United States Patent Application Publication US 2018/0126003 A1 - sequence listing, part 45

SEQ ID NO: 76290 - DNA, 2196 bp, Artificial Sequence
  derived and/or modified sequence
atgcccagcatcccccccatccccgtgcccccccccgtgcccaccctgccccccgtgccccccgtgccccccatcccccccgtgcccagcgtgccccccatgacccccctgccccccatgagcggcatgccccccctgaaccccccccccgtggcccccctgcccgccggcatgaacggcagcggcgcccccatgaacctgaacaacaacctgaaccccatgttcctgggccccctgaaccccgtgaaccccatccagatgaacagccagagcagcgtgaagcccctgcccatcaaccccgacgacctgtacgtgagcgtgcacggcatgcccttcagcgccatggagaacgacgtgagagacttcttccacggcctgagagtggacgccgtgcacctgctgaaggaccacgtgggcagaaacaacggcaacggcctggtgaagttcctgagcccccaggacaccttcgaggccctgaagagaaacagaatgctgatgatccagagatacgtggaggtgagccccgccaccgagagacagtgggtggccgccggcggccacatcaccttcaagcagaacatgggccccagcggccagacccacccccccccccagaccctgcccagaagcaagagccccagcggccagaagagaagcagaagcagaagcccccacgaggccggcttctgcgtgtacctgaagggcctgcccttcgaggccgagaacaagcacgtgatcgacttcttcaagaagctggacatcgtggaggacagcatctacatcgcctacggccccaacggcaaggccaccggcgagggcttcgtggagttcagaaacgaggccgactacaaggccgccctgtgcagacacaagcagtacatgggcaacagattcatccaggtgcaccccatcaccaagaagggcatgctggagaagatcgacatgatcagaaagagactgcagaacttcagctacgaccagagagagatgatcctgaaccccgagggcgacgtgaacagcgccaaggtgtgcgcccacatcaccaacatccccttcagcatcaccaagatggacgtgctgcagttcctggagggcatccccgtggacgagaacgccgtgcacgtgctggtggacaacaacggccagggcctgggccaggccctggtgcagttcaagaacgaggacgacgccagaaagagcgagagactgcacagaaagaagctgaacggcagagaggccttcgtgcacgtggtgaccctggaggacatgagagagatcgagaagaacccccccgcccagggcaagaagggcctgaagatgcccgtgcccggcaaccccgccgtgcccggcatgcccaacgccggcctgcccggcgtgggcctgcccagcgccggcctgcccggcgccggcctgcccagcaccggcctgcccggcagcgccatcaccagcgccggcctgcccggcgccggcatgcccagcgccggcatccccagcgccggcggcgaggagcacgccttcctgaccgtgggcagcaaggaggccaacaacggcccccccttcaacttccccggcaacttcggcggcagcaacgccttcggcccccccatccccccccccggcctgggcggcggcgccttcggcgacgccagacccggcatgcccagcgtgggcaacagcggcctgcccggcctgggcctggacgtgcccggcttcggcggcggccccaacaacctgagcggccccagcggcttcggcggcggcccccagaacttcggcaacggccccggcagcctgggcggcccccccggcttcggcagcggcccccccggcctgggcagcgcccccggccacctgggcggcccccccgccttcggccccggccccggccccggccccggccccggccccatccacatcggcggcccccccggcttcgccagcagcagcggcaagcccggccccaccgtgatcaaggtgcagaacatgcccttcaccgtgagcatcgacgagatcctggacttcttctacggctaccaggtgatccccggcagcgtgtgcctgaagtacaacgagaagggcatgcccaccggcgaggccatggtggccttcgagagcagagacgaggccaccgccgccgtgatcgacctgaacgacagacccatcggcagcagaaaggtgaagctggtgctgggctag

SEQ ID NO: 76291 - DNA, 2799 bp, Artificial Sequence
  derived and/or modified sequence
atggccgtggtgatcagactgcagggcctgcccatcgtggccggcaccatggacatcagacacttcttcagcggcctgaccatccccgacggcggcgtgcacatcgtgggcggcgagctgggcgaggccttcatcgtgttcgccaccgacgaggacgccagactgggcatgatgagaaccggcggcaccatcaagggcagcaaggtgaccctgctgctgagcagcaagaccgagatgcagaacatgatcgagctgagcagaagaagattcgagaccgccaacctggacatcccccccgccaacgccagcagaagcggccccccccccagcagcggcatgagcagcagagtgaacctgcccaccaccgtgagcaacttcaacaaccccagccccagcgtggtgaccgccaccaccagcgtgcacgagagcaacaagaacatccagaccttcagcaccgccagcgtgggcaccgccccccccaacatgggcgccagcttcggcagccccaccttcagcagcaccgtgcccagcaccgccagccccatgaacaccgtgccccccccccccatcccccccatccccgccatgcccagcctgccccccatgcccagcatcccccccatccccgtgcccccccccgtgcccaccctgccccccgtgccccccgtgccccccatcccccccgtgcccagcgtgccccccatgacccccctgccccccatgagcggcatgccccccctgaaccccccccccgtggcccccctgcccgccggcatgaacggcagcggcgcccccatgaacctgaacaacaacctgaaccccatgttcctgggccccctgaaccccgtgaaccccatccagatgaacagccagagcagcgtgaagcccctgcccatcaaccccgacgacctgtacgtgagcgtgcacggcatgcccttcagcgccatggagaacgacgtgagagacttcttccacggcctgagagtggacgccgtgcacctgctgaaggaccacgtgggcagaaacaacggcaacggcctggtgaagttcctgagcccccaggacaccttcgaggccctgaagagaaacagaatgctgatgatccagagatacgtggaggtgagccccgccaccgagagacagtgggtggccgccggcggccacatcaccttcaagcagaacatgggccccagcggccagacccacccccccccccagaccctgcccagaagcaagagccccagcggccagaagagaagcagaagcagaagcccccacgaggccggcttctgcgtgtacctgaagggcctgcccttcgaggccgagaacaagcacgtgatcgacttcttcaagaagctggacatcgtggaggacagcatctacatcgcctacggccccaacggcaaggccaccggcgagggcttcgtggagttcagaaacgaggccgactacaaggccgccctgtgcagacacaagcagtacatgggcaacagattcatccaggtgcaccccatcaccaagaagggcatgctggagaagatcgacatgatcagaaagagactgcagaacttcagctacgaccagagagagatgatcctgaaccccgagggcgacgtgaacagcgccaaggtgtgcgcccacatcaccaacatccccttcagcatcaccaagatggacgtgctgcagttcctggagggcatccccgtggacgagaacgccgtgcacgtgctggtggacaacaacggccagggcctgggccaggccctggtgcagttcaagaacgaggacgacgccagaaagagcgagagactgcacagaaagaagctgaacggcagagaggccttcgtgcacgtggtgaccctggaggacatgagagagatcgagaagaacccccccgcccagggcaagaagggcctgaagatgcccgtgcccggcaaccccgccgtgcccggcatgcccaacgccggcctgcccggcgtgggcctgcccagcgccggcctgcccggcgccggcctgcccagcaccggcctgcccggcagcgccatcaccagcgccggcctgcccggcgccggcatgcccagcgccggcatccccagcgccggcggcgaggagcacgccttcctgaccgtgggcagcaaggaggccaacaacggcccccccttcaacttccccggcaacttcggcggcagcaacgccttcggcccccccatccccccccccggcctgggcggcggcgccttcggcgacgccagacccggcatgcccagcgtgggcaacagcggcctgcccggcctgggcctggacgtgcccggcttcggcggcggccccaacaacctgagcggccccagcggcttcggcggcggcccccagaacttcggcaacggccccggcagcctgggcggcccccccggcttcggcagcggcccccccggcctgggcagcgcccccggccacctgggcggcccccccgccttcggccccggccccggccccggccccggccccggccccatccacatcggcggcccccccggcttcgccagcagcagcggcaagcccggccccaccgtgatcaaggtgcagaacatgcccttcaccgtgagcatcgacgagatcctggacttcttctacggctaccaggtgatccccggcagcgtgtgcctgaagtacaacgagaagggcatgcccaccggcgaggccatggtggccttcgagagcagagacgaggccaccgccgccgtgatcgacctgaacgacagacccatcggcagcagaaaggtgaagctggtgctgggctag

SEQ ID NO: 76292 - DNA, 876 bp, Artificial Sequence
  derived and/or modified sequence
atggccgtggtgatcagactgcagggcctgcccatcgtggccggcaccatggacatcagacacttcttcagcggcctgaccatccccgacggcggcgtgcacatcgtgggcggcgagctgggcgaggccttcatcgtgttcgccaccgacgaggacgccagactgggcatgatgagaaccggcggcaccatcaagggcagcaaggtgaccctgctgctgagcagcaagaccgagatgcagaacatgatcgagctgagcagaagaagattcgagaccgccaacctggacatcccccccgccaacgccagcagaagcggccccccccccagcagcggcatgagcagcagagtgaacctgcccaccaccgtgagcaacttcaacaaccccagccccagcgtggtgaccgccaccaccagcgtgcacgagagcaacaagaacatccagaccttcagcaccgccagcgtgggcaccgccccccccaacatgggcgccagcttcggcagccccaccttcagcagcaccgtgcccagcaccgccagccccatgaacaccgtgccccccccccccatcccccccatccccgccatgcccagcctgccccccatgcccagcatcccccccatccccgtgcccccccccgtgcccaccctgccccccgtgccccccgtgccccccatcccccccgtgcccagcgtgccccccatgacccccctgccccccatgagcggcatgccccccctgaaccccccccccgtggcccccctgcccgccggcatgaacggcagcggcgcccccatgaacctgaacaacaacctgaaccccatgttcctgggccccctgaaccccgtgaaccccatccagatgaacagccagtag

SEQ ID NO: 76293 - DNA, 432 bp, Artificial Sequence
  derived and/or modified sequence
atggccgtggtgatcagactgcagggcctgcccatcgtggccggcaccatggacatcagacacttcttcagcggcctgaccatccccgacggcggcgtgcacatcgtgggcggcgagctgggcgaggccttcatcgtgttcgccaccgacgaggacgccagactgggcatgatgagaaccggcggcaccatcaagggcagcaaggtgaccctgctgctgagcagcaagaccgagatgcagaacatgatcgagctgagcagaagaagattcgagaccgccaacctggacatcccccccgccaacgccagcagaagcggccccccccccagcagcggcatgagcagcagagtgaacctgcccaccaccgtgagcaacttcaacaaccccagccccagcgtggtgaccgccaccaccagcgtgcacgagagctag

SEQ ID NO: 76294 - DNA, 405 bp, Artificial Sequence
  derived and/or modified sequence
atggccgtggtgatcagactgcagggcctgcccatcgtggccggcaccatggacatcagacacttcttcagcggcctgaccatccccgacggcggcgtgcacatcgtgggcggcgagctgggcgaggccttcatcgtgttcgccaccgacgaggacgccagactgggcatgatgagaaccggcggcaccatcaagggcagcaaggtgaccctgctgctgagcagcaagaccgagatgcagaacatgatcgagctgagcagaagaagattcgagaccgccaacctggacatcccccccgccaacgccagcagaagcggccccccccccagcagcggcatgagcagcagagtgaacctgcccaccaccgtgagcaacttcaacaaccccagccccagcgtggtgtag

SEQ ID NO: 76295 - protein, 143 aa, Artificial Sequence
  derived and/or modified sequence
MVKLFIGNLPREATEQEIRSLFEQYGKVLECDIIKNYGFVHIEDKTAAEDAIRNLHHYKLHGVNINVEASKNKSKTSTKLHVGNISPTCTNKELRAKFEEYGPVIECDIVKDYAFVHMERAEDAVEAIRGLDNTEFQGGMCVG

SEQ ID NO: 76296 - DNA, 757 bp, Artificial Sequence
  derived and/or modified sequence
aggaggccctgctggtttctgtgcgggtgagactccgagcctttccactgcctttcttgtactgtgttaaatcttctctcactcccttgggcttcgggggtgtcctggtaggtccgcagtctccacacccgtcactgagagccgacctcggtcctcggcattgcgcggctcttgtcaggatggtgaagctgttcatcggaaacctgccccgggaggctacagagcaggagattcgctcactcttcgagcagtatgggaaggtgctggaatgtgacatcattaagaattacggctttgtgcacatagaagacaagacggcagctgaggatgccatacgcaacctgcaccattacaagcttcatggggtgaacatcaacgtggaagccagcaagaataagagcaaaacctcaacaaagttgcatgtgggcaacatcagtcccacctgcaccaataaggagcttcgagccaagtttgaggagtatggtccggtcatcgaatgtgacatcgtgaaagattatgccttcgtacacatggagcgggcagaggatgcagtggaggccatcaggggccttgataacacagagtttcaaggtgaaccaccctctttgggtagagggctgaacacaaggctgtgtgcagaaaatggttggataagtaaaaggagaggtttggtaaagataacagctgttggctggctggtgatgaagaaataagtgtgggtgatggacttcttatgatgtagaatgcatgggactta

SEQ ID NO: 76297 - DNA, 1548 bp, Artificial Sequence
  derived and/or modified sequence
gttttgtcagaagcgtccgcgccgcgaggaggaggccctgctggtttctgtgcgggctcttgtcaggatggtgaagctgttcatcggaaacctgccccgggaggctacagagcaggagattcgctcactcttcgagcagtatgggaaggtgctggaatgtgacatcattaagaattacggctttgtgcacatagaagacaagacggcagctgaggatgccatacgcaacctgcaccattacaagcttcatggggtgaacatcaacgtggaagccagcaagaataagagcaaaacctcaacaaagttgcatgtgggcaacatcagtcccacctgcaccaataaggagcttcgagccaagtttgaggagtatggtccggtcatcgaatgtgacatcgtgaaagattatgccttcgtacacatggagcgggcagaggatgcagtggaggccatcaggggccttgataacacagagtttcaaggtgaaccaccctctttgggtagagggctgaacacaaggctgtgtgcagaaaatggttggataagtaaaaggagaggtttggtaaagataacagctgttggctggctggtgatgaagaaataagtgtgggtgatggacttcttatgatgtagaatgcatgggacttaggggctttaccttaggcaaatgtctcctggagaaaagccactcaccttttatttggagcccctacggcttttgtgcttatcagtgcagaaacccttttctttgaaggctttctgagttactgggccttttttattttttatttttttgtagtagagcacagttcagagttcctcactctgaatttattgccctcagcacaggatcagaattctgcattttacgtgaagaacctctcaaaaacatgtcaagcgacacttataggaccagaatccttgttaagctgtcctaccttacacaaactctttaaagggttacagctcttgttgcttttatattatacctgtaccaagggattgtattttgagtttaaggccactctagaattacaaggctgattttaggacttcctggggaggaggcactggggttttaggggcggtaatgactgtcttttcattggtttggggggctggactttataagattttggtgaatagagcacttagatttgtgttatcttggagtcttaaccaaatgaatcttttgtgcctggagggcagcatgggtgatatgtggattgtcacttcatttggaagcatctcaaatccccagcattttgaatgcctacatgttgctcaaaggaaatgcttgttagagcattttggattttgaattttcagatttgggatgctaaaatggtacgtagaacgcaaatattccaaaatctgaggtctgaagcaacagtggcagttcaggggtggtgatcatggtgagttgctatctgaactcttctttcacctcctttgggttcccagtgtcaaaaagagtggtgtccttttttagcttaattaagcaggactgaacaaaaataataaaaaataaaaaaagccttattcaaatta

SEQ ID NO: 76298 - DNA, 534 bp, Artificial Sequence
  derived and/or modified sequence
atggtcaagctcttcattggtaatctgccccgtgaggctacagaacaggaaattcgctctcttttcgaacagtacggcaaagtactggagtgtgatatcattaagaattacggttttgtgcatattgaagataagacagccgccgaagacgccattaggaacttgcaccactacaagctccacggagtgaatatcaacgtggaggcaagcaagaataagtccaagactagcactaagctccacgtagggaacatatcacctacttgcacaaataaggagctacgcgcaaagttcgaggagtacgggcctgtgatcgagtgtgatattgtcaaggattacgccttcgtccatatggagagggctgaagatgctgtcgaggctattcgtggcctcgacaacaccgagttccagggagaaccaccaagcctgggacgaggacttaacacacgcctttgcgctgaaaatggatggatctccaagcggcgtggactggttaaaattacagcagtgggatggctcgtgatgaaaaagtag

SEQ ID NO: 76299 - DNA, 534 bp, Artificial Sequence
  derived and/or modified sequence
atggtcaaactgtttatcggcaatcttccccgggaggcgactgaacaggagataaggagcctcttcgaacagtacggcaaagttctggagtgcgacattatcaaaaactacggcttcgttcacatcgaggataaaaccgcagctgaagatgccatcaggaatttgcaccactataagctgcatggagttaatattaacgtggaggcctcaaaaaacaaatcgaagacatccacaaaactgcacgtgggcaatatcagccctacctgcaccaataaagagctgcgtgctaaatttgaggaatacggacccgtgatcgagtgtgacatcgtcaaggactatgcatttgtgcatatggagcgtgcagaagatgctgtggaggctattcgaggactagacaatactgaatttcaaggggagcccccgtcactgggccgagggctgaatactagactgtgtgccgaaaatggctggatatcaaagaggaggggattggtgaaaatcaccgctgtggggtggctggtcatgaaaaagtag

SEQ ID NO: 76300 - DNA, 432 bp, Artificial Sequence
  derived and/or modified sequence
atggtgaagctttttattgggaatcttccccgtgaagccacagagcaggaaatccggagtctctttgagcagtacggaaaagtgcttgagtgcgacatcattaagaattacgggttcgtgcatatcgaggacaaaactgcagccgaggatgcaattcggaacctgcaccattacaaactgcacggcgtaaatattaacgtggaggccagcaagaacaagtcaaaaacttccaccaagttacacgttggcaacattagtcctacctgcaccaataaggagctcagggcaaagttcgaggagtatgggccagtcatcgagtgcgatatcgtaaaggattacgcttttgtgcacatggaacgggccgaagacgctgtggaggctattaggggccttgacaacaccgaattccaaggcgggatgtgtgtcggctag

SEQ ID NO: 76301 - DNA, 534 bp, Artificial Sequence
  derived and/or modified sequence
atggtgaagctgttcatcggcaacctgccccgggaggccacagagcaggagatccgcagcctgtttgagcagtatggcaaggtgctggagtgtgacatcatcaagaactacggctttgtgcacatcgaggacaagacagctgctgaagatgccatccggaacctgcaccactacaagctgcatggagtgaacatcaacgtggaggccagcaagaacaagagcaagaccagcaccaagctgcacgtgggcaacatcagccccacctgcaccaacaaggagctgcgggccaagtttgaggagtatggccctgtgattgaatgtgacatcgtgaaggactatgcctttgtgcacatggagcgggcagaagatgctgtggaggccatccggggcctggacaacacagagttccagggcgagccccccagcctgggccggggcctgaacacccggctgtgtgccgagaatggctggatcagcaagagaagaggcctggtgaagatcacagctgtgggctggctggtgatgaagaagtag

SEQ ID NO: 76302 - DNA, 432 bp, Artificial Sequence
  derived and/or modified sequence
atggtgaagctgttcatcggcaacctgccccgggaggccacagagcaggagatccgcagcctgtttgagcagtatggcaaggtgctggagtgtgacatcatcaagaactacggctttgtgcacatcgaggacaagacagctgctgaagatgccatccggaacctgcaccactacaagctgcatggagtgaacatcaacgtggaggccagcaagaacaagagcaagaccagcaccaagctgcacgtgggcaacatcagccccacctgcaccaacaaggagctgcgggccaagtttgaggagtatggccctgtgattgaatgtgacatcgtgaaggactatgcctttgtgcacatggagcgggcagaagatgctgtggaggccatccggggcctggacaacacagagttccagggcggcatgtgtgtgggctag

SEQ ID NO: 76303 - DNA, 534 bp, Artificial Sequence
  derived and/or modified sequence
atggtgaagctgttcatcggcaacctgccccgggaggccaccgagcaggaaatccgatctctgttcgaacaatatgggaaggttctagagtgtgacatcatcaagaattacggctttgtgcatatagaggataaaactgccgccgaagacgccattaggaacctccatcactacaaactccacggggtgaacattaacgtggaagccagcaagaataagagcaaaaccagcacgaaactgcacgtcgggaatatttccccaacctgcaccaacaaggagctgagggccaagtttgaagagtatgggccagtcatcgaatgtgatatcgtaaaggactatgcatttgtgcatatggagagggctgaggacgcagtcgaggccatccgcggcctggataacactgaattccagggggaaccaccttcactaggccggggactcaatactcgcttatgcgctgaaaatgggtggatctccaaacgccgaggcttagtcaaaataaccgctgtcgggtggcttgtgatgaagaagtag

SEQ ID NO: 76304 - DNA, 534 bp, Artificial Sequence
  derived and/or modified sequence
atggtgaagctgttcatcggcaacctgccccgggaggccaccgagcaggagattcggagcctcttcgagcagtatgggaaagttctggaatgtgatattattaagaactacggctttgtccatatcgaggacaaaaccgccgctgaagatgccattaggaatctgcatcattataaactccacggagtgaacatcaatgtggaggcttccaagaataagtccaaaactagcactaaactgcacgtgggcaatattagcccaacatgtaccaataaagaactgcgcgctaaatttgaggaatatggcccagtcatcgaatgtgacatcgtgaaagattatgcctttgtgcatatggaacgagccgaagatgctgttgaggctattcgcgggctggacaacacggagtttcagggtgagcctccatctttaggaagagggctgaataccagactgtgtgctgagaacggatggatctctaaaaggcgggggttggtgaaaataacagccgttggatggttggtgatgaagaaatag

SEQ ID NO: 76305 - DNA, 432 bp, Artificial Sequence
  derived and/or modified sequence
atggtgaagctgttcatcggcaacctgccccgggaggccaccgagcaggagatccgatcactatttgagcagtacggcaaagtgttggaatgtgacatcatcaagaactacggattcgttcacattgaggataagactgctgcggaggacgcaatcaggaatctccatcattacaagctccacggcgtgaacattaatgtggaggcaagcaaaaacaaaagtaaaacctccacgaaattgcacgtcggcaatattagtcccacatgtactaataaagaattgagagccaagtttgaagagtacggacctgtgattgagtgtgacatcgttaaagattatgctttcgtgcacatggagcgcgcagaggacgctgtagaggcaatacgcggactcgataacactgaatttcagggggggatgtgcgttgggtag

SEQ ID NO: 76306 - DNA, 534 bp, Artificial Sequence
  derived and/or modified sequence
atggtcaaactgttcatcgggaatctaccacgggaagcaaccgagcaggagatccgatcactcttcgaacaatacggcaaagttctcgagtgcgatatcatcaagaattacgggttcgtgcatattgaagataaaacagccgctgaggacgcgattcgaaacctgcaccattataaactacatggcgtgaatattaacgtcgaagcttccaagaataaaagcaagactagcaccaagcttcacgttggaaatataagccccacatgcactaacaaagaactgagggctaaatttgaggaatatggcccagtcattgaatgcgacatagtcaaggattatgccttcgtgcacatggagcgtgctgaggatgctgtcgaggccattcggggactggacaataccgaattccagggtgaaccccctagtctgggcagaggcttaaacacacgactttgtgctgaaaacgggtggatttcaaagcggcgtgggctagtgaaaatcacagccgtggggtggctggtgatgaagaagtag

SEQ ID NO: 76307 - DNA, 534 bp, Artificial Sequence
  derived and/or modified sequence
atggtgaagctgtttatcggaaaccttccccgtgaggcgaccgagcaggaaattcggtctctatttgagcagtatgggaaggtattggagtgcgatatcattaagaattacggtttcgtccacatcgaggataagaccgcagccgaggacgcgatccgaaaccttcaccattataaactgcacggggtcaacattaacgtggaagccagcaagaataagagcaaaacaagtacaaagcttcatgtgggcaacatctcacctacatgcacaaataaggagctccgcgctaagttcgaagaatatgggccagtcattgaatgtgacattgtcaaggactacgcgtttgtgcatatggaacgcgctgaggatgcagtggaggccatacgaggactggacaataccgagtttcagggggaacccccttcgcttgggagaggattgaatactcgtctgtgtgcagaaaatggatggatcagcaagcggcgtggccttgtgaagatcaccgctgtcggctggctcgtgatgaaaaagtag

SEQ ID NO: 76308 - DNA, 432 bp, Artificial Sequence
  derived and/or modified sequence
atggtgaaattattcattggtaacttgccgcgtgaagccacagagcaggagatacgctcacttttcgaacagtacggtaaagtgctggaatgcgatattattaagaattacgggttcgtgcatattgaagataaaactgcggctgaagatgccattcggaacctccatcattataaactgcatggcgtcaacataaatgtagaggcttccaagaataagtccaagacgagtaccaaactgcacgtaggtaatatttccccaacatgcaccaacaaggaactgagagcaaaatttgaggaatacgggccagtaattgagtgcgatatcgtgaaggactacgcgttcgtgcacatggaaagggccgaggatgctgtggaagcaattagggggctggacaataccgagttccagggaggcatgtgcgtagggtag

SEQ ID NO: 76309 - DNA, 921 bp, Artificial Sequence
  derived and/or modified sequence
gttttgtcagaagcgtccgcgccgcgaggaggaggccctgctggtttctgtgcgggctcttgtcaggatggtgaagctgttcatcggaaacctgccccgggaggctacagagcaggagattcgctcactcttcgagcagtatgggaaggtgctggaatgtgacatcattaagaattacggctttgtgcacatagaagacaagacggcagctgaggatgccatacgcaacctgcaccattacaagcttcatggggtgaacatcaacgtggaagccagcaagaataagagcaaaacctcaacaaagttgcatgtgggcaacatcagtcccacctgcaccaataaggagcttcgagccaagtttgaggagtatggtccggtcatcgaatgtgacatcgtgaaagattatgccttcgtacacatggagcgggcagaggatgcagtggaggccatcaggggccttgataacacagagtttcaaggtgggatgtgtgtgggctgaaattccgagctgcggttgtgcatgagaatacacccttcgtggtaccccatctccgggacgttctcggctctgtgcgttcagtccctcaggaaccgtggaccttaatttaccttgctaagttcagaccttctcttcctttcctttcctttcctctcctgcccattttcctgttcttctgtccttcaatacttctgtagcttcccattcatgttctcttctcccagcaggcctcattgtgtgcagaaactgtggtgggggctgtgctgtctcctccctgcctcctgcctcctgcggctgttggatttgggaatgaccttggtgagagtctcactgctccagggtctctttttggtccaaaggctagacctatagagttggatcactttttttctttccggtgaaataaatggtttttcaactta

SEQ ID NO: 76310 - DNA, 534 bp, Artificial Sequence
  derived and/or modified sequence
atggtgaagctgttcatcggcaacctgcccagagaggccaccgagcaggagatcagaagcctgttcgagcagtacggcaaggtgctggagtgcgacatcatcaagaactacggcttcgtgcacatcgaggacaagaccgccgccgaggacgccatcagaaacctgcaccactacaagctgcacggcgtgaacatcaacgtggaggccagcaagaacaagagcaagaccagcaccaagctgcacgtgggcaacatcagccccacctgcaccaacaaggagctgagagccaagttcgaggagtacggccccgtgatcgagtgcgacatcgtgaaggactacgccttcgtgcacatggagagagccgaggacgccgtggaggccatcagaggcctggacaacaccgagttccagggcgagccccccagcctgggcagaggcctgaacaccagactgtgcgccgagaacggctggatcagcaagagaagaggcctggtgaagatcaccgccgtgggctggctggtgatgaagaagtag

SEQ ID NO: 76311 - DNA, 432 bp, Artificial Sequence
  derived and/or modified sequence
atggtgaagctgttcatcggcaacctgcccagagaggccaccgagcaggagatcagaagcctgttcgagcagtacggcaaggtgctggagtgcgacatcatcaagaactacggcttcgtgcacatcgaggacaagaccgccgccgaggacgccatcagaaacctgcaccactacaagctgcacggcgtgaacatcaacgtggaggccagcaagaacaagagcaagaccagcaccaagctgcacgtgggcaacatcagccccacctgcaccaacaaggagctgagagccaagttcgaggagtacggccccgtgatcgagtgcgacatcgtgaaggactacgccttcgtgcacatggagagagccgaggacgccgtggaggccatcagaggcctggacaacaccgagttccagggcggcatgtgcgtgggctag

SEQ ID NO: 76312 - protein, 173 aa, Artificial Sequence
  derived and/or modified sequence
MVKLFIGNLPREATEQEIRSLFEQYGKVLECDIIKNYGFVHIEDKTAAEDAIRNLHHYKLHGVNINVEASKNKSKTSTKLHVGNISPTCTNKELRAKFEEYGPVIECDIVKDYAFVHMERAEDAVEAIRGLDNTEFQGKITPVTEGYCCCNKGHTYIFKNCNLILESRKSRRC

SEQ ID NO: 76313 - DNA, 522 bp, Artificial Sequence
  derived and/or modified sequence
atggtgaaactcttcatcggaaacttgccccgggaagctacagagcaagagattagaagcttgtttgagcaatacggaaaggtccttgagtgtgatataattaaaaattacggatttgtgcatatagaagataagacagcagccgaggacgcgatcaggaatctgcaccactacaagctccacggcgtcaatatcaatgtcgaagcaagcaagaacaagagcaagacctcgaccaagctccacgtgggaaacatcagcccaacatgtactaacaaagaactgcgggccaaattcgaagaatatggccctgtgatcgagtgtgatatagtaaaagactacgccttcgtccacatggaacgggctgaggacgccgtcgaagccatcaggggactggataatacagagtttcagggtaaaattaccccagtcaccgagggctattgctgttgcaataaaggtcacacctatatcttcaaaaattgcaaccttatcttagagagccggaagtccagacggtgctag

SEQ ID NO: 76314 - DNA, 522 bp, Artificial Sequence
  derived and/or modified sequence
atggtgaagctgttcatcggcaacctgccccgggaggccacagagcaggagatccgcagcctgtttgagcagtatggcaaggtgctggagtgtgacatcatcaagaactacggctttgtgcacatcgaggacaagacagctgctgaagatgccatccggaacctgcaccactacaagctgcatggagtgaacatcaacgtggaggccagcaagaacaagagcaagaccagcaccaagctgcacgtgggcaacatcagccccacctgcaccaacaaggagctgcgggccaagtttgaggagtatggccctgtgattgaatgtgacatcgtgaaggactatgcctttgtgcacatggagcgggcagaagatgctgtggaggccatccggggcctggacaacacagagttccagggcaagatcacccctgtgacagagggctactgctgctgcaacaagggccacacctacatcttcaagaactgcaacctgatcctggagagcaggaagagccgccgctgctag

SEQ ID NO: 76315 - DNA, 522 bp, Artificial Sequence
  derived and/or modified sequence
atggtgaagctgttcatcggcaacctgccccgggaggccaccgagcaggagatcaggagcctttttgagcagtatggtaaagtgctggagtgcgacatcattaagaactatggatttgtgcatatagaggataaaacagctgcagaggatgctatcaggaatctgcaccattataaacttcatggggtaaacatcaatgtggaagcttccaagaataagtccaaaacaagtacaaaactccacgtgggtaacatttcacctacctgcactaataaggagctccgcgctaagtttgaagaatacggcccagtgatcgaatgcgatatcgttaaggattatgccttcgtgcacatggaacgtgctgaggacgcggtggaagccatccgggggctggacaacaccgaatttcaagggaaaataacacctgtcaccgaaggctactgctgctgcaataagggccacacatacatattcaagaactgcaacctgatcctggaatccagaaagagccggcgctgttag

SEQ ID NO: 76316 - DNA, 522 bp, Artificial Sequence
  derived and/or modified sequence
atggtgaagctgtttatcgggaatcttccgagggaagcaacagaacaggagatcaggtccctttttgagcaatacggcaaggtactggagtgcgatataattaagaactacggctttgtccacattgaagataaaacagctgccgaagacgcgatccggaaccttcatcactataaacttcacggggtgaacattaatgtggaggcttccaagaacaagtctaagactagtaccaaactgcacgtagggaatatttctcctacgtgtacgaacaaagaactgcgcgctaaattcgaggaatatggacctgtgattgaatgtgatatagtgaaagactacgccttcgttcatatggaacgggctgaggatgctgtggaggctatcaggggcttggacaataccgaattccaaggcaagattacacccgtgacagaaggctattgctgctgcaacaaaggccatacatatattttcaagaattgcaacttgatactggaatctaggaagtctcgccgatgttag

SEQ ID NO: 76317 - DNA, 1337 bp, Artificial Sequence
  derived and/or modified sequence
agagcactgctgcggccgccgccattttagcgttttgtcagaagcgtccgcgccgcgaggaggaggccctgctggtttctgtgcgggctcttgtcaggatggtgaagctgttcatcggaaacctgccccgggaggctacagagcaggagattcgctcactcttcgagcagtatgggaaggtgctggaatgtgacatcattaagaattacggctttgtgcacatagaagacaagacggcagctgaggatgccatacgcaacctgcaccattacaagcttcatggggtgaacatcaacgtggaagccagcaagaataagagcaaaacctcaacaaagttgcatgtgggcaacatcagtcccacctgcaccaataaggagcttcgagccaagtttgaggagtatggtccggtcatcgaatgtgacatcgtgaaagattatgccttcgtacacatggagcgggcagaggatgcagtggaggccatcaggggccttgataacacagagtttcaaggcaagataacccctgtgacagaaggctactgttgctgtaacaaagggcatacatacattttcaagaactgcaatttaattttggagtccaggaaaagcagaagatgctgagatgtcatatatggcgaattgcactattctaaatgtgttttgttttaatctttcacagtaaacaagctttcagaaatgatggtcacaaggggtaggatatcaaggagcagccagtcattcacccaattccaacacacctacatgtcacactgtcacagagtgagagccacagttccagtagttcccctaattgaccaaatctcccttgccaaatcaaaagaaatcattcctagaattctctaatccttctattgatgatgggaactccagacaccaatggctgggggaaaaaaaaagttaactcacaccaagttcctctacttattacagacaaagggccaaatcttggtcttgatctgtgccaatcgacttcaaaagttgtgacgttcttggatcagttctgctagggtgagacccgaatttggatccccaacagttctggagtatttcatcctggcagcctcattaacatcaggctcctgggactgcaaccaactcagggttattcagtccatttgaggttcacacctggaaggtaagtttctttaaaagtcatcgctaaaaagaggttagttgaacaaccactgcttgcagtcaaaattcattttaaaatgtcctagcaataccttttgaagaccacaatatatgaatttaatatttaactttgaaacataagagacaggttatctgatagatttataccagcttacttcggaa

SEQ ID NO: 76318 - DNA, 522 bp, Artificial Sequence
  derived and/or modified sequence
atggtgaagctgttcatcggcaacctgcccagagaggccaccgagcaggagatcagaagcctgttcgagcagtacggcaaggtgctggagtgcgacatcatcaagaactacggcttcgtgcacatcgaggacaagaccgccgccgaggacgccatcagaaacctgcaccactacaagctgcacggcgtgaacatcaacgtggaggccagcaagaacaagagcaagaccagcaccaagctgcacgtgggcaacatcagccccacctgcaccaacaaggagctgagagccaagttcgaggagtacggccccgtgatcgagtgcgacatcgtgaaggactacgccttcgtgcacatggagagagccgaggacgccgtggaggccatcagaggcctggacaacaccgagttccagggcaagatcacccccgtgaccgagggctactgctgctgcaacaagggccacacctacatcttcaagaactgcaacctgatcctggagagcagaaagagcagaagatgctag

SEQ ID NO: 76319 - protein, 339 aa, Artificial Sequence
  derived and/or modified sequence
MKIFVGNVDGADTTPEELAALFAPYGTVMSCAVMKQFAFVHMRENAGALRAIEALHGHELRPGRALVVEMSRPRPLNTWKIFVGNVSAACTSQELRSLFERRGRVIECDVVKGKRMHVQLSTSRLRTAPGMGDQSGCYRCGKEGHWSKECPIDRSGRVADLTEQYNEQYGAVRTPYTMSYGDSLYYNNAYGALDAYYKRCRAARSYEAVAAAAASVYNYAEQTLSQLPQVQNTAMASHLTSTSLDPYDRHLLPTSGAAATAAAAAAAAAAVTAASTSYYGRDRSPLRRATAPVPTVGEGYGYGHESELSQASAAARNSLYDMARYEREQYADRARYSAF

SEQ ID NO: 76320 - DNA, 1020 bp, Artificial Sequence
  derived and/or modified sequence
atgaagatcttcgtgggcaacgtggacggcgccgacaccacccccgaggagctggccgccctgttcgccccctacggcaccgtgatgagctgcgccgtgatgaagcagttcgccttcgtgcacatgagagagaacgccggcgccctgagagccatcgaggccctgcacggccacgagctgagacccggcagagccctggtggtggagatgagcagacccagacccctgaacacctggaagatcttcgtgggcaacgtgagcgccgcctgcaccagccaggagctgagaagcctgttcgagagaagaggcagagtgatcgagtgcgacgtggtgaagggcaagagaatgcacgtgcagctgagcaccagcagactgagaaccgcccccggcatgggcgaccagagcggctgctacagatgcggcaaggagggccactggagcaaggagtgccccatcgacagaagcggcagagtggccgacctgaccgagcagtacaacgagcagtacggcgccgtgagaaccccctacaccatgagctacggcgacagcctgtactacaacaacgcctacggcgccctggacgcctactacaagagatgcagagccgccagaagctacgaggccgtggccgccgccgccgccagcgtgtacaactacgccgagcagaccctgagccagctgccccaggtgcagaacaccgccatggccagccacctgaccagcaccagcctggacccctacgacagacacctgctgcccaccagcggcgccgccgccaccgccgccgccgccgccgccgccgccgccgccgtgaccgccgccagcaccagctactacggcagagacagaagccccctgagaagagccaccgcccccgtgcccaccgtgggcgagggctacggctacggccacgagagcgagctgagccaggccagcgccgccgccagaaacagcctgtacgacatggccagatacgagagagagcagtacgccgacagagccagatacagcgccttctag

SEQ ID NO: 76321 - DNA, 1020 bp, Artificial Sequence
  derived and/or modified sequence
atgaaaatctttgtggggaatgtggatggtgctgataccaccccagaagaacttgctgccctctttgcgccttacggcactgtgatgtcttgcgccgtgatgaagcagtttgccttcgtccatatgcgcgagaacgccggcgccctgagagctattgaggccttgcacgggcacgagctccgcccggggcgtgctctagtcgtggaaatgagtaggccgcgccctttgaatacttggaaaattttcgtcgggaatgtcagcgctgcttgtactagccaggagttgcggagcctgttcgagagacgtggcagagtcattgaatgtgacgtagtcaagggcaagcggatgcacgtgcagctgtccacctcgagactgcgcactgcgcctgggatgggagaccagtcaggctgttacaggtgcggaaaggagggccactggagtaaagagtgtcctatcgataggagtgggagagtggcagatttgaccgaacagtataacgagcagtatggcgcagtcaggaccccttacacaatgagctatggggacagcctttattacaataatgcctatggcgctttagatgcctactacaaacgatgccgcgccgctcggagctacgaagcagttgctgctgctgcagcctcagtttataattacgccgaacagaccctgtctcaactgccacaggtgcagaatacagctatggcatctcacttgacctctaccagtctggatccgtatgatcgacacttgctacctacctctggcgctgcagccaccgctgcagctgctgctgcggccgctgcagccgtgactgccgcaagtacctcttattacggccgagatagatctcccctgagaagggccaccgctcccgtgccgacagtgggcgaagggtacggttatggacacgagagcgagctgtcccaagcatctgcagcagcgcggaactctctatacgacatggcacgctatgaacgtgaacaatatgctgatcgagcccggtacagcgccttttag

SEQ ID NO: 76322 - DNA, 1020 bp, Artificial Sequence
  derived and/or modified sequence
atgaagatctttgtgggcaatgtggatggagctgacaccaccccagaggagctggccgccctgtttgccccctatggaacagtgatgagctgtgctgtgatgaagcagtttgcctttgtgcacatgagagaaaatgctggggccctgcgggccatcgaggccctgcacggccacgagctgcggcccggccgggccctggtggtggagatgagccggccccggcccctgaacacctggaagatctttgtgggcaatgtgtctgctgcctgcaccagccaggagctgcggagcctgtttgaaagaagaggccgggtgattgaatgtgatgtggtgaagggcaagaggatgcacgtgcagctgagcaccagccggctgaggacagcccctggcatgggagaccagagcggctgctaccgctgtgggaaggagggccactggagcaaagaatgtcccatcgacagaagtggccgggtggccgacctgacagagcagtacaatgagcagtatggagctgtgaggaccccctacaccatgtcctatggagacagcctgtactacaacaatgcctacggggccctggatgcctactacaagcgctgccgggccgcccggagctatgaggccgtggccgctgctgctgcctctgtgtacaactatgcagagcagaccctgagccagctgccccaggtgcagaacacagccatggccagccacctgaccagcaccagcctggacccctatgacagacacctgctgcccaccagcggggccgccgccacagctgctgctgctgctgctgctgctgctgctgtgacagctgccagcaccagctactacggccgggacaggagccccctgcggcgggccacagcccctgtgcccaccgtgggggagggctacggctacggccacgagagcgagctgagccaggccagcgctgctgccaggaacagcctgtatgacatggcccgctatgagcgggagcagtatgctgaccgggcccgctacagcgccttctag

SEQ ID NO: 76323 - DNA, 1020 bp, Artificial Sequence
  derived and/or modified sequence
atgaagatcttcgtgggcaacgtggacggcgccgacaccacccccgaggagctagctgcgctttttgctccctatggcaccgtaatgagctgcgccgttatgaagcagtttgccttcgtacacatgagggaaaatgcaggggccttgcgagccatcgaggcgctgcacggccatgaactacgccctgggagagctcttgtagtagagatgagccggcccagacctctcaatacttggaagattttcgtcgggaacgtttcagcggcttgtacaagtcaggaactgcgctctctctttgagcgcaggggtagagtgattgagtgtgatgtggttaaaggaaagcgcatgcacgttcagctctctacatcccgcttgcgaactgctcccggaatgggcgatcagtccggatgttaccgctgtgggaaggagggccattggtcaaaggaatgccccatcgatcgctcaggtcgcgtcgccgacctcaccgaacaatataatgagcaatacggcgcagtgcgcactccgtataccatgtcgtacggcgactcattgtactacaataacgcgtacggggctctcgacgcctattataaacggtgtagagccgcccggtcctatgaggccgttgccgctgccgcagcctccgtatataattacgctgagcaaacactcagccagcttccacaagtgcagaatacagcaatggcaagccacctaacttcgacgagcctcgacccctatgacagacatttgctccccacctccggagccgccgctaccgcggcagccgcagcagctgctgccgctgctgtgacggcagccagtaccagctactacggcagggaccgctctcccctgcgtagagctactgccccggtcccgacggtaggagaaggctacggctacggacacgaaagtgaactgagccaggcttcagccgcggcgagaaacagtctatacgacatggcccggtacgagcgtgagcagtacgccgatagggcgaggtacagcgccttttag

SEQ ID NO: 76324 - DNA, 1566 bp, Artificial Sequence
  derived and/or modified sequence
agccattcctgaggaggactgccggtcgttcggacgtcttgcctgtcgctggaggagaggtccgggctctccaggaaggtggctgcggcgacaaaatgaagatattcgtgggcaacgtcgacggggcggatacgactccggaggagctggcagccctctttgcgccctacggcacggtcatgagctgcgccgtcatgaaacagttcgccttcgtgcacatgcgcgagaacgcgggcgcgctgcgcgccatcgaagccctgcacggccacgagctgcggccggggcgcgcgctcgtggtggagatgtcgcgcccaaggcctcttaatacttggaagattttcgtgggcaatgtgtcggctgcatgcacgagccaggaactgcgcagcctcttcgagcgccgcggacgcgtcatcgagtgtgacgtggtgaaaggcaaacgaatgcacgtgcagttgtccaccagccggcttaggactgcgcccgggatgggagaccagagcggctgctatcggtgcgggaaagaggggcactggtccaaagagtgtccgatagatcgttcaggccgcgtggcagacttgaccgagcaatataatgagcaatacggagcagtgcgtacgccttacaccatgagctatggggattcattgtattacaacaacgcgtacggagcgctcgatgcctactacaagcgctgccgtgctgcccggtcctatgaggcagtggcagctgcagctgcctccgtgtataattacgcagagcagaccctgtcccagctgccacaagtccagaatacagccatggccagtcacctcacctccacctctctcgatccctacgatagacacctgttgccgacctcaggagctgctgccacagctgctgctgcagcagcagccgctgctgctgttactgcagcttccacttcatattacgggcgggatcggagccccctgcgtcgcgctacagccccagtccccactgttggagagggctacggttacgggcatgagagtgagttgtcccaagcttcagcagccgcgcggaattctctgtacgacatggcccggtatgagcgggagcagtatgccgatcgggcgcggtactcagccttttaaagcttgaggtgggatgtgtgtgggctgaaattccgagctgcggttgtgcatgagaatacacccttcgtggtaccccatctccgggacgttctcggctctgtgcgttcagtccctcaggaaccgtggaccttaatttaccttgctaagttcagaccttctcttcctttcctttcctttcctctcctgcccattttcctgttcttctgtccttcaatacttctgtagcttcccattcatgttctcttctcccagcaggcctcattgtgtgcagaaactgtggtgggggctgtgctgtctcctccctgcctcctgcctcctgcggctgttggatttgggaatgaccttggtgagagtctcactgctccagggtctctttttggtccaaaggctagacctatagagttggatcactttttttctttccggtgaaataaatggtttttcaacttag

SEQ ID NO: 76325 - DNA, 1020 bp, Artificial Sequence
  derived and/or modified sequence
atgaagattttcgtgggcaatgttgacggcgcagatactaccccagaagaattggccgcactgtttgccccttatggaaccgtcatgtcctgcgctgtgatgaagcagtttgcattcgtgcacatgcgcgagaacgctggcgcactgcgagccattgaagcactccatgggcatgagctgagacccggacgcgcactcgtggttgaaatgagccggcctagacccctgaacacttggaagatcttcgttggtaatgtttccgctgcctgcacatcacaggaactccgtagcctgtttgagcgcaggggacgagtgattgagtgcgatgtggtgaaagggaagcggatgcacgtgcaactcagtaccagcaggttgcgcaccgcccctggaatgggggaccagagtggttgctatcgatgcggcaaggaaggtcactggtctaaggagtgtcctatagatagaagtggcagagttgccgatttaaccgaacagtataatgagcagtatggagcagtgagaacaccatacaccatgagctacggcgattctttgtactacaacaatgcatacggtgccctggacgcctactacaagaggtgtcgggctgctagaagctatgaggccgtggccgctgcagctgcttcagtgtacaattatgccgagcagaccctttcccaattgcctcaggtccagaatacagcaatggcatcacacctcaccagtaccagcctggatccatacgatcggcatctcctgcctacatctggggctgccgctacggcggctgccgcagcagctgctgctgcggctgtcaccgcagccagcacatcctattatggacgtgatcgctcccctctacggcgtgctaccgcacctgtgccaactgttggcgaggggtatggttacggccatgagtccgaactgagccaagcgagcgcagcggctcgcaattccctttatgatatggctagatacgagcgggaacagtacgccgatcgtgccaggtacagcgcattttag

SEQ ID NO: 76326 - protein, 118 aa, Artificial Sequence
  derived and/or modified sequence
MKIFVGNVDGADTTPEELAALFAPYGTVMSCAVMKQFAFVHMRENAGALRAIEALHGHELRPGRALVVEMSRPRPLNTWKIFVGNVSAACTSQELRSLFERRGRVIECDVVKGGMCVG

SEQ ID NO: 76327 - DNA, 357 bp, Artificial Sequence
  derived and/or modified sequence
atgaagatcttcgtgggcaacgtggacggcgccgacaccacccccgaggagctggccgccctgttcgccccctacggcaccgtgatgagctgcgccgtgatgaagcagttcgccttcgtgcacatgagagagaacgccggcgccctgagagccatcgaggccctgcacggccacgagctgagacccggcagagccctggtggtggagatgagcagacccagacccctgaacacctggaagatcttcgtgggcaacgtgagcgccgcctgcaccagccaggagctgagaagcctgttcgagagaagaggcagagtgatcgagtgcgacgtggtgaagggcggcatgtgcgtgggctag

SEQ ID NO: 76328 - DNA, 357 bp, Artificial Sequence
  derived and/or modified sequence
atgaaaatctttgttggcaacgtggatggcgcagataccactccagaggagctggcagccttgttcgctccttacgggactgttatgtcatgtgccgtgatgaagcaattcgcattcgtgcatatgcgagaaaatgctggggcattgagagccatcgaggccctacacgggcacgaacttagacccggacgtgccctggtcgtggaaatgagtcggccacggccattgaacacctggaagatattcgtaggcaacgtatccgccgcctgcacctcccaggagctccgcagcctattcgaaagacggggtcgtgtcattgagtgtgatgtcgtgaagggaggaatgtgtgtagggtag

SEQ ID NO: 76329 - DNA, 357 bp, Artificial Sequence
  derived and/or modified sequence
atgaagatctttgtgggcaatgtggatggagctgacaccaccccagaggagctggccgccctgtttgccccctatggaacagtgatgagctgtgctgtgatgaagcagtttgcctttgtgcacatgagagaaaatgctggggccctgcgggccatcgaggccctgcacggccacgagctgcggcccggccgggccctggtggtggagatgagccggccccggcccctgaacacctggaagatctttgtgggcaatgtgtctgctgcctgcaccagccaggagctgcggagcctgtttgaaagaagaggccgggtgattgaatgtgatgtggtgaagggcggcatgtgtgtgggctag

SEQ ID NO: 76330 - DNA, 357 bp, Artificial Sequence
  derived and/or modified sequence
atgaagatcttcgtgggcaacgtggacggcgccgacaccacccccgaagaacttgctgccctgtttgccccgtatggcactgtgatgtcttgcgcggtcatgaaacagttcgcctttgtgcacatgcgcgagaatgccggggcgttgagggctattgaggctctccacgggcacgaactgcgaccaggtcgcgcactcgtggtggaaatgtctagaccaaggccgttgaatacatggaagatcttcgtcggcaacgtcagcgccgcctgcacgtctcaagagctcaggtcactgtttgagcgacgggggagggttattgagtgcgatgtcgtcaaaggaggaatgtgtgtggggtag

SEQ ID NO: 76331 - DNA, 357 bp, Artificial Sequence
  derived and/or modified sequence
atgaagatttttgtaggcaatgtggatggcgcagacaccacccctgaggaactggctgctttgttcgccccttacggcaccgtcatgagctgcgcagtaatgaagcaattcgccttcgtccacatgcgggagaacgcaggggcattgcgagcaattgaagccctgcacgggcacgaactgcgacccggaagggctttggtcgtggagatgtcgaggcccaggcctctgaacacatggaaaatctttgtcggcaatgtatccgccgcatgtacatcccaggaactgcgctcgctctttgagaggagaggcagagtaattgagtgcgacgtggtgaaaggaggaatgtgcgtcggatag

SEQ ID NO: 76332 - DNA, 829 bp, Artificial Sequence
  derived and/or modified sequence
gtcgctggaggagaggtccgggctctccaggaaggtggctgcggcgacaaaatgaagatattcgtgggcaacgtcgacggggcggatacgactccggaggagctggcagccctctttgcgccctacggcacggtcatgagctgcgccgtcatgaaacagttcgccttcgtgcacatgcgcgagaacgcgggcgcgctgcgcgccatcgaagccctgcacggccacgagctgcggccggggcgcgcgctcgtggtggagatgtcgcgcccaaggcctcttaatacttggaagattttcgtgggcaatgtgtcggctgcatgcacgagccaggaactgcgcagcctcttcgagcgccgcggacgcgtcatcgagtgtgacgtggtgaaaggtgggatgtgtgtgggctgaaattccgagctgcggttgtgcatgagaatacacccttcgtggtaccccatctccgggacgttctcggctctgtgcgttcagtccctcaggaaccgtggaccttaatttaccttgctaagttcagaccttctcttcctttcctttcctttcctctcctgcccattttcctgttcttctgtccttcaatacttctgtagcttcccattcatgttctcttctcccagcaggcctcattgtgtgcagaaactgtggtgggggctgtgctgtctcctccctgcctcctgcctcctgcggctgttggatttgggaatgaccttggtgagagtctcactgctccagggtctctttttggtccaaaggctagacctatagagttggatcactttttttctttccggtgaaataaatggtttttcaactt

SEQ ID NO: 76333 - protein, 388 aa, Artificial Sequence
  derived and/or modified sequence
MFLQPIAKGIISSNGKRWKEIRRFSLTTLRNFGMGKRSIEDRVQEEAHCLVEELRKTKASPCDPTFILGCAPCNVICSVVFQKRFDYKDQNFLTLMKRFNENFRILNSPWIQVCNNFPLLIDCFPGTHNKVLKNVALTRSYIREKVKEHQASLDVNNPRDFIDCFLIKMEQEKDNQKSEFNIENLVGTVADLFVAGTETTSTTLRYGLLLLLKHPEVTAKVQEEIDHVIGRHRSPCMQDRSHMPYTDAVVHEIQRYSDLVPTGVPHAVTTDTKFRNYLIPKGTTIMALLTSVLHDDKEFPNPNIFDPGHFLDKNGNFKKSDYFMPFSAGKRICAGEGLARMELFLFLTTILQNFNLKSVDDLKNLNTTAVTKGIVSLPPSYQICFIPV

SEQ ID NO: 76334 - DNA, 1374 bp, Artificial Sequence
  derived and/or modified sequence
atggagcgcagctttctcgaagaggccattccccagtatctgaaagaattgctgaaagatctggttggcgctcacatcagcgtctccgcccttgtcacaggggtgcgcggcatggaaaatagggctctgaagagtttcagtgccgaattaagtctcagcgcctggttaccttccgtcgctgctctgagttcccttgctgttaattcaccgagtttctgtccgttttttctaggcattattagcagtaatggaaaacggtggaaagaaatcagacgattctcactgacaaccctcaggaacttcgggatgggtaaacgcagtatagaagaccgggtgcaagaggaagcacactgcctcgtggaggagctgagaaaaaccaaagcctctccttgcgatccaactttcattttaggttgcgcaccctgtaacgtgatttgcagcgttgtgtttcagaaacggtttgactataaggaccaaaattttctgactttgatgaaaagattcaacgaaaattttcgaatcttgaattccccctggatacaggtctgcaacaattttcctctattaattgactgtttccccggaacccacaataaggtcctgaaaaatgtggcgctcacaagatcgtacattagagagaaagtaaaggaacatcaagcttccttagatgtaaataaccctcgcgacttcatcgattgtttcttaataaaaatggagcaggaaaaagataatcagaaatccgagttcaatatcgaaaatctggtaggcactgtggcagacctttttgtagccggcactgaaacaacatcaaccacacttcgctatggtctcttattgctgctcaagcaccctgaggtgaccgccaaagtgcaggaggagatagaccatgtgattggccgccaccgctcaccctgtatgcaggacagatcacacatgccgtatacggatgctgtcgtgcatgagatccagagatactcagacctggttccaaccggggtgcctcacgctgtgaccaccgataccaaatttcgcaactacctgattcccaagggtacgacaattatggccctgctgacttccgtcctacacgacgataaagaattccctaatcccaatatctttgatccaggacacttcctggataaaaatggcaatttcaagaagtccgactactttatgccctttagcgccggaaaacgcatatgcgccggcgaggggctcgccagaatggagcttttcctcttcctgacgacaattcttcaaaattttaacctcaagtctgtcgacgatctgaaaaatctgaacactacagcggtgacaaaaggcatcgtctctctgccgccgagctaccagatctgctttatcccagtatag

SEQ ID NO: 76335 - DNA, 1167 bp, Artificial Sequence
  derived and/or modified sequence
atgtttctccagcctatcgcaaagggaattataagttccaacggtaagcgctggaaagaaatcagacggttttctctcacgacgctgaggaacttcggaatgggaaaacgatccatcgaggatagggttcaggaggaggcccattgcctcgtggaggaacttcgcaaaaccaaagcctctccctgcgatcctacatttattctgggctgtgcgccctgtaacgtaatttgcagcgtggtcttccagaaaagatttgactacaaggaccagaatttcctgaccctgatgaaaaggttcaatgaaaacttcaggatacttaattctccctggattcaagtgtgcaataacttcccactcctaatcgactgtttccctggaactcacaataaagtactcaagaatgtagcgttaacacgatcctacattagggagaaggtcaaggagcaccaggcatccttggatgtgaataacccacgggacttcattgactgtttcctgattaagatggagcaggagaaggataaccagaaatccgaatttaacatcgagaacttggtgggcaccgtagccgacctgtttgttgccggcacagagaccaccagcacaaccctcagatacggcttactcctgttgttgaagcaccctgaagtgacggcaaaggtccaggaggagatcgaccatgttataggaagacaccgcagcccgtgtatgcaggaccggagccacatgccctacacagacgctgtggtccacgagatccaacgctattccgatttggtgcccaccggagtccctcatgccgtgacgacagatactaagtttcgtaactatcttattcccaagggaaccacaataatggctctgctgacaagcgtcctccacgatgataaggaattccccaatccaaatatttttgatcccggacactttctagataagaacgggaatttcaagaaatccgattattttatgcctttttccgctggaaagcggatctgcgccggagagggcctggcaagaatggagctgtttttattcttgactacaattctgcaaaatttcaatctgaaatctgtcgacgatctgaaaaatttaaatacaactgctgtgaccaaaggtatcgtatccctgcctccatcgtatcagatctgttttattcccgtgtag

SEQ ID NO: 76336 - DNA, 924 bp, Artificial Sequence
  derived and/or modified sequence
atggctgccaagtgttgttcaacgttctttctcggctgtgagttcagtcaatttttgcctctgtttctgcttggaataatttcgtcaaatggcaagcgctggaaggaaatccggcggttcagccttacgaccctgcggaatttcggaatgggcaagcgcagcatcgaggatagggttcaggaggaggcccactgtctggtggaagagctgagaaagaccaaggcatctccatgcgatcctactttcattctaggctgcgccccatgcaacgttatttgtagtgtggtcttccagaagagattcgactacaaagaccagaattttctgacgctgatgaagcggttcaacgagaatttcaggattctgaactccccctggatccaggtgtgcaacaactttccgctattgattgattgttttccgggaactcataataaagtgctgaagaacgtggctctgacgcgttcctacataagggagaaggttaaagaacatcaggcctcactggatgtcaataatccgcgagactttatcgattgttttcttattaagatggaacaggagaaagacaatcagaaatcagaatttaatatagagaatttagtgggtactgtcgctgacttgttcgtcgcaggtaccgaaacgacaagcacaactcttaggtatggcctcctcttattgctgaagcacccagaagtgaccgccaaggtccaagaagagatagatcatgtgatcggcagacaccgctcaccctgcatgcaggatcgcagccatatgccatataccgacgctgttgttcatgaaatccagcggtacagcgatttagtgcctaccggggttccacacgccgttacaacggacaccaaatttaggaactacttaatccccaagagttttgataacaaaatcatgttggccgcctag

SEQ ID NO: 76337 - DNA, 1374 bp, Artificial Sequence
  derived and/or modified sequence
atggagaggagcttcctggaggaggccatcccccagtacctgaaggagctgctgaaggacctggtgggcgcccacatctctgtgtctgccctggtgactggagtgcggggcatggagaacagagccctgaagagcttctctgctgagctgagcctgagcgcctggctgcccagcgtggccgccctgagcagcctggccgtgaacagccccagcttctgccccttcttcctgggcatcatcagcagcaatggcaagcgctggaaggagatccgccgcttcagcctgaccaccctgaggaactttggcatgggcaagaggagcattgaagatagagtgcaggaggaggcccactgcctggtggaggagctgaggaagaccaaggccagcccctgtgaccccaccttcatcctgggctgtgccccctgcaacgtcatctgcagcgtggtgttccagaagagatttgactacaaggaccagaacttcctgaccctgatgaagcgcttcaatgaaaacttccgcatcctgaacagcccctggatccaggtgtgcaacaacttccccctgctgattgactgcttccctggcacccacaacaaggtgctgaagaatgtggccctgaccaggagctacatccgggagaaggtgaaggagcaccaggccagcctggatgtgaacaacccccgggacttcatcgactgcttcctgatcaagatggagcaggagaaggacaaccagaagtctgagttcaacatcgagaacctggtgggcaccgtggccgacctgtttgtggccggcacagagaccaccagcaccaccctgcgctatggcctgctgctgctgctgaagcaccctgaggtgacagccaaggtgcaggaggagattgaccacgtgattggccgccacaggagcccctgcatgcaggacaggagccacatgccctacacagatgctgtggtgcatgagatccagcgctacagcgacctggtgcccactggagtgccccatgctgtgaccacagacaccaagttcaggaactacctgatccccaagggcaccaccatcatggccctgctgacctctgtgctgcatgatgacaaggagttccccaaccccaacatctttgaccccggccacttcctggacaagaatggaaacttcaagaagagtgactacttcatgcccttctctgctgggaagaggatctgtgccggggagggcctggccaggatggagctgttcctgttcctgaccaccatcctgcagaacttcaacctgaagtctgtggatgacctgaagaacctgaacaccacagctgtgaccaagggcatcgtgtccctgcccccatcctaccagatctgcttcatccctgtgtag

SEQ ID NO: 76338 - DNA, 1167 bp, Artificial Sequence
  derived and/or modified sequence
atgttcctgcagcccatcgccaagggcatcatcagcagcaatggcaagcgctggaaggagatccgccgcttcagcctgaccaccctgaggaactttggcatgggcaagaggagcattgaggacagagtgcaggaggaggcccactgcctggtggaggagctgaggaagaccaaggccagcccctgtgaccccaccttcatcctgggctgtgccccctgcaacgtcatctgcagcgtggtgttccagaagagatttgactacaaggaccagaacttcctgaccctgatgaagcgcttcaatgaaaacttccgcatcctgaacagcccctggatccaggtgtgcaacaacttccccctgctgattgactgcttccctggcacccacaacaaggtgctgaagaatgtggccctgaccaggagctacatccgggagaaggtgaaggagcaccaggccagcctggatgtgaacaacccccgggacttcatcgactgcttcctgatcaagatggagcaggagaaggacaaccagaagtctgagttcaacatcgagaacctggtgggcaccgtggccgacctgtttgtggccggcacagagaccaccagcaccaccctgcgctatggcctgctgctgctgctgaagcaccctgaggtgacagccaaggtgcaggaggagattgaccacgtgattggccgccacaggagcccctgcatgcaggacaggagccacatgccctacacagatgctgtggtgcatgagatccagcgctacagcgacctggtgcccaccggggtgccccatgctgtgaccacagacaccaagttcaggaactacctgatccccaagggcaccaccatcatggccctgctgacctctgtgctgcatgatgacaaggagttccccaaccccaacatctttgatcctggccacttcctggacaagaatggaaacttcaagaagagtgactacttcatgcccttctctgctgggaagaggatctgtgccggggagggcctggccaggatggagctgttcctgttcctgaccaccatcctgcagaacttcaacctgaagtctgtggatgacctgaagaacctgaacaccacagctgtgaccaagggcatcgtgtccctgccccccagctaccagatctgcttcatccctgtgtag

SEQ ID NO: 76339 - DNA, 924 bp, Artificial Sequence
  derived and/or modified sequence
atggccgccaagtgctgcagcaccttcttcctgggctgtgagttcagccagttcctgcccctcttcctgctgggcatcatcagcagcaatggcaagcgctggaaggagatccgccgcttcagcctgaccaccctgaggaactttggcatgggcaagaggagcattgaggacagagtgcaggaggaggcccactgcctggtggaggagctgaggaagaccaaggccagcccctgtgaccccaccttcatcctgggctgtgccccctgcaacgtcatctgcagcgtggtgttccagaagagatttgactacaaggaccagaacttcctgaccctgatgaagcgcttcaatgaaaacttccgcatcctgaacagcccctggatccaggtgtgcaacaacttccccctgctgattgactgcttccctggcacccacaacaaggtgctgaagaatgtggccctgaccaggagctacatccgggagaaggtgaaggagcaccaggccagcctggatgtgaacaacccccgggacttcatcgactgcttcctgatcaagatggagcaggagaaggacaaccagaagtctgagttcaacatcgagaacctggtgggcaccgtggccgacctgtttgtggccggcacagagaccaccagcaccaccctgcgctatggcctgctgctgctgctgaagcaccctgaggtgacagccaaggtgcaggaggagattgaccacgtgattggccgccacaggagcccctgcatgcaggacaggagccacatgccctacacagatgctgtggtgcatgagatccagcgctacagcgacctggtgcccaccggggtgccccatgctgtgaccacagacaccaagttcaggaactacctgatccccaagagctttgacaacaagatcatgctggccgcctag

SEQ ID NO: 76340 - DNA, 1374 bp, Artificial Sequence
  derived and/or modified sequence
atggagcggagcttcctggaggaggccatcccccagtacctgaaggagctgttaaaggacctggtgggcgcacatatctcagtttctgcactcgtaacgggagtgagaggaatggagaatagggccctgaaaagtttttccgctgagctaagcttgagtgcatggctgcctagcgttgccgctctgtctagcctggctgttaattcaccaagtttttgccccttctttctcggaatcatcagctctaatggtaaaagatggaaagaaatccgccgctttagtctcaccacattacgaaactttggtatggggaaaagatcgatcgaagatagggttcaggaagaggctcactgcctggtcgaagagctcagaaaaacgaaggcttcgccttgcgaccctacttttatcctcggatgtgccccttgcaacgtgatatgctccgtggtcttccagaaacggttcgactacaaggatcagaattttctcactcttatgaagcgatttaatgagaacttccgcattctaaactccccttggatccaggtgtgcaacaattttcctctgctaatcgactgcttccccggaacccacaacaaggtgctgaaaaacgtagccctgacccggtcgtacatccgagaaaaagtcaaggagcaccaggcttccctggacgttaataacccgcgcgactttatagattgttttcttattaagatggagcaagaaaaggataatcagaagagcgaattcaatattgagaacctcgtggggacagtggcagatctcttcgtagccggtaccgagactaccagcaccacacttcggtatggcctattgctcctgctgaaacatcccgaggtaaccgccaaagtccaggaagagatagaccacgttatcgggagacaccgcagcccctgcatgcaggatcgatctcacatgccgtatactgacgccgtggtccacgagattcagcgttattctgacttggtccccaccggagtgccacatgctgtcacgaccgatactaagtttcgcaactatctgatccctaaaggcacaaccattatggcactgttgacttcagtactccacgacgataaggagtttccaaatcccaatattttcgaccctggccactttctggataagaatggaaatttcaaaaaatctgactatttcatgccattctcggcgggcaagaggatatgtgcaggtgaagggctggcgcgcatggagctctttctgttcctgacaactatcttgcagaactttaatttgaagagtgtggacgacctcaaaaatctcaacaccacagccgtgaccaaaggaatcgtgtctttgccaccttcttatcagatttgtttcattcctgtgtag

SEQ ID NO: 76341 - DNA, 1167 bp, Artificial Sequence
  derived and/or modified sequence
atgttcctgcagcccatcgccaagggcatcatcagcagcaacggcaaacgttggaaagaaatccgcaggtttagcttaacaaccctgcgcaactttggcatgggaaaacggagtatagaagatcgggttcaggaggaggcccattgcctggtagaagaattgcgaaagacaaaagcatcgccttgtgatcccaccttcattttggggtgcgccccgtgcaatgtcatctgtagcgttgtattccagaagcggttcgactacaaggaccagaatttcttgaccctcatgaagcggtttaacgagaatttccgcatactaaactccccgtggattcaggtttgtaacaacttccccttactgatcgattgttttccaggaacccacaataaggtgctgaagaacgttgccctgactcgttcatacatccgggagaaagttaaggaacaccaagcctctcttgacgtcaacaacccgcgggattttattgattgtttcctgatcaagatggagcaggagaaagataaccagaagtccgagtttaacatcgagaatcttgtgggaaccgtcgctgatctgttcgttgctggcactgaaacaacctctaccacactgcgctatggactgttactgctgctgaagcatcccgaagtcactgctaaagtccaggaagagatagaccacgttattggacgacacaggagcccgtgtatgcaggacaggagccatatgccgtacaccgatgcggtcgtgcatgaaattcagaggtactcggatctagtgcctactggtgtccctcatgctgtgacaactgacaccaaatttcgcaattacctcatccccaagggcactacaataatggcccttctgacttctgtgctgcacgacgacaaggagttccctaacccaaacatcttcgaccctgggcattttctggataaaaacggaaatttcaaaaaaagcgattatttcatgccattcagtgcgggtaaacgtatctgcgccggcgaaggtctggcaaggatggaattattcctgttcctgaccacaatcctacagaacttcaatctaaagtctgtcgatgacctgaagaacctcaatactaccgcagtcacaaaagggattgtttccctacccccctcataccaaatatgcttcattcctgtatag

SEQ ID NO: 76342 - DNA, 924 bp, Artificial Sequence
  derived and/or modified sequence
atggccgccaagtgctgcagcaccttcttcctgggctgcgagttctctcagttcctgccactgttccttttgggaataatctctagcaatggcaagaggtggaaagaaatccgtcggttttccttgactacactccgcaacttcgggatgggcaaaagatctattgaagatagggttcaagaggaagctcattgtctggttgaggagctgcgcaagaccaaggccagcccttgcgatcccactttcatccttggctgcgcaccatgcaacgtgatttgctccgtggttttccagaaacgctttgactataaagatcagaactttctgacgctcatgaagaggttcaacgagaatttccgcatcctgaattcaccttggatccaggtttgtaataatttccccttgctcatcgactgctttccgggtacccataataaggtgctgaaaaatgtagctctgacacgttcctacatcagggagaaggtgaaggagcatcaagcatctcttgacgtcaataatccccgcgactttatagactgcttccttataaaaatggaacaggagaaggataatcagaagtccgagttcaatatagagaacttagtcggaactgtggctgacctttttgtggcgggcacagagacaactagtaccacactgcggtatggcttgctcctcctcctgaagcaccctgaagttactgccaaagttcaggaggaaatcgaccatgtcattgggcgacacaggtcgccctgtatgcaggatcgcagccacatgccctacaccgatgcagttgtacatgaaatacagcgttactctgaccttgttcctaccggcgtcccccacgccgtgaccacggataccaaattccgaaattaccttatcccgaagtccttcgacaacaaaatcatgctggccgcctag

SEQ ID NO: 76343 - DNA, 1374 bp, Artificial Sequence
  derived and/or modified sequence
atggagcgttccttcctggaagaagcaattcctcagtatttaaaagagctcctcaaagatctcgtgggtgcccatattagcgtgtccgcccttgtcactggggtgcgcggaatggaaaaccgcgctctcaagagcttcagcgctgaactcagcctatccgcctggctgccgagcgtggccgcacttagttctttagcggtaaactccccatccttctgtccgttcttcctcggtattatcagctccaatggcaagaggtggaaagagatacggaggttcagtctgaccaccctcaggaatttcggaatgggcaagcgctccattgaggaccgcgtgcaggaggaagctcactgtttggtggaagagctgagaaagaccaaggccagcccatgtgacccaacttttatattggggtgcgcaccctgcaacgttatctgctcagttgttttccagaaacgcttcgactataaagatcagaactttttaaccctcatgaaaaggttcaatgagaactttaggatcctcaatagtccttggattcaagtctgcaacaattttccccttttaatcgactgtttccctggcacccacaataaagtgctcaaaaacgttgctttgactaggagctatattagggaaaaagttaaagaacaccaagcctctctggacgtaaacaaccctagagatttcatcgactgtttcctgatcaagatggagcaggaaaaggataatcaaaaaagcgagttcaacattgaaaatctggtgggcaccgtggccgatttgtttgtggcgggtacagaaacaactagtacaaccctgagatatggactgctgttgttgctcaagcatcctgaagtgactgccaaggtgcaggaagagatcgatcatgtgattgggagacatcggagtccctgtatgcaggataggtctcacatgccctacaccgacgcagtcgtgcatgaaattcagaggtactcggatttggtgcctactggagtgccccatgctgtgactaccgataccaaatttagaaactatctaattccgaagggaactactatcatggctttgctgacaagtgtgctccatgatgataaagaattcccaaaccccaatatctttgaccctgggcactttctggataagaacgggaacttcaagaagtctgactatttcatgccgttctccgccggtaagaggatttgtgcaggcgaaggactggcaaggatggagctgttcctgtttctgacgacaatcctgcagaacttcaacttaaagtccgtggatgatctgaaaaatcttaacacgaccgctgttacaaaagggatcgtctccctccctcccagctatcagatctgtttcatccctgtgtag

SEQ ID NO: 76344 - DNA, 1167 bp, Artificial Sequence
  derived and/or modified sequence
atgttcttgcagccgatcgccaaggggataatctcatcgaatgggaaaaggtggaaagagataaggaggttctctctaaccaccttgagaaactttggaatggggaagcgctctatcgaagatcgtgttcaggaggaagcccattgtctggttgaggagttacggaagaccaaagcttccccttgtgaccccacattcatcctcggctgtgccccatgcaacgtgatttgcagcgtggtgttccaaaaacgtttcgattataaggaccaaaacttcctgacattaatgaaacggttcaacgaaaacttcaggattctcaactcaccatggatccaggtatgtaataacttccccttgctcatagattgtttccctggaactcacaataaagttctgaagaatgtggccctgacaagaagttacatcagagagaaagtgaaagaacaccaggcatctttggacgtgaataaccccagagacttcattgactgctttttaattaagatggagcaggaaaaagacaaccaaaagtctgagttcaatatcgagaatctggtgggtactgtcgcagacctgttcgtagctggcaccgagacaacctccacaacgctacgatacgggttactgctgctgctgaaacacccagaggttactgcaaaagtccaggaggagatcgaccatgtgatagggaggcaccgatccccttgcatgcaggaccgttcacacatgccctacacagatgctgtcgtacatgaaattcagagatacagcgacctggtgcccacaggagtgcctcacgctgtgacaaccgatactaagttcagaaattacctgatccccaaaggaaccactattatggccctgctcacttctgtcctccatgatgacaaggaatttccaaaccccaatatcttcgatccgggacatttcttagataaaaacggaaatttcaaaaagtccgactacttcatgcccttttccgccggaaagaggatctgtgccggtgaaggtcttgccagaatggagttgtttcttttccttactacgattctccagaatttcaacctgaagagcgtcgatgacctgaaaaatctgaacaccaccgctgtgacaaaaggcatagtgagcctgcctccaagctatcagatttgttttattcctgtgtag

SEQ ID NO: 76345 - DNA, 924 bp, Artificial Sequence
  derived and/or modified sequence
atggccgcaaaatgctgcagcaccttcttcttaggttgtgaattcagtcagttcctgcctctttttctccttggaatcatcagctccaatggcaagagatggaaagagattcgacggttcagcctcacgacactccggaattttggcatgggaaagagatccatcgaagacagagtgcaggaggaagctcactgtctggttgaagagctccggaagacaaaggcaagtccttgcgatccaaccttcatcctggggtgcgccccatgtaatgtgatctgctcagtcgtttttcagaagcggtttgattacaaggaccagaatttccttaccttgatgaagcggtttaacgagaactttcggattctcaacagcccatggattcaggtgtgcaacaattttcctctgttaatcgattgcttccctggcacacataacaaggtcctgaaaaacgtggcactgacccggtcctacattcgtgagaaggtgaaagagcaccaggcctcactggacgtgaacaaccccagagacttcattgattgctttctgattaagatggagcaggagaaggacaatcagaaaagcgaattcaacatcgagaacctggtcggaaccgtggccgacctgttcgttgccggtaccgaaaccacttctacgaccctgaggtacggactgctcctgctgctgaagcatcctgaggtcacagctaaggtccaggaggaaatcgatcatgtgatcggtagacatcggtctccgtgcatgcaggatcgttcccatatgccctatacggacgctgtcgtgcatgaaattcaacgttactccgacctggtgcctacaggggtgccacatgcggtgaccacggacaccaaatttagaaattatttaatacccaaatcttttgacaataagattatgttggccgcatag

SEQ ID NO: 76346 - DNA, 2031 bp, Artificial Sequence
  derived and/or modified sequence
gtcttaataagaagagaaggcttcaatggaaccttttgtggtcctggtgctgtgtctctcttttatgcttctcttttcactctggagacagagctgtaggagaaggaagctccctcctggccccactcctcttcctattattggaaatatgctacagatagatgttaaggacatctgcaaatctttcaccaatgtaagtctgccttatgttcctccagccaattgcaaaggttctcaaaagtctatggtcctgtgttcaccgtgtattttggcatgaatcccatagtggtgtttcatggatatgaggcagtgaaggaagccctgattgataatggagaggagttttctggaagaggcaattccccaatatctcaaagaattactaaaggacttggtaggtgcacatatttctgtgtcagctttggtaactggggtgagggggatggaaaacagagccctaaaaagcttctcagcagagcttagcctatctgcatggctgccaagtgttgcagcactttcttccttggctgtgaattctcccagtttctgccccttttttttaggaatcatttccagcaatggaaagagatggaaggagatccggcgtttctccctcacaaccttgcggaattttgggatggggaagaggagcattgaggaccgtgttcaagaggaagctcactgccttgtggaggagttgagaaaaaccaaggcttcaccctgtgatcccactttcatcctgggctgtgctccctgcaatgtgatctgctccgttgttttccagaaacgatttgattataaagatcagaattttctcaccctgatgaaaagattcaatgaaaacttcaggattctgaactccccatggatccaggtctgcaataatttccctctactcattgattgtttcccaggaactcacaacaaagtgcttaaaaatgttgctcttacacgaagttacattagggagaaagtaaaagaacaccaagcatcactggatgttaacaatcctcgggactttatcgattgcttcctgatcaaaatggagcaggaaaaggacaaccaaaagtcagaattcaatattgaaaacttggttggcactgtagctgatctatttgttgctggaacagagacaacaagcaccactctgagatatggactcctgctcctgctgaagcacccagaggtcacagctaaagtccaggaagagattgatcatgtaattggcagacacaggagcccctgcatgcaggataggagccacatgccttacactgatgctgtagtgcacgagatccagagatacagtgaccttgtccccaccggtgtgccccatgcagtgaccactgatactaagttcagaaactacctcatccccaagggcacaaccataatggcattactgacttccgtgctacatgatgacaaagaatttcctaatccaaatatctttgaccctggccactttctagataagaatggcaactttaagaaaagtgactacttcatgcctttctcagcaggaaaacgaatttgtgcaggagaaggacttgcccgcatggagctatttttatttctaaccacaattttacagaactttaacctgaaatctgttgatgatttaaagaacctcaatactactgcagttaccaaagggattgtttctctgccaccctcataccagatctgcttcatccctgtctgaagaatgctagcccatctggctgccgatctgctatcacctgcaactctttttttatcaaggacattcccactattatgtcttctctgacctctcatcaaatcttcccattcactcaatatcccataagcatccaaactccattaaggagagttgttcaggtcactgcacaaatatatctgcaattattcatactctgtaacacttgtattaattgctgcatatgctaatacttttctaatgctgactttttaatatgttatcactgtaaaacacagaaaagtgattaatgaatgataatttagatccatttcttttgtgaatgtgct

SEQ ID NO: 76347 - DNA, 1587 bp, Artificial Sequence
  derived and/or modified sequence
acatgtcaaagagacacacactaaattagcagggagtgttataaaaactttggagtgcaagctcacagctgtcttaataagaagagaaggcttcaatggaaccttttgtggtcctggtgctgtgtctctcttttatgcttctcttttcactctggagacagagctgtaggagaaggaagctccctcctggccccactcctcttcctattattggaaatatgctacagatagatgttaaggacatctgcaaatctttcaccaatgtaagtctgccttatgttcctccagccaattgcaaagggaatcatttccagcaatggaaagagatggaaggagatccggcgtttctccctcacaaccttgcggaattttgggatggggaagaggagcattgaggaccgtgttcaagaggaagctcactgccttgtggaggagttgagaaaaaccaaggcttcaccctgtgatcccactttcatcctgggctgtgctccctgcaatgtgatctgctccgttgttttccagaaacgatttgattataaagatcagaattttctcaccctgatgaaaagattcaatgaaaacttcaggattctgaactccccatggatccaggtctgcaataatttccctctactcattgattgtttcccaggaactcacaacaaagtgcttaaaaatgttgctcttacacgaagttacattagggagaaagtaaaagaacaccaagcatcactggatgttaacaatcctcgggactttatcgattgcttcctgatcaaaatggagcaggaaaaggacaaccaaaagtcagaattcaatattgaaaacttggttggcactgtagctgatctatttgttgctggaacagagacaacaagcaccactctgagatatggactcctgctcctgctgaagcacccagaggtcacagctaaagtccaggaagagattgatcatgtaattggcagacacaggagcccctgcatgcaggataggagccacatgccttacactgatgctgtagtgcacgagatccagagatacagtgaccttgtccccaccggtgtgccccatgcagtgaccactgatactaagttcagaaactacctcatccccaagggcacaaccataatggcattactgacttccgtgctacatgatgacaaagaatttcctaatccaaatatctttgaccctggccactttctagataagaatggcaactttaagaaaagtgactacttcatgcctttctcagcaggaaaacgaatttgtgcaggagaaggacttgcccgcatggagctatttttatttctaaccacaattttacagaactttaacctgaaatctgttgatgatttaaagaacctcaatactactgcagttaccaaagggattgtttctctgccaccctcataccagatctgcttcatccctgtctgaagaatgctagcccatctggctgccgatctgctatcacctgcaactctttttttatcaaggacattcccactattatgtcttctctgacctctcatcaaatcttcccattcactcaatatcccataagcatccaaactccattaa

SEQ ID NO: 76348 - DNA, 1493 bp, Artificial Sequence
  derived and/or modified sequence
acatgtcaaagagacacacactaaattagcagggagtgttataaaaactttggagtgcaagctcacagctgtcttaataagaagagaaggcttcaatggaaccttttgtggtcctggtgctgtgtctctcttttatgcttctcttttcactctggagacagagctgtaggagaaggaagctccctcctggccccactcctcttcctattattggaaatatgctacagatagatgttaaggacatctgcaaatctttcaccaatgtaagtctgccttatgttcctccagccaattgcaaaggttctcaaaagtctatggtcctgtgttcaccgtgtattttggcatgaatcccatagtggtgtttcatggatatgaggcagtgaaggaagccctgattgataatggagaggagttttctggaagaggcaattccccaatatctcaaagaattactaaaggacttggtaggtgcacatatttctgtgtcagctttggtaactggggtgagggggatggaaaacagagccctaaaaagcttctcagcagagcttagcctatctgcatggctgccaagtgttgcagcactttcttccttggctgtgaattctcccagtttctgcccctttttttattaggaatcatttccagcaatggaaagagatggaaggagatccggcgtttctccctcacaaccttgcggaattttgggatggggaagaggagcattgaggaccgtgttcaagaggaagctcactgccttgtggaggagttgagaaaaaccaaggcttcaccctgtgatcccactttcatcctgggctgtgctccctgcaatgtgatctgctccgttgttttccagaaacgatttgattataaagatcagaattttctcaccctgatgaaaagattcaatgaaaacttcaggattctgaactccccatggatccaggtctgcaataatttccctctactcattgattgtttcccaggaactcacaacaaagtgcttaaaaatgttgctcttacacgaagttacattagggagaaagtaaaagaacaccaagcatcactggatgttaacaatcctcgggactttatcgattgcttcctgatcaaaatggagcaggaaaaggacaaccaaaagtcagaattcaatattgaaaacttggttggcactgtagctgatctatttgttgctggaacagagacaacaagcaccactctgagatatggactcctgctcctgctgaagcacccagaggtcacagctaaagtccaggaagagattgatcatgtaattggcagacacaggagcccctgcatgcaggataggagccacatgccttacactgatgctgtagtgcacgagatccagagatacagtgaccttgtccccaccggtgtgccccatgcagtgaccactgatactaagttcagaaactacctcatccccaagagctttgataacaagataatgctggctgcataaaactagg

SEQ ID NO: 76349 - DNA, 1374 bp, Artificial Sequence
  derived and/or modified sequence
atggagagaagcttcctggaggaggccatcccccagtacctgaaggagctgctgaaggacctggtgggcgcccacatcagcgtgagcgccctggtgaccggcgtgagaggcatggagaacagagccctgaagagcttcagcgccgagctgagcctgagcgcctggctgcccagcgtggccgccctgagcagcctggccgtgaacagccccagcttctgccccttcttcctgggcatcatcagcagcaacggcaagagatggaaggagatcagaagattcagcctgaccaccctgagaaacttcggcatgggcaagagaagcatcgaggacagagtgcaggaggaggcccactgcctggtggaggagctgagaaagaccaaggccagcccctgcgaccccaccttcatcctgggctgcgccccctgcaacgtgatctgcagcgtggtgttccagaagagattcgactacaaggaccagaacttcctgaccctgatgaagagattcaacgagaacttcagaatcctgaacagcccctggatccaggtgtgcaacaacttccccctgctgatcgactgcttccccggcacccacaacaaggtgctgaagaacgtggccctgaccagaagctacatcagagagaaggtgaaggagcaccaggccagcctggacgtgaacaaccccagagacttcatcgactgcttcctgatcaagatggagcaggagaaggacaaccagaagagcgagttcaacatcgagaacctggtgggcaccgtggccgacctgttcgtggccggcaccgagaccaccagcaccaccctgagatacggcctgctgctgctgctgaagcaccccgaggtgaccgccaaggtgcaggaggagatcgaccacgtgatcggcagacacagaagcccctgcatgcaggacagaagccacatgccctacaccgacgccgtggtgcacgagatccagagatacagcgacctggtgcccaccggcgtgccccacgccgtgaccaccgacaccaagttcagaaactacctgatccccaagggcaccaccatcatggccctgctgaccagcgtgctgcacgacgacaaggagttccccaaccccaacatcttcgaccccggccacttcctggacaagaacggcaacttcaagaagagcgactacttcatgcccttcagcgccggcaagagaatctgcgccggcgagggcctggccagaatggagctgttcctgttcctgaccaccatcctgcagaacttcaacctgaagagcgtggacgacctgaagaacctgaacaccaccgccgtgaccaagggcatcgtgagcctgccccccagctaccagatctgcttcatccccgtgtag

SEQ ID NO: 76350 - DNA, 1167 bp, Artificial Sequence
  derived and/or modified sequence
atgttcctgcagcccatcgccaagggcatcatcagcagcaacggcaagagatggaaggagatcagaagattcagcctgaccaccctgagaaacttcggcatgggcaagagaagcatcgaggacagagtgcaggaggaggcccactgcctggtggaggagctgagaaagaccaaggccagcccctgcgaccccaccttcatcctgggctgcgccccctgcaacgtgatctgcagcgtggtgttccagaagagattcgactacaaggaccagaacttcctgaccctgatgaagagattcaacgagaacttcagaatcctgaacagcccctggatccaggtgtgcaacaacttccccctgctgatcgactgcttccccggcacccacaacaaggtgctgaagaacgtggccctgaccagaagctacatcagagagaaggtgaaggagcaccaggccagcctggacgtgaacaaccccagagacttcatcgactgcttcctgatcaagatggagcaggagaaggacaaccagaagagcgagttcaacatcgagaacctggtgggcaccgtggccgacctgttcgtggccggcaccgagaccaccagcaccaccctgagatacggcctgctgctgctgctgaagcaccccgaggtgaccgccaaggtgcaggaggagatcgaccacgtgatcggcagacacagaagcccctgcatgcaggacagaagccacatgccctacaccgacgccgtggtgcacgagatccagagatacagcgacctggtgcccaccggcgtgccccacgccgtgaccaccgacaccaagttcagaaactacctgatccccaagggcaccaccatcatggccctgctgaccagcgtgctgcacgacgacaaggagttccccaaccccaacatcttcgaccccggccacttcctggacaagaacggcaacttcaagaagagcgactacttcatgcccttcagcgccggcaagagaatctgcgccggcgagggcctggccagaatggagctgttcctgttcctgaccaccatcctgcagaacttcaacctgaagagcgtggacgacctgaagaacctgaacaccaccgccgtgaccaagggcatcgtgagcctgccccccagctaccagatctgcttcatccccgtgtag

SEQ ID NO: 76351 - DNA, 924 bp, Artificial Sequence
  derived and/or modified sequence
atggccgccaagtgctgcagcaccttcttcctgggctgcgagttcagccagttcctgcccctgttcctgctgggcatcatcagcagcaacggcaagagatggaaggagatcagaagattcagcctgaccaccctgagaaacttcggcatgggcaagagaagcatcgaggacagagtgcaggaggaggcccactgcctggtggaggagctgagaaagaccaaggccagcccctgcgaccccaccttcatcctgggctgcgccccctgcaacgtgatctgcagcgtggtgttccagaagagattcgactacaaggaccagaacttcctgaccctgatgaagagattcaacgagaacttcagaatcctgaacagcccctggatccaggtgtgcaacaacttccccctgctgatcgactgcttccccggcacccacaacaaggtgctgaagaacgtggccctgaccagaagctacatcagagagaaggtgaaggagcaccaggccagcctggacgtgaacaaccccagagacttcatcgactgcttcctgatcaagatggagcaggagaaggacaaccagaagagcgagttcaacatcgagaacctggtgggcaccgtggccgacctgttcgtggccggcaccgagaccaccagcaccaccctgagatacggcctgctgctgctgctgaagcaccccgaggtgaccgccaaggtgcaggaggagatcgaccacgtgatcggcagacacagaagcccctgcatgcaggacagaagccacatgccctacaccgacgccgtggtgcacgagatccagagatacagcgacctggtgcccaccggcgtgccccacgccgtgaccaccgacaccaagttcagaaactacctgatccccaagagcttcgacaacaagatcatgctggccgcctag

SEQ ID NO: 76352 - protein, 457 aa, Artificial Sequence
  derived and/or modified sequence
MERSFLEEAIPQYLKELLKDLVGAHISVSALVTGVRGMENRALKSFSAELSLSAWLPSVAALSSLAVNSPSFCPFFLGIISSNGKRWKEIRRFSLTTLRNFGMGKRSIEDRVQEEAHCLVEELRKTKASPCDPTFILGCAPCNVICSVVFQKRFDYKDQNFLTLMKRFNENFRILNSPWIQVCNNFPLLIDCFPGTHNKVLKNVALTRSYIREKVKEHQASLDVNNPRDFIDCFLIKMEQEKDNQKSEFNIENLVGTVADLFVAGTETTSTTLRYGLLLLLKHPEVTAKVQEEIDHVIGRHRSPCMQDRSHMPYTDAVVHEIQRYSDLVPTGVPHAVTTDTKFRNYLIPKGTTIMALLTSVLHDDKEFPNPNIFDPGHFLDKNGNFKKSDYFMPFSAGKRICAGEGLARMELFLFLTTILQNFNLKSVDDLKNLNTTAVTKGIVSLPPSYQICFIPV

SEQ ID NO: 76353 - protein, 307 aa, Artificial Sequence
  derived and/or modified sequence
MAAKCCSTFFLGCEFSQFLPLFLLGIISSNGKRWKEIRRFSLTTLRNFGMGKRSIEDRVQEEAHCLVEELRKTKASPCDPTFILGCAPCNVICSVVFQKRFDYKDQNFLTLMKRFNENFRILNSPWIQVCNNFPLLIDCFPGTHNKVLKNVALTRSYIREKVKEHQASLDVNNPRDFIDCFLIKMEQEKDNQKSEFNIENLVGTVADLFVAGTETTSTTLRYGLLLLLKHPEVTAKVQEEIDHVIGRHRSPCMQDRSHMPYTDAVVHEIQRYSDLVPTGVPHAVTTDTKFRNYLIPKSFDNKIMLAA

SEQ ID NO: 76354 - protein, 231 aa, Artificial Sequence
  derived and/or modified sequence
MSWKMALQIPGGFWAAAVTVMLVMLSTPVAEARDFPKDFLVQFKGMCYFTNGTERVRGVARYIYNREEYGRFDSDVGEFQAVTELGRSIEDWNNYKDFLEQERAAVDKVCRHNYEAELRTTLQRQVEPTVTISPSRTEALNHHNLLVCSVTDFYPAQIKVQWFRNDQEETAGVVSTSLIRNGDWTFQILVMLEITPQRGDIYTCQVEHPSLQSPITVEWRPRGPPPAGLLH

SEQ ID NO: 76355 - protein, 227 aa, Artificial Sequence
  derived and/or modified sequence
MALQIPGGFWAAAVTVMLVMLSTPVAEARDFPKDFLVQFKGMCYFTNGTERVRGVARYIYNREEYGRFDSDVGEFQAVTELGRSIEDWNNYKDFLEQERAAVDKVCRHNYEAELRTTLQRQVEPTVTISPSRTEALNHHNLLVCSVTDFYPAQIKVRWFRNDQEETAGVVSTSLIRNGDWTFQILVMLEITPQRGDIYTCQVEHPSLQSPITVEWRPRGPPPAGLLH

SEQ ID NO: 76356 - protein, 208 aa, Artificial Sequence
  derived and/or modified sequence
MLSTPVAEARDFPKDFLVQFKGMCYFTNGTERVRGVARYIYNREEYGRFDSDVGEFQAVTELGRSIEDWNNYKDFLEQERAAVDKVCRHNYEAELRTTLQRQVEPTVTISPSRTEALNHHNLLVCSVTDFYPAQIKVQWFRNDQEETAGVVSTSLIRNGDWTFQILVMLEITPQRGDIYTCQVEHPSLQSPITVEWRPRGPPPAGLLH

SEQ ID NO: 76357 - protein, 208 aa, Artificial Sequence
  derived and/or modified sequence
MLSTPVAEARDFPKDFLVQFKGMCYFTNGTERVRGVARYIYNREEYGRFDSDVGEFQAVTELGRSIEDWNNYKDFLEQERAAVDKVCRHNYEAELRTTLQRQVEPTVTISPSRTEALNHHNLLVCSVTDFYPAQIKVRWFRNDQEETAGVVSTSLIRNGDWTFQILVMLEITPQRGDIYTCQVEHPSLQSPITVEWRPRGPPPAGLLH

SEQ ID NO: 76358 - DNA, 696 bp, Artificial Sequence
  derived and/or modified sequence
atgagctggaagatggccctgcagatccccggcggcttctgggccgccgccgtgaccgtgatgctggtgatgctgagcacccccgtggccgaggccagagacttccccaaggacttcctggtgcagttcaagggcatgtgctacttcaccaacggcaccgagagagtgagaggcgtggccagatacatctacaacagagaggagtacggcagattcgacagcgacgtgggcgagttccaggccgtgaccgagctgggcagaagcatcgaggactggaacaactacaaggacttcctggagcaggagagagccgccgtggacaaggtgtgcagacacaactacgaggccgagctgagaaccaccctgcagagacaggtggagcccaccgtgaccatcagccccagcagaaccgaggccctgaaccaccacaacctgctggtgtgcagcgtgaccgacttctaccccgcccagatcaaggtgcagtggttcagaaacgaccaggaggagaccgccggcgtggtgagcaccagcctgatcagaaacggcgactggaccttccagatcctggtgatgctggagatcaccccccagagaggcgacatctacacctgccaggtggagcaccccagcctgcagagccccatcaccgtggagtggagacccagaggccccccccccgccggcctgctgcactag

SEQ ID NO: 76359 - DNA, 684 bp, Artificial Sequence
  derived and/or modified sequence
atggccctgcagatccccggcggcttctgggccgccgccgtgaccgtgatgctggtgatgctgagcacccccgtggccgaggccagagacttccccaaggacttcctggtgcagttcaagggcatgtgctacttcaccaacggcaccgagagagtgagaggcgtggccagatacatctacaacagagaggagtacggcagattcgacagcgacgtgggcgagttccaggccgtgaccgagctgggcagaagcatcgaggactggaacaactacaaggacttcctggagcaggagagagccgccgtggacaaggtgtgcagacacaactacgaggccgagctgagaaccaccctgcagagacaggtggagcccaccgtgaccatcagccccagcagaaccgaggccctgaaccaccacaacctgctggtgtgcagcgtgaccgacttctaccccgcccagatcaaggtgagatggttcagaaacgaccaggaggagaccgccggcgtggtgagcaccagcctgatcagaaacggcgactggaccttccagatcctggtgatgctggagatcaccccccagagaggcgacatctacacctgccaggtggagcaccccagcctgcagagccccatcaccgtggagtggagacccagaggccccccccccgccggcctgctgcactag

SEQ ID NO: 76360 - DNA, 627 bp, Artificial Sequence
  derived and/or modified sequence
atgctgagcacccccgtggccgaggccagagacttccccaaggacttcctggtgcagttcaagggcatgtgctacttcaccaacggcaccgagagagtgagaggcgtggccagatacatctacaacagagaggagtacggcagattcgacagcgacgtgggcgagttccaggccgtgaccgagctgggcagaagcatcgaggactggaacaactacaaggacttcctggagcaggagagagccgccgtggacaaggtgtgcagacacaactacgaggccgagctgagaaccaccctgcagagacaggtggagcccaccgtgaccatcagccccagcagaaccgaggccctgaaccaccacaacctgctggtgtgcagcgtgaccgacttctaccccgcccagatcaaggtgcagtggttcagaaacgaccaggaggagaccgccggcgtggtgagcaccagcctgatcagaaacggcgactggaccttccagatcctggtgatgctggagatcaccccccagagaggcgacatctacacctgccaggtggagcaccccagcctgcagagccccatcaccgtggagtggagacccagaggccccccccccgccggcctgctgcactag

SEQ ID NO: 76361 - DNA, 627 bp, Artificial Sequence
  derived and/or modified sequence
atgctgagcacccccgtggccgaggccagagacttccccaaggacttcctggtgcagttcaagggcatgtgctacttcaccaacggcaccgagagagtgagaggcgtggccagatacatctacaacagagaggagtacggcagattcgacagcgacgtgggcgagttccaggccgtgaccgagctgggcagaagcatcgaggactggaacaactacaaggacttcctggagcaggagagagccgccgtggacaaggtgtgcagacacaactacgaggccgagctgagaaccaccctgcagagacaggtggagcccaccgtgaccatcagccccagcagaaccgaggccctgaaccaccacaacctgctggtgtgcagcgtgaccgacttctaccccgcccagatcaaggtgagatggttcagaaacgaccaggaggagaccgccggcgtggtgagcaccagcctgatcagaaacggcgactggaccttccagatcctggtgatgctggagatcaccccccagagaggcgacatctacacctgccaggtggagcaccccagcctgcagagccccatcaccgtggagtggagacccagaggccccccccccgccggcctgctgcactag

SEQ ID NO: 76362 - DNA, 696 bp, Artificial Sequence
  derived and/or modified sequence
atgagttggaagatggcactccagatccctggcggcttttgggccgccgccgttactgttatgctggtcatgctgtccaccccagtggcagaggctagagactttcctaaggactttctggtgcagtttaagggaatgtgttatttcaccaatgggaccgagcgcgtccgaggagtggcacgatacatctacaatagggaagagtatggccgtttcgacagtgatgtgggggagtttcaggccgtaactgaactcggccgcagcatagaggattggaataattacaaggactttctggagcaagagcgagccgccgtggacaaagtgtgtcgccataactacgaagcggaactccgaacaaccctgcagagacaggtagagccaacggtgacgatttccccaagtcggaccgaggccctaaaccatcataacttactagtttgcagcgtcacagacttttacccagcccaaatcaaagtacaatggtttcggaacgatcaggaggagaccgccggagtcgtgagtacgagcctaatccgtaatggcgactggactttccaaatactggtgatgttggagattacgccccagaggggagatatctacacatgccaagtagaacatccctccttacagtccccaattacagtggaatggcgacctcgggggcctcctcctgccggcctgctgcactag

SEQ ID NO: 76363 - DNA, 684 bp, Artificial Sequence
  derived and/or modified sequence
atggccctgcaaatccccggtggcttctgggctgcggctgttacagtgatgcttgtgatgttgtcgacgccagtcgccgaggcaagggactttcctaaagacttccttgtacagttcaagggcatgtgctatttcacaaatggtacagagagggtgagaggagtggcacgctatatttacaatcgggaagaatacggacgctttgactctgatgtcggagaatttcaggccgtcacagagttgggcagatccattgaggattggaacaactacaaagattttcttgaacaagagagagctgccgttgacaaagtgtgtcggcataattatgaagccgaactccgaaccaccctgcagcgccaggtcgagccaaccgtgactatttccccctcaaggacagaagctctaaatcaccacaacctcctggtatgttcagtgactgatttttaccccgcccaaatcaaagtcagatggttcagaaatgaccaggaggagaccgccggcgtcgtgtccacctctctaattaggaacggtgactggacttttcagatactagtgatgctggagattactcctcagcgaggggacatttacacatgccaagtggagcatccctctctgcagagccctatcaccgtcgagtggcgtcctaggggaccgccccccgcaggcctgctgcactag

SEQ ID NO: 76364 - DNA, 696 bp, Artificial Sequence
  derived and/or modified sequence
atgtcttggaaaatggccctgcagatccctgggggcttttgggccgcagctgttacagtgatgctcgtaatgctgagcacacctgtggccgaggctcgcgacttccctaaggacttcctggttcaatttaaaggaatgtgttacttcaccaatggcacagagcgcgttcggggcgtcgctcgatacatttataatcgggaagagtatggccggtttgattcagatgtgggcgagtttcaggccgtcacggaactgggtagaagtatcgaggactggaataattacaaggacttcctcgagcaggagcgcgccgctgtagataaagtatgtaggcacaattacgaagcagagctgcgtactaccctgcagcggcaggtggagcccacagttaccatcagtcctagtcgaactgaggctttaaaccaccataatctgctggtctgctcagtcacagatttttaccctgcgcagattaaggtgcagtggttccggaatgatcaggaagagaccgccggcgtcgtgagcacaagcctgatcaggaatggagattggacctttcagatcctggtcatgttagagattaccccacagcgtggggacatctacacctgccaagtagagcatcccagtttgcagtcaccgatcactgtggagtggaggcctaggggaccaccaccagctggtctcctgcattag

SEQ ID NO: 76365 - DNA, 684 bp, Artificial Sequence
  derived and/or modified sequence
atggccttgcagattccaggcggcttttgggctgcggcggtcaccgtcatgctagtcatgctgagcaccccggtcgcggaagctcgagactttccgaaagactttctggtgcagttcaaaggcatgtgttattttactaacggcacagaacgggttcgcggtgtggcgaggtacatttacaaccgtgaggaatacggacggtttgattccgatgtcggtgagtttcaagccgtgaccgaactgggcaggagcatcgaagactggaataactataaagacttcctggagcaagagagagccgctgttgataaagtgtgcaggcataattacgaggccgagcttaggaccactctgcagaggcaggtggagccaacggttacaatctccccgagcagaacggaggctttgaaccaccacaatctgctagtctgcagtgtcacagatttttaccctgcccaaatcaaggtgcgatggttccgcaacgaccaggaagaaactgcaggcgtcgtgagtacaagtctgattcggaacggtgactggaccttccagatcctggtcatgctcgagatcacgcctcagcgcggggacatttacacctgccaggttgagcatccgagcctgcagtctcccattaccgttgaatggcgcccaagaggcccaccaccggccgggctgttacactag

SEQ ID NO: 76366 - DNA, 696 bp, Artificial Sequence
  derived and/or modified sequence
atgtcttggaagatggccctccagattccaggaggattttgggcagcggctgtcacagttatgctggtcatgctgtccaccccggtagctgaggcgagagactttcctaaggactttctggttcagtttaaaggcatgtgttattttaccaacggcactgaacgggtacggggggtcgcccggtacatatacaatcgggaggagtatggcagattcgacagcgatgtgggcgaatttcaggccgtaaccgaacttgggcggtccattgaagattggaacaattacaaagacttcctggagcaggagagagccgccgtagataaagtgtgccggcacaattatgaagccgagttgagaaccaccctccaaagacaagtggagcccactgtcacaatctcaccaagccggacggaggccttgaatcaccataatctattagtttgctccgtgacagacttctacccagcgcaaatcaaggtgcagtggttcagaaacgaccaggaggagaccgcaggtgttgtcagcaccagtttaatccgcaacggcgattggactttccaaattctggtaatgctcgaaatcacccctcagcgaggcgacatctacacatgtcaagtagaacacccgtcactccagagccccataaccgtggaatggcggccacgaggtccaccgcctgcaggcctgctacattag

SEQ ID NO: 76367 - DNA, 696 bp, Artificial Sequence
  derived and/or modified sequence
atgtcttggaagatggccctccaaatacctggcggtttctgggccgccgcagtcactgtcatgctagttatgctctccactccagtagcggaggctcgggactttccgaaagacttcctggtccagttcaagggaatgtgctactttaccaatgggacagaacgcgtgaggggcgtggcccgctatatttacaaccgagaggagtacgggcgtttcgacagcgatgtgggagaattccaggccgtcacagagctgggacggtcaatcgaggactggaacaactacaaagactttctggaacaagagagagcagctgtagataaggtatgcagacataactatgaggctgaactgaggacaactctgcaaagacaggtggagcccaccgtcaccatctcaccaagccgcaccgaagctctaaatcaccataatctgctggtgtgttccgttactgacttttatcccgcgcagataaaagttcagtggtttagaaacgaccaggaagaaaccgccggggtagtgagcaccagcctcatccggaatggggattggacctttcaaatccttgtaatgcttgagatcacaccccagaggggcgatatctacacttgccaggtggagcacccctccttgcagagtcccatcaccgtggagtggagacccagaggccctcctcctgccgggctgctccattag

SEQ ID NO: 76368 - DNA, 684 bp, Artificial Sequence
  derived and/or modified sequence
atggctctgcaaatcccaggcggattttgggcagcggcagtgacagtgatgctggttatgctgagcacacctgtggccgaggctcgcgattttccgaaggacttcctcgtacagttcaaagggatgtgttactttacaaatggcactgaaagagtcaggggcgtggcccgctatatatacaatcgggaagagtatggaaggttcgactcagatgtgggcgagtttcaagccgtgacagagctgggccggtctattgaggattggaacaactataaagattttcttgaacaggaaagagcagccgtggataaggtgtgccggcacaattatgaagcggagctacgtacaactctgcagagacaggtagaacctacagtgaccatatctccttcgagaaccgaggctctcaaccaccataatctcctggtgtgtagcgttacagacttctatcccgcgcagattaaggtccgttggttcaggaacgatcaggaagagacagctggtgtggtgtccaccagcctcatcagaaatggcgattggacttttcaaatcctcgtgatgctcgaaattactcctcagagaggagatatttatacatgccaggtggaacacccttcactccaaagcccaatcacagtggaatggcgccctcgcggccctcccccggccggactgctacattag

SEQ ID NO: 76369 - DNA, 684 bp, Artificial Sequence
  derived and/or modified sequence
atggctctccagatacctggtggattctgggctgcagccgtcacagttatgctggttatgttaagcaccccagttgctgaagcaagggactttccaaaagactttctcgtccagttcaaaggcatgtgctactttacaaatggaaccgagagagttcgtggggttgctcgctatatctataacagagaagagtacggtagatttgacagtgatgtaggcgaatttcaggccgtaacagagctcggcaggagcatcgaggattggaacaactataaagatttccttgaacaggagcgcgcagccgtcgataaggtctgcaggcacaactatgaagcggaattgcgcacgacccttcagcgccaggtggagcccacggtcacaatcagtccttcacgcacagaggcgttaaatcaccataacctcttggtgtgttctgtgacagacttctatcctgctcagataaaggtaagatggtttaggaacgatcaggaagaaacagcgggtgtcgtcagcacatccctgatcagaaacggagattggaccttccaaatccttgtcatgctggaaatcacgccacagcgcggcgacatttacacatgtcaggtggagcaccctagcttgcagtctcccatcaccgtcgagtggaggcctcgggggccccctccagccggcctgctgcactag

SEQ ID NO: 76370 - DNA, 627 bp, Artificial Sequence
  derived and/or modified sequence
atgctgtctacccctgtagctgaggcccgggattttcctaaggactttctggtgcagtttaaaggcatgtgctattttaccaatgggactgagagggtccgcggggtagccagatatatctataacagggaagaatatggaaggttcgactctgacgtgggcgagttccaggctgtgaccgagctaggacgctcaatcgaggattggaataactataaagattttttggagcaggagcgcgccgccgtggacaaggtctgccgccataactacgaggctgaactccggactacccttcagcgacaagtggagcctactgttacaatcagcccgagccgtaccgaagccctgaatcaccacaatctgttagtgtgttccgttacagacttttatcccgcccagataaaagtgcaatggtttcgcaacgatcaagaggagacagccggcgtggtcagcacttcacttattagaaacggggattggacctttcagattctggtgatgctggagattacaccgcagcgcggcgacatatatacttgccaagttgaacaccccagcttacagtccccgattactgttgaatggcggcctaggggacctcccccagccggactgctgcactag

SEQ ID NO: 76371 - DNA, 627 bp, Artificial Sequence
  derived and/or modified sequence
atgttatctaccccagtggccgaagctcgggattttcccaaggatttcctggtgcagtttaaaggcatgtgctatttcaccaatgggaccgaacgggtgagaggagtggccaggtatatttataaccgggaggagtatggccggttcgatagtgacgtgggagagttccaggccgttactgagcttggtcgatcaatcgaagactggaacaactataaagactttttagaacaggagagggcagcagtggacaaggtgtgtcggcataattatgaagcagaacttaggactactctgcaacggcaagtggaaccaacagtcactatttctccgtcaaggacagaagcacttaatcatcacaatctcctcgtttgctctgtgaccgacttctaccctgctcagataaaagtgagatggttccggaatgatcaggaggaaaccgccggagttgtgtccacaagcctcattagaaacggcgattggacttttcagatcctggtaatgctcgagatcacaccacagcgtggcgatatttatacttgccaggtcgaacacccctcgttgcaatcccccatcacagtggagtggaggccccgcggcccacctccggccgggctgttgcactag

SEQ ID NO: 76372 - DNA, 627 bp, Artificial Sequence
  derived and/or modified sequence
atgctgtccacgcccgtagcagaggcccgcgattttcccaaagacttcctagtgcagtttaaggggatgtgctatttcacaaatggtacagagagagtccggggggtggctagatatatatacaaccgcgaggaatatggcaggtttgatagcgacgtcggcgagtttcaggccgttacggagctaggaaggagcattgaggattggaacaactacaaagacttcctggaacaggagagagcagccgtcgataaggtgtgccgacataactacgaggccgaattaaggactaccctgcagcgccaagtggagccgactgttaccatttctccatccagaaccgaagctctgaatcatcataatttgctcgtgtgctcagtgacagatttctatccagcacaaatcaaagtccagtggtttaggaatgatcaggaagaaacagcgggtgtggtgagcactagcttgatcagaaacggggactggactttccagatccttgtgatgcttgagatcacacctcagcgtggtgacatctacacatgccaggtagagcatccaagcctccagtcaccaattacagtggaatggcgtccccgagggcctcccccagctgggcttctgcactag

SEQ ID NO: 76373 - DNA, 627 bp, Artificial Sequence
  derived and/or modified sequence
atgctgtcaactcccgtggccgaggccagagattttcccaaggatttcctggtgcagttcaaaggtatgtgttactttactaacgggacggagcgggtaagaggggtggctagatatatttacaatcgtgaggaatatggaagattcgattcagatgttggtgagttccaggccgtgaccgagcttggccggtctatcgaagattggaacaattacaaagactttctcgagcaagagagagcggccgtcgataaagtctgccggcataactatgaggccgaactacgcactacactgcaacggcaggtggaacccaccgtgaccattagtccaagtcggacagaggcccttaatcaccacaatcttctggtttgttctgtgacggacttttatccagcccagatcaaggtgcagtggtttagaaatgaccaagaggagactgcgggagtggtgtcgacttctctcattaggaacggggattggacttttcagattctggtgatgctggaaatcactcctcaaagaggcgatatctatacctgtcaggtcgagcatccgtctctacagagcccaatcaccgtggagtggcgtccccggggacccccgcctgctggtctgcttcactag

SEQ ID NO: 76374 - DNA, 627 bp, Artificial Sequence
  derived and/or modified sequence
atgttgagtactcccgtggccgaggccagagacttccccaaggattttctggttcagtttaaggggatgtgttatttcacaaatggcacagagagggtgaggggcgtggccagatacatctataatcgggaggagtatggcagattcgactccgacgtgggcgagtttcaggctgttaccgagctcggtaggtcaattgaagactggaataactataaggacttccttgagcaggaaagggcggcggtggataaggtatgcaggcacaattatgaggccgagctgagaaccaccctgcagcggcaagttgagcccaccgtgacaatctcgcccagccgcacagaagcactcaatcatcacaatctattagtgtgctccgtaactgatttctaccctgcccagattaaggtgcggtggtttcggaacgaccaggaggagacagccggggtggtttcaactagtctgattaggaatggggactggacattccagatcctagtgatgctggagatcaccccccagcgaggggatatctacacctgtcaggtcgagcaccccagtttgcagtcgccgataacagtcgaatggaggccccgggggccaccccccgccggcctgctgcactag

SEQ ID NO: 76375 - DNA, 627 bp, Artificial Sequence
  derived and/or modified sequence
atgctgagcactcctgtcgccgaggccagagactttcctaaggacttcctggtccagttcaagggtatgtgttatttcaccaacggtacagaacgcgtccgaggcgttgcacgatacatttacaatagagaagagtacggcaggttcgacagtgacgtgggcgaattccaagccgtcaccgaactgggacggtctattgaggattggaacaattacaaagatttcctggaacaggagcgcgccgccgtggacaaggtctgcaggcacaattacgaagctgagctgaggacgaccctccagaggcaggtcgaacccacagtaacaattagcccctctaggaccgaggctcttaatcaccacaatttgctggtttgttcagtcactgatttctaccctgcccagattaaagtgcagtggtttcgcaacgatcaagaggagaccgcgggggtggtcagcacttctttaattcgcaacggtgattggacctttcaaatattagtcatgctggaaataacaccacagagaggcgatatctatacctgccaggtggagcacccatctctgcaatcacccatcaccgtcgaatggcgaccaaggggacccccgcccgccggcttgctgcactag

SEQ ID NO: 76376 - DNA, 627 bp, Artificial Sequence
  derived and/or modified sequence
atgctctccactccagtagctgaagctcgtgactttccaaaagattttttagtccaattcaagggaatgtgctatttcacaaacggtaccgaaagagtgcgcggagtggcccgctacatttacaaccgcgaggaatatggcaggttcgattcagacgtaggcgagttccaggcagtgaccgagttgggtcggtcaattgaagattggaataattacaaagattttttagaacaagagcgcgcagctgtcgataaggtgtgtagacacaactatgaggccgagcttaggaccaccttacagcggcaggtggagcctactgttacaatctccccatcaagaacggaagctctcaatcatcacaatctgctagtatgctccgttaccgacttttaccctgctcaaattaaagtgagatggtttcgtaacgaccaagaggaaacagctggtgtagtgagtacttcactaattcggaatggggattggacatttcaaattcttgttatgctggaaatcacgcctcagaggggtgacatatacacctgtcaagtcgagcatccatctttacagtcaccaattactgtcgaatggcggcctagaggccccccccccgcagggctgttgcactag

SEQ ID NO: 76377 - DNA, 696 bp, Artificial Sequence
  derived and/or modified sequence
atgtcctggaagatggccctgcagatccctgggggcttctgggccgctgctgtgacagtgatgctggtgatgctgagcacccctgtggccgaggcccgggacttccccaaggacttcctggtgcagttcaagggcatgtgctacttcaccaatggaacagagcgggtgcggggcgtggcccgctacatctacaaccgggaggagtatggccgctttgacagtgatgtgggggagttccaggccgtgacagagctgggccgcagcattgaggactggaacaactacaaggacttcctggagcaggagagagctgctgtggacaaggtgtgccgccacaactatgaggccgagctgcggaccaccctgcagaggcaggtggagcccaccgtgaccatcagccccagcaggacagaggccctgaaccaccacaacctgctggtgtgcagcgtgacagacttctacccagcccagatcaaggtgcagtggttcagaaatgaccaggaggagacagctggggtggtgtccaccagcctcatcagaaatggagactggaccttccagatcctggtgatgctggagatcaccccccagagaggagacatctacacctgccaggtggagcaccccagcctgcagagccccatcaccgtggagtggaggccccggggccccccacctgctggcctgctgcactag

SEQ ID NO: 76378 - DNA, 684 bp, Artificial Sequence
  derived and/or modified sequence
atggccctgcagatccctgggggcttctgggccgctgctgtgacagtgatgctggtgatgctgagcacccctgtggccgaggcccgggacttccccaaggacttcctggtgcagttcaagggcatgtgctacttcaccaatggaacagagcgggtgcggggcgtggcccgctacatctacaaccgggaggagtatggccgctttgacagtgatgtgggggagttccaggccgtgacagagctgggccgcagcattgaggactggaacaactacaaggacttcctggagcaggagagagctgctgtggacaaggtgtgccgccacaactatgaggccgagctgcggaccaccctgcagaggcaggtggagcccaccgtgaccatcagccccagcaggacagaggccctgaaccaccacaacctgctggtgtgcagcgtgacagacttctacccagcccagatcaaggtgcgctggttcagaaatgaccaggaggagacagctggggtggtgtccaccagcctcatcagaaatggagactggaccttccagatcctggtgatgctggagatcaccccccagagaggagacatctacacctgccaggtggagcaccccagcctgcagagccccatcaccgtggagtggaggccccggggccccccacctgctggcctgctgcactag

SEQ ID NO: 76379 - DNA, 627 bp, Artificial Sequence
  derived and/or modified sequence
atgctgagcacccctgtggccgaggcccgggacttccccaaggacttcctggtgcagttcaagggcatgtgctacttcaccaacggcacagagcgggtgcggggcgtggcccgctacatctacaaccgggaggagtatggccgctttgacagtgatgtgggggagttccaggccgtgacagagctgggccgcagcattgaggactggaacaactacaaggacttcctggagcaggagagagctgctgtggacaaggtgtgccgccacaactatgaagctgagctgcggaccaccctgcagaggcaggtggagcccaccgtgaccatcagccccagcaggacagaggccctgaaccaccacaacctgctggtgtgcagcgtgacagacttctacccagcccagatcaaggtgcagtggttcagaaatgaccaggaggagacagctggggtggtgtccaccagcctcatcagaaatggagactggaccttccagatcctggtgatgctggagatcaccccccagagaggagacatctacacctgccaggtggagcaccccagcctgcagagccccatcaccgtggagtggaggccccggggccccccacctgctggcctgctgcactag

SEQ ID NO: 76380 - DNA, 627 bp, Artificial Sequence
  derived and/or modified sequence
atgctgagcacccctgtggccgaggcccgggacttccccaaggacttcctggtgcagttcaagggcatgtgctacttcaccaacggcacagagcgggtgcggggcgtggcccgctacatctacaaccgggaggagtatggccgctttgacagtgatgtgggggagttccaggccgtgacagagctgggccgcagcattgaggactggaacaactacaaggacttcctggagcaggagagagctgctgtggacaaggtgtgccgccacaactatgaagctgagctgcggaccaccctgcagaggcaggtggagcccaccgtgaccatcagccccagcaggacagaggccctgaaccaccacaacctgctggtgtgcagcgtgacagacttctacccagcccagatcaaggtgcgctggttcagaaatgaccaggaggagacagctggggtggtgtccaccagcctcatcagaaatggagactggaccttccagatcctggtgatgctggagatcaccccccagagaggagacatctacacctgccaggtggagcaccccagcctgcagagccccatcaccgtggagtggaggccccggggccccccacctgctggcctgctgcactag

SEQ ID NO: 76381 - DNA, 696 bp, Artificial Sequence
  derived and/or modified sequence
atgagctggaagatggccctgcagatccccggcggcttctgggccgccgctgtaaccgttatgctggtaatgctgtctacccctgtggcagaggccagggatttcccaaaagatttccttgtgcagttcaagggcatgtgctactttacaaatggcaccgagagggttcgtggggttgcccgctacatttacaatagagaagaatacggccggtttgactccgatgtaggagagttccaggcagtcaccgaactgggacgctcaatcgaagattggaacaactacaaggattttctagaacaagagcgggctgcagttgataaagtgtgtagacacaattacgaggctgagctgcgaacaacactgcagcgccaggtggaacctaccgtgaccatctcccccagtcgtacagaggccctgaaccaccacaatctactggtttgctcagtcaccgatttctatccggcccaaattaaggttcagtggtttcggaacgaccaggaggagactgccggggttgtgagcaccagcctgatacgcaacggcgattggacattccaaattctcgtgatgctggagattacaccacagaggggggatatctatacatgccaagttgaacaccccagcctccagagcccaataactgtcgagtggaggccgaggggacccccccctgcggggcttttgcattag

SEQ ID NO: 76382 - DNA, 684 bp, Artificial Sequence
  derived and/or modified sequence
atggccctgcagatccccggcggcttctgggccgccgccgtgaccgtcatgctggtgatgttatctaccccagtggctgaggcaagggacttcccaaaggacttcctggtccaattcaaaggtatgtgctatttcaccaacggaacagagcgcgtccggggcgtggcacgctatatatataatagagaagaatacggtcgcttcgattcagacgtaggcgaattccaggccgttacggaattgggcagatccattgaggactggaataattataaggattttctcgaacaggaacgtgcagccgtagataaggtctgcaggcacaactacgaggccgagctgcgcacgacactccagcggcaagtcgaacctacggtcactataagccccagtagaactgaggcgctgaaccatcacaatctgttagtatgctccgtgacagatttttatccagcccagatcaaagtgcgctggtttcgtaacgatcaggaagagactgcaggagttgtctccaccagtcttatccgcaacggggactggactttccagatacttgtcatgcttgagatcacaccgcaacgtggcgacatttatacctgtcaagtggagcacccctctttgcaatctccaatcacagtggagtggagaccgaggggccccccccctgcaggcctgctgcactag

SEQ ID NO: 76383 - DNA, 696 bp, Artificial Sequence
  derived and/or modified sequence
atgagctggaagatggccctgcagatccccggcggcttctgggccgctgctgtaacagtgatgctggtaatgctctcaactcctgtggccgaggcacgcgattttccgaaggacttcctggtgcaattcaaggggatgtgctacttcactaacggtaccgagcgtgtccgcggtgtggcacggtatatctataacagagaggaatacggacggtttgactctgacgtgggtgaattccaagccgtcacggagctcggccgctccatcgaagactggaataactacaaggacttcctggaacaggagcgagccgctgtcgacaaggtgtgcagacataactatgaagctgagctgcggacaactcttcagcggcaggttgagcctaccgtgaccatctccccgagtaggaccgaggccctgaaccaccacaatctgctcgtctgtagtgtcacagacttttacccagcccagatcaaggtgcaatggtttcgcaatgaccaagaggagacggctggcgtagtttcaacaagtctcatccgcaatggtgactggacctttcaaattctagtgatgctggagatcactccccagcgcggggatatttacacctgccaggtggagcaccctagcctgcagtcccctatcacggtggagtggaggccccgaggacctcctcctgcaggccttttacactag

SEQ ID NO: 76384 - DNA, 684 bp, Artificial Sequence
  derived and/or modified sequence
atggccctgcagatccccggcggcttctgggccgccgccgtgaccgtgatgttggtgatgctgtctacaccagtggccgaagcccgagatttccctaaggacttcctcgtgcagttcaagggaatgtgttatttcactaacggcacagagcgagtgcggggcgtggcccgttacatatacaatagggaagagtacgggcgatttgattccgacgtgggcgaattccaggctgttaccgaactgggaaggagcatagaagattggaacaattataaggactttttagaacaagagagggccgctgtggataaagtgtgccgtcacaactatgaggccgaactgcggactactttgcagcgacaagtggagcctacagtcacaatctctcccagccggactgaggctctgaaccaccataacctcttggtctgctcggtgacagacttctatcccgcacaaatcaaagtgaggtggtttagaaatgaccaagaagagaccgctggcgtggttagcacaagcctcattaggaatggcgattggacctttcagatcctcgtcatgctggagataacaccccagagaggcgatatctacacatgccaggtcgaacatccctccctccagtctcctatcacggtggaatggagaccaagggggcccccaccagctggacttctccactag

SEQ ID NO: 76385 - DNA, 696 bp, Artificial Sequence
  derived and/or modified sequence
atgagctggaagatggccctgcagatccccggcggcttctgggccgctgctgttactgttatgttagtcatgttgtccaccccggtagcggaagcccgtgacttccccaaggattttttagtgcagttcaagggaatgtgttactttaccaatgggacagagcgcgttcgaggcgtggctagatatatatacaatagagaagagtacggcagatttgatagtgacgtgggcgaattccaggctgttacagagctgggtaggtctattgaggactggaataactacaaagattttctggaacaagagagggccgccgttgataaagtttgtcgccataattatgaagccgagctgcgtaccactctgcaacggcaggtggagcccacggtgaccatctccccatctcggacggaagctctgaaccaccataatttgctcgtatgcagtgtcacagacttttaccccgcacaaatcaaggtgcagtggttcaggaacgaccaggaggaaacagcaggcgtggtatccacttccctgattcgcaatggagactggacttttcagatactggtcatgctggagatcaccccacagagaggtgacatttacacgtgccaagtggaacatcccagtttacaatcccccatcaccgtcgaatggcgtccgagggggcctccgcccgctgggctccttcactag

SEQ ID NO: 76386 - DNA, 696 bp, Artificial Sequence
  derived and/or modified sequence
atgagctggaagatggccctgcagatccccggcggcttctgggccgctgccgtcaccgtcatgctcgtcatgttatcaacaccagttgctgaagcaagagattttcccaaggacttcctggtccagtttaagggcatgtgttacttcacaaatgggaccgaaagagtgcggggcgtggctagatacatctataaccgggaagagtatggccgttttgatagcgacgtgggggagtttcaggcagtgactgagctgggcagatccatcgaggattggaataactacaaggacttcctcgaacaggagagagctgccgttgacaaggtgtgtaggcataactatgaagcggagctccgcaccactttacaacggcaggtggaaccaaccgtgactatctctcccagtagaaccgaggcgctgaaccaccacaaccttctggtctgttctgtgacggacttctaccctgcccaaatcaaggttcagtggtttaggaatgaccaggaggagaccgccggcgtggtctccacgtccctgatccggaacggggattggacttttcaaattctggtcatgctggaaatcacgccccagagaggcgatatctatacttgtcaagtggagcatcctagcttgcagtcaccgattacagtggagtggcgtcctcgcggaccaccccccgccggcctgttgcactag

SEQ ID NO: 76387 - DNA, 684 bp, Artificial Sequence
  derived and/or modified sequence
atggccctgcagatccccggcggcttctgggccgccgccgtgaccgtgatgcttgttatgctttcaacaccagtggcagaggccagagactttcccaaggatttcctagttcaatttaaaggaatgtgctacttcaccaacggaacagaacgggtgaggggtgttgctaggtatatatacaatcgcgaagaatacggtcggtttgacagcgacgtcggagaatttcaggcggtgacagaacttggacgctctatagaggattggaataattacaaagacttcctggagcaggagagggcagcggtagataaggtctgtagacataattacgaggccgagctaaggaccactcttcagaggcaggtggagccaacagtgactatctcaccctcacgcacggaggcacttaaccatcacaatctgcttgtgtgtagtgtgactgacttctacccagctcaaataaaagtaagatggttccgtaacgaccaggaagaaaccgccggcgtggtgtccacaagtttgatcagaaatggagattggactttccagattctggtgatgctggagatcaccccacagagaggcgacatttatacttgccaggtggagcaccctagcctccagtctccgattactgtagagtggaggcctcgcggaccccccccagctggtctactgcactag

SEQ ID NO: 76388 - DNA, 684 bp, Artificial Sequence
  derived and/or modified sequence
atggccctgcagatccccggcggcttctgggccgccgccgtgaccgtgatgcttgtaatgctttctactccagtcgctgaagctcgcgatttccccaaagactttctggttcaatttaaaggcatgtgttatttcaccaacggcacagaacgggtgaggggcgtggcccgatacatctacaaccgcgaagaatacggccgattcgactccgatgtgggggagttccaggcggtgactgagctcggccgctcgatagaggactggaataactacaaggatttcttggaacaggagagagccgccgttgacaaggtgtgtagacacaactacgaggcggagctgaggacgactctgcagcgtcaggtggagccaaccgttacgatttccccaagccgcaccgaggctctcaaccatcataacctgctggtgtgttccgtcacagatttctaccctgcccaaatcaaggtgcgctggttccgaaatgaccaggaggagactgccggcgtcgtgtctacttctctcattaggaatggagactggacctttcagatcctcgtaatgctggaaatcacacctcaaaggggagatatctacacctgtcaggtggaacaccctagtctccagagtccgattacagttgagtggcgcccacgcggaccaccgcccgccgggctgctgcactag

SEQ ID NO: 76389 - DNA, 627 bp, Artificial Sequence
  derived and/or modified sequence
atgctgagcacccccgtggccgaggcccgggacttccccaaggacttcctggtgcagtttaagggcatgtgttactttaccaacggtaccgagagagtaaggggggtcgcacgatacatctacaacagggaggagtatggacgattcgactccgatgtgggagagttccaggctgtgacagaactggggaggtctatagaagattggaacaattacaaggattttctggagcaggaaagagccgccgtcgacaaagtgtgtcgacacaactacgaggcagagctgagaacaacactccagagacaggtggagcccacagtcaccatcagcccctcacggaccgaggctctcaaccaccacaacctgcttgtctgttcagtaaccgatttttaccccgcccagatcaaagtgcagtggtttcgcaatgaccaagaagaaacggccggcgtagtgagtacatctctcatacgtaacggggattggacatttcagatccttgtgatgctcgaaatcacacctcagcgaggcgacatttatacgtgccaggtcgaacatccctctttgcaaagccctatcacagtggagtggcgacctaggggaccacctccagcaggactgctccactag

SEQ ID NO: 76390 - DNA, 627 bp, Artificial Sequence
  derived and/or modified sequence
atgctgagcacccccgtggccgaggcccgggacttccccaaggacttcctcgtccaatttaaggggatgtgctattttacaaacggcacggaacgcgtccggggggtggccaggtacatatataaccgggaagagtatggtcggttcgattccgatgttggggaatttcaggcagtgactgagctgggccggtcaatcgaggattggaacaattataaggactttctagagcaggagcgggccgcagtggataaggtctgccgtcacaactatgaggccgagctgagaaccacacttcagaggcaggtggagcctactgttactatctccccgagccgcactgaggctttaaaccaccataatctgctcgtgtgttctgtcactgacttttaccctgctcagattaaggtccgttggttccgcaacgaccaggaggagaccgctggagtcgtttccacctcgctgataagaaacggagattggacttttcaaattctcgtcatgctcgaaatcacccctcaacggggcgatatatatacttgtcaagtcgaacaccctagtcttcagtcgcccattacagtggagtggaggcccagaggccccccacccgccggcctgcttcactag

SEQ ID NO: 76391 - DNA, 627 bp, Artificial Sequence
  derived and/or modified sequence
atgctgagcacccccgtggccgaggcccgggacttccccaaggactttctcgtgcagttcaaagggatgtgctatttcacaaacggcaccgagcgggtgcgcggtgtcgctcgctacatttacaaccgcgaggaatacggtagatttgactcggatgtcggagaatttcaagccgtgaccgagcttgggcgaagcatcgaagattggaataactataaagactttttagaacaggagcgcgcggcagtggataaggtttgcagacacaattatgaggctgagcttagaaccactctacagcgacaggtcgagccaacagttactattagtccaagtcggacagaagccttaaatcaccacaacctgctggtgtgtagtgtgacagatttttaccctgctcagattaaggtacagtggtttaggaacgaccaagaagagaccgccggggttgtctccacctcactaattcggaatggagattggacgtttcagatcctggtgatgctcgagattactccccaacgcggagacatctacacctgccaagtggaacacccaagccttcagagcccgattacagtggaatggaggcctcgcggtccacctcccgcggggctactgcattag

SEQ ID NO: 76392 - DNA, 627 bp, Artificial Sequence
  derived and/or modified sequence
atgctgagcacccccgtggccgaggcccgggacttccccaaggactttctcgtacagtttaagggcatgtgttatttcacgaacggtacagaaagagtgcgtggcgtagctcgatatatatacaatcgagaagagtatggacgctttgattccgacgtcggggagtttcaggccgtcacggaactgggacggtccatcgaggattggaacaactataaggacttcctggagcaagaaagagcggcagtggataaagtttgtcggcacaactatgaggccgaattgagaactacccttcagaggcaggtggagcctacagtgacaatttcaccttcccgcactgaggcactgaaccaccataatcttctggtttgctccgtgaccgatttctatcctgctcaaatcaaagtccagtggttccggaacgatcaggaagaaaccgctggggtggtgtctacctcactgatacgcaatggagactggacatttcagatcctcgtgatgctggaaatcaccccccagaggggcgatatctatacgtgtcaggtcgaacatccaagcctccagtcgccaataacagtcgagtggcggcctcgcggacctccgccagcgggccttcttcattag

SEQ ID NO: 76393 - DNA, 627 bp, Artificial Sequence
  derived and/or modified sequence
atgctgagcacccccgtggccgaggcccgggacttccccaaggactttctggtacagttcaaaggaatgtgctatttcacaaacggaacggagagggtgcgtggggtggctaggtacatctacaatcgtgaagagtacgggcggtttgacagcgacgtcggcgagtttcaggcagtgacggagcttggtcgctccattgaagactggaacaattacaaggacttccttgaacaggagagagctgccgtggataaggtctgtcgtcacaattatgaggctgagttgcgcaccaccctccagcgccaagtcgaacctaccgtgactataagcccgtccaggaccgaggccctgaatcatcacaacttgctggtctgcagtgtgactgatttttatccggctcagattaaggtcaggtggttcagaaatgaccaggaagaaacagcaggggtggttagcaccagtctgattcggaacggggattggacatttcaaattctcgtgatgttagagattaccccccaacgcggcgacatatatacatgccaggtcgaacacccaagcctacagtctcctattacagtggagtggaggcctaggggacctccccctgctgggctccttcactag

SEQ ID NO: 76394 - DNA, 627 bp, Artificial Sequence
  derived and/or modified sequence
atgctgagcacccccgtggccgaggcccgggacttccccaaggacttcctcgtccagttcaagggcatgtgttatttcacgaacggcactgagcgagttagaggggttgccaggtatatatacaatcgagaggaatatggcagattcgattcagacgtcggcgaattccaggcagtgaccgaactgggaagaagcatcgaggattggaataattataaagactttctggagcaagagcgtgcagccgtggacaaggtttgtagacacaattacgaagccgaactgagaaccacacttcagaggcaggttgagcccacagtcacaatctcacccagtaggacagaagccctgaatcatcacaacctgttagtgtgctctgtgaccgatttctatccagcacagatcaaggtccagtggttccgtaatgatcaagaggagactgccggggtggtgtctacctcccttattagaaatggggactggacttttcagattctggttatgctcgaaatcaccccccagcgcggagacatatatacatgccaagtcgagcacccctcactccagagccctattactgttgagtggcggccccgagggcctcctcctgcaggactccttcattag

SEQ ID NO: 76395 - DNA, 627 bp, Artificial Sequence
  derived and/or modified sequence
atgctgagcacccccgtggccgaggcccgggacttccccaaggactttctggtgcaattcaagggtatgtgttatttcaccaatgggacagagcgagttcgaggagtggcaagatacatctacaatagggaggagtatggccggttcgattccgatgtaggagaattccaggcggttacagaacttggaaggtccatcgaggattggaataactacaaagatttcctggaacaagagcgtgcagcagtcgacaaggtgtgccggcataactacgaggctgaattgcgaactacccttcagaggcaggtggaaccgacggttacaatttcccccagtcggacggaggccctcaatcatcataacctgctggtgtgctccgtaactgacttttatcccgctcaaattaaggtaagatggtttcgaaatgaccaggaagaaacggcaggcgtggtctcgaccagcctgatcagaaatggagactggacattccagatcctcgtgatgttagagatcaccccccagcgcggagatatctatacatgtcaagtggaacatccttcattgcagagcccaattacagtggagtggaggccgcggggtccccctcctgcagggttgctccactag

SEQ ID NO: 76396 - DNA, 696 bp, Artificial Sequence
  derived and/or modified sequence
atgagctggaaaatggcgcttcagatcccaggcggtttttgggcagcagctgtcactgtcatgttagtcatgctctctacccccgtggctgaagcccgagacttccctaaagattttttagtccagttcaaaggaatgtgctactttaccaacggtacagaacgtgtgagaggggtagctagatacatctacaatcgcgaagaatacggcaggtttgattcagacgttggcgagttccaggcagtgaccgagctgggccgttctattgaggattggaataactataaggactttcttgagcaggagagggctgcggtggacaaggtctgccggcataattacgaggccgagctgcggactaccctgcaaaggcaggtggaacctacagtcaccatttcaccctcaagaaccgaagctctcaaccaccataacctcttggtgtgtagtgttacagacttctaccccgcacagatcaaagttcagtggttcaggaacgaccaagaagaaaccgcaggggtggtcagcaccagtttaatccgcaacggggactggacatttcagatccttgttatgttagagatcaccccgcagaggggggatatctatacttgccaagtggagcaccctagcttgcagagcccaattacagttgagtggaggccacggggtccccctcctgctggcttattacactag

SEQ ID NO: 76397 - DNA, 684 bp, Artificial Sequence
  derived and/or modified sequence
atggcattgcagatccccggaggattctgggcagctgcagtcactgtcatgctcgtcatgctctctactcctgtggcagaggcaagggactttccaaaggattttttggttcagtttaagggcatgtgctactttacgaacggaactgaaagagtgaggggcgttgcccgttacatttataacagggaagagtacggcaggtttgattctgatgtcggagagttccaagccgtaaccgagttgggtcgctccattgaggattggaataactacaaagattttctggaacaagagcgggctgccgttgataaggtgtgcagacacaactatgaagcggagctgcgaacaaccctccagcgccaggtcgagcctacggttactatcagtccgtccagaactgaggccctgaaccatcacaacttattggtgtgttcagtaacagacttctatcctgcacagataaaagtgaggtggttccgcaatgaccaggaggaaacagcaggtgtcgtgagcaccagtcttatcagaaatggcgactggactttccaaattctggtgatgctcgagatcacacctcagagaggtgatatctatacatgccaggtagagcacccgagtctccagagtcccattacagttgagtggcggcctcggggaccaccgccagctggccttttgcattag

SEQ ID NO: 76398 - DNA, 696 bp, Artificial Sequence
  derived and/or modified sequence
atgtcatggaaaatggccctgcagattcctggcggtttttgggcagctgcggtgactgtcatgttggtgatgcttagcacgccagtggcagaagctcgcgatttccctaaagatttcctggtacagtttaaggggatgtgctactttacgaatgggacggagagggtaagaggggtggctcgctacatttacaatcgagaagagtacggaagattcgactcagatgtgggagagtttcaagcagtaactgaactgggcaggtcgatcgaagactggaataactacaaggattttctcgagcaggaacgcgctgctgtggacaaagtgtgtcggcataactacgaggctgagctgaggacgacactgcagcgacaggtggagccaaccgtgaccatcagccccagccggacagaagccctgaatcaccacaaccttcttgtgtgtagcgtgactgatttctacccagcgcaaattaaggttcaatggttcaggaacgaccaagaggagacagccggagtcgtgtctaccagtttgatcagaaatggagactggactttccaaatcctggtgatgctggaaataacccctcagcgaggtgatatatacacttgtcaggtcgagcatccttctctccagagccctatcaccgtggagtggaggccaagaggccctcctccagcaggtctgctccattag

SEQ ID NO: 76399 - DNA, 684 bp, Artificial Sequence
  derived and/or modified sequence
atggctctgcagattcccggtggattctgggcagcagcggtgacagtgatgctggtgatgttgtccacacccgtcgctgaggcgagagatttcccaaaggactttctggtccagttcaagggtatgtgctatttcacgaatggaactgagagggtgcggggtgtggccaggtacatctataaccgggaggagtacggtaggtttgactcggacgttggcgagtttcaggccgtgaccgagctgggcagaagcatcgaggattggaataattacaaagattttttagagcaagaaagggcagccgttgacaaagtttgcagacacaactatgaagccgaattaagaactaccttgcagaggcaggtggaacctaccgtgaccatctccccttcacggaccgaggcactcaatcatcacaatctgctagtgtgtagtgtcactgatttctacccagcgcagatcaaagtgaggtggtttagaaacgatcaggaggagaccgccggagtcgtgtccacctccctcatcaggaatggtgactggactttccagatcttagtaatgctggaaatcaccccccagcgcggagacatctatacttgccaagtcgaacatcccagtctgcagtcacccattacggtagaatggagaccacgcggtcctccaccagctggcctgctccattag

SEQ ID NO: 76400 - DNA, 696 bp, Artificial Sequence
  derived and/or modified sequence
atgtcatggaagatggcactgcagatccctgggggattttgggcggcagctgtaacggtcatgctggtgatgctcagcacacctgtcgctgaggccagagatttccctaaagacttcctggtgcaattcaaaggcatgtgttacttcactaatggcacagaacgcgttcgcggagttgctcggtatatctataaccgagaagagtacggtcgattcgattccgacgtaggtgaattccaggcggtgactgaactgggtcggtccatcgaggattggaataactacaaggacttcctggaacaagaaagggcagctgtggacaaggtgtgcaggcacaattacgaggccgagctgaggactacactgcagagacaggtggagccaactgtgacgattagtccctctaggaccgaggcgctcaaccaccacaaccttctcgtctgctccgtgacggatttttatcctgcgcagataaaggtgcagtggttccggaacgatcaggaggagaccgctggggtggtttccacaagtctgatacggaacggggattggaccttccaaatactcgtgatgctcgagattacaccgcagcgcggagacatctacacttgccaggtggagcacccctcgctgcagagcccaatcacggtggagtggcgacctcggggtccaccaccagctggtttacttcactag

SEQ ID NO: 76401 - DNA, 696 bp, Artificial Sequence
  derived and/or modified sequence
atgtcgtggaagatggctctgcaaatcccgggtgggttctgggcagcagctgtgacagtaatgctggtgatgctttccacccctgtagcagaggctagggattttccaaaggattttttagtacaattcaaaggaatgtgctatttcactaatggaactgaaagggtgcgcggagtcgcacggtacatctataatagagaggagtatgggcgttttgacagtgatgtgggggaattccaggcggttacagaactgggaaggtcgatcgaagactggaataattataaggatttcctggaacaggagagggctgcagtagataaggtgtgccggcataattacgaggcagagttaaggactaccttgcagcgccaggtggagccgacagtcaccatcagccccagtaggactgaagccttgaatcatcacaacctacttgtatgttctgtcacagacttttatcccgctcagattaaagtacaatggtttagaaatgaccaagaggaaactgcaggagtggtatctaccagcctcattcgcaacggggactggacattccagatcttggttatgctagagatcaccccccaacggggagatatctacacctgccaggtggagcaccccagtctccagagccctatcacggtcgaatggaggccccgtggtcccccacctgccggtctcctccactag

SEQ ID NO: 76402 - DNA, 684 bp, Artificial Sequence
  derived and/or modified sequence
atggcactacagattccagggggattttgggcggctgccgtgactgtaatgctcgttatgttgtctaccccggtcgccgaggcacgggatttccccaaggattttcttgtgcaattcaaggggatgtgttacttcacaaatggtacagaaagggtacgaggcgttgccagatatatctataaccgggaggagtatggtaggttcgacagcgacgtcggagagttccaggccgtgacagagctgggcagatctatcgaggactggaacaactataaagactttctggagcaagaaagagctgccgtggacaaagtttgccgccataactacgaagcagaattacggactaccttacagcgccaggtcgaaccgactgtgaccatctccccctcccgcaccgaggctctaaaccatcataacctgctcgtatgctctgtaacggatttttatcccgctcagataaaagtgaggtggtttcgcaacgaccaggaggagacagccggagtcgtgtccacatctctcatacgcaacggagattggactttccagattctggtaatgctcgagattacaccacagcggggtgatatttatacttgccaggtggaacacccttcgctccagagccctatcacagtggagtggcggcctcgtggacctccacccgcaggcctgttacactag

SEQ ID NO: 76403 - DNA, 684 bp, Artificial Sequence
  derived and/or modified sequence
atggcactccagattcctggtggcttctgggccgctgcggtcacagtgatgctggtgatgctgtccacccctgtcgcggaggcacgggacttccctaaagatttcctagtgcaattcaagggaatgtgctacttcaccaatgggacagagcgagtcaggggagtggctcggtacatctataacagagaagagtacgggagatttgatagcgatgtgggggagtttcaggctgtcacagaactcggtcgctccatcgaggattggaacaattacaaagatttcttggaacaagagagagccgctgtggataaagtttgccggcacaactatgaggcagagctcagaaccacattgcagcggcaggtggagcccacagtgacaatctcacctagtcggactgaggcgctgaatcaccataatctgctcgtctgcagcgtgactgatttctaccccgcacaaattaaagtgaggtggtttcggaatgaccaggaggagacagccggagtcgtttccacaagtctgatcagaaacggagactggaccttccagattctggtgatgctggaaattacaccacaacggggagatatctacacgtgtcaggtggaacacccttcactgcagagccccataacggttgaatggaggcccagaggaccacctccagcaggcctactccattag

SEQ ID NO: 76404 - DNA, 627 bp, Artificial Sequence
  derived and/or modified sequence
atgctatccactcctgtagctgaagcaagggactttcctaaagattttcttgttcaatttaaaggtatgtgctactttaccaatggaacggagagggtgcggggagtggcgaggtatatatacaatcgcgaggagtacggacgctttgactctgacgtcggagagttccaagccgtgacggaacttggaaggagcattgaggactggaacaattacaaagactttctagaacaggagagggcagcagtggataaggtgtgcagacataattacgaagctgaattgcggaccacgctgcagcggcaagtcgagcccaccgtcaccatcagcccatctcgcaccgaggcgcttaaccaccacaatctgctggtatgcagcgtgactgacttctaccccgcacagataaaagtgcagtggttccggaatgaccaggaagagaccgcgggtgtcgtgtcgacatcccttattcgcaacggggattggacctttcaaatcttagttatgttagagattacgcctcagaggggtgatatctacacctgccaagtggagcatccttccttacagtcacccatcaccgtggagtggcgccctcggggtccgcctcctgctggcctgctgcattag

SEQ ID NO: 76405 - DNA, 627 bp, Artificial Sequence
  derived and/or modified sequence
atgctgagtacccccgtagcagaggcaagggacttcccaaaggattttttggtgcagttcaagggcatgtgttactttaccaacggcaccgagagagtgcgcggtgtagctaggtatatttataatcgcgaggagtatgggcgtttcgatagcgacgttggggaattccaggcggtgactgaactgggccgttccatagaggactggaacaattacaaggatttcttggagcaggagagggccgctgtggacaaggtgtgtcggcataactatgaagccgagttgaggaccaccctgcagcgccaggttgagcccactgtaacgatttctcctagtagaacggaagctctgaatcatcacaatctgttggtatgctctgttaccgatttttaccctgcccagataaaggtaaggtggttcagaaatgaccaagaagaaactgccggtgtggtttcgacatctctaatacgaaacggtgattggaccttccagatcctggtgatgttagagattacaccccagcgaggcgacatctacacttgccaggtcgagcacccgtctctgcagagtccgatcaccgtggagtggagacccaggggaccccctcctgctgggcttttgcactag

SEQ ID NO: 76406 - DNA, 627 bp, Artificial Sequence
  derived and/or modified sequence
atgctatctacccctgttgctgaagctagggatttccctaaggatttcctggtccaatttaaggggatgtgctacttcacaaacgggactgagagagtccgaggcgtcgcccgttacatctataaccgcgaggaatatgggcgttttgactctgacgtgggcgagtttcaggcagtcaccgagttgggacgctccatcgaggactggaacaattataaggactttctggagcaggagcgggctgcagtggataaagtgtgccgccataactacgaggctgaattgaggaccactcttcagcggcaggtggagcccacagtcactatctctccctcaaggacagaagcactgaaccatcacaatctccttgtctgctctgtgacggatttctatcccgcacagatcaaagtccagtggtttaggaatgatcaggaagaaacagctggggtggtaagcacgtccttgatcagaaatggtgactggacctttcagatcctggttatgctggaaattaccccccagagaggggatatctatacctgccaggtggaacacccaagtctgcagtcaccaataaccgtcgaatggcggcctaggggtcctccacccgcaggcttgcttcactag

SEQ ID NO: 76407 - DNA, 627 bp, Artificial Sequence
  derived and/or modified sequence
atgctgtcaactcctgtggcggaagccagagactttccaaaagacttcctggtgcagttcaagggaatgtgttactttacaaacggcacggaacgggtgagaggcgtggccagatacatctataacagggaggagtatggaagatttgattccgacgttggagagtttcaggccgtgactgagctagggaggagtatcgaggactggaataactacaaagacttcctcgagcaggagagagccgctgtggacaaggtatgccgacataactatgaggccgaattgcgaaccacccttcagcgccaggtcgaacccacagtcacaataagcccatccaggacagaggccctaaatcaccacaacctgctcgtgtgtagcgtgacagacttttatcccgcacaaataaaggtgcagtggtttaggaacgatcaggaggagactgcgggagttgtgtctactagtctgatccggaatggggattggaccttccagatcctggttatgttagagatcacaccgcaacgcggtgacatctacacctgtcaggttgagcacccatccttgcagagtcctataaccgtggaatggcggccaaggggtcccccaccagctggacttctccattag

SEQ ID NO: 76408 - DNA, 627 bp, Artificial Sequence
  derived and/or modified sequence
atgctcagtactccagtcgcggaagctagggacttcccaaaagattttctggtccagtttaagggaatgtgctatttcactaatggcacagagcgggtccgcggagtcgctaggtatatttataaccgagaagagtacggaagatttgactcagacgtcggcgagttccaggccgtaaccgaactgggaagaagtattgaagactggaacaactacaaggactttttagagcaagagcgggctgccgttgacaaggtctgccgccacaactatgaagcggagttacgaacaaccctgcagcgccaggtcgagcctaccgtgaccatcagtcccagccgcactgaggctctgaatcaccacaacctgctggtttgctccgtgaccgacttctatccagcacagattaaagttcgctggttccgaaacgatcaggaggaaacagccggagtggtcagtacttcgctaattcgcaacggcgactggacctttcagatcctcgtcatgctcgaaatcacacctcagcgcggagacatctatacctgccaggttgagcatccttctctgcagtcgcctatcaccgtggagtggcgccctcgcggtcctcccccagccggtttgctgcactag

SEQ ID NO: 76409 - DNA, 627 bp, Artificial Sequence
  derived and/or modified sequence
atgctgagcacgccggtcgcagaagccagagatttccccaaagattttctggttcagttcaaaggaatgtgttatttcaccaacggcacggagcgggttcgcggagtggcacgttatatatataatagggaggaatacggcaggtttgacagtgacgttggtgaatttcaagctgtgaccgagctgggacggagcattgaagattggaataactataaggacttcctggagcaagagcgcgctgccgtggataaggtgtgtcggcacaactatgaagcagagcttcgaaccacgctacagcggcaggtcgaacctaccgtgaccatatcaccatcccggacggaagccctgaatcatcataatctactggtgtgctctgttactgacttctaccctgcacagatcaaagtgcagtggttcaggaatgatcaagaggaaaccgcaggagtcgtgtctacatcactgatacgaaacggcgactggacatttcaaatcttggtgatgctagagattacaccacagaggggcgacatttacacgtgtcaggtggaacacccatcactgcaatcccccataacggtggagtggcgccctcgcggtccccctcccgctggccttctccattag

SEQ ID NO: 76410 - DNA, 627 bp, Artificial Sequence
  derived and/or modified sequence
atgctctccaccccagtggccgaagccagagattttcctaaggacttcctagtccagtttaagggcatgtgctacttcacaaatggcacagaaagagtgcgcggagtcgccagatacatctataatagggaggaatatggccgtttcgactctgacgtgggagaattccaggccgttaccgagcttggccgatcgatcgaagactggaacaattacaaggacttcctggaacaggagcgggcagccgtggataaggtgtgtaggcacaattacgaggccgaactcaggacaactctgcagaggcaggtggagcccaccgtaacaataagtccgtcaaggaccgaggctctgaaccaccacaacttgctggtgtgcagcgtgacagatttttacccggctcaaatcaaggtgcggtggtttcggaatgatcaggaagaaaccgctggagtcgtgagcaccagcttaatccgcaacggcgattggacattccagattctggtcatgctggaaatcaccccgcagagaggggatatctatacttgccaagtggagcacccttccctacagagccctattacagtagaatggcgccctcggggaccccctccggctggccttcttcactag

SEQ ID NO: 76411 - protein, 231 aa, Artificial Sequence
  derived and/or modified sequence
MAHCVTLVQLSISCDHLIDKDIGSKSDPLCVLLQDVGGGSWAELGRTERVRNCSSPEFSKTLQLEYRFETVQKLRFGIYDIDNKTPELRDDDFLGGAECSLGQIVSSQVLTLPLMLKPGKPAGRGTITVSAQELKDNRVVTMEVEARNLDKKDFLGKSDPFLEFFRQGDGKWHLVYRSEVIKNNLNPTWKRFSVPVQHFCGGNPSTPIQVQCSDYDSDGSHDLIGTFHTSL

SEQ ID NO: 76412 - protein, 174 aa, Artificial Sequence
  derived and/or modified sequence
MAHCVTLVQLSISCDHLIDKDIGSKSDPLCVLLQDVGGGSWAELGRTERVRNCSSPEFSKTLQLEYRFETVQKLRFGIYDIDNKTPELRDDDFLGGAECSLGQIVSSQVLTLPLMLKPGKPAGRGTITVSAQELKDNRVVTMEVEARNLDKKDFLGKSDPFLEFFRQGDGKWHL

SEQ ID NO: 76413 - DNA, 915 bp, Artificial Sequence
  derived and/or modified sequence
atggcccactgcgtgaccctggtgcagctgagcatcagctgcgaccacctgatcgacaaggacatcggcagcaagagcgaccccctgtgcgtgctgctgcaggacgtgggcggcggcagctgggccgagctgggcagaaccgagagagtgagaaactgcagcagccccgagttcagcaagaccctgcagctggagtacagattcgagaccgtgcagaagctgagattcggcatctacgacatcgacaacaagacccccgagctgagagacgacgacttcctgggcggcgccgagtgcagcctgggccagatcgtgagcagccaggtgctgaccctgcccctgatgctgaagcccggcaagcccgccggcagaggcaccatcaccgtgagcgcccaggagctgaaggacaacagagtggtgaccatggaggtggaggccagaaacctggacaagaaggacttcctgggcaagagcgaccccttcctggagttcttcagacagggcgacggcaagtggcacctggtgtacagaagcgaggtgatcaagaacaacctgaaccccacctggaagagattcagcgtgcccgtgcagcacttctgcggcggcaaccccagcacccccatccaggtgcagtgcagcgactacgacagcgacggcagccacgacctgatcggcaccttccacaccagcctggcccagctgcaggccgtgcccgccgagttcgagtgcatccaccccgagaagcagcagaagaagaagagctacaagaacagcggcaccatcagagtgaagatctgcagagtggagaccgagtacagcttcctggactacgtgatgggcggctgccagatcaacttcaccgtgggcgtggacttcaccggcagcaacggcgaccccagcagccccgacagctag

SEQ ID NO: 76414 - DNA, 411 bp, Artificial Sequence
  derived and/or modified sequence
atggcccactgcgtgaccctggtgcagctgagcatcagctgcgaccacctgatcgacaaggacatcggcagcaagagcgaccccctgtgcgtgctgctgcaggacgtgggcggcggcagctgggccgagctgggcagaaccgagagagtgagaaactgcagcagccccgagttcagcaagaccctgcagctggagtacagattcgagaccgtgcagaagctgagattcggcatctacgacatcgacaacaagacccccgagctgagagacgacgacttcctgggcggcgccgagtgcagcctgggccagatcgtgagcagccaggtgctgaccctgcccctgatgctgaagcccggcaagcccgccggcagaggcaccatcaccgtgagcgcccaggagctgaaggactag

SEQ ID NO: 76415 - DNA, 630 bp, Artificial Sequence
  derived and/or modified sequence
atggcccactgcgtgaccctggtgcagctgagcatcagctgcgaccacctgatcgacaaggacatcggcagcaagagcgaccccctgtgcgtgctgctgcaggacgtgggcggcggcagctgggccgagctgggcagaaccgagagagtgagaaactgcagcagccccgagttcagcaagaccctgcagctggagtacagattcgagaccgtgcagaagctgagattcggcatctacgacatcgacaacaagacccccgagctgagagacgacgacttcctgggcggcgccgagtgcagcctgggccagatcgtgagcagccaggtgctgaccctgcccctgatgctgaagcccggcaagcccgccggcagaggcaccatcaccgtgagcgcccaggagctgaaggacaacagagtggtgaccatggaggtggaggccagaaacctggacaagaaggacttcctgggcaagagcgaccccttcctggagttcttcagacagggcgacggcaagtggcacctggtgtacagaagcgaggtgatcaagaacaacctgaaccccacctggaagagattcagcgtgcccgtgcagcacttctgcggcggcaaccccagcacccccatccagtag

SEQ ID NO: 76416 - DNA, 609 bp, Artificial Sequence
  derived and/or modified sequence
atggcccactgcgtgaccctggtgcagctgagcatcagctgcgaccacctgatcgacaaggacatcggcagcaagagcgaccccctgtgcgtgctgctgcaggacgtgggcggcggcagctgggccgagctgggcagaaccgagagagtgagaaactgcagcagccccgagttcagcaagaccctgcagctggagtacagattcgagaccgtgcagaagctgagattcggcatctacgacatcgacaacaagacccccgagctgagagacgacgacttcctgggcggcgccgagtgcagcctgggccagatcgtgagcagccaggtgctgaccctgcccctgatgctgaagcccggcaagcccgccggcagaggcaccatcaccgtgagcgcccaggagctgaaggacaacagagtggtgaccatggaggtggaggccagaaacctggacaagaaggacttcctgggcaagagcgaccccttcctggagttcttcagacagggcgacggcaagtggcacctggtgtacagaagcgaggtgatcaagaacaacctgaaccccacctggaagagattcagcgtgcccgtgcagcacttctgcggcggctag

SEQ ID NO: 76417 - DNA, 204 bp, Artificial Sequence
  derived and/or modified sequence
atggcccactgcgtgaccctggtgcagctgagcatcagctgcgaccacctgatcgacaaggacatcggcagcaagagcgaccccctgtgcgtgctgctgcaggacgtgggcggcggcagctgggccgagctgggcagaaccgagagagtgagaaactgcagcagccccgagttcagcaagaccctgcagctggagtacagatag

SEQ ID NO: 76418 - DNA, 459 bp, Artificial Sequence
  derived and/or modified sequence
atggcccactgcgtgaccctggtgcagctgagcatcagctgcgaccacctgatcgacaaggacatcggcagcaagagcgaccccctgtgcgtgctgctgcaggacgtgggcggcggcagctgggccgagctgggcagaaccgagagagtgagaaactgcagcagccccgagttcagcaagaccctgcagctggagtacagattcgagaccgtgcagaagctgagattcggcatctacgacatcgacaacaagacccccgagctgagagacgacgacttcctgggcggcgccgagtgcagcctgggccagatcgtgagcagccaggtgctgaccctgcccctgatgctgaagcccggcaagcccgccggcagaggcaccatcaccgtgagcgcccaggagctgaaggacaacagagtggtgaccatggaggtggaggccagaaacctggacaagaagtag

SEQ ID NO: 76419 - DNA, 696 bp, Artificial Sequence
  derived and/or modified sequence
atggcccactgcgtgaccctggtgcagctgagcatcagctgcgaccacctgatcgacaaggacatcggcagcaagagcgaccccctgtgcgtgctgctgcaggacgtgggcggcggcagctgggccgagctgggcagaaccgagagagtgagaaactgcagcagccccgagttcagcaagaccctgcagctggagtacagattcgagaccgtgcagaagctgagattcggcatctacgacatcgacaacaagacccccgagctgagagacgacgacttcctgggcggcgccgagtgcagcctgggccagatcgtgagcagccaggtgctgaccctgcccctgatgctgaagcccggcaagcccgccggcagaggcaccatcaccgtgagcgcccaggagctgaaggacaacagagtggtgaccatggaggtggaggccagaaacctggacaagaaggacttcctgggcaagagcgaccccttcctggagttcttcagacagggcgacggcaagtggcacctggtgtacagaagcgaggtgatcaagaacaacctgaaccccacctggaagagattcagcgtgcccgtgcagcacttctgcggcggcaaccccagcacccccatccaggtgcagtgcagcgactacgacagcgacggcagccacgacctgatcggcaccttccacaccagcctgtag

SEQ ID NO: 76420 - DNA, 525 bp, Artificial Sequence
  derived and/or modified sequence
atggcccactgcgtgaccctggtgcagctgagcatcagctgcgaccacctgatcgacaaggacatcggcagcaagagcgaccccctgtgcgtgctgctgcaggacgtgggcggcggcagctgggccgagctgggcagaaccgagagagtgagaaactgcagcagccccgagttcagcaagaccctgcagctggagtacagattcgagaccgtgcagaagctgagattcggcatctacgacatcgacaacaagacccccgagctgagagacgacgacttcctgggcggcgccgagtgcagcctgggccagatcgtgagcagccaggtgctgaccctgcccctgatgctgaagcccggcaagcccgccggcagaggcaccatcaccgtgagcgcccaggagctgaaggacaacagagtggtgaccatggaggtggaggccagaaacctggacaagaaggacttcctgggcaagagcgaccccttcctggagttcttcagacagggcgacggcaagtggcacctgtag

SEQ ID NO: 76421 - DNA, 1070 bp, Artificial Sequence
  derived and/or modified sequence
gagcgggccgacggccattttgtgaagcggcgaaggaggtggtggctgcgttgggctccgggaagccgttcgggctggggctgtcggccgcggggcggaggcactcgcgcggggggtaattcggggtctgggttctggtgccgcgcagctttccccgatggcccactgcgtgaccttggttcagctgtccatttcctgtgaccatctcattgacaaggacatcggctccaagtctgacccactctgcgtccttttacaggatgtgggagggggcagctgggctgagcttggccggactgaacgggtgcggaactgctcaagccctgagttctccaagactctacagcttgagtaccgctttgagacagtccagaagctacgctttggaatctatgacatagacaacaagacgccagagctgagggatgatgacttcctagggggtgctgagtgttccctaggacagattgtgtccagccaggtactgactctccccttgatgctgaagcctggaaaacctgctgggcgggggaccatcacggtctcagctcaggaattaaaggacaatcgtgtagtaaccatggaggtagaggccagaaacctagataagaaggacttcctgggaaaatcagatccatttctggagttcttccgccagggtgatgggaaatggcacctggtgtacagatctgaggtcatcaagaacaacctgaaccctacatggaagcgtttctcagtccccgttcagcatttctgtggtgggaaccccagcacacccatccaggtgcaatgctccgattatgacagtgacgggtcacatgatctcatcggtaccttccacaccagcttggcccagctgcaggcagtcccggctgagtttgaatgcatccaccctgagaagcagcagaaaaagaaaagctacaagaactctggaactatccgtgtcaagatttgtcgggtagaaacagagtactcctttctggactatgtgatgggaggctgtcagatcaacttcactgtgggcgtggacttcactggctccaatggagacccctcctcacctgactccc

SEQ ID NO: 76422 - DNA, 673 bp, Artificial Sequence
  derived and/or modified sequence
gctgtcggccgcggggcggaggcactcgcgcgggggtctaaaagttggttttaattggttgcccacaggattgacttggcctctacttcttgttaaggaaattcatctcttgttttatcaggtgtgtgtggtttcagcgcagcatggctgtggtcatccgtttgcaaggtctcccaattgtggcggggaccatggacattcgccacttcttctctggattgaccattcctgatgggggcgtgcatattgtagggggtgaactggatggcccactgcgtgaccttggttcagctgtccatttcctgtgaccatctcattgacaaggacatcggctccaagtctgacccactctgcgtccttttacaggatgtgggagggggcagctgggctgagcttggccggactgaacgggtgcggaactgctcaagccctgagttctccaagactctacagcttgagtaccgctttgagacagtccagaagctacgctttggaatctatgacatagacaacaagacgccagagctgagggatgatgacttcctagggggtgctgagtgttccctaggacagattgtgtccagccaggtactgactctccccttgatgctgaagcctggaaaacctgctgggcgggggaccatcacggtctcagctcaggaattaaaggaca

SEQ ID NO: 76423 - DNA, 821 bp, Artificial Sequence
  derived and/or modified sequence
attttgtgaagcggcgaaggaggtggtggctgcgttgggctccgggaagccgttcgggctggggctgtcggccgcggggcggaggcactcgcgcggggggtaattcggggtctgggttctggtgccgcgcagctttccccggattgacttggcctctacttcttgttaaggaaattcatctcttgttttatcagatggcccactgcgtgaccttggttcagctgtccatttcctgtgaccatctcattgacaaggacatcggctccaagtctgacccactctgcgtccttttacaggatgtgggagggggcagctgggctgagcttggccggactgaacgggtgcggaactgctcaagccctgagttctccaagactctacagcttgagtaccgctttgagacagtccagaagctacgctttggaatctatgacatagacaacaagacgccagagctgagggatgatgacttcctagggggtgctgagtgttccctaggacagattgtgtccagccaggtactgactctccccttgatgctgaagcctggaaaacctgctgggcgggggaccatcacggtctcagctcaggaattaaaggacaatcgtgtagtaaccatggaggtagaggccagaaacctagataagaaggacttcctgggaaaatcagatccatttctggagttcttccgccagggtgatgggaaatggcacctggtgtacagatctgaggtcatcaagaacaacctgaaccctacatggaagcgtttctcagtccccgttcagcatttctgtggtgggaaccccagcacacccatccag

SEQ ID NO: 76424 - DNA, 831 bp, Artificial Sequence
  derived and/or modified sequence
attttgtgaagcggcgaaggaggtggtggctgcgttgggctccgggaagccgttcgggctggggctgtcggccgcggggcggaggcactcgcgcggggggtaattcggggtctgggttctggtgccgcgcagctttccccgtctaaaagttggttttaattggttgcccacaggattgacttggcctctacttcttgttaaggaaattcatctcttgttttatcagatggcccactgcgtgaccttggttcagctgtccatttcctgtgaccatctcattgacaaggacatcggctccaagtctgacccactctgcgtccttttacaggatgtgggagggggcagctgggctgagcttggccggactgaacgggtgcggaactgctcaagccctgagttctccaagactctacagcttgagtaccgctttgagacagtccagaagctacgctttggaatctatgacatagacaacaagacgccagagctgagggatgatgacttcctagggggtgctgagtgttccctaggacagattgtgtccagccaggtactgactctccccttgatgctgaagcctggaaaacctgctgggcgggggaccatcacggtctcagctcaggaattaaaggacaatcgtgtagtaaccatggaggtagaggccagaaacctagataagaaggacttcctgggaaaatcagatccatttctggagttcttccgccagggtgatgggaaatggcacctggtgtacagatctgaggtcatcaagaacaacctgaaccctacatggaagcgtttctcagtccccgttcagcatttctgtggtgg

SEQ ID NO: 76425 - DNA, 826 bp, Artificial Sequence
  derived and/or modified sequence
cattttgtgaagcggcgaaggaggtggtggctgcgttgggctccgggaagccgttcgggctggggctgtcggccgcggggcggaggcactcgcgcggggggtaattcggggtctgggttctggtgccgcgcagctttccccgtctaaaagttggttttaattggttgcccacaggattgacttggcctctacttcttgttaaggaaattcatctcttgttttatcaggtgtgtgtggtttcagcgcagcatggctgtggtcatccgtttgcaaggtctcccaattgtggcggggaccatggacattcgccacttcttctctggattgaccattcctgatgggggcgtgcatattgtagggggtgaactggatggcccactgcgtgaccttggttcagctgtccatttcctgtgaccatctcattgacaaggacatcggctccaagtctgacccactctgcgtccttttacaggatgtgggagggggcagctgggctgagcttggccggactgaacgggtgcggaactgctcaagccctgagttctccaagactctacagcttgagtaccgctttgagacagtccagaagctacgctttggaatctatgacatagacaacaagacgccagagctgagggatgatgacttcctagggggtgctgagtgttccctaggacagattgtgtccagccaggtactgactctccccttgatgctgaagcctggaaaacctgctgggcgggggaccatcacggtctcagctcaggaattaaaggacaatcgtgtagtaaccatggaggtagaggccagaaacctagataagaag

SEQ ID NO: 76426 - DNA, 751 bp, Artificial Sequence
  derived and/or modified sequence
ggaacgcggagccgctgagcgggccgacggccattttgtgaagcggcgaaggaggtgatggcccactgcgtgaccttggttcagctgtccatttcctgtgaccatctcattgacaaggacatcggctccaagtctgacccactctgcgtccttttacaggatgtgggagggggcagctgggctgagcttggccggactgaacgggtgcggaactgctcaagccctgagttctccaagactctacagcttgagtaccgctttgagacagtccagaagctacgctttggaatctatgacatagacaacaagacgccagagctgagggatgatgacttcctagggggtgctgagtgttccctaggacagattgtgtccagccaggtactgactctccccttgatgctgaagcctggaaaacctgctgggcgggggaccatcacggtctcagctcaggaattaaaggacaatcgtgtagtaaccatggaggtagaggccagaaacctagataagaaggacttcctgggaaaatcagatccatttctggagttcttccgccagggtgatgggaaatggcacctggtgtacagatctgaggtcatcaagaacaacctgaaccctacatggaagcgtttctcagtccccgttcagcatttctgtggtgggaaccccagcacacccatccaggtgcaatgctccgattatgacagtgacgggtcacatgatctcatcggtaccttccacaccagcttgg

SEQ ID NO: 76427 - DNA, 746 bp, Artificial Sequence
  derived and/or modified sequence
ggaggtggtggctgcgttgggctccgggaagccgttcgggctggggctgtcggccgcggggcggaggcactcgcgcggggggtgtgtgtggtttcagcgcagcatggctgtggtcatccgtttgcaaggtctcccaattgtggcggggaccatggacattcgccacttcttctctggattgaccattcctgatgggggcgtgcatattgtagggggtgaactggatggcccactgcgtgaccttggttcagctgtccatttcctgtgaccatctcattgacaaggacatcggctccaagtctgacccactctgcgtccttttacaggatgtgggagggggcagctgggctgagcttggccggactgaacgggtgcggaactgctcaagccctgagttctccaagactctacagcttgagtaccgctttgagacagtccagaagctacgctttggaatctatgacatagacaacaagacgccagagctgagggatgatgacttcctagggggtgctgagtgttccctaggacagattgtgtccagccaggtactgactctccccttgatgctgaagcctggaaaacctgctgggcgggggaccatcacggtctcagctcaggaattaaaggacaatcgtgtagtaaccatggaggtagaggccagaaacctagataagaaggacttcctgggaaaatcagatccatttctggagttcttccgccagggtgatgggaaatggcacctg

SEQ ID NO: 76428 - DNA, 915 bp, Artificial Sequence
  derived and/or modified sequence
atggcacattgtgtaactctggttcaactcagcatatcttgtgaccatttgattgacaaggacatcggctctaagtccgaccccctgtgcgtactcctgcaggatgtgggagggggaagctgggctgagctgggtagaactgagcgggttcgaaattgcagtagccctgagtttagcaagactctgcaactggaataccgattcgagactgtccagaagctgcggttcggaatttacgacatcgataacaaaacaccggaactgcgcgatgatgactttctgggcggtgcagagtgttccctcgggcaaatcgttagctcacaggtgctgacactacccctcatgcttaagcccggaaagcccgccggaagggggaccatcaccgtcagcgctcaggagcttaaggataacagagtcgtaaccatggaggtggaggcccgtaacttggataagaaggacttcctgggcaaatccgatcccttcctagagttttttaggcaaggagacggaaagtggcaccttgtgtacaggtcagaggtgatcaaaaataacttgaatcctacgtggaaaagatttagtgttcccgtgcagcatttctgcggcggtaatccatcaactcctatccaagtgcagtgcagcgactacgacagcgatgggagccacgaccttattggaaccttccacacaagcctggctcaactacaagcggtgcccgctgagttcgaatgtattcatcccgagaaacagcagaaaaagaaaagctacaagaattctggcactataagagtgaaaatctgccgagtagagaccgaatattcattcctggattatgtgatgggcggttgtcagattaactttacggtaggcgtggatttcaccgggagtaacggcgacccatcaagccctgacagctag

SEQ ID NO: 76429 - DNA, 411 bp, Artificial Sequence
  derived and/or modified sequence
atggcccattgcgtgacacttgtacaactctcaatttcatgtgaccacctcattgacaaagacatcggttccaagagcgatcccctgtgtgttttactacaggacgttggcgggggaagttgggccgagctcggccgaaccgagcgggtgcggaactgctcttcccccgaattctcgaaaaccctacaactggaatacaggttcgaaaccgtgcagaaactgagattcggcatttatgacatcgacaataaaacccccgagctcagggatgacgactttctcggcggggcggaatgcagcctggggcaaatcgtgagcagccaagtcctgacactgccactgatgctgaaaccaggcaaacccgccggacgaggtaccattacagtctctgctcaggagctgaaagattag

SEQ ID NO: 76430 - DNA, 630 bp, Artificial Sequence
  derived and/or modified sequence
atggcccattgtgttacgctggttcaactgtctataagctgtgaccacctgatcgataaagatatcggatcaaagtccgatccgctttgcgtgctgctgcaggacgtcggcggcggcagttgggcggagttgggacggaccgagcgggtgcgcaattgctccagccctgagttctccaagactctgcaactggagtaccgattcgaaacggtgcagaaactcagattcggcatctacgatatcgacaacaagacccccgagctgagggacgatgatttcctgggtggcgccgagtgttctctgggtcagatagtcagctctcaagttctgacactcccactcatgttgaagcccggaaagcctgccggtcgaggtaccatcactgtgagcgctcaggaactcaaagataacagggtagtcacaatggaagttgaagctagaaatttagacaaaaaggactttctggggaagtctgatcctttccttgaattcttccgacagggcgacggcaagtggcacttggtttacagaagtgaggttattaaaaacaatcttaaccctacttggaaacgttttagcgttccagtgcagcatttctgtggtggtaacccaagcacccccatccagtag

SEQ ID NO: 76431 - DNA, 609 bp, Artificial Sequence
  derived and/or modified sequence
atggcgcactgcgtcaccctggtgcagttgagtatctcctgtgaccacctcatcgacaaggacatcggatcaaagagtgaccctttgtgcgtgttgctccaggatgtggggggagggtcctgggcagaacttggaaggaccgagcgtgtgcgcaattgttcatcccctgaatttagcaagacgctgcagttagaataccggttcgaaaccgttcagaagctgcgctttggcatttacgatatcgacaacaagacccccgagctgagagacgacgacttcttgggtggggcagaatgcagcctggggcaaatcgtgtcaagccaggtgcttactttgcctttgatgctgaagcccggcaaacctgccggccggggtacgattaccgtttcggcccaggagctgaaggacaacagagtggtgaccatggaggttgaggcacgcaacctggataagaaggatttcttgggaaaatcagatccttttttagagttcttccgtcaaggggacggtaaatggcatctcgtgtaccggagcgaggtaataaagaacaatctcaaccctacatggaagcgcttttccgtgccagtacagcatttttgtggtggatag

SEQ ID NO: 76432 - DNA, 204 bp, Artificial Sequence
  derived and/or modified sequence
atggcccactgtgtgacccttgtgcaactgtccattagttgcgatcatctcatagacaaagacataggctcaaaaagtgatccgctatgcgtgctcctccaagatgttggcggggggagctgggccgaacttggccgcaccgagcgcgtccggaactgttcaagccccgaattcagtaaaaccctgcaattggagtaccgctag

SEQ ID NO: 76433 - DNA, 459 bp, Artificial Sequence
  derived and/or modified sequence
atggcgcactgcgttactctggtacagctgtcaatttcctgcgatcatctgatcgataaggacattggtagtaaaagcgatccactgtgcgtgcttcttcaagacgtcggggggggttcctgggccgagctgggaaggactgagagggtgcgcaattgtagcagccccgagtttagtaagaccctgcaactggagtacaggttcgagaccgtgcagaagctccgattcgggatatacgatattgataacaaaacgcccgaactccgcgatgatgactttctaggcggcgctgaatgtagtctcgggcagatcgtgagcagtcaggtcctgactctacccctgatgctaaaaccgggcaagccggccgggagaggtactatcactgttagcgcacaagagttgaaagataacagggtggtgaccatggaagtagaggccagaaatcttgacaagaagtag

SEQ ID NO: 76434 - DNA, 696 bp, Artificial Sequence
  derived and/or modified sequence
atggcccactgcgttaccctcgtgcagctgtctatttcctgtgatcatctcatcgataaagatattgggagcaagagtgatcctctgtgtgtcctcctccaagatgtggggggtggctcctgggctgaactgggtcggactgagagagtgagaaactgcagttctcctgagttctccaaaaccctccagcttgagtataggttcgaaaccgttcagaaactccgatttggcatttatgacatagacaacaaaacccccgagcttcgcgatgacgactttctggggggggccgaatgttctctggggcagatagtgagtagtcaagttctgactctgcccctcatgcttaagccgggcaagccagctggccggggcacaataacagtgtccgcacaagaactaaaggacaatagagtggtgactatggaggttgaagcccgtaatttagataagaaagactttctcggtaaaagcgatcccttcctggagttcttccgtcagggtgacgggaagtggcaccttgtgtacagatccgaggtgatcaaaaacaacttgaatcccacatggaagcgtttttctgttcccgtgcagcacttttgcggaggcaacccaagtacgccaatccaggttcagtgcagtgattacgacagcgacggttcccacgatctgattggcaccttccacacgagtctttag

SEQ ID NO: 76435 - DNA, 525 bp, Artificial Sequence
  derived and/or modified sequence
atggcacattgcgtgacactcgtgcagctttctatctcttgcgaccatttgatcgacaaggatattggaagcaagagcgaccccctgtgcgtgctcctgcaagacgtaggaggcggatcttgggcagagctcggtcgtactgagcgggtgaggaactgttcgtcaccggagttctctaaaacactgcaattggagtatcgcttcgaaaccgtacagaagcttaggtttgggatctatgatattgataataagactccagaattgagagatgatgatttcctgggcggggctgaatgttctctcggtcagatcgtgagctctcaggtgctgacattgcctctgatgttaaaacccgggaagccggcgggacgtggcaccatcactgtgagcgctcaagaattgaaagataaccgcgtggtcaccatggaagtcgaagccagaaaccttgacaagaaggactttctgggtaagagtgaccccttcctggaattctttagacagggtgatgggaagtggcatctctag

SEQ ID NO: 76436 - DNA, 915 bp, Artificial Sequence
  derived and/or modified sequence
atggcccactgtgtgaccctggtgcagctgagcatcagctgtgaccacctgattgacaaggacatcggcagcaagagtgaccccctgtgtgtgctgctgcaggatgtgggcggcggctcctgggccgagctgggccgcacagagcgggtgaggaactgcagcagccctgagttcagcaagaccctgcagctggagtacagatttgagaccgtgcagaagctgcgcttcggcatctatgacatcgacaacaagaccccagagctgagagatgatgacttcctgggcggcgctgagtgcagcctgggccagatcgtgagcagccaggtgctgaccctgcccctgatgctgaagccaggcaagccagctggccggggcaccatcaccgtgtctgcccaggagctgaaggacaacagagtggtgaccatggaggtggaggccaggaacctggacaagaaggacttcctgggcaagagtgaccccttcctggagttcttccggcagggagatggcaagtggcacctggtgtacagaagtgaggtgatcaagaacaacctgaaccccacctggaagcgcttctctgtgcctgtgcagcacttctgtggcggcaaccccagcacccccatccaggtgcagtgcagcgactatgacagtgatggcagccatgacctgattggcaccttccacaccagcctggcccagctgcaggccgtgcctgctgagtttgagtgcatccaccctgagaagcagcagaagaagaagagctacaagaacagcggcaccatccgggtgaagatctgccgggtggagacagagtacagcttcctggactatgtgatgggcggctgccagatcaacttcaccgtgggcgtggacttcaccggcagcaatggagaccccagcagcccagacagctag

SEQ ID NO: 76437 - DNA, 411 bp, Artificial Sequence
  derived and/or modified sequence
atggcccactgtgtgaccctggtgcagctgagcatcagctgtgaccacctgattgacaaggacatcggcagcaagagtgaccccctgtgtgtgctgctgcaggatgtgggcggcggctcctgggccgagctgggccgcacagagcgggtgaggaactgcagcagccctgagttcagcaagaccctgcagctggagtacagatttgagaccgtgcagaagctgcgcttcggcatctatgacatcgacaacaagaccccagagctgagagatgatgacttcctgggcggcgctgagtgcagcctgggccagatcgtgagcagccaggtgctgaccctgcccctgatgctgaagccaggcaagccagctggccggggcaccatcaccgtgtctgcccaggagctgaaggactag

SEQ ID NO: 76438 - DNA, 630 bp, Artificial Sequence
  derived and/or modified sequence
atggcccactgtgtgaccctggtgcagctgagcatcagctgtgaccacctgattgacaaggacatcggcagcaagagtgaccccctgtgtgtgctgctgcaggatgtgggcggcggctcctgggccgagctgggccgcacagagcgggtgaggaactgcagcagccctgagttcagcaagaccctgcagctggagtacagatttgagaccgtgcagaagctgcgcttcggcatctatgacatcgacaacaagaccccagagctgagagatgatgacttcctgggcggcgctgagtgcagcctgggccagatcgtgagcagccaggtgctgaccctgcccctgatgctgaagccaggcaagccagctggccggggcaccatcaccgtgtctgcccaggagctgaaggacaacagagtggtgaccatggaggtggaggccaggaacctggacaagaaggacttcctgggcaagagtgaccccttcctggagttcttccggcagggagatggcaagtggcacctggtgtacagaagtgaggtgatcaagaacaacctgaaccccacctggaagcgcttctctgtgcctgtgcagcacttctgtggcggcaaccccagcacccccatccagtag

SEQ ID NO: 76439 - DNA, 609 bp, Artificial Sequence
  derived and/or modified sequence
atggcccactgtgtgaccctggtgcagctgagcatcagctgtgaccacctgattgacaaggacatcggcagcaagagtgaccccctgtgtgtgctgctgcaggatgtgggcggcggctcctgggccgagctgggccgcacagagcgggtgaggaactgcagcagccctgagttcagcaagaccctgcagctggagtacagatttgagaccgtgcagaagctgcgcttcggcatctatgacatcgacaacaagaccccagagctgagagatgatgacttcctgggcggcgctgagtgcagcctgggccagatcgtgagcagccaggtgctgaccctgcccctgatgctgaagccaggcaagccagctggccggggcaccatcaccgtgtctgcccaggagctgaaggacaacagagtggtgaccatggaggtggaggccaggaacctggacaagaaggacttcctgggcaagagtgaccccttcctggagttcttccggcagggagatggcaagtggcacctggtgtacagaagtgaggtgatcaagaacaacctgaaccccacctggaagcgcttctctgtgcctgtgcagcacttctgtggcggctag

SEQ ID NO: 76440 - DNA, 204 bp, Artificial Sequence
  derived and/or modified sequence
atggcccactgtgtgaccctggtgcagctgagcatcagctgtgaccacctgattgacaaggacatcggcagcaagagtgaccccctgtgtgtgctgctgcaggatgtgggcggcggctcctgggccgagctgggccgcacagagcgggtgaggaactgcagcagccctgagttcagcaagaccctgcagctggagtacagatag

SEQ ID NO: 76441 - DNA, 459 bp, Artificial Sequence
  derived and/or modified sequence
atggcccactgtgtgaccctggtgcagctgagcatcagctgtgaccacctgattgacaaggacatcggcagcaagagtgaccccctgtgtgtgctgctgcaggatgtgggcggcggctcctgggccgagctgggccgcacagagcgggtgaggaactgcagcagccctgagttcagcaagaccctgcagctggagtacagatttgagaccgtgcagaagctgcgcttcggcatctatgacatcgacaacaagaccccagagctgagagatgatgacttcctgggcggcgctgagtgcagcctgggccagatcgtgagcagccaggtgctgaccctgcccctgatgctgaagccaggcaagccagctggccggggcaccatcaccgtgtctgcccaggagctgaaggacaacagagtggtgaccatggaggtggaggccaggaacctggacaagaagtag

SEQ ID NO: 76442 - DNA, 696 bp, Artificial Sequence
  derived and/or modified sequence
atggcccactgtgtgaccctggtgcagctgagcatcagctgtgaccacctgattgacaaggacatcggcagcaagagtgaccccctgtgtgtgctgctgcaggatgtgggcggcggctcctgggccgagctgggccgcacagagcgggtgaggaactgcagcagccctgagttcagcaagaccctgcagctggagtacagatttgagaccgtgcagaagctgcgcttcggcatctatgacatcgacaacaagaccccagagctgagagatgatgacttcctgggcggcgctgagtgcagcctgggccagatcgtgagcagccaggtgctgaccctgcccctgatgctgaagccaggcaagccagctggccggggcaccatcaccgtgtctgcccaggagctgaaggacaacagagtggtgaccatggaggtggaggccaggaacctggacaagaaggacttcctgggcaagagtgaccccttcctggagttcttccggcagggagatggcaagtggcacctggtgtacagaagtgaggtgatcaagaacaacctgaaccccacctggaagcgcttctctgtgcctgtgcagcacttctgtggcggcaaccccagcacccccatccaggtgcagtgcagcgactatgacagtgatggcagccatgacctgattggcaccttccacaccagcctgtag

SEQ ID NO: 76443 - DNA, 525 bp, Artificial Sequence
  derived and/or modified sequence
atggcccactgtgtgaccctggtgcagctgagcatcagctgtgaccacctgattgacaaggacatcggcagcaagagtgaccccctgtgtgtgctgctgcaggatgtgggcggcggctcctgggccgagctgggccgcacagagcgggtgaggaactgcagcagccctgagttcagcaagaccctgcagctggagtacagatttgagaccgtgcagaagctgcgcttcggcatctatgacatcgacaacaagaccccagagctgagagatgatgacttcctgggcggcgctgagtgcagcctgggccagatcgtgagcagccaggtgctgaccctgcccctgatgctgaagccaggcaagccagctggccggggcaccatcaccgtgtctgcccaggagctgaaggacaacagagtggtgaccatggaggtggaggccaggaacctggacaagaaggacttcctgggcaagagtgaccccttcctggagttcttccggcagggagatggcaagtggcacctgtag

SEQ ID NO: 76444 - DNA, 915 bp, Artificial Sequence
  derived and/or modified sequence
atggcccactgcgtgaccctggtgcagctgagcatcagctgcgaccacctgatcgacaaggatattgggagcaaatccgatcctctgtgtgttctcttacaggacgtcggtggaggctcgtgggccgaactgggacggaccgagagagtccgcaactgctcttcccctgagttttccaagaccctccaattggaatatagattcgaaaccgtgcagaagttgagatttggaatctatgacatcgataacaagacccctgagttgagagatgacgacttcctcggcggcgccgagtgctcactgggtcagattgtctcttcccaggtactgacactgccactgatgctgaagcccggtaagcctgctggccggggcaccattaccgtgagcgcccaggaactcaaagataatcgagtcgtgacgatggaagtggaagctagaaatctggacaaaaaggattttctgggaaagtccgatccttttctcgagtttttccgccagggggacggcaagtggcacctggtttatcgcagcgaggttattaaaaacaatctcaatcctacatggaagcggtttagtgtgccggtgcagcacttttgtggaggcaaccccagcactccaatacaagtacagtgctcagactacgacagcgatggtagtcatgatcttattggcacctttcatacatccttggcccagctacaggcagtgcctgctgagtttgaatgcatacatcccgagaagcaacaaaagaaaaagagttataagaattctggcaccattcgagtaaagatctgccgcgtggagaccgagtatagtttcctggactatgtcatggggggttgtcagatcaacttcaccgtgggtgtcgacttcaccggctcaaacggagatccctctagtcccgacagctag

SEQ ID NO: 76445 - DNA, 411 bp, Artificial Sequence
  derived and/or modified sequence
atggcccactgcgtgaccctggtgcagctgagcatcagctgcgaccacctgatcgataaagatattggctccaaatccgatccactgtgtgtattactgcaagatgttggtggagggagctgggccgagttaggacgaaccgaaagagttcgaaactgttccagccccgaattttcaaagacccttcagttagagtaccgcttcgaaacagtgcaaaagctacgtttcgggatttacgacattgacaataaaacccctgagctgcgtgacgacgatttcctcggcggggctgaatgtagccttggccagattgttagttcccaagtactgacactgcccctgatgcttaagccagggaaacctgctggaagaggcactatcacagtgtctgctcaggagctgaaggattag

SEQ ID NO: 76446 - DNA, 630 bp, Artificial Sequence
  derived and/or modified sequence
atggcccactgcgtgaccctggtgcagctgagcatcagctgcgaccacctgattgacaaggacataggatccaaatctgatcccctatgtgttcttctgcaggacgtcggtggtggctcttgggctgagctgggccgcacagaacgggtccgcaactgttcaagcccggaattttccaagaccctccagctcgaataccgatttgagaccgtgcagaaactcagatttggaatctacgatatcgacaacaaaacacccgagctcagggacgacgacttcctggggggcgccgaatgctccctcggccagattgtgtcttctcaagtgctcaccctcccgctgatgctgaagcctggaaagcctgccggacggggtacgataacagtcagtgcacaggagttgaaggacaacagagtggtgacaatggaggtagaagctcggaacctggacaaaaaggatttcctcggaaagtcagacccattccttgagtttttcaggcagggcgacggtaaatggcatttagtctatcggagcgaagtaataaagaataatcttaaccctacatggaagcggttctctgtgcctgttcagcacttctgcggagggaacccttcgacgcccattcagtag

SEQ ID NO: 76447 - DNA, 609 bp, Artificial Sequence
  derived and/or modified sequence
atggcccactgcgtgaccctggtgcagctgagcatcagctgcgaccacctgattgacaaagatatagggtccaaaagtgacccactgtgcgtgctgctgcaggatgtcggcggtggctcgtgggcggagctgggccgtacagaaagggttagaaattgttcgtctcctgaattttccaagaccttacagctggagtacaggtttgagacagtgcaaaagttacgcttcgggatttacgatatcgataacaagacacctgagcttagagacgatgacttccttggtggcgccgaatgcagccttgggcagatcgtttcctcacaggtgctgacccttccgctaatgctaaagcctggaaagcctgccgggaggggcacaattaccgtgagcgcccaggagcttaaggataacagggttgtcaccatggaggtagaagccaggaatctggacaaaaaggactttctgggaaagtcggatcctttcctcgaatttttccgccagggagacggcaaatggcatctggtgtataggtctgaggtgatcaaaaacaacctgaaccctacttggaagaggttcagtgtgcctgtccaacacttctgtggcggctag

SEQ ID NO: 76448 - DNA, 204 bp, Artificial Sequence
  derived and/or modified sequence
atggcccactgcgtgaccctggtgcagctgagcatcagctgcgaccatttgattgacaaggacattggctctaaatctgatccactgtgtgtcctgctgcaggatgtgggtggcggatcttgggccgagttggggcggacagaacgggtgcgaaactgtagttcgcctgaatttagtaagaccctccaactcgagtaccgttag

SEQ ID NO: 76449 - DNA, 459 bp, Artificial Sequence
  derived and/or modified sequence
atggcccactgcgtgaccctggtgcagctgagcatcagctgcgaccacttgatcgacaaggatatcggctctaaatctgatcctctgtgcgtcctcctacaggatgttggtgggggcagctgggctgagctcggcagaactgagagggtgcggaattgctcttccccagagttcagtaagacattgcagctcgagtacaggttcgagaccgttcaaaagctcagattcgggatctacgatatcgacaataagactcccgaactccgcgacgatgatttcctgggtggagccgagtgttcgctcggccagatcgtttcttcacaggtccttaccctcccgcttatgctgaaacctggaaaaccggccggcagaggtaccataaccgtatctgcccaggaactgaaagataaccgtgtggtgacaatggaggtcgaagcacgcaacttggacaagaagtag

SEQ ID NO: 76450 - DNA, 696 bp, Artificial Sequence
  derived and/or modified sequence
atggcccactgcgtgaccctggtgcagctgagcatcagctgcgaccatctcattgataaggacatcggatccaagagcgaccctctctgcgttctgctacaagacgtgggtggtggatcttgggctgagcttggccgtactgaaagagtgagaaattgttcttcaccagaatttagcaaaactcttcagttggagtatcgtttcgaaacggttcagaagttgcgttttggaatctatgatatcgataataaaacaccagagcttagagacgatgattttctcggcggcgcagagtgcagcctgggccagattgtttcatctcaggtactgacattgccactcatgcttaagcctggaaagccagctggccgaggaacaattaccgtgagcgcccaggaactcaaggacaacagggtcgtgacaatggaggtggaagcaaggaacctggacaagaaggacttcctgggcaaaagtgatcccttcttggaatttttccgccagggagacggcaagtggcatctggtctataggtccgaggttataaaaaataacctgaatcctacttggaagcggtttagcgtgccagtccagcacttctgtggcggaaacccatccacccccatccaggtgcagtgctccgactacgatagcgacggtagccatgatctgatcggcacctttcacactagcctgtag

SEQ ID NO: 76451 - DNA, 525 bp, Artificial Sequence
  derived and/or modified sequence
atggcccactgcgtgaccctggtgcagctgagcatcagctgcgaccacttgatcgataaagatatcggaagcaagagcgatccactgtgcgtgctccttcaagacgtggggggcggttcctgggcagagctgggccggacggaacgggttcgcaactgttcatctcccgaattttctaaaacactacagctcgaataccgattcgaaactgtccagaaactacgttttgggatttacgatattgacaataagacccccgaattgagggacgatgatttcctcggaggggcagagtgttccctcggccagatcgtcagtagccaagtcctgacccttcccttaatgcttaaacccggcaaacctgcaggcagaggcaccattacagtgtctgcccaggagcttaaggacaaccgcgtggtgaccatggaagtcgaagcaaggaatttggataagaaggattttctgggaaaaagcgacccatttctggaattcttcagacagggggatggaaagtggcacttgtag

SEQ ID NO: 76452 - DNA, 915 bp, Artificial Sequence
  derived and/or modified sequence
atggcccactgcgtcacacttgttcagctctccattagctgcgatcatttaattgataaggacatcgggagcaagagtgaccccctgtgtgtcctgcttcaagacgtgggcggtggctcttgggcagaattgggccgaacggagcgggtgagaaactgcagcagcccagagtttagcaaaaccctccaactggaatatagatttgaaacagtccagaagcttcggtttgggatctacgacatcgataacaaaacacctgagcttcgcgacgacgacttcttaggcggagcagaatgtagcctgggccagattgtgagtagccaggtcctcacattgccacttatgttaaagcccggtaaacctgccggtaggggaactatcactgtgagcgcacaggaattgaaggacaatagagtggtcactatggaagtagaagctcgcaacctggacaaaaaggacttcctgggaaaatctgacccatttctagagtttttccgacagggcgacgggaagtggcacctcgtgtatcgctccgaggtgatcaagaacaacctcaaccccacctggaaacgtttcagtgtccctgtgcagcacttttgcggtgggaacccctccaccccaatacaggtgcagtgcagtgattacgacagtgacgggtcacatgacctcatcggcacattccacacgagcctggcccagctgcaggccgtgcccgctgaattcgaatgtatccatcccgaaaagcaacagaagaaaaaaagttacaaaaactccggtacaatccgggtcaaaatttgtcgcgtggaaaccgagtattctttcctggattacgtcatgggagggtgccagattaattttactgtgggcgtcgacttcaccggctccaacggcgatcccagctcccccgactcttag

SEQ ID NO: 76453 - DNA, 411 bp, Artificial Sequence
  derived and/or modified sequence
atggcgcactgcgtgacgctggttcagctctctatttcgtgcgaccatcttatcgacaaggacattgggtccaagagcgaccctctctgtgtactactgcaggatgttggcggagggagctgggccgaactaggaagaacggaacgcgtgcgtaattgctcctcgccagagtttagtaagacactccaactcgaataccggttcgagaccgtccagaagttgaggtttggaatttatgacatcgacaataagactccggagctgcgcgatgacgatttcctggggggagccgaatgctctctggggcagattgtgtcctcccaggtgcttaccttgcccctgatgttaaaacctggtaaacccgcagggagagggactattaccgtttcggcccaggagctgaaggactag

SEQ ID NO: 76454 - DNA, 630 bp, Artificial Sequence
  derived and/or modified sequence
atggctcactgcgttacacttgtccaactgagtataagctgcgatcatctgatcgataaagatatcggcagcaaaagcgatcccctgtgtgtgctgctgcaggatgtgggaggtggctcctgggcagagctggggcgaacggagcgcgtaaggaattgcagctcccccgaattcagtaagacactgcaactcgaatatagattcgagactgtgcaaaaactaaggttcggtatctatgatatagataataaaactccggagctccgggacgatgacttcctcgggggagccgaatgctcccttggacaaatcgtttcctcgcaggtgctcacccttccacttatgctaaaacccggaaagcccgctggcagggggacgatcacggtgagtgcccaggagctgaaggataatcgtgtggtaaccatggaggtcgaagcccgtaaccttgacaagaaagacttcttgggaaagtctgatccttttctggaattctttcgtcaaggagacgggaaatggcatctggtctacaggtctgaggtaatcaaaaataatcttaacccaacctggaagcgtttcagcgtacctgtccaacatttttgtggcggaaatccatcaacacccatccagtag

SEQ ID NO: 76455 - DNA, 609 bp, Artificial Sequence
  derived and/or modified sequence
atggcgcactgtgtcacacttgtccagctgtcgatttcctgtgaccacttgatcgataaggacataggcagcaaaagtgacccgctctgtgttctgctgcaggacgtaggaggcggatcctgggccgaactgggcagaactgaaagagtgagaaactgtagctctcctgaatttagcaagaccttgcaactggagtaccggttcgaaactgtacaaaagctgcgcttcggcatctacgacattgataacaaaactccagagctgagggatgatgacttccttggtggcgcagaatgctcccttggtcagatcgtctctagtcaagtgctgacgctccctctcatgctcaagcccggtaagccggctgggaggggcaccataaccgtctccgcccaggagctcaaggataatcgagttgtcacaatggaggtggaagcacggaacctggataaaaaggacttcttgggaaaaagcgatccattcctagagttcttccgtcagggggatgggaagtggcaccttgtttataggagcgaggtcataaaaaataacttaaatcccacttggaaaaggtttagtgtgccagtccaacacttctgcgggggttag

SEQ ID NO: 76456 - DNA, 204 bp, Artificial Sequence
  derived and/or modified sequence
atggcccattgcgtgactctggtccagctctctatatcatgtgatcaccttattgacaaggatatagggagtaaatctgaccccctgtgtgtactgctgcaggatgtcgggggtggatcttgggcggagcttggtcgtaccgaacgcgtgcgcaactgttcctcgcccgagttcagcaagaccttacagctagagtatagatag

SEQ ID NO: 76457 - DNA, 459 bp, Artificial Sequence
  derived and/or modified sequence
atggcacattgcgtaaccttagtgcagcttagcatttcatgtgaccacctgatagacaaagacatcggatctaaatctgaccccctatgcgtcctgctacaggatgtcggaggcggaagctgggcagaacttggaagaactgagagagtgcgcaactgttcatccccggagtttagcaaaacactgcagctggaatatcggtttgagactgttcagaaactccgatttgggatttatgacattgataataaaaccccagagctcagagacgacgattttctggggggtgctgagtgctcacttggccagattgtgtcaagtcaagtgttgaccttacccctgatgctgaaaccaggtaagcctgcaggtcggggaactattacggttagcgcacaggagctgaaggataatcgcgtagtgacgatggaagtggaggctcgtaatttagacaaaaagtag

SEQ ID NO: 76458 - DNA, 696 bp, Artificial Sequence
  derived and/or modified sequence
atggcacattgtgtgactttagtccagctctccattagttgcgaccatctcattgataaagatataggaagcaagtccgatccactgtgtgtgctcttacaggacgtgggcggaggatcatgggccgaactggggcgtaccgagcgtgtcagaaactgtagttcccctgaattctccaaaactctgcagttggagtacaggttcgaaacagtccagaagttacgcttcgggatttacgatatagataacaagacaccggaactccgggacgatgattttctcggcggtgccgaatgttcgctcggacaaatagtgtctagtcaggtactgacactacctttaatgttgaagcctggaaagccggctggccgaggtacgataactgtgagcgcccaggagctaaaagacaacagggtcgtgactatggaagtcgaggctaggaacttggacaagaaggactttctgggcaagagcgatcctttcttagaattttttagacagggtgatgggaaatggcacctagtctataggagcgaagtgatcaagaataacctcaaccccacgtggaagcgtttttctgtccccgttcaacatttttgcgggggaaacccttccacgcccatccaagtccagtgtagtgattatgacagcgatggttctcacgacctcattggtacttttcatactagcctgtag

SEQ ID NO: 76459 - DNA, 525 bp, Artificial Sequence
  derived and/or modified sequence
atggctcactgtgtcacgttggtgcaactgagcatcagctgtgatcacctgattgacaaggatataggtagcaagagcgaccccctatgcgtcttgttgcaggacgtgggagggggaagctgggcagaactgggcaggaccgagagggtaagaaattgttcctcccctgaattctccaagactttacaattggagtaccgtttcgagactgtccagaagttacggtttggaatttacgacatagataataaaacacccgagctcagggacgatgattttctcggcggtgcagaatgctcactcggtcagatcgtctcctcccaggtgttaaccttaccactgatgctgaaaccagggaagccggcaggacgtggcactatcacagtgagtgcccaggagctcaaggacaatagggttgtgacaatggaggtggaggcaaggaaccttgacaagaaggattttctcggcaaatctgatcctttcctggaattctttaggcaaggcgacggaaagtggcacctctag

SEQ ID NO: 76460 - protein, 408 aa, Artificial Sequence
  derived and/or modified sequence
MTSKGPEEEHPSVTLFRQYLRIRTVQPKPDYGAAVAFFEETARQLGLGCQKVEVAPGYVVTVLTWPGTNPTLSSILLNSHTDVVPVFKEHWSHDPFEAFKDSEGYIYARGAQDMKCVSIQYLEAVRRLKVEGHRFPRTIHMTFVPDEEVGGHQGMELFVQRPEFHALRAGFALDEGIANPTDAFTVFYSERSPWWVRVTSTGRPGHASRFMEDTAAEKLHKVVNSILAFREKEWQRLQSNPHLKEGSVTSVNLTKLEGGVAYNVIPATMSASFDFRVAPDVDFKAFEEQLQSWCQAAGEGVTLEFAQKWMHPQVTPTDDSNPWWAAFSRVCKDMNLTLEPEIMPAATDNRYIRAVGVPALGFSPMNRTPVLLHDHDERLHEAVFLRGVDIYTRLLPALASVPALPSDS

SEQ ID NO: 76461 - DNA, 1227 bp, Artificial Sequence
  derived and/or modified sequence
atgacaagtaagggtccagaggaggagcacccttcagttaccttgttccggcagtacctacgaatacggactgtgcaacctaagccagactacggcgcggcagttgccttctttgaggaaaccgccaggcagcttggcctcgggtgtcagaaagtcgaggtcgcacccggctacgtggtaaccgtgctgacatggccgggtactaatccaaccttgtcatcgatcttactgaattcccacactgacgttgtaccagtttttaaggagcactggagccacgacccattcgaagccttcaaggatagtgagggctacatttacgcccgtggggcccaagacatgaaatgcgtgtcgattcagtatctcgaagctgttagacgtctgaaggtcgagggtcaccgctttccccggacaattcatatgacatttgtgcctgatgaagaggtggggggccatcagggtatggagctgttcgttcaacgacctgaattccacgcactgcgggccggattcgctctggacgagggcatcgctaatcccactgacgcctttactgtcttctattctgagagatccccctggtgggttcgggttaccagcaccgggagacctggacacgcaagtaggttcatggaggataccgcagccgagaaactgcacaaggtggtaaacagtattctggcttttcgggagaaagagtggcagaggctccaaagcaacccccatctgaaggaaggcagtgttacaagcgtaaacctgacgaaattagagggcggtgtggcctacaacgtgatcccggcaactatgagcgcctcctttgatttccgggttgctcccgacgtcgatttcaaggcttttgaagaacagcttcagtcctggtgtcaggcggccggggagggcgtgactctggagttcgcccagaaatggatgcaccctcaggtgacccctaccgacgactccaacccctggtgggctgccttcagtagagtctgtaaagacatgaatcttaccctcgaacccgagatcatgccggccgcgactgacaatcgttacataagggcagtgggcgtgcctgccttaggattctctcccatgaaccgaacaccagtcctgctgcatgatcacgatgagaggctgcatgaggccgtttttctgaggggagtggacatttatactagattgctgccagctcttgccagcgtgcccgctttaccgtcagatagctag

SEQ ID NO: 76462 - DNA, 1227 bp, Artificial Sequence
  derived and/or modified sequence
atgaccagcaagggccctgaggaggagcaccccagcgtgaccctcttccggcagtacctgcgcatcagaacagtgcagcccaagccagactatggagctgctgtggccttctttgaggagacagcccggcagctgggcctgggctgccagaaggtggaggtggcccctggctacgtggtgacagtgctgacctggccaggcaccaaccccaccctgagcagcatcctgctgaacagccacacagatgtggtgcctgtgttcaaggagcactggagccatgacccctttgaggccttcaaggacagcgagggctacatctatgcccggggggcccaggacatgaagtgtgtgtccatccagtacctggaggccgtgcggcggctgaaggtggagggccaccgcttccccaggaccatccacatgacctttgtgcctgatgaggaggtgggcggccaccagggcatggagctgtttgtgcagaggcctgagttccacgccctgcgggccggctttgccctggatgagggcatcgccaaccccacagatgccttcaccgtcttctacagcgagaggagcccctggtgggtgcgggtgaccagcacaggccggcccggccacgccagccgcttcatggaggacacagctgctgagaagctgcacaaggtggtgaacagcatcctggccttccgggagaaggagtggcagaggctgcagagcaacccccacctgaaggagggctctgtgacctctgtgaacctgaccaagctggagggcggcgtggcctacaacgtcatcccagccaccatgtctgccagctttgacttccgggtggccccagatgtggacttcaaggcctttgaggagcagctgcagagctggtgccaggccgccggggagggcgtgaccctggagtttgcccagaagtggatgcacccccaggtgacccccacagatgacagcaacccctggtgggccgccttcagccgggtgtgcaaggacatgaacctgaccctggagcctgagatcatgcctgctgccacagacaaccgctacatccgggctgtgggcgtgcctgccctgggcttcagccccatgaacagaacacctgtgctgctgcatgaccatgatgagcggctgcacgaggccgtgttcctgcggggcgtggacatctacacccggctgctgcctgccctggcctctgtgcctgccctgcccagcgacagctag

SEQ ID NO: 76463 - DNA, 1227 bp, Artificial Sequence
  derived and/or modified sequence
atgaccagcaagggccccgaggaggagcaccccagcgtgaccctgtttcggcagtacttaagaatccgtacagtgcagccaaagccagattatggagccgccgtcgcctttttcgaagagacggcgagacaactcgggctcggctgtcagaaggttgaggtggcccctggctatgtggtgaccgtgctcacatggcccggtaccaaccccacacttagttctatacttcttaacagccataccgacgtcgtgcccgtcttcaaagaacactggagccatgatccttttgaagcttttaaagattccgagggctatatttacgctagaggggcacaagacatgaagtgtgtgtcaatccagtatctggaggccgtgcgaaggctgaaagttgaaggccataggttccccaggaccatccatatgacgttcgtgccagacgaggaggtcggcggtcatcaggggatggagctttttgtccaacggccagaattccacgctctgcgcgctggatttgctctggacgaagggatcgcaaaccccacagatgccttcacagtgttttactcggagaggtcaccctggtgggtgcgagtgacgtcgactgggcgcccaggacacgcttctcgcttcatggaagatacggccgccgaaaagctgcacaaagtggtcaattcaatactggcgtttcgagagaaagagtggcagcgcttacaatcgaaccctcacctgaaagaggggtccgtcacatctgtgaaccttacaaaactggagggcggggtagcttacaacgtgatacccgctaccatgtctgctagcttcgattttcgcgtagcaccggatgtcgattttaaggcatttgaagagcaacttcagtcctggtgtcaggccgcgggggagggggttacgttagagttcgcgcaaaagtggatgcaccctcaggtcaccccgaccgatgatagtaatccatggtgggccgcattttctcgcgtgtgtaaagatatgaacctgactctcgaacccgagattatgcccgctgccacggataaccggtacattagagccgtgggagtacctgccttgggattcagcccaatgaacagaacccccgtcctgcttcatgatcacgatgaacgactgcatgaagctgtgttcctgagaggagtggacatctacacacgtttgctgccagcgctggctagtgtacctgcactgccctctgatagctag

SEQ ID NO: 76464 - DNA, 1227 bp, Artificial Sequence
  derived and/or modified sequence
atgacaagcaaaggtccggaagaggaacaccctagcgtcaccttgttccgtcagtacctgcgaatacggaccgtgcagcctaaacccgactacggtgcggcagtggccttttttgaggaaaccgctcggcagttgggattggggtgccagaaagtcgaagtggcacctggttacgtagtaaccgtgctaacctggcctggaacgaatcctactctctcttcaatcctattaaacagccacaccgatgtggtgcccgtgttcaaggagcactggtctcatgaccccttcgaagcatttaaggacagtgagggttacatctacgcaaggggggctcaggacatgaagtgtgtaagcatacagtaccttgaggcggtaagacgactgaaagttgaaggccacaggttcccgaggaccattcatatgacattcgtgccagatgaggaagttggaggacatcaagggatggaactgtttgttcagaggccagagtttcatgcactgcgtgccggtttcgccctggacgagggtatagcaaaccccaccgatgccttcacagtgttctatagcgaacggtcgccctggtgggtcagagtgacatctaccgggaggcccggacacgcctcccgttttatggaggacacagccgctgaaaagctgcataaggttgtgaacagcattctggctttcagagagaaggagtggcagaggctgcaatctaacccccacttaaaggagggctcggtgacatccgtcaatcttacaaaactggagggtggagtggcatacaatgtgatcccagcaacaatgtctgcttcatttgatttccgagtcgccccagacgtcgactttaaggcgtttgaagagcagctccagagctggtgtcaggccgcaggcgaaggtgtgacactggagttcgcccagaaatggatgcatccccaggtcacccctacagatgactccaacccgtggtgggccgcattctcaagagtgtgtaaggatatgaacttgacattggaacccgaaattatgccggctgctaccgacaatcggtatataagggccgttggtgtgccggctttggggttcagtccaatgaataggacacctgtgctactgcatgaccatgatgaacggctgcatgaggctgtgttcctgcgtggggtggatatttataccagactattgccagccctggccagcgtgcctgcgctgccttcagactcatag

SEQ ID NO: 76465 - DNA, 1227 bp, Artificial Sequence
  derived and/or modified sequence
atgaccagcaagggccccgaggaggagcaccccagcgtgaccctgttcagacagtacctgagaatcagaaccgtgcagcccaagcccgactacggcgccgccgtggccttcttcgaggagaccgccagacagctgggcctgggctgccagaaggtggaggtggcccccggctacgtggtgaccgtgctgacctggcccggcaccaaccccaccctgagcagcatcctgctgaacagccacaccgacgtggtgcccgtgttcaaggagcactggagccacgaccccttcgaggccttcaaggacagcgagggctacatctacgccagaggcgcccaggacatgaagtgcgtgagcatccagtacctggaggccgtgagaagactgaaggtggagggccacagattccccagaaccatccacatgaccttcgtgcccgacgaggaggtgggcggccaccagggcatggagctgttcgtgcagagacccgagttccacgccctgagagccggcttcgccctggacgagggcatcgccaaccccaccgacgccttcaccgtgttctacagcgagagaagcccctggtgggtgagagtgaccagcaccggcagacccggccacgccagcagattcatggaggacaccgccgccgagaagctgcacaaggtggtgaacagcatcctggccttcagagagaaggagtggcagagactgcagagcaacccccacctgaaggagggcagcgtgaccagcgtgaacctgaccaagctggagggcggcgtggcctacaacgtgatccccgccaccatgagcgccagcttcgacttcagagtggcccccgacgtggacttcaaggccttcgaggagcagctgcagagctggtgccaggccgccggcgagggcgtgaccctggagttcgcccagaagtggatgcacccccaggtgacccccaccgacgacagcaacccctggtgggccgccttcagcagagtgtgcaaggacatgaacctgaccctggagcccgagatcatgcccgccgccaccgacaacagatacatcagagccgtgggcgtgcccgccctgggcttcagccccatgaacagaacccccgtgctgctgcacgaccacgacgagagactgcacgaggccgtgttcctgagaggcgtggacatctacaccagactgctgcccgccctggccagcgtgcccgccctgcccagcgacagctag

SEQ ID NO: 76466 - protein, 336 aa, Artificial Sequence
  derived and/or modified sequence
MTSKGPEEEHPSVTLFRQYLRIRTVQPKPDYGAAVAFFEETARQLGLGCQKVEVAPGYVVTVLTWPGTNPTLSSILLNSHTDVVPVFKEHWSHDPFEAFKDSEGIANPTDAFTVFYSERSPWWVRVTSTGRPGHASRFMEDTAAEKLHKVVNSILAFREKEWQRLQSNPHLKEGSVTSVNLTKLEGGVAYNVIPATMSASFDFRVAPDVDFKAFEEQLQSWCQAAGEGVTLEFAQKWMHPQVTPTDDSNPWWAAFSRVCKDMNLTLEPEIMPAATDNRYIRAVGVPALGFSPMNRTPVLLHDHDERLHEAVFLRGVDIYTRLLPALASVPALPSDS

SEQ ID NO: 76467 - DNA, 1011 bp, Artificial Sequence
  derived and/or modified sequence
atgacttctaaagggcccgaggaggaacatccatctgtcactctgtttcgccagtatctgagaatcagaacggttcagccaaagcccgactacggcgctgctgtcgccttcttcgaggaaactgccaggcaactgggactgggttgtcagaaggttgaggtggctcctggatatgtggtgacagtcctgacttggccagggactaacccaactctctcttccatcctgctcaactcgcacaccgacgtggttcccgtcttcaaagagcactggagtcatgacccgtttgaggccttcaaggactcagagggaatagccaacccaacggatgcttttacagtcttttactccgagcggtccccatggtgggtacgtgtgacgtctactggccgcccagggcacgcttcaaggttcatggaggacaccgcggctgaaaaactccacaaagttgtcaacagcatattggcttttcgagagaaggaatggcaacgcctgcagtcaaacccacacttgaaggaaggatccgtgacttccgtgaacctgactaaacttgaagggggcgtggcttacaacgtaatcccagcaacaatgtcggcctcgttcgacttccgagtggctcccgacgtcgatttcaaagcgtttgaggagcagctccagtcttggtgtcaggccgccggggaaggcgtgactttggagtttgcacagaaatggatgcacccacaggtgactccaactgacgatagtaacccctggtgggccgccttttcacgcgtctgcaaggacatgaacttgaccctggaacccgagattatgccagcggccaccgacaacagatatataagagcagtgggcgtgcccgccctgggatttagccccatgaaccggacccccgtcctactccatgatcacgatgagcggctgcatgaagcggtgttcttacggggcgtcgatatctacaccaggttgctgccagctctggccagcgtgcctgcacttccatctgacagttag

SEQ ID NO: 76468 - DNA, 1011 bp, Artificial Sequence
  derived and/or modified sequence
atgaccagcaagggccctgaggaggagcaccccagcgtgaccctcttccggcagtacctgcgcatcagaacagtgcagcccaagccagactatggagctgctgtggccttctttgaggagacagcccggcagctgggcctgggctgccagaaggtggaggtggcccctggctacgtggtgacagtgctgacctggccaggcaccaaccccaccctgagcagcatcctgctgaacagccacacagatgtggtgcctgtgttcaaggagcactggagccatgacccctttgaggccttcaaggacagcgagggcatcgccaaccccacagatgccttcaccgtcttctacagcgagaggagcccctggtgggtgcgggtgaccagcacaggccggcccggccacgccagccgcttcatggaggacacagctgctgagaagctgcacaaggtggtgaacagcatcctggccttccgggagaaggagtggcagaggctgcagagcaacccccacctgaaggagggctctgtgacctctgtgaacctgaccaagctggagggcggcgtggcctacaacgtcatcccagccaccatgtctgccagctttgacttccgggtggccccagatgtggacttcaaggcctttgaggagcagctgcagagctggtgccaggccgccggggagggcgtgaccctggagtttgcccagaagtggatgcacccccaggtgacccccacagatgacagcaacccctggtgggccgccttcagccgggtgtgcaaggacatgaacctgaccctggagcctgagatcatgcctgctgccacagacaaccgctacatccgggctgtgggcgtgcctgccctgggcttcagccccatgaacagaacacctgtgctgctgcatgaccatgatgagcggctgcacgaggccgtgttcctgcggggcgtggacatctacacccggctgctgcctgccctggcctctgtgcctgccctgcccagcgacagctag

SEQ ID NO: 76469 - DNA, 1298 bp, Artificial Sequence
  derived and/or modified sequence
cgacatccggcctcggccacgtggtgggcggaccggggcggtcctgagcctgcgacctcgcaggcgacctcgctggaccctaagtccaggccacagtcagggaagggcgctgagaggcgagcgtgagcccagcgacaggagagtgagctcaccacgcgcagcgccatgaccagcaagggtcccgaggaggagcacccatcggtgacgctcttccgccagtacctgcgtatccgcactgtccagcccaagcctgactatggagctgctgtggctttctttgaggagacagcccgccagctgggcctgggctgtcagaaagtagaggtggcacctggctatgtggtgaccgtgttgacctggccaggcaccaaccctacactctcctccatcttgctcaactcccacacggatgtggtgcctgtcttcaaggaacattggagtcacgacccctttgaggccttcaaggattctgagggcatagccaatcccactgatgccttcactgtcttttatagtgagcggagtccctggtgggtgcgggttaccagcactgggaggccaggccatgcctcacgcttcatggaggacacagcagcagagaagctgcacaaggttgtaaactccatcctggcattccgggagaaggaatggcagaggctgcagtcaaacccccacctgaaagaggggtccgtgacctccgtgaacctgactaagctagagggtggcgtggcctataacgtgatacctgccaccatgagcgccagctttgacttccgtgtggcaccggatgtggacttcaaggcttttgaggagcagctgcagagctggtgccaggcagctggcgagggggtcaccctagagtttgctcagaagtggatgcacccccaagtgacacctactgatgactcaaacccttggtgggcagcttttagccgggtctgcaaggatatgaacctcactctggagcctgagatcatgcctgctgccactgacaaccgctatatccgcgcggtgggggtcccagctctaggcttctcacccatgaaccgcacacctgtgctgctgcacgaccacgatgaacggctgcatgaggctgtgttcctccgtggggtggacatatatacacgcctgctgcctgcccttgccagtgtgcctgccctgcccagtgacagctgagccctggaactcctaaacctttgcccctggggcttccatcccaaccagtgccaaggacctcctcttcccccttccaaataataaagtctatggacagggctgtctctgaagtactaacacaa

SEQ ID NO: 76470 - DNA, 1011 bp, Artificial Sequence
  derived and/or modified sequence
atgaccagcaagggccccgaggaggagcaccccagcgtgaccctgtttcgtcaataccttagaatcaggaccgttcaacccaagccagactatggtgcagccgtggcatttttcgaagagaccgctcgacagttgggtctcgggtgtcagaaagttgaagtggcgccaggctatgttgtcacggtcctgacctggccaggtactaatccaaccctgtccagcatcctgctcaattctcacactgacgttgtcccagtgttcaaggagcattggtctcatgatccatttgaggcatttaaagactccgaaggtatcgccaatccgactgacgcattcactgttttctacagtgagcggtcaccatggtgggtgagagtgactagcacggggaggcctgggcacgcttccaggtttatggaagatactgccgctgaaaagctccacaaggttgtcaactcaatcttagcgtttagagaaaaggagtggcagcggctccagtcaaacccacacctcaaagagggttccgtgaccagtgtcaatcttaccaagctcgaaggcggggttgcctacaacgtgatcccagccaccatgagtgcgtcttttgatttcagggttgcgcccgatgttgatttcaaagcttttgaagaacagcttcagtcctggtgccaggccgccggtgagggcgtgactctcgagttcgctcaaaaatggatgcacccacaagtgacaccaaccgatgacagtaacccatggtgggccgcattctccagggtctgcaaggatatgaacttgaccctcgagcctgagattatgccggccgccactgataaccgatacatccgcgccgtgggtgtacctgctctaggcttctcacctatgaaccggacaccagttctccttcatgaccatgacgagagactccatgaagccgtcttcttacgcggggtcgatatttacacccgtttactgcccgccttagcttccgtccccgccctacccagcgacagctag

SEQ ID NO: 76471 - DNA, 1011 bp, Artificial Sequence
  derived and/or modified sequence
atgacctccaagggaccagaggaagagcatccaagcgtcacgctcttcaggcagtatcttcgcataagaaccgtccaacccaagcctgactatggtgccgctgtggcattcttcgaggagacggctcgccaactcggtctgggatgtcaaaaagtggaagtggcacccggatatgtggtcacggtcttgacttggccaggcacaaatcccaccttgagcagcatcttactgaatagccacactgatgtcgtgcctgtgttcaaagagcactggtctcatgacccttttgaggccttcaaagacagcgaaggaatcgccaaccccactgacgccttcaccgtgttctactccgaacgatcgccgtggtgggtgagggttacctctaccggtcgtcctggacacgcctccagattcatggaggacacggctgcagagaaactgcataaggtggtcaattctatcttagccttccgggagaaggaatggcagcgactacaatcaaaccctcatctcaaggagggttctgttacaagtgtcaatcttactaagttagagggtggcgttgcctataacgtcatccccgcaaccatgtccgcctctttcgacttcagagtggctcctgatgtagatttcaaagctttcgaggagcaactgcagtcctggtgccaggcggcaggcgagggcgtgacactcgaattcgctcagaaatggatgcatcctcaggttacgccgacagacgactccaatccgtggtgggctgccttcagccgcgtgtgtaaggatatgaacctgacgctcgaacctgaaattatgcctgccgcaactgacaaccgctacattagggcagtcggcgtccccgcacttggcttctcgcctatgaataggacccccgtgctacttcacgatcacgacgagcgattacatgaggctgtatttctccggggtgttgatatctacacccgcctgctaccagccttggctagcgtaccagccttgccctctgacagttag

SEQ ID NO: 76472 - DNA, 1011 bp, Artificial Sequence
  derived and/or modified sequence
atgaccagcaagggccccgaggaggagcaccccagcgtgaccctgttcagacagtacctgagaatcagaaccgtgcagcccaagcccgactacggcgccgccgtggccttcttcgaggagaccgccagacagctgggcctgggctgccagaaggtggaggtggcccccggctacgtggtgaccgtgctgacctggcccggcaccaaccccaccctgagcagcatcctgctgaacagccacaccgacgtggtgcccgtgttcaaggagcactggagccacgaccccttcgaggccttcaaggacagcgagggcatcgccaaccccaccgacgccttcaccgtgttctacagcgagagaagcccctggtgggtgagagtgaccagcaccggcagacccggccacgccagcagattcatggaggacaccgccgccgagaagctgcacaaggtggtgaacagcatcctggccttcagagagaaggagtggcagagactgcagagcaacccccacctgaaggagggcagcgtgaccagcgtgaacctgaccaagctggagggcggcgtggcctacaacgtgatccccgccaccatgagcgccagcttcgacttcagagtggcccccgacgtggacttcaaggccttcgaggagcagctgcagagctggtgccaggccgccggcgagggcgtgaccctggagttcgcccagaagtggatgcacccccaggtgacccccaccgacgacagcaacccctggtgggccgccttcagcagagtgtgcaaggacatgaacctgaccctggagcccgagatcatgcccgccgccaccgacaacagatacatcagagccgtgggcgtgcccgccctgggcttcagccccatgaacagaacccccgtgctgctgcacgaccacgacgagagactgcacgaggccgtgttcctgagaggcgtggacatctacaccagactgctgcccgccctggccagcgtgcccgccctgcccagcgacagctag

SEQ ID NO: 76473 - protein, 343 aa, Artificial Sequence
  derived and/or modified sequence
MTSKGPEEEHPSVTLFRQYLRIRTVQPKPDYGAAVAFFEETARQLGLGCQKVEVAPGYVVTVLTWPGTNPTLSSILLNSHTDVVPVFKEHWSHDPFEAFKDSEGYIYARGAQDMKCVSIQYLEAVRRLKVEGHRFPRTIHMTFVPDEEVGGHQGMELFVQRPEFHALRAGFALDEGIANPTDAFTVFYSERSPWWVRVTSTGRPGHASRFMEDTAAEKLAFEEQLQSWCQAAGEGVTLEFAQKWMHPQVTPTDDSNPWWAAFSRVCKDMNLTLEPEIMPAATDNRYIRAVGVPALGFSPMNRTPVLLHDHDERLHEAVFLRGVDIYTRLLPALASVPALPSDS

SEQ ID NO: 76474 - DNA, 1032 bp, Artificial Sequence
  derived and/or modified sequence
atgacatctaagggccccgaggaggagcatccaagtgtgaccctcttcagacagtacctgaggattcggaccgtacagcctaaacccgactacggtgccgccgtggctttttttgaagagacggcaagacagctcgggcttggatgtcagaaggtggaggtggcccccgggtacgtcgttaccgtattgacctggcccggcaccaacccgacactaagctctatcctgctcaacagccacaccgacgtggtcccggtcttcaaagaacactggagtcatgacccgttcgaggccttcaaggattcggaaggatacatatacgcccgcggggcacaagacatgaaatgcgttagtatacagtacctggaagcagtgcgtagactgaaagtcgagggtcaccggtttcccagaactatccacatgacatttgtacctgatgaagaggtggggggacaccagggaatggagctttttgtccagagaccagagtttcatgctctcagagcaggcttcgccctcgacgagggcattgccaacccgacagacgcttttaccgtgttttactccgaacggagtccatggtgggtgcgcgtaacgtctaccggacgcccaggacatgcttctcggttcatggaggatactgccgcagagaagctggcattcgaggagcagcttcaatcgtggtgccaggcagcaggcgaaggcgtgacattggaatttgcacagaaatggatgcatccccaggtaaccccaaccgatgactctaacccatggtgggccgcttttagccgggtctgcaaagatatgaacttgacactagagcccgagataatgcctgcggcaactgacaaccggtacatcagggctgtgggcgttcctgctctaggcttctcccctatgaataggacgcccgtcctgcttcatgatcatgatgaacgactccacgaggccgtgtttctgcgcggcgtggacatctacacacgcctgctgcccgcccttgccagcgttccagcactgccttcagactcttag

SEQ ID NO: 76475 - DNA, 1032 bp, Artificial Sequence
  derived and/or modified sequence
atgaccagcaagggccctgaggaggagcaccccagcgtgaccctcttccggcagtacctgcgcatcagaacagtgcagcccaagccagactatggagctgctgtggccttctttgaggagacagcccggcagctgggcctgggctgccagaaggtggaggtggcccctggctacgtggtgacagtgctgacctggccaggcaccaaccccaccctgagcagcatcctgctgaacagccacacagatgtggtgcctgtgttcaaggagcactggagccatgacccctttgaggccttcaaggacagcgagggctacatctatgcccggggggcccaggacatgaagtgtgtgtccatccagtacctggaggccgtgcggcggctgaaggtggagggccaccgcttccccaggaccatccacatgacctttgtgcctgatgaggaggtgggcggccaccagggcatggagctgtttgtgcagaggcctgagttccacgccctgcgggccggctttgccctggatgagggcatcgccaaccccacagatgccttcaccgtcttctacagcgagaggagcccctggtgggtgcgggtgaccagcacaggccggcccggccacgccagccgcttcatggaggacacagctgctgagaagctggcctttgaggagcagctgcagagctggtgccaggccgccggggagggcgtgaccctggagtttgcccagaagtggatgcacccccaggtgacccccacagatgacagcaacccctggtgggccgccttcagccgggtgtgcaaggacatgaacctgaccctggagcctgagatcatgcctgctgccacagacaaccgctacatccgggctgtgggcgtgcctgccctgggcttcagccccatgaacagaacacctgtgctgctgcatgaccatgatgagcggctgcatgaagctgtgttcctgcggggcgtggacatctacacccggctgctgcctgccctggcctctgtgcctgccctgcccagcgacagctag

SEQ ID NO: 76476 - DNA, 1319 bp, Artificial Sequence
  derived and/or modified sequence
cgacatccggcctcggccacgtggtgggcggaccggggcggtcctgagcctgcgacctcgcaggcgacctcgctggaccctaagtccaggccacagtcagggaagggcgctgagaggcgagcgtgagcccagcgacaggagagtgagctcaccacgcgcagcgccatgaccagcaagggtcccgaggaggagcacccatcggtgacgctcttccgccagtacctgcgtatccgcactgtccagcccaagcctgactatggagctgctgtggctttctttgaggagacagcccgccagctgggcctgggctgtcagaaagtagaggtggcacctggctatgtggtgaccgtgttgacctggccaggcaccaaccctacactctcctccatcttgctcaactcccacacggatgtggtgcctgtcttcaaggaacattggagtcacgacccctttgaggccttcaaggattctgagggctacatctatgccaggggtgcccaggacatgaagtgcgtcagcatccagtacctggaagctgtgaggaggctgaaggtggagggccaccggttccccagaaccatccacatgacctttgtgcctgatgaggaggttgggggtcaccaaggcatggagctgttcgtgcagcggcctgagttccacgccctgagggcaggctttgccctggatgagggcatagccaatcccactgatgccttcactgtcttttatagtgagcggagtccctggtgggtgcgggttaccagcactgggaggccaggccatgcctcacgcttcatggaggacacagcagcagagaagctggcttttgaggagcagctgcagagctggtgccaggcagctggcgagggggtcaccctagagtttgctcagaagtggatgcacccccaagtgacacctactgatgactcaaacccttggtgggcagcttttagccgggtctgcaaggatatgaacctcactctggagcctgagatcatgcctgctgccactgacaaccgctatatccgcgcggtgggggtcccagctctaggcttctcacccatgaaccgcacacctgtgctgctgcacgaccacgatgaacggctgcatgaggctgtgttcctccgtggggtggacatatatacacgcctgctgcctgcccttgccagtgtgcctgccctgcccagtgacagctgagccctggaactcctaaacctttgcccctggggcttccatcccaaccagtgccaaggacctcctcttcccccttccaaataataaagtctatggacagggctgtctctgaagtactaacacaa

SEQ ID NO: 76477 - DNA, 1032 bp, Artificial Sequence
  derived and/or modified sequence
atgaccagcaagggccccgaggaggagcaccccagcgtgaccctgttccgccaatacctgagaattaggaccgtgcagcccaagcctgattatggggcggcggtggcctttttcgaggagacagccaggcaactcgggctgggatgtcagaaagtggaggtcgctccagggtacgtggtaaccgtgctcacctggccggggacaaatcctacgctgtcttcaattctcctgaacagccatactgatgtggtgccagttttcaaggaacactggtctcatgatccttttgaggcctttaaggacagtgagggatacatctatgctcggggcgcccaggacatgaaatgcgtctccattcagtacttagaggcggtaaggaggctgaaagtggagggccaccgctttcctcgtaccattcatatgaccttcgtgccggatgaggaggtcggtggccaccagggcatggaactgttcgtccagaggcccgaatttcacgcacttcgtgcaggttttgcgttggatgaaggcatcgccaacccaaccgatgcctttaccgttttttacagcgagcgttcgccatggtgggtgagagtcaccagtactggccgccccggccacgcttctcggtttatggaggacaccgctgcagaaaaactcgcttttgaagaacagctgcagagctggtgtcaagcagctggagaaggagtaacattagagtttgcccagaagtggatgcatccacaggttaccccaaccgacgactccaacccttggtgggcagccttctctcgcgtgtgtaaggacatgaacctgactctcgagccggagattatgccagctgccacagacaaccgatatattagagccgtcggtgtcccagctctggggttctccccaatgaatcggacgcctgtgctgttgcacgatcacgacgaacggctgcacgaggcagtgtttctgcgcggtgtggacatttatacacgactactccctgccctggcttccgtgcccgccttaccctctgatagttag

SEQ ID NO: 76478 - DNA, 1032 bp, Artificial Sequence
  derived and/or modified sequence
atgactagtaaaggtcccgaggaagaacatccctctgtgaccctgtttcggcaatacctgcggatcagaactgtccaacctaagccagattacggggctgccgtagcctttttcgaggaaactgcgagacagctcggactgggctgccagaaagtagaggtggcacccggttacgttgtgaccgtactgacatggcctggcactaatcctactctgtcctccattctactcaacagccacacagatgtggtgcccgtgttcaaagaacattggtcacatgaccccttcgaggcttttaaggactccgaagggtacatatacgcacggggtgcacaggacatgaagtgcgtgagcatccagtatctcgaggctgtcaggcgactgaaggtggagggccataggttccccaggacgatccacatgacgttcgttcccgacgaagaggtgggaggacatcaaggaatggaactcttcgtgcaacgtcccgaatttcacgccctgagagctggcttcgcattggacgagggcattgcaaaccccaccgatgcctttactgtcttctatagcgagcgatctccatggtgggtgagggttactagcacgggacggcctggtcacgcatctcgttttatggaggacacagccgctgagaagctcgctttcgaggagcaactccagtcctggtgccaggccgcaggcgaaggggtgacccttgagttcgcacagaagtggatgcacccccaggtgactcctacggatgactccaatccttggtgggctgcgttcagcagggtgtgtaaagatatgaaccttaccctagaaccagagatcatgcccgctgctacagacaacagatacattcgcgctgtgggtgtgccggcattgggattctccccgatgaacagaacgcccgtcctattacacgatcatgatgaacgcttacacgaagctgtgttcctgcgaggggtcgacatctacactaggctgttgcctgcattagctagcgtgccggctcttcccagcgattcgtag

SEQ ID NO: 76479 - DNA, 1032 bp, Artificial Sequence
  derived and/or modified sequence
atgaccagcaagggccccgaggaggagcaccccagcgtgaccctgttcagacagtacctgagaatcagaaccgtgcagcccaagcccgactacggcgccgccgtggccttcttcgaggagaccgccagacagctgggcctgggctgccagaaggtggaggtggcccccggctacgtggtgaccgtgctgacctggcccggcaccaaccccaccctgagcagcatcctgctgaacagccacaccgacgtggtgcccgtgttcaaggagcactggagccacgaccccttcgaggccttcaaggacagcgagggctacatctacgccagaggcgcccaggacatgaagtgcgtgagcatccagtacctggaggccgtgagaagactgaaggtggagggccacagattccccagaaccatccacatgaccttcgtgcccgacgaggaggtgggcggccaccagggcatggagctgttcgtgcagagacccgagttccacgccctgagagccggcttcgccctggacgagggcatcgccaaccccaccgacgccttcaccgtgttctacagcgagagaagcccctggtgggtgagagtgaccagcaccggcagacccggccacgccagcagattcatggaggacaccgccgccgagaagctggccttcgaggagcagctgcagagctggtgccaggccgccggcgagggcgtgaccctggagttcgcccagaagtggatgcacccccaggtgacccccaccgacgacagcaacccctggtgggccgccttcagcagagtgtgcaaggacatgaacctgaccctggagcccgagatcatgcccgccgccaccgacaacagatacatcagagccgtgggcgtgcccgccctgggcttcagccccatgaacagaacccccgtgctgctgcacgaccacgacgagagactgcacgaggccgtgttcctgagaggcgtggacatctacaccagactgctgcccgccctggccagcgtgcccgccctgcccagcgacagctag

SEQ ID NO: 76480 - protein, 373 aa, Artificial Sequence
  derived and/or modified sequence
MTSKGPEEEHPSVTLFRQYLRIRTVQPKPDYGTNPTLSSILLNSHTDVVPVFKEHWSHDPFEAFKDSEGYIYARGAQDMKCVSIQYLEAVRRLKVEGHRFPRTIHMTFVPDEEVGGHQGMELFVQRPEFHALRAGFALDEGIANPTDAFTVFYSERSPWWVRVTSTGRPGHASRFMEDTAAEKLHKVVNSILAFREKEWQRLQSNPHLKEGSVTSVNLTKLEGGVAYNVIPATMSASFDFRVAPDVDFKAFEEQLQSWCQAAGEGVTLEFAQKWMHPQVTPTDDSNPWWAAFSRVCKDMNLTLEPEIMPAATDNRYIRAVGVPALGFSPMNRTPVLLHDHDERLHEAVFLRGVDIYTRLLPALASVPALPSDS

SEQ ID NO: 76481 - DNA, 1122 bp, Artificial Sequence
  derived and/or modified sequence
atgacaagcaagggccccgaggaagagcatccatcggtcactctgttcaggcagtatttgcggatacgcaccgtgcaacctaagccagactacggcaccaaccctaccctctcctccattctccttaattctcacacggacgtcgttccagtgttcaaggagcattggtcacacgatccattcgaggcctttaaggatagcgagggctatatttacgcacgtggggctcaggacatgaagtgcgtgagtatccagtacctcgaggccgttcgccggctgaaggtcgaaggccatcgcttccctcgcacaattcatatgacatttgtccccgacgaagaggtgggaggtcatcaggggatggaactgttcgttcaacggccagagttccatgcattgagggcgggttttgcattagacgaaggcatcgcgaaccctactgacgcttttaccgtgttttattcagagcgatctccctggtgggtccgggtgaccagcacaggtaggccagggcacgcaagcagatttatggaggacacggcggccgagaagctccataaagtcgtgaattcaatccttgcctttagagagaaggagtggcaaagactgcaatctaacccgcatctgaaggaaggctcagtgacctccgtaaatctcaccaaactggagggcggagttgcctataatgtgatccccgcaactatgtcagctagtttcgacttccgtgttgccccagatgttgactttaaggcattcgaggagcaactgcagtcctggtgccaggcggcgggcgaaggggtcactctagagttcgcacaaaaatggatgcatccccaggtgacccccactgacgactctaatccctggtgggcagcattttccagagtctgcaaagatatgaatttgactctagaacctgagatcatgcctgcagccacagataacagatacatcagagcagtgggggtgccggctctcgggtttagccctatgaacaggacaccggtgttgctgcatgaccacgacgagcgacttcacgaggcagtgtttctgcggggggtcgacatctacacgaggttgctcccagctttagcttccgtccctgctctcccatctgactcatag

SEQ ID NO: 76482 - DNA, 1122 bp, Artificial Sequence
  derived and/or modified sequence
atgaccagcaagggccctgaggaggagcaccccagcgtgaccctcttccggcagtacctgcgcatcagaacagtgcagcccaagccagactatggcaccaaccccaccctgagcagcatcctgctgaacagccacacagatgtggtgcctgtgttcaaggagcactggagccatgacccctttgaggccttcaaggacagcgagggctacatctatgcccggggggcccaggacatgaagtgtgtgtccatccagtacctggaggccgtgcggcggctgaaggtggagggccaccgcttccccaggaccatccacatgacctttgtgcctgatgaggaggtgggcggccaccagggcatggagctgtttgtgcagaggcctgagttccacgccctgcgggccggctttgccctggatgagggcatcgccaaccccacagatgccttcaccgtcttctacagcgagaggagcccctggtgggtgcgggtgaccagcacaggccggcccggccacgccagccgcttcatggaggacacagctgctgagaagctgcacaaggtggtgaacagcatcctggccttccgggagaaggagtggcagaggctgcagagcaacccccacctgaaggagggctctgtgacctctgtgaacctgaccaagctggagggcggcgtggcctacaacgtcatcccagccaccatgtctgccagctttgacttccgggtggccccagatgtggacttcaaggcctttgaggagcagctgcagagctggtgccaggccgccggggagggcgtgaccctggagtttgcccagaagtggatgcacccccaggtgacccccacagatgacagcaacccctggtgggccgccttcagccgggtgtgcaaggacatgaacctgaccctggagcctgagatcatgcctgctgccacagacaaccgctacatccgggctgtgggcgtgcctgccctgggcttcagccccatgaacagaacacctgtgctgctgcatgaccatgatgagcggctgcatgaagctgtgttcctgcggggcgtggacatctacacccggctgctgcctgccctggcctctgtgcctgccctgcccagcgacagctag

SEQ ID NO: 76483 - DNA, 1409 bp, Artificial Sequence
  derived and/or modified sequence
cgacatccggcctcggccacgtggtgggcggaccggggcggtcctgagcctgcgacctcgcaggcgacctcgctggaccctaagtccaggccacagtcagggaagggcgctgagaggcgagcgtgagcccagcgacaggagagtgagctcaccacgcgcagcgccatgaccagcaagggtcccgaggaggagcacccatcggtgacgctcttccgccagtacctgcgtatccgcactgtccagcccaagcctgactatggcaccaaccctacactctcctccatcttgctcaactcccacacggatgtggtgcctgtcttcaaggaacattggagtcacgacccctttgaggccttcaaggattctgagggctacatctatgccaggggtgcccaggacatgaagtgcgtcagcatccagtacctggaagctgtgaggaggctgaaggtggagggccaccggttccccagaaccatccacatgacctttgtgcctgatgaggaggttgggggtcaccaaggcatggagctgttcgtgcagcggcctgagttccacgccctgagggcaggctttgccctggatgagggcatagccaatcccactgatgccttcactgtcttttatagtgagcggagtccctggtgggtgcgggttaccagcactgggaggccaggccatgcctcacgcttcatggaggacacagcagcagagaagctgcacaaggttgtaaactccatcctggcattccgggagaaggaatggcagaggctgcagtcaaacccccacctgaaagaggggtccgtgacctccgtgaacctgactaagctagagggtggcgtggcctataacgtgatacctgccaccatgagcgccagctttgacttccgtgtggcaccggatgtggacttcaaggcttttgaggagcagctgcagagctggtgccaggcagctggcgagggggtcaccctagagtttgctcagaagtggatgcacccccaagtgacacctactgatgactcaaacccttggtgggcagcttttagccgggtctgcaaggatatgaacctcactctggagcctgagatcatgcctgctgccactgacaaccgctatatccgcgcggtgggggtcccagctctaggcttctcacccatgaaccgcacacctgtgctgctgcacgaccacgatgaacggctgcatgaggctgtgttcctccgtggggtggacatatatacacgcctgctgcctgcccttgccagtgtgcctgccctgcccagtgacagctgagccctggaactcctaaacctttgcccctggggcttccatcccaaccagtgccaaggacctcctcttcccccttccaaataataaagtctatggacagggctgtctctgaagtactaacacaa

SEQ ID NO: 76484 - DNA, 1122 bp, Artificial Sequence
  derived and/or modified sequence
atgaccagcaagggccccgaggaggagcaccccagcgtgaccctgtttagacagtatcttaggattcgaaccgtgcaacctaaacccgattacggaaccaatcctacactttcctcgatactcctcaacagccataccgatgtagtcccagtgtttaaggaacactggtctcacgacccatttgaggcatttaaagattccgaaggttacatttacgcgcggggtgctcaggatatgaagtgcgtgtctatacagtatttggaggctgtaaggagactgaaagtagagggccaccggttcccccgtacgattcatatgacctttgtgccagatgaagaagtcggaggccatcaggggatggagcttttcgtacagagacccgaattccacgctctgcgggctgggttcgccttggacgaaggcatcgctaatccaacagacgcctttaccgtgttttactcggagagaagtccgtggtgggttagggtgacgagtaccggtcgtcctggccatgcttctcggttcatggaagataccgcagccgagaagcttcataaagttgtgaatagtatactcgcttttagagagaaggagtggcaacgactacagagcaacccacacttgaaggaaggctcagtgacgagtgtcaacctcaccaaactggaagggggtgtcgcttataatgtgatcccagccaccatgagcgcttcctttgatttccgggttgcccctgatgtcgattttaaggcttttgaagaacagctccagtcctggtgtcaggccgccggtgagggcgttacgttggagtttgctcagaaatggatgcatccccaggttacaccaacagatgattccaatccctggtgggcagccttcagtcgtgtctgtaaggacatgaatctgaccctggaacctgaaataatgcccgctgctactgataataggtatattagagcggtaggggtgcctgccttggggttcagcccaatgaacaggacccctgtccttctgcacgaccacgatgaaaggctacacgaggccgtttttcttcgaggagtggatatttataccaggctgcttccggcactggcctctgttccagccctgccctcagattcatag

SEQ ID NO: 76485 - DNA, 1122 bp, Artificial Sequence
  derived and/or modified sequence
atgacttctaagggtcccgaggaggagcacccttctgtaacactctttaggcagtacttgcgcatccggacggtgcaaccgaagcccgattatggaaccaatcccactcttagttccattctgctgaatagccacactgacgtggttccagtgttcaaggagcactggagccacgatcccttcgaagctttcaaggacagtgaaggatatatctacgccagaggcgctcaggacatgaagtgcgtgtctattcagtaccttgaagcagtgaggaggttaaaggtggagggacaccgctttccgcgaacaatccatatgacgttcgtacccgatgaggaggtcggaggccatcagggaatggaactttttgtgcagcgaccggaattccatgccttaagggctggattcgctctggacgagggcatcgcaaaccccactgatgcttttaccgtgttctattcggaaagatccccatggtgggtgagggtgacctccaccggccgacccggtcacgcatccagatttatggaagatactgcagccgaaaaactgcacaaagttgtaaactctatcttggcttttagggaaaaagaatggcagagattgcagtccaatccgcaccttaaggaggggtcagtgacctctgtgaacctgactaagctcgagggcggtgtggcatataacgtcatcccagcgactatgtcagctagtttcgactttagagttgcacccgacgttgattttaaggcatttgaggagcagctccagagctggtgtcaggctgcaggggagggcgtgaccttggagttcgcacagaagtggatgcatcctcaagtgaccccgacagacgatagcaacccttggtgggctgcattttcaagagtctgtaaagacatgaacctcacccttgaacctgaaattatgcctgcagcgaccgataatcggtatatacgcgctgtgggggtgcccgcactcggcttctcacccatgaaccggacaccagtgcttctacacgaccacgatgaaaggctgcacgaggccgtctttctgcgaggtgtggatatttacacccggttactaccagcacttgcctcagtgcctgctctccccagtgattcctag

SEQ ID NO: 76486 - DNA, 1122 bp, Artificial Sequence
  derived and/or modified sequence
atgaccagcaagggccccgaggaggagcaccccagcgtgaccctgttcagacagtacctgagaatcagaaccgtgcagcccaagcccgactacggcaccaaccccaccctgagcagcatcctgctgaacagccacaccgacgtggtgcccgtgttcaaggagcactggagccacgaccccttcgaggccttcaaggacagcgagggctacatctacgccagaggcgcccaggacatgaagtgcgtgagcatccagtacctggaggccgtgagaagactgaaggtggagggccacagattccccagaaccatccacatgaccttcgtgcccgacgaggaggtgggcggccaccagggcatggagctgttcgtgcagagacccgagttccacgccctgagagccggcttcgccctggacgagggcatcgccaaccccaccgacgccttcaccgtgttctacagcgagagaagcccctggtgggtgagagtgaccagcaccggcagacccggccacgccagcagattcatggaggacaccgccgccgagaagctgcacaaggtggtgaacagcatcctggccttcagagagaaggagtggcagagactgcagagcaacccccacctgaaggagggcagcgtgaccagcgtgaacctgaccaagctggagggcggcgtggcctacaacgtgatccccgccaccatgagcgccagcttcgacttcagagtggcccccgacgtggacttcaaggccttcgaggagcagctgcagagctggtgccaggccgccggcgagggcgtgaccctggagttcgcccagaagtggatgcacccccaggtgacccccaccgacgacagcaacccctggtgggccgccttcagcagagtgtgcaaggacatgaacctgaccctggagcccgagatcatgcccgccgccaccgacaacagatacatcagagccgtgggcgtgcccgccctgggcttcagccccatgaacagaacccccgtgctgctgcacgaccacgacgagagactgcacgaggccgtgttcctgagaggcgtggacatctacaccagactgctgcccgccctggccagcgtgcccgccctgcccagcgacagctag

SEQ ID NO: 76487 - protein, 888 aa, Artificial Sequence
  derived and/or modified sequence
MAGVGRSGGPWGRTRGGRSGRLGVSLGALSSLPLEELPRPLCCRRCRRHFGFALRGETIPVSVAGSASSQFAPLALHLSLLLSRISASRLTRWPPPDKREGSAVDPGKRRSLAATPSSSLPCTLIALGLRHEKEANELMEDLFETFQDEMGFSNMEDDGPEEEERVAEPQANFNTPQALRFEELLANLLNEQHQIAKELFEQLKMKKPSAKQQKEVEKVKPQCKEVHQTLILDPAQRKRLQQQMQQHVQLLTQIHLLATCNPNLNPEASSTRICLKELGTFAQSSIALHHQYNPKFQTLFQPCNLMGAMQLIEDFSTHVSIDCSPHKTVKKTANEFPCLPKQVAWILATSKVFMYPELLPVCSLKAKNPQDKILFTKAEDNLLALGLKHFEGTEFLNPLISKYLLTCKTARQLTVRIKNLNMNRAPDNIIKFYKKTKQLPVLGKCCEEIQPHQWKPPIEREEHRLPFWLKASLPSIQEELRHMADGAREVGNMTGTTEINSDQGLEKDNSELGSETRYPLLLPKGVVLKLKPVADRFPKKAWRQKRSSVLKPLLIQPSPSLQPSFNPGKTPAQSTHSEAPPSKMVLRIPHPIQPATVLQTVPGVPPLGVSGGESFESPAALPAMPPEARTSFPLSESQTLLSSAPVPKVMMPSPASSMFRKPYVRRRPSKRRGARAFRCIKPAPVIHPASVIFTVPATTVKIVSLGGGCNMIQPVNAAVAQSPQTIPIATLLVNPTSFPCPLNQPLVASSVSPLIVSGNSVNLPIPSTPEDKAHMNVDIACAVADGENAFQGLEPKLEPQELSPLSATVFPKVEHSPGPPPVDKQCQEGLSENSAYRWTVVKTEEGRQALEPLPQGIQESLNNSSPGDLEEVVKMEPEDATEEISGFL

SEQ ID NO: 76488 - protein, 495 aa, Artificial Sequence
  derived and/or modified sequence
MAGVGRSGGPWGRTRGGRSGRLGVSLGALSSLPLEELPRPLCCRRCRRHFGFALRGETIPVSVAGSASSQFAPLALHLSLLLSRISASRLTRWPPPDKREGSAVDPGKRRSLAATPSSSLPCTLIALGLRHEKEANELMEDLFETFQDEMGFSNMEDDGPEEEERVAEPQANFNTPQALRFEELLANLLNEQHQIAKELFEQLKMKKPSAKQQKEVEKVKPQCKEVHQTLILDPAQRKRLQQQMQQHVQLLTQIHLLATCNPNLNPEASSTRICLKELGTFAQSSIALHHQYNPKFQTLFQPCNLMGAMQLIEDFSTHVSIDCSPHKTVKKTANEFPCLPKQVAWILATSKVFMYPELLPVCSLKAKNPQDKILFTKAEDNLLALGLKHFEGTEFLNPLISKYLLTCKTARQLTVRIKNLNMNRAPDNIIKFYKKTKQLPVLGKCCEEIQPHQWKPPIEREEHRLPFWLKVQPSSSKSVGGRRSLKVLREYQGLP

SEQ ID NO: 76489 - DNA, 2667 bp, Artificial Sequence
  derived and/or modified sequence
atggccggcgtgggcagaagcggcggcccctggggcagaaccagaggcggcagaagcggcagactgggcgtgagcctgggcgccctgagcagcctgcccctggaggagctgcccagacccctgtgctgcagaagatgcagaagacacttcggcttcgccctgagaggcgagaccatccccgtgagcgtggccggcagcgccagcagccagttcgcccccctggccctgcacctgagcctgctgctgagcagaatcagcgccagcagactgaccagatggcccccccccgacaagagagagggcagcgccgtggaccccggcaagagaagaagcctggccgccacccccagcagcagcctgccctgcaccctgatcgccctgggcctgagacacgagaaggaggccaacgagctgatggaggacctgttcgagaccttccaggacgagatgggcttcagcaacatggaggacgacggccccgaggaggaggagagagtggccgagccccaggccaacttcaacaccccccaggccctgagattcgaggagctgctggccaacctgctgaacgagcagcaccagatcgccaaggagctgttcgagcagctgaagatgaagaagcccagcgccaagcagcagaaggaggtggagaaggtgaagccccagtgcaaggaggtgcaccagaccctgatcctggaccccgcccagagaaagagactgcagcagcagatgcagcagcacgtgcagctgctgacccagatccacctgctggccacctgcaaccccaacctgaaccccgaggccagcagcaccagaatctgcctgaaggagctgggcaccttcgcccagagcagcatcgccctgcaccaccagtacaaccccaagttccagaccctgttccagccctgcaacctgatgggcgccatgcagctgatcgaggacttcagcacccacgtgagcatcgactgcagcccccacaagaccgtgaagaagaccgccaacgagttcccctgcctgcccaagcaggtggcctggatcctggccaccagcaaggtgttcatgtaccccgagctgctgcccgtgtgcagcctgaaggccaagaacccccaggacaagatcctgttcaccaaggccgaggacaacctgctggccctgggcctgaagcacttcgagggcaccgagttcctgaaccccctgatcagcaagtacctgctgacctgcaagaccgccagacagctgaccgtgagaatcaagaacctgaacatgaacagagcccccgacaacatcatcaagttctacaagaagaccaagcagctgcccgtgctgggcaagtgctgcgaggagatccagccccaccagtggaagccccccatcgagagagaggagcacagactgcccttctggctgaaggccagcctgcccagcatccaggaggagctgagacacatggccgacggcgccagagaggtgggcaacatgaccggcaccaccgagatcaacagcgaccagggcctggagaaggacaacagcgagctgggcagcgagaccagataccccctgctgctgcccaagggcgtggtgctgaagctgaagcccgtggccgacagattccccaagaaggcctggagacagaagagaagcagcgtgctgaagcccctgctgatccagcccagccccagcctgcagcccagcttcaaccccggcaagacccccgcccagagcacccacagcgaggccccccccagcaagatggtgctgagaatcccccaccccatccagcccgccaccgtgctgcagaccgtgcccggcgtgccccccctgggcgtgagcggcggcgagagcttcgagagccccgccgccctgcccgccatgccccccgaggccagaaccagcttccccctgagcgagagccagaccctgctgagcagcgcccccgtgcccaaggtgatgatgcccagccccgccagcagcatgttcagaaagccctacgtgagaagaagacccagcaagagaagaggcgccagagccttcagatgcatcaagcccgcccccgtgatccaccccgccagcgtgatcttcaccgtgcccgccaccaccgtgaagatcgtgagcctgggcggcggctgcaacatgatccagcccgtgaacgccgccgtggcccagagcccccagaccatccccatcgccaccctgctggtgaaccccaccagcttcccctgccccctgaaccagcccctggtggccagcagcgtgagccccctgatcgtgagcggcaacagcgtgaacctgcccatccccagcacccccgaggacaaggcccacatgaacgtggacatcgcctgcgccgtggccgacggcgagaacgccttccagggcctggagcccaagctggagccccaggagctgagccccctgagcgccaccgtgttccccaaggtggagcacagccccggccccccccccgtggacaagcagtgccaggagggcctgagcgagaacagcgcctacagatggaccgtggtgaagaccgaggagggcagacaggccctggagcccctgccccagggcatccaggagagcctgaacaacagcagccccggcgacctggaggaggtggtgaagatggagcccgaggacgccaccgaggagatcagcggcttcctgtag

SEQ ID NO: 76490 - DNA, 1488 bp, Artificial Sequence
  derived and/or modified sequence
atggccggcgtgggcagaagcggcggcccctggggcagaaccagaggcggcagaagcggcagactgggcgtgagcctgggcgccctgagcagcctgcccctggaggagctgcccagacccctgtgctgcagaagatgcagaagacacttcggcttcgccctgagaggcgagaccatccccgtgagcgtggccggcagcgccagcagccagttcgcccccctggccctgcacctgagcctgctgctgagcagaatcagcgccagcagactgaccagatggcccccccccgacaagagagagggcagcgccgtggaccccggcaagagaagaagcctggccgccacccccagcagcagcctgccctgcaccctgatcgccctgggcctgagacacgagaaggaggccaacgagctgatggaggacctgttcgagaccttccaggacgagatgggcttcagcaacatggaggacgacggccccgaggaggaggagagagtggccgagccccaggccaacttcaacaccccccaggccctgagattcgaggagctgctggccaacctgctgaacgagcagcaccagatcgccaaggagctgttcgagcagctgaagatgaagaagcccagcgccaagcagcagaaggaggtggagaaggtgaagccccagtgcaaggaggtgcaccagaccctgatcctggaccccgcccagagaaagagactgcagcagcagatgcagcagcacgtgcagctgctgacccagatccacctgctggccacctgcaaccccaacctgaaccccgaggccagcagcaccagaatctgcctgaaggagctgggcaccttcgcccagagcagcatcgccctgcaccaccagtacaaccccaagttccagaccctgttccagccctgcaacctgatgggcgccatgcagctgatcgaggacttcagcacccacgtgagcatcgactgcagcccccacaagaccgtgaagaagaccgccaacgagttcccctgcctgcccaagcaggtggcctggatcctggccaccagcaaggtgttcatgtaccccgagctgctgcccgtgtgcagcctgaaggccaagaacccccaggacaagatcctgttcaccaaggccgaggacaacctgctggccctgggcctgaagcacttcgagggcaccgagttcctgaaccccctgatcagcaagtacctgctgacctgcaagaccgccagacagctgaccgtgagaatcaagaacctgaacatgaacagagcccccgacaacatcatcaagttctacaagaagaccaagcagctgcccgtgctgggcaagtgctgcgaggagatccagccccaccagtggaagccccccatcgagagagaggagcacagactgcccttctggctgaaggtgcagcccagcagcagcaagagcgtgggcggcagaagaagcctgaaggtgctgagagagtaccagggcctgccctag

SEQ ID NO: 76491 - DNA, 2667 bp, Artificial Sequence
  derived and/or modified sequence
atggctggagttgggcgttctgggggaccatgggggcggacacgggggggtagatcaggccgtttgggcgtatccttgggggctcttagcagtctgcctcttgaggaattgcctcggcccctatgctgcagacgctgtagacgacatttcggctttgcactgagaggcgaaaccatccctgtcagcgtcgctggctccgccagttctcaattcgcccctctcgctctacacctgagcttactgttgtcacgcatctccgcttctaggcttactcggtggcctccacctgacaagagagaagggagtgcggtggatccaggcaagaggaggagcctggccgcgactccgagctctagtctcccgtgcacacttatagcactgggtttgcgccacgagaaagaagctaatgagctcatggaagatctgttcgagacgttccaagacgagatggggtttagcaacatggaggacgacgggcccgaagaggaagagagggtggccgagccccaggccaactttaatacgccccaggccttgaggttcgaagagctgctggccaatctcctaaacgagcaacaccagatcgctaaggaattgttcgaacagctcaagatgaaaaaaccctccgccaaacaacagaaggaggtggagaaagtcaagccacaatgtaaggaggtgcatcaaaccctgattttggatcctgctcagcgtaagagactgcagcagcagatgcaacaacacgtccagctacttactcagatccatctgcttgcgacgtgtaatcccaacctgaatcctgaagcttcgagcactcgcatctgcctgaaggaactgggaacctttgcccagagcagtatagccctccaccaccagtacaaccccaaatttcaaacgctcttccaaccttgtaacttaatgggagcaatgcaacttattgaggacttcagtacacatgtgagtatagactgctcccctcacaaaaccgttaagaaaaccgccaacgagtttccctgcctgccaaagcaggtggcctggatcctggccacgtcaaaagtatttatgtatcccgagctcctgcctgtgtgcagcctgaaagccaagaacccacaggacaaaatcctctttactaaggcagaggacaacctgctcgccctcggcctgaagcattttgagggcacagagttcttaaatcctttaatttcaaagtaccttctgacttgcaaaacagcccgacaactcaccgtgcgaataaagaatctcaatatgaatcgggccccggataatattattaagttttataagaagacgaagcagctccccgtgttgggaaagtgctgtgaagagattcagcctcatcagtggaaaccaccaattgaacgggaggaacatagactgccattctggctcaaagcgagtctgccatccatacaagaagaactgcgccatatggccgatggggctagagaggtcggaaatatgaccgggacaactgaaatcaacagcgaccagggactggagaaggacaattctgagctgggctcagaaaccaggtatccattgcttttgcccaaaggagtcgtcttgaagctcaagccagtcgcggatcggttccctaaaaaggcatggcgccaaaaaaggagtagtgtgctgaagccgttgctgattcaaccatccccctcattacagccctcatttaatcctggcaagactccagcacaatctacacactctgaagcaccccctagtaagatggtattgagaattccgcatcccattcaacctgcgactgtcctccagacagtccccggcgtgcccccccttggcgtgtcaggaggggagagcttcgaatcccctgctgccctccctgccatgccaccagaagccagaaccagttttccactttctgaaagtcagaccttattgagctccgctccggtgcctaaggtgatgatgcccagccctgcgtctagcatgttcagaaaaccatatgtgcgcaggcggccaagcaaacgcaggggggcccgagcctttcgctgtatcaagcctgccccagttatccatccagcctctgtgatcttcacagtgccagccaccaccgttaagatagtgtcactggggggcggctgtaatatgatccagcccgtgaacgccgctgtcgcccagagtccccagacaatccctattgctactctgcttgttaaccctaccagcttcccttgtcccttgaatcagccactggttgccagttccgtgtccccactgatcgtttccgggaactcggtaaatctgcccatcccatctaccccagaagataaggctcacatgaatgtggatatagcctgcgcagtggcagatggcgagaacgccttccaagggctcgagccaaaactggagccacaggaactgtcacctttatccgctacggtgtttcccaaagtggaacactccccaggcccccctcctgttgataagcaatgtcaggaggggctctctgagaactctgcctatcggtggactgtggtgaaaacagaggagggtcggcaggcactggaaccattaccgcagggcatccaggagtccttaaacaatagttccccaggggacttagaggaggttgtcaagatggaacctgaggatgctacggaagagattagtggcttcctgtag

SEQ ID NO: 76492 - DNA, 1488 bp, Artificial Sequence
  derived and/or modified sequence
atggccggagttggccggagtggagggccatggggacggactaggggggggagatcaggccggctgggggtaagtctgggagctttaagcagcctgcccctcgaagagttgccaagacccctttgttgcagacgctgtagacggcattttggctttgccttacgaggagagaccattccagtatcagtggcagggagcgcatcttcgcagtttgcacctttagccctccacttaagcctcctgctcagccgcataagcgcctcaaggctcacaaggtggccccctcccgacaagagagagggttctgccgtggatccaggtaagcgccgaagcctggccgccactccatcttcgagcctcccatgcacactgattgccctcgggctgcgccatgaaaaggaggctaatgaattgatggaggacttatttgagacttttcaggatgaaatgggcttcagtaacatggaagatgacggacctgaagaggaggagcgagtggccgaacctcaagcaaatttcaacacgccacaggccctgcgctttgaggaactgctagccaacctgctgaatgaacagcatcagatcgccaaagagttattcgagcagttaaagatgaagaagccttcagcaaaacagcaaaaagaagtggaaaaggtgaaacctcaatgcaaagaagttcaccagactctaattctggatccagcccagagaaagcgcttgcagcaacagatgcagcagcatgtgcagttactcacacagatacacctgctggcaacttgtaatcctaacctgaacccagaggctagctccaccaggatctgtctcaaggagcttggaacatttgctcagtcatctatcgctctgcatcaccaatacaaccctaaatttcagaccctgttccagccgtgtaacctcatgggagccatgcagctgattgaggatttctccacccacgtatctattgattgtagccctcataaaacagttaagaaaacggcgaacgaattcccatgtctgcccaagcaagttgcctggattctcgccacttctaaggtgttcatgtaccccgagcttctacccgtatgcagtctcaaggcgaagaatcctcaggacaagatcctgttcactaaggccgaggacaacctcctcgctctgggtctgaaacatttcgaggggactgaattccttaaccctctcattagtaagtatctgctgacctgtaaaacagccagacaacttaccgtcagaatcaaaaacctgaacatgaatagagcccctgacaatatcatcaaattctataaaaagaccaagcaactgcccgtcctcggaaagtgctgtgaagaaattcagcctcaccaatggaagcctcctatcgagagggaggaacacagacttccattctggctgaaagtacagcccagttctagcaagtccgtggggggtcgaagatcactgaaggtactgagggaataccaggggctgccatag

SEQ ID NO: 76493 - DNA, 2874 bp, Artificial Sequence
  derived and/or modified sequence
gctacatggccggagtcgggcgaagcgggggaccgtggggaagaacgcgaggagggaggagtgggaggttgggggtgtcgctaggcgcccttagctccctccctctggaggagctgccgcggccactctgctgccgccgctgccgccgccattttgggttcgctttgcgaggggaaacgatcccagtgtcggttgcgggatccgcctcctctcagtttgcccctttagccctccacctttcccttctcctctctcgcatttccgccagtcggcttacccgctggccgcctcctgacaagcgggagggatccgcggtggacccagggaagcggaggagcctggcggccaccccctcttcctcacttccctgtactctcatcgctctcggcctccgacacgaaaaggaagcaaatgagctgatggaagatctgtttgaaactttccaagatgagatgggattctccaacatggaagatgatggcccagaagaggaggagcgtgtggctgagcctcaagctaactttaacacccctcaagctctacggtttgaggaactactggccaacctactaaatgaacaacatcagatagcgaaggaactatttgaacagctgaagatgaagaaaccttcagccaaacagcagaaggaggtagagaaggttaaaccccagtgtaaggaagttcatcagaccctgattctggacccagcacaaaggaagagactccagcagcagatgcagcagcatgttcagctcttgacacaaatccaccttcttgccacctgcaaccccaatctcaatccggaggccagtagcaccaggatatgtcttaaagagctgggaacctttgctcaaagctccatcgcccttcaccatcagtacaaccccaagtttcagaccctgttccaaccctgtaacttgatgggagctatgcagctgattgaagacttcagcacacatgtcagcattgactgcagccctcataaaactgtcaagaagactgccaatgaatttccctgtttgccaaagcaagtggcttggatcctggccacaagcaaggttttcatgtatccagagttacttccagtgtgttccctgaaggcaaagaatccccaggataagatcctcttcaccaaggctgaggacaatttgttagctttaggactgaagcattttgaagggactgagtttcttaaccctctaatcagcaagtaccttctaacctgcaagactgcccgccaactgacagtgagaatcaagaacctcaacatgaacagagctcctgacaacatcattaaattttataagaagaccaaacagctgccagtcctaggaaaatgctgtgaagagatccagccacatcagtggaagccacctatagagagagaagaacaccggctcccattctggttaaaggccagtctgccatccatccaggaagaactgcggcacatggctgatggtgctagagaggtaggaaatatgactggaaccactgagatcaactcagatcaaggcctagaaaaagacaactcagagttggggagtgaaactcggtacccactgctattgcctaagggtgtagtcctgaaactgaagccagttgccgaccgtttccccaagaaggcttggagacagaagcgttcatcagtcctgaaacccctccttatccaacccagcccctctctccagcccagcttcaaccctgggaaaacaccagcccaatcaactcattcagaagcccctccgagcaaaatggtgctccggattcctcacccaatacagccagccactgttttacagacagttccaggtgtccctccactgggggtcagtggaggtgagagttttgagtctcctgcagcactgcctgctatgccccctgaggccaggacaagcttccctctgtctgagtcccagactttgctctcttctgcccctgtgcccaaggtaatgatgccctcccctgcctcttccatgtttcgaaagccatatgtgagacggagaccctcaaaaagaaggggagccagggcctttcgctgtatcaaacctgcccctgttatccaccctgcatctgttatcttcactgttcctgctaccactgtgaagattgtgagccttggcggtggctgtaacatgatccagcctgtcaatgcggctgtggcccagagtccccagactattcccatcgccaccctcttggttaaccctacttccttcccctgtccattgaaccagccccttgtggcctcctctgtctcacccttaattgtttctggcaattctgtgaatcttcctataccatccacccctgaagataaggcccacatgaatgtggacattgcttgtgctgtggctgatggggaaaatgcctttcagggcctagaacccaaattagagccccaggaactatctcctctctctgctactgttttccccaaagtggaacatagcccagggcctccaccagtcgataaacagtgccaagaaggattgtcagagaacagtgcctatcgctggaccgttgtgaaaacagaggagggaaggcaagctctggagccgctccctcagggcatccaggagtctctaaacaactcttcccctggggatttagaggaagttgtcaagatggaacctgaagatgctacagaggaaatcagtggatttctttgagctaggagaataagagtctggagactgggagccttcacttcggcctccgattggtggcgcatagggtgtaaccaataggaaacccctaaagggtacttaaaccccagattttgcaactggggctcttgagcagcttgctttagcctgctcccactctgtggaatatacttttgcttcaataaatctgtgcttttattgcttc

SEQ ID NO: 76494 - DNA, 2667 bp, Artificial Sequence
  derived and/or modified sequence
atggccggcgtgggccgcagcggcggcccctggggccgcacccggggcggccgcagcggccgcctgggcgtgtccctgggcgccctgagcagcctgcccctggaggagctgccccggcccctgtgctgccgccgctgcagaagacacttcggctttgccctgcggggggagaccatccctgtgtctgtggccggcagcgccagcagccagtttgcccccctggccctgcacctgagcctgctgctgagccgcatcagcgccagccggctgacccgctggcccccaccagacaagcgggagggcagcgctgtggaccccgggaagagaagaagcctggccgccacccccagcagcagcctgccctgcaccctgattgccctgggcctgcggcatgagaaggaggccaatgagctgatggaggacctgtttgagaccttccaggatgagatgggcttcagcaacatggaggatgatggccctgaggaggaggagcgggtggccgagccccaggccaacttcaacaccccccaggccctgcgctttgaggagctgctggccaacctgctgaatgagcagcaccagatcgccaaggagctgtttgagcagctgaagatgaagaagcccagcgccaagcagcagaaggaggtggagaaggtgaagccccagtgcaaggaggtgcaccagaccctcatcctggaccctgcccagaggaagaggctgcagcagcagatgcagcagcacgtgcagctgctgacccagatccacctgctggccacctgcaaccccaacctgaaccctgaggccagcagcacccgcatctgcctgaaggagctgggcacctttgcccagagcagcatcgccctgcaccaccagtacaaccccaagttccagaccctcttccagccctgcaacctgatgggcgccatgcagctgattgaggacttcagcacccacgtgtccattgactgcagcccccacaagacagtgaagaagacagccaatgagttcccctgcctgcccaagcaggtggcctggatcctggccaccagcaaggtgttcatgtacccagagctgctgcctgtgtgcagcctgaaggccaagaacccccaggacaagatcctcttcaccaaggccgaggacaacctgctggccctgggcctgaagcactttgagggcacagagttcctgaaccccctcatcagcaagtacctgctgacctgcaagacagcccggcagctgactgtgcgcatcaagaacctgaacatgaacagagccccagacaacatcatcaagttctacaagaagaccaagcagctgcctgtgctgggcaagtgctgtgaggagatccagccccaccagtggaagccacccatcgagcgggaggagcaccggctgcccttctggctgaaggccagcctgcccagcatccaggaggagctgcggcacatggctgatggagcccgggaggtgggcaacatgacaggcaccacagagatcaacagcgaccagggcctggagaaggacaacagcgagctgggcagcgagacccgctaccccctgctgctgcccaagggcgtggtgctgaagctgaagcctgtggccgaccgcttccccaagaaggcctggaggcagaagaggagctctgtgctgaagcccctgctgatccagcccagccccagcctgcagcccagcttcaaccctgggaagaccccagcccagagcacccacagcgaggccccacccagcaagatggtgctgcgcatcccccaccccatccagcctgccaccgtgctgcagacagtgcctggggtgccccccctgggcgtgtctggaggagagagctttgagagccctgctgccctgcctgccatgcctcctgaggcccggaccagcttccccctgtctgagagccagaccctgctgagcagcgcccctgtgcccaaggtgatgatgcccagccctgccagctccatgttcaggaagccctacgtgagaagaagacccagcaagagaagaggagcccgggccttccgctgcatcaagccagcccctgtgatccacccagccagcgtcatcttcaccgtgcctgccaccaccgtgaagatcgtgtccctgggcggcggctgcaacatgatccagcctgtgaatgctgctgtggcccagagcccccagaccatccccatcgccaccctgctggtgaaccccaccagcttcccctgccccctgaaccagcccctggtggccagctctgtgagccccctgattgtgtctggcaacagcgtgaacctgcccatccccagcaccccagaggacaaggcccacatgaatgtggacatcgcctgtgctgtggctgatggagaaaatgccttccagggcctggagcccaagctggagccccaggagctgagccccctgagcgccaccgtcttccccaaggtggagcacagccctggccccccacctgtggacaagcagtgccaggagggcctgtctgagaacagcgcctaccgctggacagtggtgaagacagaggagggccggcaggccctggagcccctgccccagggcatccaggagagcctgaacaacagcagccctggggacctggaggaggtggtgaagatggagccagaagatgccacagaggagatcagcggcttcctgtag

SEQ ID NO: 76495 - DNA, 1488 bp, Artificial Sequence
  derived and/or modified sequence
atggccggcgtgggccgcagcggcggcccctggggccgcacccggggcggccgcagcggccgcctgggcgtgtccctgggcgccctgagcagcctgcccctggaggagctgccccggcccctgtgctgccgccgctgcagaagacacttcggctttgccctgcggggggagaccatccctgtgtctgtggccggcagcgccagcagccagtttgcccccctggccctgcacctgagcctgctgctgagccgcatcagcgccagccggctgacccgctggcccccaccagacaagcgggagggcagcgctgtggaccccgggaagagaagaagcctggccgccacccccagcagcagcctgccctgcaccctgattgccctgggcctgcggcatgagaaggaggccaatgagctgatggaggacctgtttgagaccttccaggatgagatgggcttcagcaacatggaggatgatggccctgaggaggaggagcgggtggccgagccccaggccaacttcaacaccccccaggccctgcgctttgaggagctgctggccaacctgctgaatgagcagcaccagatcgccaaggagctgtttgagcagctgaagatgaagaagcccagcgccaagcagcagaaggaggtggagaaggtgaagccccagtgcaaggaggtgcaccagaccctcatcctggaccctgcccagaggaagaggctgcagcagcagatgcagcagcacgtgcagctgctgacccagatccacctgctggccacctgcaaccccaacctgaaccctgaggccagcagcacccgcatctgcctgaaggagctgggcacctttgcccagagcagcatcgccctgcaccaccagtacaaccccaagttccagaccctcttccagccctgcaacctgatgggcgccatgcagctgattgaggacttcagcacccacgtgtccattgactgcagcccccacaagacagtgaagaagacagccaatgagttcccctgcctgcccaagcaggtggcctggatcctggccaccagcaaggtgttcatgtacccagagctgctgcctgtgtgcagcctgaaggccaagaacccccaggacaagatcctcttcaccaaggccgaggacaacctgctggccctgggcctgaagcactttgagggcacagagttcctgaaccccctcatcagcaagtacctgctgacctgcaagacagcccggcagctgactgtgcgcatcaagaacctgaacatgaacagagccccagacaacatcatcaagttctacaagaagaccaagcagctgcctgtgctgggcaagtgctgtgaggagatccagccccaccagtggaagccacccatcgagcgggaggagcaccggctgcccttctggctgaaggtgcagcccagcagcagcaagtctgtgggcggccgccgcagcctgaaggtgctgcgggagtaccagggcctgccctag

SEQ ID NO: 76496 - DNA, 2667 bp, Artificial Sequence
  derived and/or modified sequence
atggccggcgtgggccggagcggcggcccctggggccggacccggggcgggagatcagggaggctgggtgttagcctaggagctctttcctccctcccgctggaggaactgccccgccccctgtgctgcagacggtgcaggagacactttggatttgccctgcggggcgaaaccatccctgttagtgtcgccggctctgcttcaagccagtttgccccgctggctttacaccttagcctcttactgagcaggatttccgcatcacggctcacacggtggccccctcctgacaaaagggaggggtccgccgtggatcccgggaaacgtcgcagtctggctgccacaccgagttcctccctgccttgtaccttaatcgcactggggttgaggcatgaaaaggaagctaatgagctgatggaagatctctttgagacatttcaggacgaaatgggatttagcaacatggaagacgatggaccagaggaagaagaacgggtcgcagagccccaagcaaatttcaacaccccacaggctctgcgcttcgaggaactgctcgcaaatctcctaaacgaacagcaccaaatcgccaaagagctgtttgagcaactgaagatgaaaaaacctagcgccaagcaacagaaagaggttgaaaaggtgaaaccacaatgcaaggaagtgcatcagacactgattctcgaccccgcccagaggaagcgcctacagcagcaaatgcagcaacacgtacagctgctgacccagatccacctattagctacttgtaacccaaacttgaaccctgaagcttcttccaccaggatttgtcttaaagagctgggaactttcgcccagtcctcgattgctctccatcatcagtacaatcccaagtttcagactctgtttcagccttgcaacctgatgggcgcaatgcagctcatagaggatttttcgacccacgtctccatcgactgttctcctcataagaccgtgaagaaaactgccaacgaatttccttgcttgccaaagcaggtggcttggatcctggccacatctaaagtctttatgtacccagagttgttgccagtctgttctctaaaagccaaaaacccacaggacaaaatcttgttcaccaaagccgaagataatctgctggccctcggtttaaagcacttcgaggggacagagttcctaaatcctctgattagcaaatatctgcttacctgtaagacggcccgccaactgactgtgagaattaagaatctgaatatgaatcgcgcacccgacaatatcatcaagttctacaaaaaaacgaagcagctgcctgttctgggtaagtgctgcgaagagattcagccacatcagtggaagccacctattgagcgtgaagagcaccgcctccctttttggcttaaggcatcccttcctagtatacaggaggagctgcggcatatggctgatggtgctcgcgaggtaggaaatatgacaggcaccacagagataaactccgatcaggggttggaaaaggataacagcgaactgggcagcgaaactcgatacccgctcctgctgccaaaaggcgtcgtgttaaagttaaaacccgtcgcagatcgatttcccaagaaggcttggcgtcaaaagagatcctctgtcttgaaaccccttctgatccagccaagcccttctctgcaaccctcgtttaaccccgggaagacaccggcccaatcaacacattctgaggccccaccgtcgaaaatggtgttgcggattccacaccccatacagcccgccactgtcctacagactgttccaggtgtgccacctctcggagtaagcgggggggagtccttcgaaagcccagccgcccttcccgccatgcctcccgaagctagaacctcttttcccttaagcgagagccagacacttctgagcagcgcccctgttcctaaagtcatgatgcccagcccagcgtccagcatgttcagaaaaccatacgtacgccgccgccccagtaagagacggggggcccgcgccttccgctgcattaaaccagcaccggtaatacatccagccagcgttattttcactgtgcccgcaacaacagtcaagattgtctccctcggtggcggatgcaatatgattcagcctgtgaatgctgctgtagcccagtccccccagaccatacccattgcaacactgctcgtcaatccaacctctttcccatgtccacttaaccaacctttggtagcctcaagtgtgagccctctaatcgtgtccggcaattcagtaaacctcccaatcccatcaacacctgaagacaaggcccatatgaatgtggatatcgcttgcgcggtcgccgatggcgaaaacgcattccagggcttggagcctaagctggagccgcaggagctgagcccgctgagcgcaacggtgttccccaaggtcgagcactctcccggacctccccccgtggataagcagtgccaagagggactgagcgagaactctgcctaccgttggaccgttgtgaagacagaggaaggtcgtcaggctcttgagcccctaccacagggcattcaagagtctctgaacaactccagcccaggagatctagaagaggtagtcaaaatggagcctgaggacgctacagaagagatatccggattcctatag

SEQ ID NO: 76497 - DNA, 1488 bp, Artificial Sequence
  derived and/or modified sequence
atggccggcgtgggccggagcggcggcccctggggccggacccgggggggtcggagtggtcggctgggagtgagtctgggagctctgtcatcactgccacttgaagaactgcctcgcccgttgtgctgtcggcgatgtcggcgtcatttcggctttgctctcagaggcgagacaattcccgtgtcagtggctgggagcgcttctagccaattcgcgccactcgccctgcacctttcattactgctgtctcggatatccgcctcccggctcacccgttggccaccccctgataagcgtgaaggcagtgccgtggaccccggcaagaggaggagtttggccgctactccatcctcaagtctcccctgcaccctcatcgctctggggctgcggcatgaaaaggaggctaacgaactgatggaggatctctttgagacgttccaagatgaaatgggtttttctaatatggaggatgacggccctgaggaagaggagagggtcgcggagccacaggccaatttcaacaccccgcaggcattgcggttcgaggagctgctagctaatctgttaaatgaacagcatcagattgccaaggagttgttcgagcaactcaaaatgaagaagcccagcgccaaacagcagaaagaggttgaaaaggtgaagccacaatgcaaggaggttcatcaaaccctaattctcgatcccgcgcagagaaagagactgcagcagcagatgcagcagcatgtgcagctgctcacccagattcatctgctggctacttgcaatcctaatctgaacccagaagcgtcttctacacgaatttgcctgaaagagctcggtacatttgctcagagctccatcgccctgcaccaccagtacaacccaaaatttcagactctgtttcagccgtgtaacctgatgggcgcaatgcagctgattgaagattttagtacacatgtgagcattgattgctccccccacaagacggtgaagaagaccgcaaacgaattcccatgcctgcccaagcaggtcgcgtggattctggctacttcaaaggtcttcatgtaccccgaattgctgcccgtgtgctctcttaaagctaagaaccctcaggacaagatcttatttacgaaggcagaagataacctgctggctctggggcttaaacactttgagggaaccgagttcctcaatccactgatcagcaagtatctgctcacatgcaagaccgccaggcaacttacggtgaggattaagaatcttaatatgaaccgagccccagacaacatcatcaagttctataaaaaaactaagcagctacctgtgcttggcaaatgctgcgaggaaattcagccccatcagtggaagccgccaattgagagggaggaacaccgtcttcctttttggctgaaagtacagccttccagctctaagagcgtcggtggcagacgctccttaaaagtgctacgggagtatcaaggtttgccatag

SEQ ID NO: 76498 - DNA, 2011 bp, Artificial Sequence
  derived and/or modified sequence
gtgcgcgctacatggccggagtcgggcgaagcgggggaccgtggggaagaacgcgaggagggaggagtgggaggttgggggtgtcgctaggcgcccttagctccctccctctggaggagctgccgcggccactctgctgccgccgctgccgccgccattttgggttcgctttgcgaggggaaacgatcccagtgtcggttgcgggatccgcctcctctcagtttgcccctttagccctccacctttcccttctcctctctcgcatttccgccagtcggcttacccgctggccgcctcctgacaagcgggagggatccgcggtggacccagggaagcggaggagcctggcggccaccccctcttcctcacttccctgtactctcatcgctctcggcctccgacacgaaaaggaagcaaatgagctgatggaagatctgtttgaaactttccaagatgagatgggattctccaacatggaagatgatggcccagaagaggaggagcgtgtggctgagcctcaagctaactttaacacccctcaagctctacggtttgaggaactactggccaacctactaaatgaacaacatcagatagcgaaggaactatttgaacagctgaagatgaagaaaccttcagccaaacagcagaaggaggtagagaaggttaaaccccagtgtaaggaagttcatcagaccctgattctggacccagcacaaaggaagagactccagcagcagatgcagcagcatgttcagctcttgacacaaatccaccttcttgccacctgcaaccccaatctcaatccggaggccagtagcaccaggatatgtcttaaagagctgggaacctttgctcaaagctccatcgcccttcaccatcagtacaaccccaagtttcagaccctgttccaaccctgtaacttgatgggagctatgcagctgattgaagacttcagcacacatgtcagcattgactgcagccctcataaaactgtcaagaagactgccaatgaatttccctgtttgccaaagcaagtggcttggatcctggccacaagcaaggttttcatgtatccagagttacttccagtgtgttccctgaaggcaaagaatccccaggataagatcctcttcaccaaggctgaggacaatttgttagctttaggactgaagcattttgaagggactgagtttcttaaccctctaatcagcaagtaccttctaacctgcaagactgcccgccaactgacagtgagaatcaagaacctcaacatgaacagagctcctgacaacatcattaaattttataagaagaccaaacagctgccagtcctaggaaaatgctgtgaagagatccagccacatcagtggaagccacctatagagagagaagaacaccggctcccattctggttaaaggtacagccctcttcctcgaagtctgtaggaggcagaaggtcactgaaagttctgagagaatatcaaggacttccttaatcgtctaatgctttagttgtagaactaggacttcaggaatcttcctgattcacctttcttcccttacttttctgcccttctccgggtgattctacaacattttcaaaataatgggtaaaatggtaatttgctaaaggaaattcagagaagagtttctaaagtgtataattggactgtggtctttgtagaaatttcatatgcagagtcccttggaaagatgccttgagcttgtctcaggtccctaaacttagaaagtcctattctttttcccaaattctgacatgtgctggatcagagtgttctcatttccaataggccagtctgccatccatccaggaagaactgcggcacatggctgatggtgctagagaggtaggaaatatgactggaaccactgagatcaactcagatcaaggcctagaaaaagacaactcagagttggggagtgaaactcggtacccactgctattgcctaagggtgtagtcctgaaactgaagccagttgccgaccg

SEQ ID NO: 76499 - DNA, 2667 bp, Artificial Sequence
  derived and/or modified sequence
atggccggagtcgggaggagtggcggaccatggggtcggaccagaggaggaagatctgggcgtttgggggtctcactcggagcgctgtcatcacttcccctggaggaattaccacgcccactgtgttgccgaagatgccggcgacattttgggttcgccctgcggggagagactattccagtatcagttgcgggaagtgcttctagtcagttcgcccctctggcactgcatctgagcctgcttctttctaggattagtgcatccaggctaacaaggtggcctcccccagacaaaagagagggttcagctgtcgaccccggaaaacgaagaagccttgccgctacacctagctcctccctcccttgtacgttgatcgccctgggtctgaggcacgagaaggaggccaacgaactgatggaggatctcttcgagacttttcaggacgaaatgggattctctaatatggaagacgatgggccagaggaagaggaacgcgtggccgagccacaggccaacttcaatactccgcaagccctgaggtttgaggagttactcgctaacctgctgaatgaacaacaccagattgccaaagagctttttgaacagctgaagatgaaaaagccctctgcaaagcagcagaaggaagtcgaaaaagttaagccacagtgtaaagaggtacaccagaccttgatcctggatccggcacagcgcaaaaggctccagcagcaaatgcagcagcatgtccaattgctgacacagatccacctgctcgccacgtgcaatcctaaccttaacccagaggcttcgagcacacggatctgtctcaaagaactgggcacctttgcccagtcaagtatcgccctgcatcatcagtataacccaaaatttcaaactctcttccagccttgcaaccttatgggagcgatgcagttgattgaagacttctccacccacgtgtctatcgactgcagccctcacaagactgtgaagaaaactgcaaatgagttcccgtgtctccccaagcaggttgcctggattttggctaccagtaaggtattcatgtacccagaattactgcctgtgtgtagcctcaaagccaaaaacccccaggataaaatcctcttcaccaaagcagaggataacttgctggccctgggcctaaagcacttcgaaggcaccgaattcttaaatccgctaatatctaagtacctgcttacctgtaaaaccgccagacagttgactgttagaattaagaatctaaacatgaaccgcgcaccagacaatatcataaagttctataaaaaaacgaagcagctgcctgttctcggaaagtgttgcgaagaaatccagccacaccagtggaagcccccaatcgagcgggaggaacatcggctacccttttggctcaaagcatccctcccctcaatacaagaagagctgaggcacatggccgatggggcaagagaagtcggtaatatgactggcaccactgagattaattcagatcaaggtttggagaaagacaacagtgagctgggctccgaaacccgctatccgttactcctgcctaagggcgtggtgctcaagcttaagccagttgccgatcggttccccaagaaagcctggcggcagaagcgatcctccgtgctgaaacccttgttgatccagcctagccctagcttacagcctagctttaacccagggaaaacaccagcgcagtctacacatagcgaagccccacctagcaagatggttcttagaattccacatcctattcagcctgccacggtgctccagaccgtgcccggtgtacccccactgggtgtgtctggtggcgagagcttcgagtctcctgccgcactgcctgctatgccccctgaagcacgtaccagttttcccctctccgagtcacagactctgttgagttcagcccctgtgcccaaagtaatgatgccaagccccgcatccagtatgttcaggaaaccttacgtgagacgcagaccctcgaagaggagaggggctagagctttcagatgcatcaagccagctccggtgattcacccagcctccgtgatctttactgttcctgcgacgaccgtgaaaatagttagccttgggggagggtgtaatatgatccaacctgtgaatgccgcagtggcacaatcacctcagaccatacccatcgctacactgctagtcaatcccacgagcttcccctgtcctctgaaccagcctctcgtcgcatcctctgtgtcgcctctgatcgtgtctggtaactcagtcaatctgccgatcccttcaacgcccgaggataaagcacacatgaatgttgacatcgcctgcgccgttgcggatggagagaatgcctttcagggcctggagccaaagttggaacctcaggaactgtctcctctttctgcaacagtgttccccaaagtcgaacactcacccggacctcccccagtggataaacagtgtcaagaagggttaagtgaaaactcagcttatagatggaccgtggtcaagaccgaagagggcagacaggcactcgagccgctcccccagggcatccaggaatcactgaacaatagcagtccgggagatcttgaggaggtagtcaagatggagccagaggatgcaacagaagagatcagcggttttctctag

SEQ ID NO: 76500 - DNA, 1488 bp, Artificial Sequence
  derived and/or modified sequence
atggcaggggttggtcgttcagggggtccgtgggggagaacacgaggaggtagatccggccgtctgggtgtctccctgggggctctgagtagcctcccgctggaggagcttcccagacctctatgttgtcgcagatgcaggcggcactttgggtttgctttacggggagagacaatcccagtctcggtcgccggttcagcgtcctcacagttcgccccactggccctgcacctttctctcctgctcagcagaatttctgcctcccgcttgacacgctggcctcctcccgataaaagagaagggagtgcagtcgaccccggaaagaggcggtctctcgcagcaactcccagcagcagccttccttgcacactgatcgctctcgggctcaggcatgagaaagaagccaacgagctcatggaggatctttttgagacctttcaggacgaaatgggttttagtaacatggaagatgacggtcccgaagaggaagagagggtcgccgagccccaggccaacttcaatacacctcaggctttgagattcgaagaactgctcgctaacttacttaatgagcaacatcagattgccaaggagctgtttgaacaattaaaaatgaagaaacccagtgcaaaacagcagaaggaggtagagaaggttaagccacagtgcaaagaagtccaccaaactctgatcctagatcctgcccagcgcaagcggctgcaacagcaaatgcagcagcatgtccagctgctgactcagatacatcttctggcaacttgcaacccaaaccttaatcccgaggcttcttctactcgcatctgcctcaaggagcttggcacattcgcccagtcaagtatagcactgcaccaccagtacaacccgaagttccagactctcttccaaccttgcaacctcatgggcgcaatgcagctgatcgaagatttttccacccatgtgagcatcgactgctctccccacaagacggtaaaaaaaacagctaacgaattcccttgcctccccaagcaagtagcctggatcttagccacctccaaagtctttatgtaccccgagctgctaccggtctgctctctgaaggctaaaaacccacaggacaaaattctgttcacaaaggccgaggacaacctgttggccttggggctcaagcattttgagggaacggagtttctgaaccccctcatttcaaagtacctgttaacctgtaagaccgcaagacagctcactgtgcggatcaaaaaccttaatatgaacagggccccagataatattattaagttctacaagaagactaagcaactacccgttctcggcaaatgttgtgaggagatacagccccaccagtggaagccccctatagaaagggaagaacaccggttacccttttggctgaaggtgcagccatcatcctccaaaagcgtagggggacgaaggagtttaaaagtgctccgggagtatcagggactcccttag

SEQ ID NO: 76501 - protein, 196 aa, Artificial Sequence
  derived and/or modified sequence
MEDLFETFQDEMGFSNMEDDGPEEEERVAEPQANFNTPQALRFEELLANLLNEQHQIAKELFEQLKMKKPSAKQQKEVEKVKPQCKEVHQTLILDPAQRKRLQQQMQQHVQLLTQIHLLATCNPNLNPEASSTRICLKELGTFAQSSIALHHQYNPKFQTLFQPCNLMGAMQLIEDFSTHVSIDCSPHKTVKKTVC

SEQ ID NO: 76502 - protein, 165 aa, Artificial Sequence
  derived and/or modified sequence
MEDLFETFQDEMGFSNMEDDGPEEEERVAEPQANFNTPQALRFEELLANLLNEQHQIAKELFEQLKMKKPSAKQQKEVEKVKPQCKEVHQTLILDPAQRKRLQQQMQQHVQLLTQIHLLATCNPNLNPEASSTRICLSWEPLLKAPSPFTISTTPSFRPCSNPVT

SEQ ID NO: 76503 - protein, 868 aa, Artificial Sequence
  derived and/or modified sequence
MAGVGRSGGPWGRTRGGRSGRLGVSLGALSSLPLEELPRPLCCRRCRRHFGFALRGETIPVSVAGSASSQFAPLALHLSLLLSRISASRLTRWPPPDKREGSAVDPGKRRSLAATPSSSLPCTLIALGLRHEKEANELMEDLFETFQDEMGFSNMEDDGPEEEERVAEPQANFNTPQALRFEELLANLLNEQHQIAKELFEQLKMKKPSAKQQKEVEKVKPQCKEVHQTLILDPAQRKRLQQQMQQHVQLLTQIHLLATCNPNLNPEASSTRICLKELGTFAQSSIALHHQYNPKFQTLFQPCNLMGAMQLIEDFSTHVSIDCSPHKTVKKTANEFPCLPKQVAWILATSKVFMYPELLPVCSLKAKNPQDKILFTKAEDNKYLLTCKTARQLTVRIKNLNMNRAPDNIIKFYKKTKQLPVLGKCCEEIQPHQWKPPIEREEHRLPFWLKASLPSIQEELRHMADGAREVGNMTGTTEINSDQGLEKDNSELGSETRYPLLLPKGVVLKLKPVADRFPKKAWRQKRSSVLKPLLIQPSPSLQPSFNPGKTPAQSTHSEAPPSKMVLRIPHPIQPATVLQTVPGVPPLGVSGGESFESPAALPAMPPEARTSFPLSESQTLLSSAPVPKVMMPSPASSMFRKPYVRRRPSKRRGARAFRCIKPAPVIHPASVIFTVPATTVKIVSLGGGCNMIQPVNAAVAQSPQTIPIATLLVNPTSFPCPLNQPLVASSVSPLIVSGNSVNLPIPSTPEDKAHMNVDIACAVADGENAFQGLEPKLEPQELSPLSATVFPKVEHSPGPPPVDKQCQEGLSENSAYRWTVVKTEEGRQALEPLPQGIQESLNNSSPGDLEEVVKMEPEDATEEISGFL

SEQ ID NO: 76504 - DNA, 2607 bp, Artificial Sequence
  derived and/or modified sequence
atggccggcgtgggcagaagcggcggcccctggggcagaaccagaggcggcagaagcggcagactgggcgtgagcctgggcgccctgagcagcctgcccctggaggagctgcccagacccctgtgctgcagaagatgcagaagacacttcggcttcgccctgagaggcgagaccatccccgtgagcgtggccggcagcgccagcagccagttcgcccccctggccctgcacctgagcctgctgctgagcagaatcagcgccagcagactgaccagatggcccccccccgacaagagagagggcagcgccgtggaccccggcaagagaagaagcctggccgccacccccagcagcagcctgccctgcaccctgatcgccctgggcctgagacacgagaaggaggccaacgagctgatggaggacctgttcgagaccttccaggacgagatgggcttcagcaacatggaggacgacggccccgaggaggaggagagagtggccgagccccaggccaacttcaacaccccccaggccctgagattcgaggagctgctggccaacctgctgaacgagcagcaccagatcgccaaggagctgttcgagcagctgaagatgaagaagcccagcgccaagcagcagaaggaggtggagaaggtgaagccccagtgcaaggaggtgcaccagaccctgatcctggaccccgcccagagaaagagactgcagcagcagatgcagcagcacgtgcagctgctgacccagatccacctgctggccacctgcaaccccaacctgaaccccgaggccagcagcaccagaatctgcctgaaggagctgggcaccttcgcccagagcagcatcgccctgcaccaccagtacaaccccaagttccagaccctgttccagccctgcaacctgatgggcgccatgcagctgatcgaggacttcagcacccacgtgagcatcgactgcagcccccacaagaccgtgaagaagaccgccaacgagttcccctgcctgcccaagcaggtggcctggatcctggccaccagcaaggtgttcatgtaccccgagctgctgcccgtgtgcagcctgaaggccaagaacccccaggacaagatcctgttcaccaaggccgaggacaacaagtacctgctgacctgcaagaccgccagacagctgaccgtgagaatcaagaacctgaacatgaacagagcccccgacaacatcatcaagttctacaagaagaccaagcagctgcccgtgctgggcaagtgctgcgaggagatccagccccaccagtggaagccccccatcgagagagaggagcacagactgcccttctggctgaaggccagcctgcccagcatccaggaggagctgagacacatggccgacggcgccagagaggtgggcaacatgaccggcaccaccgagatcaacagcgaccagggcctggagaaggacaacagcgagctgggcagcgagaccagataccccctgctgctgcccaagggcgtggtgctgaagctgaagcccgtggccgacagattccccaagaaggcctggagacagaagagaagcagcgtgctgaagcccctgctgatccagcccagccccagcctgcagcccagcttcaaccccggcaagacccccgcccagagcacccacagcgaggccccccccagcaagatggtgctgagaatcccccaccccatccagcccgccaccgtgctgcagaccgtgcccggcgtgccccccctgggcgtgagcggcggcgagagcttcgagagccccgccgccctgcccgccatgccccccgaggccagaaccagcttccccctgagcgagagccagaccctgctgagcagcgcccccgtgcccaaggtgatgatgcccagccccgccagcagcatgttcagaaagccctacgtgagaagaagacccagcaagagaagaggcgccagagccttcagatgcatcaagcccgcccccgtgatccaccccgccagcgtgatcttcaccgtgcccgccaccaccgtgaagatcgtgagcctgggcggcggctgcaacatgatccagcccgtgaacgccgccgtggcccagagcccccagaccatccccatcgccaccctgctggtgaaccccaccagcttcccctgccccctgaaccagcccctggtggccagcagcgtgagccccctgatcgtgagcggcaacagcgtgaacctgcccatccccagcacccccgaggacaaggcccacatgaacgtggacatcgcctgcgccgtggccgacggcgagaacgccttccagggcctggagcccaagctggagccccaggagctgagccccctgagcgccaccgtgttccccaaggtggagcacagccccggccccccccccgtggacaagcagtgccaggagggcctgagcgagaacagcgcctacagatggaccgtggtgaagaccgaggagggcagacaggccctggagcccctgccccagggcatccaggagagcctgaacaacagcagccccggcgacctggaggaggtggtgaagatggagcccgaggacgccaccgaggagatcagcggcttcctgtag

SEQ ID NO: 76505 - DNA, 2607 bp, Artificial Sequence
  derived and/or modified sequence
atggccggcgtggggagaagcggcggcccatggggaagaacaaggggcggccgatcggggaggctgggggtttcgctcggtgcactgtcctctcttcctctcgaggagctgccgaggcctctgtgctgtagaaggtgccgtagacatttcggattcgctctgaggggtgagacaattccggtttccgtggccggatccgcgagttcccagtttgcccccctagcgctccatttgtcactgctgctgtctagaatttccgccagccggttaacccgatggccgcctccagacaagagggagggctccgcagttgatcctgggaagagaaggtcactggcagcaacaccctcgtcatcattgccctgcaccctgatcgccctcggactgaggcatgagaaggaagctaatgaattaatggaggacctcttcgaaacgttccaggatgagatggggtttagcaacatggaggacgacgggcctgaagaggaggaaagagtggcagagccacaagcaaatttcaatactccacaggcactaaggttcgaagagctcctggctaacctgctcaatgaacagcaccaaattgcaaaggagctgttcgaacagttgaagatgaaaaagccctcagcaaagcagcagaaggaggtggaaaaagttaagccacagtgcaaggaggtacaccagaccctaatcctagatccggcacagaggaagaggctgcagcaacagatgcagcaacacgtacaattgctgactcagattcatcttctggccacatgtaaccctaatttaaatcccgaggcttcatcgacccgtatctgcctcaaagagttaggcacgtttgcccagagctctattgccctccatcaccaatacaaccccaaattccaaacccttttccagccctgcaacctcatgggtgccatgcagctcattgaagacttcagtacccatgtatccattgattgcagtccccataagactgtgaagaagaccgccaatgaattcccctgtctgcccaaacaggtagcctggatactggccacctctaaggttttcatgtatcccgagctcttgccagtgtgcagcctcaaagctaagaaccctcaggataaaatcctctttacaaaagccgaggacaacaagtacctgctgacatgcaagactgccaggcaactgactgtgcggatcaagaatctcaatatgaacagagccccagacaatattattaaattctacaaaaaaacaaagcaactcccagtgttgggcaaatgttgtgaagagattcaacctcaccagtggaaacctccgattgagagggaggaacatcgtttgcctttttggctgaaagcctctcttccttcgattcaggaagaactgcgtcacatggccgacggggctcgggaggtcggcaacatgactggcacaactgaaataaattccgaccaaggtctggaaaaagataacagcgaactggggagcgagacaagatatccgctgctcctgccgaagggtgtggtgctcaaattgaagccagtcgccgatcggttccccaagaaagcctggagacagaaacggagcagcgtgctaaagccactcctgattcagccgagtccttcgttgcagcctagctttaatccagggaagacaccagcacagagtacccatagcgaggccccgcctagcaaaatggtgctcaggatccctcaccccattcagccagctaccgtgctgcagactgtaccgggcgtgccacctttgggagtaagtggtggggagtcatttgagtcacccgccgctttgcctgcaatgcctccggaggctcgcacttcattccccctgtcagaatcccagactctgttgtccagtgcccctgtcccgaaagtgatgatgcctagtccagcctccagcatgtttcgcaagccgtacgtgcggcggagacctagcaagcggcggggggctagggcttttaggtgcatcaaaccggcgcccgtcatccacccagcgagtgtgatattcaccgtgccggccaccacagtgaagattgtctcccttggggggggatgtaacatgatacagcccgtcaacgctgccgtggcacagagccctcagaccatccccattgccaccctcttggtcaacccaacaagcttcccctgccctttgaatcaaccactagtggccagcagcgtgagcccacttattgtctccggcaactcggtcaatctcccaattcctagcacccccgaagacaaggcgcacatgaatgtagacattgcttgcgcagtagcagacggagagaacgcatttcagggattagagccaaaattagagcctcaagaattgagtcccctgtccgctaccgttttccccaaggtggagcattctcctggaccccccccagttgacaaacaatgtcaggaaggcctgagcgagaatagcgcctataggtggactgtggtcaaaaccgaagaaggtagacaagcactcgagcctcttccgcaggggatacaggaatcgctgaacaactcatctcctggggatctcgaagaggtcgtgaagatggagcccgaggacgctacagaggaaatcagcgggttcttgtag

SEQ ID NO: 76506 - DNA, 2927 bp, Artificial Sequence
  derived and/or modified sequence
cgcgtacgggatggctggctcgcaggacggccgaaggtggtggttggtgggagcagccagcgacgagcccgtagacactcgtacgcgtgcgggctgacgtgcgcgctacatggccggagtcgggcgaagcgggggaccgtggggaagaacgcgaggagggaggagtgggaggttgggggtgtcgctaggcgcccttagctccctccctctggaggagctgccgcggccactctgctgccgccgctgccgccgccattttgggttcgctttgcgaggggaaacgatcccagtgtcggttgcgggatccgcctcctctcagtttgcccctttagccctccacctttcccttctcctctctcgcatttccgccagtcggcttacccgctggccgcctcctgacaagcgggagggatccgcggtggacccagggaagcggaggagcctggcggccaccccctcttcctcacttccctgtactctcatcgctctcggcctccgacacgaaaaggaagcaaatgagctgatggaagatctgtttgaaactttccaagatgagatgggattctccaacatggaagatgatggcccagaagaggaggagcgtgtggctgagcctcaagctaactttaacacccctcaagctctacggtttgaggaactactggccaacctactaaatgaacaacatcagatagcgaaggaactatttgaacagctgaagatgaagaaaccttcagccaaacagcagaaggaggtagagaaggttaaaccccagtgtaaggaagttcatcagaccctgattctggacccagcacaaaggaagagactccagcagcagatgcagcagcatgttcagctcttgacacaaatccaccttcttgccacctgcaaccccaatctcaatccggaggccagtagcaccaggatatgtcttaaagagctgggaacctttgctcaaagctccatcgcccttcaccatcagtacaaccccaagtttcagaccctgttccaaccctgtaacttgatgggagctatgcagctgattgaagacttcagcacacatgtcagcattgactgcagccctcataaaactgtcaagaagactgccaatgaatttccctgtttgccaaagcaagtggcttggatcctggccacaagcaaggttttcatgtatccagagttacttccagtgtgttccctgaaggcaaagaatccccaggataagatcctcttcaccaaggctgaggacaacaagtaccttctaacctgcaagactgcccgccaactgacagtgagaatcaagaacctcaacatgaacagagctcctgacaacatcattaaattttataagaagaccaaacagctgccagtcctaggaaaatgctgtgaagagatccagccacatcagtggaagccacctatagagagagaagaacaccggctcccattctggttaaaggccagtctgccatccatccaggaagaactgcggcacatggctgatggtgctagagaggtaggaaatatgactggaaccactgagatcaactcagatcaaggcctagaaaaagacaactcagagttggggagtgaaactcggtacccactgctattgcctaagggtgtagtcctgaaactgaagccagttgccgaccgtttccccaagaaggcttggagacagaagcgttcatcagtcctgaaacccctccttatccaacccagcccctctctccagcccagcttcaaccctgggaaaacaccagcccaatcaactcattcagaagcccctccgagcaaaatggtgctccggattcctcacccaatacagccagccactgttttacagacagttccaggtgtccctccactgggggtcagtggaggtgagagttttgagtctcctgcagcactgcctgctatgccccctgaggccaggacaagcttccctctgtctgagtcccagactttgctctcttctgcccctgtgcccaaggtaatgatgccctcccctgcctcttccatgtttcgaaagccatatgtgagacggagaccctcaaaaagaaggggagccagggcctttcgctgtatcaaacctgcccctgttatccaccctgcatctgttatcttcactgttcctgctaccactgtgaagattgtgagccttggcggtggctgtaacatgatccagcctgtcaatgcggctgtggcccagagtccccagactattcccatcgccaccctcttggttaaccctacttccttcccctgtccattgaaccagccccttgtggcctcctctgtctcacccttaattgtttctggcaattctgtgaatcttcctataccatccacccctgaagataaggcccacatgaatgtggacattgcttgtgctgtggctgatggggaaaatgcctttcagggcctagaacccaaattagagccccaggaactatctcctctctctgctactgttttccccaaagtggaacatagcccagggcctccaccagtcgataaacagtgccaagaaggattgtcagagaacagtgcctatcgctggaccgttgtgaaaacagaggagggaaggcaagctctggagccgctccctcagggcatccaggagtctctaaacaactcttcccctggggatttagaggaagttgtcaagatggaacctgaagatgctacagaggaaatcagtggatttctttgagctaggagaataagagtctggagactgggagccttcacttcggcctccgattggtggcgcatagggtgtaaccaataggaaacccctaaagggtacttaaaccccagattttgcaactggggctcttgagcagcttgctttagcctgctcccactctgtggaatatacttttgcttcaataaatctgtgcttttattgcttcattgtttca

SEQ ID NO: 76507 - DNA, 2607 bp, Artificial Sequence
  derived and/or modified sequence
atggccggcgtgggccgcagcggcggcccctggggccgcacccggggcggccgcagcggccgcctgggcgtgtccctgggcgccctgagcagcctgcccctggaggagctgccccggcccctgtgctgccgccgctgcagaagacacttcggctttgccctgcggggggagaccatccctgtgtctgtggccggcagcgccagcagccagtttgcccccctggccctgcacctgagcctgctgctgagccgcatcagcgccagccggctgacccgctggcccccaccagacaagcgggagggcagcgctgtggaccccgggaagagaagaagcctggccgccacccccagcagcagcctgccctgcaccctgattgccctgggcctgcggcatgagaaggaggccaatgagctgatggaggacctgtttgagaccttccaggatgagatgggcttcagcaacatggaggatgatggccctgaggaggaggagcgggtggccgagccccaggccaacttcaacaccccccaggccctgcgctttgaggagctgctggccaacctgctgaatgagcagcaccagatcgccaaggagctgtttgagcagctgaagatgaagaagcccagcgccaagcagcagaaggaggtggagaaggtgaagccccagtgcaaggaggtgcaccagaccctcatcctggaccctgcccagaggaagaggctgcagcagcagatgcagcagcacgtgcagctgctgacccagatccacctgctggccacctgcaaccccaacctgaaccctgaggccagcagcacccgcatctgcctgaaggagctgggcacctttgcccagagcagcatcgccctgcaccaccagtacaaccccaagttccagaccctcttccagccctgcaacctgatgggcgccatgcagctgattgaggacttcagcacccacgtgtccattgactgcagcccccacaagacagtgaagaagacagccaatgagttcccctgcctgcccaagcaggtggcctggatcctggccaccagcaaggtgttcatgtacccagagctgctgcctgtgtgcagcctgaaggccaagaacccccaggacaagatcctcttcaccaaggccgaggacaacaagtacctgctgacctgcaagacagcccggcagctgactgtgcgcatcaagaacctgaacatgaacagagccccagacaacatcatcaagttctacaagaagaccaagcagctgcctgtgctgggcaagtgctgtgaggagatccagccccaccagtggaagccacccatcgagcgggaggagcaccggctgcccttctggctgaaggccagcctgcccagcatccaggaggagctgcggcacatggctgatggagcccgggaggtgggcaacatgacaggcaccacagagatcaacagcgaccagggcctggagaaggacaacagcgagctgggcagcgagacccgctaccccctgctgctgcccaagggcgtggtgctgaagctgaagcctgtggccgaccgcttccccaagaaggcctggaggcagaagaggagctctgtgctgaagcccctgctgatccagcccagccccagcctgcagcccagcttcaaccctgggaagaccccagcccagagcacccacagcgaggccccacccagcaagatggtgctgcgcatcccccaccccatccagcctgccaccgtgctgcagacagtgcctggggtgccccccctgggcgtgtctggaggagagagctttgagagccctgctgccctgcctgccatgcctcctgaggcccggaccagcttccccctgtctgagagccagaccctgctgagcagcgcccctgtgcccaaggtgatgatgcccagccctgccagctccatgttcaggaagccctacgtgagaagaagacccagcaagagaagaggagcccgggccttccgctgcatcaagccagcccctgtgatccacccagccagcgtcatcttcaccgtgcctgccaccaccgtgaagatcgtgtccctgggcggcggctgcaacatgatccagcctgtgaatgctgctgtggcccagagcccccagaccatccccatcgccaccctgctggtgaaccccaccagcttcccctgccccctgaaccagcccctggtggccagctctgtgagccccctgattgtgtctggcaacagcgtgaacctgcccatccccagcaccccagaggacaaggcccacatgaatgtggacatcgcctgtgctgtggctgatggagaaaatgccttccagggcctggagcccaagctggagccccaggagctgagccccctgagcgccaccgtcttccccaaggtggagcacagccctggccccccacctgtggacaagcagtgccaggagggcctgtctgagaacagcgcctaccgctggacagtggtgaagacagaggagggccggcaggccctggagcccctgccccagggcatccaggagagcctgaacaacagcagccctggggacctggaggaggtggtgaagatggagccagaagatgccacagaggagatcagcggcttcctgtag

SEQ ID NO: 76508 - DNA, 2607 bp, Artificial Sequence
  derived and/or modified sequence
atggccggcgtgggccggagcggcggcccctggggccggacccggggtggccgtagcggacgactgggcgtgagccttggcgcattaagctctttgcccttagaggaactgccaaggccattgtgttgccggaggtgtcgtcggcactttggcttcgctctcaggggggagacaatccccgtatctgtggccggatctgctagtagtcagttcgctcctcttgctctgcatctgtccctcttgctatctcggatctccgcgtctcgcctgactagatggccaccccctgacaaaagggagggatcagcggttgatccaggaaagcggagatcactggctgcaaccccctcctcttcgctcccttgcacactcatcgcccttggtctccggcatgaaaaagaggccaatgagttgatggaggacttattcgagacctttcaggacgagatgggattcagcaatatggaggacgatggccccgaggaagaagagcgtgtggcagaaccccaggctaacttcaacacgccccaagccctgcggtttgaggaattactagccaacctgttaaacgaacaacatcagattgccaaagaactcttcgagcagcttaagatgaagaagccctccgccaaacaacagaaagaggttgaaaaggtgaaaccacaatgcaaggaggttcaccaaacactgattctggaccctgcgcaacgcaagagactccagcagcagatgcagcagcatgtccagctcctgacccagatccatctgttggccacttgcaaccctaatctcaaccccgaggcatcatcaaccagaatctgcctcaaagagctcggaacattcgcacagagtagtatcgcactgcatcaccagtataatccaaaattccagacactcttccagccatgcaacctcatgggggctatgcaactaatcgaagatttcagcacacacgtgtctatcgattgctccccccataagactgtcaagaagacggctaatgagttcccgtgcctcccaaagcaggtggcttggatattggccacaagtaaggtatttatgtaccccgaactacttccagtgtgctcccttaaagccaagaatccacaagataaaatactctttaccaaggctgaggacaacaagtatctattaacatgcaaaaccgcccgccaactgacagtgagaattaagaaccttaatatgaaccgcgcccctgataacattattaagttttataaaaaaacaaagcaactgccagttctgggaaaatgctgtgaagagattcagccacatcaatggaaaccccctattgagagggaggaacaccggctgccgttctggctgaaagcatccctgccatctatccaggaagaactgcgccacatggccgacggcgcacgcgaggtgggaaatatgaccggcactacagagatcaactcagaccagggattggagaaggataactccgaattgggttccgaaacaagatatcccctgctgctccccaaaggagtcgtgctcaagcttaaaccagtcgccgaccgtttcccaaagaaagcctggagacagaagcgaagcagtgtgctgaagcctctgctaatacagcccagtccatccctgcagcctagctttaacccagggaagacgcccgcacaatccactcactccgaggcccccccctctaaaatggttctgcgtatcccccacccgattcagcccgcgacagtcttgcaaacggtcccaggggtgccacccctgggtgtgtctggtggcgaaagttttgaaagccccgccgctcttccagccatgccacctgaggcaaggaccagcttcccactttctgaatcacagacgttgctgtcttccgcgccggtcccaaaggttatgatgccatctcctgcaagttccatgttccgaaaaccctacgtgagaagacggccttccaagcggcgaggtgctcgcgcattcaggtgtattaaacctgccccggtcatccatccagctagtgtgatctttaccgtccccgctacaactgtcaagatcgtctctctggggggggggtgcaacatgattcaaccggttaacgccgcggtcgcacagtctccccagaccattcccattgctactctgctggttaaccccacttcttttccgtgtcccctgaatcagccactggtggcgtccagcgtttccccgttgatagtgtctggtaatagtgttaacctgcctattcctagcacacctgaagacaaggctcatatgaacgtggacatagcttgcgcggtagcagatggagagaatgcctttcagggactggagccaaaactcgagcctcaggagctgagtcctctgtcagcaaccgtctttccgaaggtggagcatagcccaggtccccctccggtcgacaaacagtgtcaggaggggcttagtgagaatagcgcctacaggtggacagttgtcaagacagaagaaggacgccaggcgctggagcccctgccccagggaattcaggaaagcctgaataactccagtccgggcgatctggaggaagtggtgaaaatggagcctgaagacgcaactgaggagatcagcggcttcctgtag

SEQ ID NO: 76509 - DNA, 2654 bp, Artificial Sequence
  derived and/or modified sequence
gcggcggctgctttggcggcggttggtggccgtgcgggcggggagggagggggaggagagaagaggaggtggagaaggcttgggctcgcgccgctgaagtcggcttacccgctggccgcctcctgacaagcgggagggatccgcggtggacccagggaagcggaggagcctggcggccaccccctcttcctcacttccctgtactctcatcgctctcggcctccgacacgaaaaggaagcaaatgagctgatggaagatctgtttgaaactttccaagatgagatgggattctccaacatggaagatgatggcccagaagaggaggagcgtgtggctgagcctcaagctaactttaacacccctcaagctctacggtttgaggaactactggccaacctactaaatgaacaacatcagatagcgaaggaactatttgaacagctgaagatgaagaaaccttcagccaaacagcagaaggaggtagagaaggttaaaccccagtgtaaggaagttcatcagaccctgattctggacccagcacaaaggaagagactccagcagcagatgcagcagcatgttcagctcttgacacaaatccaccttcttgccacctgcaaccccaatctcaatccggaggccagtagcaccaggatatgtcttaaagagctgggaacctttgctcaaagctccatcgcccttcaccatcagtacaaccccaagtttcagaccctgttccaaccctgtaacttgatgggagctatgcagctgattgaagacttcagcacacatgtcagcattgactgcagccctcataaaactgtcaagaagactgccaatgaatttccctgtttgccaaagcaagtggcttggatcctggccacaagcaaggttttcatgtatccagagttacttccagtgtgttccctgaaggcaaagaatccccaggataagatcctcttcaccaaggctgaggacaacaagtaccttctaacctgcaagactgcccgccaactgacagtgagaatcaagaacctcaacatgaacagagctcctgacaacatcattaaattttataagaagaccaaacagctgccagtcctaggaaaatgctgtgaagagatccagccacatcagtggaagccacctatagagagagaagaacaccggctcccattctggttaaaggccagtctgccatccatccaggaagaactgcggcacatggctgatggtgctagagaggtaggaaatatgactggaaccactgagatcaactcagatcaaggcctagaaaaagacaactcagagttggggagtgaaactcggtacccactgctattgcctaagggtgtagtcctgaaactgaagccagttgccgaccgtttccccaagaaggcttggagacagaagcgttcatcagtcctgaaacccctccttatccaacccagcccctctctccagcccagcttcaaccctgggaaaacaccagcccaatcaactcattcagaagcccctccgagcaaaatggtgctccggattcctcacccaatacagccagccactgttttacagacagttccaggtgtccctccactgggggtcagtggaggtgagagttttgagtctcctgcagcactgcctgctatgccccctgaggccaggacaagcttccctctgtctgagtcccagactttgctctcttctgcccctgtgcccaaggtaatgatgccctcccctgcctcttccatgtttcgaaagccatatgtgagacggagaccctcaaaaagaaggggagccagggcctttcgctgtatcaaacctgcccctgttatccaccctgcatctgttatcttcactgttcctgctaccactgtgaagattgtgagccttggcggtggctgtaacatgatccagcctgtcaatgcggctgtggcccagagtccccagactattcccatcgccaccctcttggttaaccctacttccttcccctgtccattgaaccagccccttgtggcctcctctgtctcacccttaattgtttctggcaattctgtgaatcttcctataccatccacccctgaagataaggcccacatgaatgtggacattgcttgtgctgtggctgatggggaaaatgcctttcagggcctagaacccaaattagagccccaggaactatctcctctctctgctactgttttccccaaagtggaacatagcccagggcctccaccagtcgataaacagtgccaagaaggattgtcagagaacagtgcctatcgctggaccgttgtgaaaacagaggagggaaggcaagctctggagccgctccctcagggcatccaggagtctctaaacaactcttcccctggggatttagaggaagttgtcaagatggaacctgaagatgctacagaggaaatcagtggatttctttgagctaggagaataagagtctggagactgggagccttcacttcggcctccgattggtggcgcatagggtgtaaccaataggaaacccctaaagggtacttaaaccccagattttgcaactggggctcttgagcagcttgctttagcctgctcccactctgtggaatatacttttgcttcaataaatctgtgcttttattgcttcattgtttca

SEQ ID NO: 76510 - DNA, 2607 bp, Artificial Sequence
  derived and/or modified sequence
atggccggtgtaggccgttctgggggtccatggggccgaacacgtggaggaaggagcggaaggctcggggtgtccctgggcgctctgtccagtttaccgctggaagaactccctcggccactgtgctgcaggcggtgccgtcgccactttggatttgcactgcgaggcgaaacaattcccgtgagtgtggccggtagtgcttcgtcacagttcgccccactcgctctgcatttgagtctgttgctgtcccggatctctgccagtagactgacccgctggcctccaccagacaagagggaaggctcagctgtcgatccaggcaagaggaggtctctggctgctaccccttccagctcactgccatgcacccttattgccttgggtctgcggcatgagaaggaggcgaatgaattaatggaagacttgtttgagacctttcaagatgaaatgggcttcagtaatatggaggacgatggtccagaggaggaagagagagttgcggaacctcaggccaacttcaatactccgcaggctctccgtttcgaagagctgttagctaatctgctgaatgaacaacatcagatagctaaggagctgtttgagcagctgaaaatgaaaaagccatccgccaagcagcagaaggaggtcgagaaggtcaaaccccagtgcaaggaggtccaccagaccctgattcttgaccccgctcagagaaagaggctgcagcagcaaatgcagcagcatgtacaacttctgacacagatccaccttctcgctacatgcaatcccaatctcaatccggaggcgtcatctactcgcatctgcctgaaggaattaggcacttttgctcagagtagcatcgccctgcaccaccagtataacccgaagtttcaaactttattccagccctgcaatctgatgggggctatgcagctaatcgaggatttttctacacacgtgagcattgactgttccccacacaagactgtaaaaaagacagctaatgagttcccctgcctgccaaagcaggttgcgtggatcctggccacctccaaggtgtttatgtatccagaactgcttccagtctgcagtctcaaggccaaaaatccccaggataagatcctgtttacaaaagccgaggacaacaagtacttactgacgtgcaaaacagcacgacagctgactgttcgtattaaaaatctgaatatgaatcgcgctcctgataacattataaaattctataaaaagaccaaacagttgcctgtgctagggaagtgttgcgaggagatccagccccaccagtggaagccccctattgaacgggaggagcatcgccttcccttttggctcaaagctagcctcccttccatccaggaagagctccgacatatggccgacggggcaagagaagtgggcaatatgacaggaacaaccgagatcaattcagaccagggcctcgagaaagataacagtgagctgggaagcgaaaccaggtatcccctgctgctgccaaagggggtcgttctaaagctcaaacctgttgccgacagatttccgaaaaaagcatggcgccagaagaggtcatctgttttaaagcctttactgatccagccttcaccttctcttcagcctagcttcaacccagggaaaacccccgctcagtcgacgcattccgaggcccctccgtccaagatggtgctgaggataccccatccaatacagcccgcaactgtgctgcagacagtgcccggtgttccacccctcggggtctccggaggcgaatccttcgagtcccctgctgctctacccgcaatgcccccagaagcaaggacttctttcccactgtcagaatcccagacactcctctcttccgcccctgtgccaaaagtgatgatgccgagccctgcgtcttccatgttccggaagccctatgtgaggcggcgtccctccaaaaggaggggagctcgcgcttttcggtgcattaagccagcccctgtgatccatcccgcatctgtgattttcaccgtgcctgccacgactgtgaaaatcgtaagccttgggggagggtgtaacatgatccagcccgtgaatgcggcagtggcccagtctcctcagaccattccaatcgctactttgttggtcaaccccacatcgtttccctgtcccctgaaccagccactcgttgcgagctctgtcagccctttgattgtgtccgggaacagcgtgaacctgcccataccctccacacccgaagacaaggcccacatgaatgttgacatcgcgtgtgcagtggctgacggggaaaatgcctttcaggggctggagccgaaactggaacctcaagaactgagccccctgagcgcaactgtcttccccaaagtggagcactcaccaggtccaccacccgtggacaaacagtgccaagaggggttgagcgagaatagtgcctacaggtggacggtcgtcaagactgaagagggcagacaggcactggaaccgctgccccagggtatccaggaaagtttaaacaattctagccccggagaccttgaggaggtggtgaagatggaacccgaagatgctaccgaggagataagtggatttctttag

SEQ ID NO: 76511 - DNA, 906 bp, Artificial Sequence
  derived and/or modified sequence
attttgggttcgctttgcgaggggaaacgatcccagtgtcggttgcgggatccgcctcctctcagtttgcccctttagccctccacctttcccttctcctctctcgcatttccgccagtcggcttacccgctggccgcctcctgacaagcgggagggatccgcggtggacccagggaagcggaggagcctggcggccaccccctcttcctcacttccctgtactctcatcgctctcggcctccgacacgaaaaggaagcaaatgagctgatggaagatctgtttgaaactttccaagatgagatgggattctccaacatggaagatgatggcccagaagaggaggagcgtgtggctgagcctcaagctaactttaacacccctcaagctctacggtttgaggaactactggccaacctactaaatgaacaacatcagatagcgaaggaactatttgaacagctgaagatgaagaaaccttcagccaaacagcagaaggaggtagagaaggttaaaccccagtgtaaggaagttcatcagaccctgattctggacccagcacaaaggaagagactccagcagcagatgcagcagcatgttcagctcttgacacaaatccaccttcttgccacctgcaaccccaatctcaatccggaggccagtagcaccaggatatgtcttaaagagctgggaacctttgctcaaagctccatcgcccttcaccatcagtacaaccccaagtttcagaccctgttccaaccctgtaacttgatgggagctatgcagctgattgaagacttcagcacacatgtcagcattgactgcagccctcataaaactgtcaagaagactgtttgttagctttaggactgaagcattttgaagggactgagtttcttaaccctct

SEQ ID NO: 76512 - DNA, 2193 bp, Artificial Sequence
  derived and/or modified sequence
atggaggacctgttcgagaccttccaggacgagatgggcttcagcaacatggaggacgacggccccgaggaggaggagagagtggccgagccccaggccaacttcaacaccccccaggccctgagattcgaggagctgctggccaacctgctgaacgagcagcaccagatcgccaaggagctgttcgagcagctgaagatgaagaagcccagcgccaagcagcagaaggaggtggagaaggtgaagccccagtgcaaggaggtgcaccagaccctgatcctggaccccgcccagagaaagagactgcagcagcagatgcagcagcacgtgcagctgctgacccagatccacctgctggccacctgcaaccccaacctgaaccccgaggccagcagcaccagaatctgcctgaaggagctgggcaccttcgcccagagcagcatcgccctgcaccaccagtacaaccccaagttccagaccctgttccagccctgcaacctgatgggcgccatgcagctgatcgaggacttcagcacccacgtgagcatcgactgcagcccccacaagaccgtgaagaagaccgccaacgagttcccctgcctgcccaagcaggtggcctggatcctggccaccagcaaggtgttcatgtaccccgagctgctgcccgtgtgcagcctgaaggccaagaacccccaggacaagatcctgttcaccaaggccgaggacaacaagtacctgctgacctgcaagaccgccagacagctgaccgtgagaatcaagaacctgaacatgaacagagcccccgacaacatcatcaagttctacaagaagaccaagcagctgcccgtgctgggcaagtgctgcgaggagatccagccccaccagtggaagccccccatcgagagagaggagcacagactgcccttctggctgaaggccagcctgcccagcatccaggaggagctgagacacatggccgacggcgccagagaggtgggcaacatgaccggcaccaccgagatcaacagcgaccagggcctggagaaggacaacagcgagctgggcagcgagaccagataccccctgctgctgcccaagggcgtggtgctgaagctgaagcccgtggccgacagattccccaagaaggcctggagacagaagagaagcagcgtgctgaagcccctgctgatccagcccagccccagcctgcagcccagcttcaaccccggcaagacccccgcccagagcacccacagcgaggccccccccagcaagatggtgctgagaatcccccaccccatccagcccgccaccgtgctgcagaccgtgcccggcgtgccccccctgggcgtgagcggcggcgagagcttcgagagccccgccgccctgcccgccatgccccccgaggccagaaccagcttccccctgagcgagagccagaccctgctgagcagcgcccccgtgcccaaggtgatgatgcccagccccgccagcagcatgttcagaaagccctacgtgagaagaagacccagcaagagaagaggcgccagagccttcagatgcatcaagcccgcccccgtgatccaccccgccagcgtgatcttcaccgtgcccgccaccaccgtgaagatcgtgagcctgggcggcggctgcaacatgatccagcccgtgaacgccgccgtggcccagagcccccagaccatccccatcgccaccctgctggtgaaccccaccagcttcccctgccccctgaaccagcccctggtggccagcagcgtgagccccctgatcgtgagcggcaacagcgtgaacctgcccatccccagcacccccgaggacaaggcccacatgaacgtggacatcgcctgcgccgtggccgacggcgagaacgccttccagggcctggagcccaagctggagccccaggagctgagccccctgagcgccaccgtgttccccaaggtggagcacagccccggccccccccccgtggacaagcagtgccaggagggcctgagcgagaacagcgcctacagatggaccgtggtgaagaccgaggagggcagacaggccctggagcccctgccccagggcatccaggagagcctgaacaacagcagccccggcgacctggaggaggtggtgaagatggagcccgaggacgccaccgaggagatcagcggcttcctgtag

SEQ ID NO: 76513 - DNA, 1791 bp, Artificial Sequence
  derived and/or modified sequence
atgcagcagaaggagctgggcaccttcgcccagagcagcatcgccctgcaccaccagtacaaccccaagttccagaccctgttccagccctgcaacctgatgggcgccatgcagctgatcgaggacttcagcacccacgtgagcatcgactgcagcccccacaagaccgtgaagaagaccgccaacgagttcccctgcctgcccaagcaggtggcctggatcctggccaccagcaaggtgttcatgtaccccgagctgctgcccgtgtgcagcctgaaggccaagaacccccaggacaagatcctgttcaccaaggccgaggacaacaagtacctgctgacctgcaagaccgccagacagctgaccgtgagaatcaagaacctgaacatgaacagagcccccgacaacatcatcaagttctacaagaagaccaagcagctgcccgtgctgggcaagtgctgcgaggagatccagccccaccagtggaagccccccatcgagagagaggagcacagactgcccttctggctgaaggccagcctgcccagcatccaggaggagctgagacacatggccgacggcgccagagaggtgggcaacatgaccggcaccaccgagatcaacagcgaccagggcctggagaaggacaacagcgagctgggcagcgagaccagataccccctgctgctgcccaagggcgtggtgctgaagctgaagcccgtggccgacagattccccaagaaggcctggagacagaagagaagcagcgtgctgaagcccctgctgatccagcccagccccagcctgcagcccagcttcaaccccggcaagacccccgcccagagcacccacagcgaggccccccccagcaagatggtgctgagaatcccccaccccatccagcccgccaccgtgctgcagaccgtgcccggcgtgccccccctgggcgtgagcggcggcgagagcttcgagagccccgccgccctgcccgccatgccccccgaggccagaaccagcttccccctgagcgagagccagaccctgctgagcagcgcccccgtgcccaaggtgatgatgcccagccccgccagcagcatgttcagaaagccctacgtgagaagaagacccagcaagagaagaggcgccagagccttcagatgcatcaagcccgcccccgtgatccaccccgccagcgtgatcttcaccgtgcccgccaccaccgtgaagatcgtgagcctgggcggcggctgcaacatgatccagcccgtgaacgccgccgtggcccagagcccccagaccatccccatcgccaccctgctggtgaaccccaccagcttcccctgccccctgaaccagcccctggtggccagcagcgtgagccccctgatcgtgagcggcaacagcgtgaacctgcccatccccagcacccccgaggacaaggcccacatgaacgtggacatcgcctgcgccgtggccgacggcgagaacgccttccagggcctggagcccaagctggagccccaggagctgagccccctgagcgccaccgtgttccccaaggtggagcacagccccggccccccccccgtggacaagcagtgccaggagggcctgagcgagaacagcgcctacagatggaccgtggtgaagaccgaggagggcagacaggccctggagcccctgccccagggcatccaggagagcctgaacaacagcagccccggcgacctggaggaggtggtgaagatggagcccgaggacgccaccgaggagatcagcggcttcctgtag

SEQ ID NO: 76514 - DNA, 2160 bp, Artificial Sequence
  derived and/or modified sequence
atgggcttttctaatatggaagacgacggccccgaggaagaggaaagagtcgccgagccacaggcgaacttcaatacaccccaggccctccgcttcgaggagctgctggctaacttactgaacgaacaacaccaaatcgccaaggagctgttcgaacagttgaaaatgaaaaagcccagtgcgaaacagcagaaggaggtagagaaggttaagccccagtgcaaggaagttcaccagactctcatcctggaccccgcccagcggaaacggttacagcagcagatgcagcaacacgtgcagctgctcactcaaatccacttgctggccacctgcaatcccaacttaaatcctgaggcttcatccacccggatatgtttaaaagagctaggtaccttcgctcagagcagtatcgccctgcaccatcaatataacccaaaattccaaacgctcttccagccctgtaacttaatgggggcgatgcagctaattgaggatttctccacacacgtgagcatcgactgtagtccccacaaaaccgtaaaaaaaaccgccaacgagtttccctgtcttcccaagcaagttgcctggatactggctacctctaaagtgtttatgtatcccgagctgctgcctgtgtgctctctgaaggcgaagaaccctcaagataagattctattcacaaaggctgaggacaataaatacctgttgacttgtaaaactgcccgccagcttacggtgcgtattaagaacctgaatatgaacagagccccagataatattatcaaattttataagaagaccaagcagcttccagtattgggtaagtgctgtgaagagattcaaccccatcagtggaagcctcctatagagcgcgaagaacacaggctgccattttggctgaaggcaagtctgccatctatacaggaagagctgaggcatatggcggacggggctagggaggtaggtaatatgacaggtacaacagagatcaactctgatcaggggttggagaaggacaacagcgagctggggtctgaaacccgatacccacttctcttgccaaagggcgtcgtgttaaagctgaagccagtggctgatcggttcccaaagaaggcatggcgtcaaaaaaggtcctccgtcctgaaaccactgttaatccaaccgtcaccaagcctgcaaccttccttcaacccaggaaagacaccggctcagagcactcatagtgaggcccccccatccaagatggtccttcggattccacatccaattcaaccggcaacagttcttcagacagtgcccggcgtgccccctttgggggtctccgggggggaatccttcgaaagccccgccgccctgcctgccatgccccctgaagcccgaacatcatttccgctcagcgagagtcagactctgctgtcctccgctcctgtgccgaaagtgatgatgccctcacctgcttcgtccatgttccgcaagccgtacgtccgccgtagacctagcaagaggcggggcgctcgagctttcagatgcatcaagcccgcgcccgtcattcatccagccagcgtgatcttcactgtgccagcgaccaccgtgaaaatcgtgtcattgggaggtgggtgtaacatgattcaacctgtcaatgccgccgttgcccagtcaccccagacgatcccgatcgcgaccttgctggtcaaccccacttcctttccgtgcccactcaatcagccgttggtggcctcgagtgtgagcccattaattgtgtctgggaattcagtcaatctgcctatcccaagtacgccggaggacaaggcacacatgaacgttgacatcgcctgtgccgttgcagatggagaaaacgccttccaggggctcgaaccaaaattagagccccaagaactctcccccctgtcagcaactgtatttccaaaagttgagcattccccagggcccccacctgtagacaagcagtgtcaagaaggactatctgagaattctgcctatcgttggacggtcgttaagactgaggagggacgccaggccctggagcctctgccgcagggaatccaggagtccctgaataactctagcccaggcgatctcgaggaggtggtaaagatggaacctgaggatgccactgaggaaatttctgggttcctgtag

SEQ ID NO: 76515 - DNA, 2193 bp, Artificial Sequence
  derived and/or modified sequence
atggaagatctatttgagacgttccaggatgagatgggtttctctaacatggaagacgatggtcccgaggaagaagagagggtagccgaacctcaggctaacttcaacacccctcaggcgctgcgattcgaggaactgctcgccaatctgctcaacgagcaacaccaaatcgcgaaagagctgtttgaacaactaaaaatgaagaagccttctgccaagcaacagaaagaggtcgaaaaggtcaagccccagtgcaaggaagtgcatcagactctgatattggaccccgcccaaaggaagcgtctgcagcaacaaatgcagcaacacgtgcagctcctcacacagatacatctgctggcaacttgcaatccgaacttaaatcctgaggcctccagcacacgcatttgtctcaaggaactgggaaccttcgcccaaagtagcattgcactgcaccatcagtacaatccaaaattccagaccctcttccaaccttgcaatcttatgggcgccatgcagcttatcgaagacttttccacgcacgttagcattgattgctcaccacacaagaccgtgaaaaagaccgccaacgaatttccttgccttccaaaacaagtggcttggattctggcaacatcaaaagtgtttatgtacccagagctgctgcccgtctgctccctcaaagcaaaaaacccgcaggataagatcttgttcactaaggccgaagacaacaaatacttgctcacttgcaagacagctcgccaacttactgtcaggatcaaaaatctcaatatgaacagagcccctgataacatcatcaaattctacaagaaaacgaagcaacttcccgttctgggcaaatgttgcgaggaaatacagcctcaccagtggaagccgccgattgaacgcgaagaacaccggcttccattttggctcaaggccagtctcccctccatccaggaagaacttagacacatggccgatggtgccagggaggttgggaatatgacaggaactaccgagattaattccgatcaagggctggagaaggataattcagagttgggatctgaaactagatatcccctgctgctcccaaaaggggtcgtactcaagctgaagcccgtcgccgatcgctttcctaaaaaagcttggcgccagaagcgctcttctgtcctgaagcccctgctcatacagccgtcaccatcgctccagccaagcttcaacccaggaaagaccccagcccagtcaacacactctgaagctcccccatctaagatggtgctccggatcccccatcccatccagccggccactgtacttcaaacagtcccaggggtaccaccactgggggtgtctggtggggagtcttttgagtcacccgctgctctgcccgcaatgcctcctgaggctcgtacctcatttccgctgtccgagagtcaaacactcttatcaagcgctccggttcctaaagtgatgatgccgtctcccgcctctagcatgtttaggaaaccctacgtgcggcggcggccgtccaagcggcgaggcgctcgcgcattcaggtgtataaagccggccccagtgattcatccagcatcagtgattttcacagtgccagctacaactgtgaagattgtgagcctcggagggggatgcaacatgatccaacccgttaacgccgccgtggcccaatcccctcaaactattccgattgccacactccttgtcaatccaacgtccttcccctgccctttaaatcagcccctggtagccagtagtgtttctcccctcatcgtgagtggaaactccgtcaatctccccatcccatcaacccctgaggataaagcccatatgaacgtggatattgcgtgcgccgtagcggacggagaaaatgcgtttcaaggtctggaacccaagctggaaccccaggagttgtctcccttaagcgccaccgtgtttcccaaggtggaacacagccccggaccaccccctgtagataagcagtgtcaggaaggtctgtccgagaactcggcctaccgttggacggtggtgaagacggaagaggggagacaagccctggaacctctaccacagggcatccaagagtcgcttaacaattctagcccaggagacctggaggaggtggtaaagatggagcctgaggatgctaccgaggagatttctggcttcctttag

SEQ ID NO: 76516 - DNA, 2160 bp, Artificial Sequence
  derived and/or modified sequence
atgggtttcagtaatatggaggatgatggacctgaggaagaggagcgcgtggctgagccgcaggcaaatttcaacacacctcaggccttgcgattcgaggaactactcgctaacctgttgaatgagcaacaccaaattgctaaagaactcttcgagcaactgaagatgaagaaaccctctgctaagcagcagaaggaggtggagaaggtgaagccccagtgtaaggaggtgcaccagaccctaatcctggatcctgcccagaggaaacggctgcagcagcagatgcagcaacacgtccagctgctcactcaaattcacctcctggccacctgcaaccctaatttgaatccagaagcatccagtaccagaatctgcctaaaggagcttgggacttttgcgcagagttctatcgctcttcaccatcagtacaatccgaaattccaaacgctctttcaaccttgcaatcttatgggcgcgatgcaattaatcgaggacttctccacgcacgtatcgattgattgctccccgcataaaacagtcaagaagacggccaacgagtttccttgcttacccaagcaggttgcttggatattggctacgagtaaagtgtttatgtatcccgagctcctccctgtgtgctctctgaaagccaagaatccccaggacaaaatcctgttcactaaagccgaggacaataagtatctcctaacatgtaagacagccaggcaactgacagtgagaattaagaaccttaatatgaaccgggccccagacaatattataaagttttacaagaaaaccaagcagctgcccgttctcggtaaatgttgtgaggagatccagccccaccagtggaagccccctatcgaacgggaagaacatagacttcccttttggttaaaggcaagccttccgtccatccaggaggaactgcggcacatggccgatggcgccagggaggtggggaacatgaccggaaccacagagatcaatagcgaccaagggctcgaaaaagacaacagcgaacttgggagcgaaacccgctaccccctcctgttacccaaaggtgtggtcttgaagctcaagccagtggctgaccgtttccccaagaaagcctggcgccagaaacgcagttcagtgcttaaacccctacttattcaacctagcccttcgttgcagccgtcatttaaccctgggaaaaccccagcacagtctactcatagcgaagccccgccgtctaagatggtccttcgcataccacaccccatacagccagctacagtgctgcaaaccgtgcctggcgttccccccctcggcgtgtccgggggagagtcatttgagagtccagcagctctgccagcgatgcccccagaggccagaacgtcattcccactgagtgagagccagaccctgctctcatccgctccggtgcccaaggttatgatgccctccccagcctcctccatgttcagaaaaccatacgttcggagacgtccgtctaagagaagaggggccagagcattccgctgtatcaagcccgcacccgttatacatccagctagcgtgatatttacagtgcctgccacaacagtgaagatcgtcagcctgggcggcggctgtaatatgatccagccagtcaacgccgccgtggctcagtccccacaaacgattcccattgccaccttgctggtaaaccccacaagttttccatgtccactaaaccaacctctggtcgcctcgagcgtgtcgccccttatagtctccggaaacagcgtgaacttgcctatcccatccactccagaggacaaagcccacatgaacgtcgacatcgcctgtgccgtcgctgacggggaaaacgccttccaggggctggagccgaaactggagcctcaagagttaagccctttgagcgcaaccgtgtttcccaaggttgagcacagtccaggcccgcccccagtcgataaacaatgccaggagggcctatccgaaaatagcgcctataggtggacggttgttaaaaccgaggagggccgccaggctctggaaccattaccgcaaggcatccaagaatcattgaataattccagcccaggcgatctggaagaagtcgtgaagatggaaccagaggatgctaccgaagaaatctccggattcctctag

SEQ ID NO: 76517 - DNA, 1791 bp, Artificial Sequence
  derived and/or modified sequence
atgcagcagaaggagctcggcactttcgcgcagtcatccatcgcattacatcaccagtataatcctaagttccagacactgttccaaccctgcaatctgatgggtgcaatgcagcttatcgaggacttttcaactcacgtctctatagactgtagtccccacaaaacagtgaagaaaactgcaaacgagttcccctgcctgccaaagcaggtcgcttggatcttggcaacatctaaagtttttatgtacccagaacttctgcccgtgtgttcactcaaagccaaaaatccacaggacaaaatactgtttacaaaggctgaagataacaaatatctgctgacatgcaagaccgcccgccagctaactgtccggattaaaaacctgaacatgaaccgggcacccgacaacataattaaattctacaagaagaccaaacagctgcccgtgctgggtaagtgttgcgaagagatccagccccatcaatggaagcctcctattgaaagagaggaacatcgcctcccattttggctcaaggccagcttaccatctatacaggaggagttgcgccacatggcagacggtgccagggaagtagggaacatgaccggaaccactgagatcaactcggaccaaggactggagaaagacaactctgaactggggtctgagacgcgctacccactgttactgcccaagggagtggtacttaagcttaagcctgtggccgatagattccctaaaaaagcatggcgacaaaagcgctcatccgtccttaaaccattgctgatccagccctcaccatctctccagccatcctttaatcccggcaaaaccccagctcaaagcactcactcggaagccccccctagtaagatggttctccggatcccccacccaatccagcccgccaccgtcctgcagacagtcccaggagtgccacctctcggggtcagcggaggggagtcttttgaaagcccagccgcattaccggctatgccccccgaagccagaaccagttttcccctttcggaatcccagaccctgctgagctcagccccagtccctaaagtgatgatgccctcgcccgcctcatctatgttccgaaagccttatgtgaggaggcgtccttccaagcggagaggagctcgggctttccggtgcattaagccggcccccgtgatccaccctgcgtccgtgatttttactgttcctgctacaacggtcaagattgtttctctgggaggcgggtgcaacatgatccaacccgtgaatgccgccgtggcccagtccccccaaaccatccctatcgctaccttactcgtgaatccgaccagcttcccctgcccattgaaccagccgctggtggcctcttccgtcagccccctaatcgttagcggcaactctgttaacctgccaataccatccacccccgaagataaagcacatatgaacgttgatatcgcctgcgctgtggctgacggagagaacgcctttcagggccttgagccaaaattggagccacaggaactttccccgttaagtgcgaccgtgttccctaaagtggagcatagtccaggaccaccccccgtggacaagcagtgtcaggaagggcttagtgagaattcagcatacaggtggacagtcgtgaaaaccgaggagggccgtcaagctctggaacccctcccacagggtattcaggaatccttaaacaatagcagccccggagatctcgaggaggtggtgaagatggagccagaggatgcaactgaggaaatcagcggattcctctag

SEQ ID NO: 76518 - DNA, 2160 bp, Artificial Sequence
  derived and/or modified sequence
atgggcttcagcaacatggaggatgatggccctgaggaggaggagcgggtggccgagccccaggccaacttcaacaccccccaggccctgcgctttgaggagctgctggccaacctgctgaatgagcagcaccagatcgccaaggagctgtttgagcagctgaagatgaagaagcccagcgccaagcagcagaaggaggtggagaaggtgaagccccagtgcaaggaggtgcaccagaccctcatcctggaccctgcccagaggaagaggctgcagcagcagatgcagcagcacgtgcagctgctgacccagatccacctgctggccacctgcaaccccaacctgaaccctgaggccagcagcacccgcatctgcctgaaggagctgggcacctttgcccagagcagcatcgccctgcaccaccagtacaaccccaagttccagaccctcttccagccctgcaacctgatgggcgccatgcagctgattgaggacttcagcacccacgtgtccattgactgcagcccccacaagacagtgaagaagacagccaatgagttcccctgcctgcccaagcaggtggcctggatcctggccaccagcaaggtgttcatgtacccagagctgctgcctgtgtgcagcctgaaggccaagaacccccaggacaagatcctcttcaccaaggccgaggacaacaagtacctgctgacctgcaagacagcccggcagctgactgtgcgcatcaagaacctgaacatgaacagagccccagacaacatcatcaagttctacaagaagaccaagcagctgcctgtgctgggcaagtgctgtgaggagatccagccccaccagtggaagccacccatcgagcgggaggagcaccggctgcccttctggctgaaggccagcctgcccagcatccaggaggagctgcggcacatggctgatggagcccgggaggtgggcaacatgacaggcaccacagagatcaacagcgaccagggcctggagaaggacaacagcgagctgggcagcgagacccgctaccccctgctgctgcccaagggcgtggtgctgaagctgaagcctgtggccgaccgcttccccaagaaggcctggaggcagaagaggagctctgtgctgaagcccctgctgatccagcccagccccagcctgcagcccagcttcaaccctgggaagaccccagcccagagcacccacagcgaggccccacccagcaagatggtgctgcgcatcccccaccccatccagcctgccaccgtgctgcagacagtgcctggggtgccccccctgggcgtgtctggaggagagagctttgagagccctgctgccctgcctgccatgcctcctgaggcccggaccagcttccccctgtctgagagccagaccctgctgagcagcgcccctgtgcccaaggtgatgatgcccagccctgccagctccatgttcaggaagccctacgtgagaagaagacccagcaagagaagaggagcccgggccttccgctgcatcaagccagcccctgtgatccacccagccagcgtcatcttcaccgtgcctgccaccaccgtgaagatcgtgtccctgggcggcggctgcaacatgatccagcctgtgaatgctgctgtggcccagagcccccagaccatccccatcgccaccctgctggtgaaccccaccagcttcccctgccccctgaaccagcccctggtggccagctctgtgagccccctcatcgtgtctggcaacagcgtgaacctgcccatccccagcaccccagaggacaaggcccacatgaatgtggacatcgcctgtgctgtggctgatggagaaaatgccttccagggcctggagcccaagctggagccccaggagctgagccccctgagcgccaccgtcttccccaaggtggagcacagccctggccccccacctgtggacaagcagtgccaggagggcctgtctgaaaattctgcctaccgctggacagtggtgaagacagaggagggccggcaggccctggagcccctgccccagggcatccaggagagcctgaacaacagcagccctggggacctggaggaggtggtgaagatggagccagaagatgccacagaggagatcagcggcttcctgtag

SEQ ID NO: 76519 - DNA, 2193 bp, Artificial Sequence
  derived and/or modified sequence
atggaggacctgtttgagaccttccaggatgagatgggcttcagcaacatggaggatgatggccctgaggaggaggagcgggtggccgagccccaggccaacttcaacaccccccaggccctgcgctttgaggagctgctggccaacctgctgaatgagcagcaccagatcgccaaggagctgtttgagcagctgaagatgaagaagcccagcgccaagcagcagaaggaggtggagaaggtgaagccccagtgcaaggaggtgcaccagaccctcatcctggaccctgcccagaggaagaggctgcagcagcagatgcagcagcacgtgcagctgctgacccagatccacctgctggccacctgcaaccccaacctgaaccctgaggccagcagcacccgcatctgcctgaaggagctgggcacctttgcccagagcagcatcgccctgcaccaccagtacaaccccaagttccagaccctcttccagccctgcaacctgatgggcgccatgcagctgattgaggacttcagcacccacgtgtccattgactgcagcccccacaagacagtgaagaagacagccaatgagttcccctgcctgcccaagcaggtggcctggatcctggccaccagcaaggtgttcatgtacccagagctgctgcctgtgtgcagcctgaaggccaagaacccccaggacaagatcctcttcaccaaggccgaggacaacaagtacctgctgacctgcaagacagcccggcagctgactgtgcgcatcaagaacctgaacatgaacagagccccagacaacatcatcaagttctacaagaagaccaagcagctgcctgtgctgggcaagtgctgtgaggagatccagccccaccagtggaagccacccatcgagcgggaggagcaccggctgcccttctggctgaaggccagcctgcccagcatccaggaggagctgcggcacatggctgatggagcccgggaggtgggcaacatgacaggcaccacagagatcaacagcgaccagggcctggagaaggacaacagcgagctgggcagcgagacccgctaccccctgctgctgcccaagggcgtggtgctgaagctgaagcctgtggccgaccgcttccccaagaaggcctggaggcagaagaggagctctgtgctgaagcccctgctgatccagcccagccccagcctgcagcccagcttcaaccctgggaagaccccagcccagagcacccacagcgaggccccacccagcaagatggtgctgcgcatcccccaccccatccagcctgccaccgtgctgcagacagtgcctggggtgccccccctgggcgtgtctggaggagagagctttgagagccctgctgccctgcctgccatgcctcctgaggcccggaccagcttccccctgtctgagagccagaccctgctgagcagcgcccctgtgcccaaggtgatgatgcccagccctgccagctccatgttcaggaagccctacgtgagaagaagacccagcaagagaagaggagcccgggccttccgctgcatcaagccagcccctgtgatccacccagccagcgtcatcttcaccgtgcctgccaccaccgtgaagatcgtgtccctgggcggcggctgcaacatgatccagcctgtgaatgctgctgtggcccagagcccccagaccatccccatcgccaccctgctggtgaaccccaccagcttcccctgccccctgaaccagcccctggtggccagctctgtgagccccctgattgtgtctggcaacagcgtgaacctgcccatccccagcaccccagaggacaaggcccacatgaatgtggacatcgcctgtgctgtggctgatggagaaaatgccttccagggcctggagcccaagctggagccccaggagctgagccccctgagcgccaccgtcttccccaaggtggagcacagccctggccccccacctgtggacaagcagtgccaggagggcctgtctgagaacagcgcctaccgctggacagtggtgaagacagaggagggccggcaggccctggagcccctgccccagggcatccaggagagcctgaacaacagcagccctggggacctggaggaggtggtgaagatggagccagaagatgccacagaggagatcagcggcttcctgtag

SEQ ID NO: 76520 - DNA, 1791 bp, Artificial Sequence
  derived and/or modified sequence
atgcagcagaaggagctgggcacctttgcccagagcagcatcgccctgcaccaccagtacaaccccaagttccagaccctcttccagccctgcaacctgatgggcgccatgcagctgattgaggacttcagcacccacgtgtccattgactgcagcccccacaagacagtgaagaagacagccaatgagttcccctgcctgcccaagcaggtggcctggatcctggccaccagcaaggtgttcatgtacccagagctgctgcctgtgtgcagcctgaaggccaagaacccccaggacaagatcctcttcaccaaggccgaggacaacaagtacctgctgacctgcaagacagcccggcagctgactgtgcgcatcaagaacctgaacatgaacagagccccagacaacatcatcaagttctacaagaagaccaagcagctgcctgtgctgggcaagtgctgtgaggagatccagccccaccagtggaagccacccatcgagcgggaggagcaccggctgcccttctggctgaaggccagcctgcccagcatccaggaggagctgcggcacatggctgatggagcccgggaggtgggcaacatgacaggcaccacagagatcaacagcgaccagggcctggagaaggacaacagcgagctgggcagcgagacccgctaccccctgctgctgcccaagggcgtggtgctgaagctgaagcctgtggccgaccgcttccccaagaaggcctggaggcagaagaggagctctgtgctgaagcccctgctgatccagcccagccccagcctgcagcccagcttcaaccctgggaagaccccagcccagagcacccacagcgaggccccacccagcaagatggtgctgcgcatcccccaccccatccagcctgccaccgtgctgcagacagtgcctggggtgccccccctgggcgtgtctggaggagagagctttgagagccctgctgccctgcctgccatgcctcctgaggcccggaccagcttccccctgtctgagagccagaccctgctgagcagcgcccctgtgcccaaggtgatgatgcccagccctgccagctccatgttcaggaagccctacgtgagaagaagacccagcaagagaagaggagcccgggccttccgctgcatcaagccagcccctgtgatccacccagccagcgtcatcttcaccgtgcctgccaccaccgtgaagatcgtgtccctgggcggcggctgcaacatgatccagcctgtgaatgctgctgtggcccagagcccccagaccatccccatcgccaccctgctggtgaaccccaccagcttcccctgccccctgaaccagcccctggtggccagctctgtgagccccctgattgtgtctggcaacagcgtgaacctgcccatccccagcaccccagaggacaaggcccacatgaatgtggacatcgcctgtgctgtggctgatggagaaaatgccttccagggcctggagcccaagctggagccccaggagctgagccccctgagcgccaccgtcttccccaaggtggagcacagccctggccccccacctgtggacaagcagtgccaggagggcctgtctgagaacagcgcctaccgctggacagtggtgaagacagaggagggccggcaggccctggagcccctgccccagggcatccaggagagcctgaacaacagcagccctggggacctggaggaggtggtgaagatggagccagaagatgccacagaggagatcagcggcttcctgtag

SEQ ID NO: 76521 - DNA, 2160 bp, Artificial Sequence
  derived and/or modified sequence
atgggcttcagcaacatggaggacgacggccccgaggaggaggagcgtgttgctgagccccaggcaaacttcaacaccccacaagccctcaggtttgaagagctgctggcgaatctgctgaacgagcagcaccaaattgctaaggaactgttcgaacagttaaagatgaaaaaaccaagcgccaagcagcagaaggaagtggagaaggttaagccccagtgcaaagaggtgcaccagaccctcatcttagaccccgcccagcggaaacgccttcaacagcaaatgcagcagcatgtgcagttgctcactcaaatccacttgcttgccacctgtaaccccaacctaaaccccgaagcaagcagcacccgcatatgcctgaaagagctgggaacattcgcccaatcttcaatagctctgcaccaccagtacaatcctaaattccagacactctttcagccctgcaatcttatgggggccatgcagcttatagaagacttctccacccacgtgtccatagactgcagtcctcataagaccgtaaaaaagacagccaatgagttcccatgtctgccaaaacaagtcgcatggatcctggcaaccagcaaagtgttcatgtatccagaactgttacccgtatgctcgcttaaggctaaaaacccccaggataagatcctctttactaaggccgaagataataaatacctgttgacatgtaagactgcacggcaactgactgtacggattaaaaacctcaacatgaatagagctccagacaatattataaagttctataagaaaacaaagcagctgcctgtactgggaaagtgctgcgaggagatccaaccacaccaatggaaaccaccgattgaacgggaagagcaccgcctccccttctggttgaaagcgagtctgccatctatacaggaggagctccgacatatggcggatggagccagagaggtggggaacatgaccggtacaacagaaatcaatagtgatcaggggctcgagaaggataactctgagcttggaagcgaaacaagataccccctgctgctccctaagggggtggtgctaaagttaaaacccgtcgccgatcggttccctaagaaagcttggaggcagaaaagaagcagtgtactgaagcctctcctgattcagccgagtccctccctgcagcctagcttcaaccccggcaagacgcctgcccagagtacacacagcgaagcccctcccagcaagatggtcctgcggattccgcatcccatacagccggccacagtgctccagacggtgcccggtgtccccccgctgggtgtgagcggcggagaaagcttcgagtctcccgccgcattgccagccatgcctcccgaagctcgcacgtcattcccactcagtgaatctcaaactctgctgtcatccgctccagtccccaaggtgatgatgccctcgccagcctcttctatgttccggaagccctacgtacggagacgcccttcaaagcgcagaggtgctcgcgccttcaggtgtataaagcctgcccctgtgatccatccggcttctgtcatttttacagtgcccgccactaccgtaaaaattgtcagcctgggcggtggatgcaacatgatacaacccgtcaatgccgcagtggcccagtctcctcagactattccaattgcaactctgctcgtaaatcccacctcgtttccttgccctctgaatcagcccctcgtggcgtcctctgtgagcccactaatcgtctccggaaatagtgtaaatcttcctataccgagtacaccggaggataaggcgcacatgaatgttgacatcgcttgcgctgtcgctgacggagagaacgcttttcagggactcgagcccaaattagagccccaggagttgtcgcccctctctgccaccgttttccccaaggttgagcactcaccagggcccccccccgtggacaaacagtgtcaagaggggctctccgaaaattcggcttaccggtggaccgtagtcaaaactgaagaaggacgacaagctcttgaacctctcccccagggtatacaggagtctctgaataacagcagtcccggagacctggaggaagtcgtaaaaatggagcccgaagatgctaccgaagaaatctccgggtttttgtag

SEQ ID NO: 76522 - DNA, 2193 bp, Artificial Sequence
  derived and/or modified sequence
atggaggacctgttcgagaccttccaggacgagatgggcttcagcaacatggaggatgatggtccagaggaagaggagcgagtcgctgaacctcaggctaattttaacacgcctcaagcccttaggttcgaggagctgctcgctaatttgctgaacgaacagcaccaaattgcaaaagaactgtttgaacagttaaaaatgaaaaagccctccgccaagcagcagaaggaggttgaaaaggtgaaaccgcagtgcaaggaggtgcaccagacactcatcctggatccggcccagaggaaaagattacagcagcagatgcagcagcatgttcagctgctcacacagatccaccttctcgccacctgtaatccaaacctcaacccagaggcaagcagcaccaggatctgcctgaaggaattaggtacctttgcacagagctccattgcgttgcaccaccagtacaatcccaaattccaaaccctctttcagccctgtaacctaatgggggcgatgcagcttatcgaagatttctctacacatgtcagtattgattgctcccctcacaagaccgtcaaaaaaactgctaacgaatttccctgtttgcccaagcaagtggcctggattttagcaacctccaaagttttcatgtacccagagctgctgccggtgtgcagcctgaaggcgaaaaatccccaggataagatcttattcacaaaggccgaggacaataaatacctgctcacgtgcaagactgctaggcagttgacagtacgcatcaagaacctgaacatgaatagagctccggacaatatcattaagttctacaaaaaaaccaaacagctgccagtcctgggaaagtgctgtgaagagatccagccacaccaatggaagccgcctatcgaacgcgaggagcatcgcttacccttttggctgaaggcttcattacccagcatccaggaggagctacggcatatggccgatggcgcccgagaggtgggcaatatgacaggcaccactgaaattaattccgatcagggactagagaaggataactctgagctggggagcgaaaccagatatccgctactcctgcccaagggggtcgtgttgaagctgaagccggtcgccgaccgcttccctaagaaagcttggcgtcagaaacgatcttcagtgttgaaacctttgttgattcagccaagtccttctcttcagccctctttcaacccaggcaaaacaccggcacagagtacgcactctgaagcacctcctagtaagatggtgttaaggattccccaccctatccaacccgctaccgtcctgcaaaccgtgcccggagtccctcctctcggtgttagcgggggagagagctttgagagcccagcagcactccccgcaatgccccccgaggcccgcaccagctttcctctaagtgaatcacagacactgctgagcagcgccccggtgccgaaagtgatgatgcctagtccggcgtcctctatgttccgcaaaccatacgtgcgcaggaggccaagcaagagaagaggggccagggcttttcgctgcataaagcccgccccagttattcaccctgcgtctgtcattttcactgtcccggccaccacagtgaagattgtttccctaggggggggttgcaatatgatccagcctgtgaacgctgccgttgctcagtcaccacagactatccctatcgccacactattggttaacccaacgtcattcccctgcccgcttaaccagcccctcgtcgccagttctgtgagcccgctcattgtctctggaaacagcgtcaatctaccaatccccagcacacctgaggacaaggcacatatgaacgtagacattgcctgcgctgtcgcagatggagagaacgcgtttcaggggctggagcccaaactggaaccacaagagctttcacccttgagcgccacagttttcccgaaagtggaacactcaccagggccccccccagtcgataaacagtgccaagaaggcctgtctgagaactccgcatatagatggacggtcgtaaaaacggaggaaggtaggcaagccctggaaccattgccgcagggaattcaggagtccttgaataatagttctccaggagacttggaagaggtagtaaaaatggagcctgaagatgccacggaagagataagcggctttttgtag

SEQ ID NO: 76523 - DNA, 2160 bp, Artificial Sequence
  derived and/or modified sequence
atgggcttcagcaacatggaggacgacggccccgaggaggaggagcgggtggctgaacctcaggccaactttaatacccctcaggcgctgagatttgaagagctcctggctaacctgctgaacgagcagcaccagatagccaaggagttattcgagcagctgaagatgaaaaaaccatctgctaaacagcagaaggaagttgaaaaagtgaaaccccagtgtaaggaagtccaccagactctcatcttagatccagctcagaggaaaagactacaacagcaaatgcagcagcatgtacagctgctcacccagattcatcttctggcaacttgtaatccaaatctaaacccagaggcatcctcaacacgtatctgtttgaaggagctgggcaccttcgcacagagcagcatcgccttgcaccaccagtacaaccctaagttccaaaccctgtttcagccgtgcaaccttatgggggccatgcagctgatcgaggacttttcaacacatgtgtctattgattgctctccacacaagactgttaaaaagacagcgaacgagttcccatgcctgcctaaacaggtggcatggatcttggccacctctaaggtcttcatgtatccagaattgcttccagtgtgcagtcttaaagccaagaaccctcaagacaagatcctgtttacgaaggctgaagataataaatatctgttgacatgcaagacggcacggcagcttaccgtgcgcatcaaaaacctcaatatgaacagagcaccagacaatatcattaagttttacaagaaaacgaagcagctccctgtcttggggaaatgttgcgaggagatacaaccacatcagtggaagcctccaatcgagcgcgaagaacaccgcctgcccttttggctgaaggcatccttaccttctatacaggaggagctccggcatatggccgacggcgctcgagaggttggaaatatgacaggaacgacagagattaactctgaccagggattggagaaggacaattccgagcttggcagcgaaacgcggtacccattgctgctaccgaagggtgtggtgctgaaactgaagccagtggccgatcgctttcccaaaaaggcttggcgacagaaacgatcctccgtgctgaagccactgctaattcagccttcccctagcttgcagcccagtttcaacccaggaaagacacctgcacagagcacccacagcgaggctccaccaagtaaaatggtacttagaatccctcaccccatccagcccgcaacagtgctgcagaccgttcctggagtgcctcctctgggcgtatcagggggggaaagcttcgaatctcctgcagctctccccgcgatgccccctgaggctaggactagctttcctctctcggagagtcagaccttgttgagttccgcccctgttccaaaagtgatgatgccttctcctgcatcatccatgtttagaaagccctatgtccgtcgaagaccctccaagagaagaggcgcgagagccttcaggtgcataaagccggccccggtgatccaccccgcctcagtcatattcaccgtacccgctacaacagtgaaaatagtatcactcggcgggggatgcaacatgatacagccagtcaacgccgctgtagcccagtccccacagacaattccaatcgccactctcctggtaaatccaacatccttcccatgccctctgaatcagcctctggtggcctccagtgttagtcccctgatcgtttcaggaaatagcgtaaatctgcccatcccttccactcctgaggacaaagctcatatgaacgttgacatcgcatgtgccgtggcggacggggaaaatgcttttcagggcttggagccaaaactggaaccacaggagctaagccctctctccgctacagtgtttccaaaagtggagcactcacctggccccccgccagtggataaacagtgccaggaaggcctgagtgagaattccgcctatcgctggactgttgttaaaacagaagaaggcaggcaggcgcttgagcccctcccccagggtattcaggagtctctgaacaactcgtcgccaggggatttggaggaggtggtgaagatggagccagaggatgccacagaagagatctccggctttctctag

SEQ ID NO: 76524 - DNA, 2705 bp, Artificial Sequence
  derived and/or modified sequence
gtagggtgggggtgctggcggcggctgctttggcggcggttggtggccgtgcgggcggggagggagggggaggagagaagaggaggtggagaaggcttgggctcgcgccgctgaagtcggcttacccgctggccgcctcctgacaagcgggagggatccgcggtggacccagggaagcggaggagcctggcggccaccccctcttcctcacttccctgtactctcatcgctctcggcctccgacacgaaaaggaagcaaatgagctgatggaagatctgtttgaaactgtgagtaatgatcctcaagtgagaacatgggattttccaagatgagatgggattctccaacatggaagatgatggcccagaagaggaggagcgtgtggctgagcctcaagctaactttaacacccctcaagctctacggtttgaggaactactggccaacctactaaatgaacaacatcagatagcgaaggaactatttgaacagctgaagatgaagaaaccttcagccaaacagcagaaggaggtagagaaggttaaaccccagtgtaaggaagttcatcagaccctgattctggacccagcacaaaggaagagactccagcagcagatgcagcagcatgttcagctcttgacacaaatccaccttcttgccacctgcaaccccaatctcaatccggaggccagtagcaccaggatatgtcttaaagagctgggaacctttgctcaaagctccatcgcccttcaccatcagtacaaccccaagtttcagaccctgttccaaccctgtaacttgatgggagctatgcagctgattgaagacttcagcacacatgtcagcattgactgcagccctcataaaactgtcaagaagactgccaatgaatttccctgtttgccaaagcaagtggcttggatcctggccacaagcaaggttttcatgtatccagagttacttccagtgtgttccctgaaggcaaagaatccccaggataagatcctcttcaccaaggctgaggacaacaagtaccttctaacctgcaagactgcccgccaactgacagtgagaatcaagaacctcaacatgaacagagctcctgacaacatcattaaattttataagaagaccaaacagctgccagtcctaggaaaatgctgtgaagagatccagccacatcagtggaagccacctatagagagagaagaacaccggctcccattctggttaaaggccagtctgccatccatccaggaagaactgcggcacatggctgatggtgctagagaggtaggaaatatgactggaaccactgagatcaactcagatcaaggcctagaaaaagacaactcagagttggggagtgaaactcggtacccactgctattgcctaagggtgtagtcctgaaactgaagccagttgccgaccgtttccccaagaaggcttggagacagaagcgttcatcagtcctgaaacccctccttatccaacccagcccctctctccagcccagcttcaaccctgggaaaacaccagcccaatcaactcattcagaagcccctccgagcaaaatggtgctccggattcctcacccaatacagccagccactgttttacagacagttccaggtgtccctccactgggggtcagtggaggtgagagttttgagtctcctgcagcactgcctgctatgccccctgaggccaggacaagcttccctctgtctgagtcccagactttgctctcttctgcccctgtgcccaaggtaatgatgccctcccctgcctcttccatgtttcgaaagccatatgtgagacggagaccctcaaaaagaaggggagccagggcctttcgctgtatcaaacctgcccctgttatccaccctgcatctgttatcttcactgttcctgctaccactgtgaagattgtgagccttggcggtggctgtaacatgatccagcctgtcaatgcggctgtggcccagagtccccagactattcccatcgccaccctcttggttaaccctacttccttcccctgtccattgaaccagccccttgtggcctcctctgtctcacccttaattgtttctggcaattctgtgaatcttcctataccatccacccctgaagataaggcccacatgaatgtggacattgcttgtgctgtggctgatggggaaaatgcctttcagggcctagaacccaaattagagccccaggaactatctcctctctctgctactgttttccccaaagtggaacatagcccagggcctccaccagtcgataaacagtgccaagaaggattgtcagagaacagtgcctatcgctggaccgttgtgaaaacagaggagggaaggcaagctctggagccgctccctcagggcatccaggagtctctaaacaactcttcccctggggatttagaggaagttgtcaagatggaacctgaagatgctacagaggaaatcagtggatttctttgagctaggagaataagagtctggagactgggagccttcacttcggcctccgattggtggcgcatagggtgtaaccaataggaaacccctaaagggtacttaaaccccagattttgcaactggggctcttgagcagcttgctttagcctgctcccactctgtggaatatacttttgcttcaataaatctgtgcttttattgcttcattgtttca

SEQ ID NO: 76525 - DNA, 1791 bp, Artificial Sequence
  derived and/or modified sequence
atgcagcagaaggagctgggcaccttcgcccagagcagcatcgccctgcatcaccagtacaaccccaagttccagacacttttccagccttgtaacttgatgggggctatgcagctaatcgaggatttcagcacccacgtgagcattgattgttcgccccataaaacagtgaaaaagactgccaacgaattcccgtgtctgccaaagcaggtggcctggatattagccaccagtaaagtctttatgtatcccgagctgctccccgtatgttccctgaaggcaaagaacccccaggataaaattctgttcaccaaggccgaggacaataagtatctcctaacatgtaaaacagcaagacagctaaccgtccgcattaaaaacctgaacatgaatcgcgctcccgacaacatcattaaattttataagaaaaccaagcagcttccggtgctgggtaagtgttgcgaggaaatccagccccaccagtggaaacctcccatcgagcgcgaggagcacagactgcctttttggctcaaggcctcactcccttccatccaggaagagttgcggcacatggcagacggtgcgcgggaggtcggaaatatgacaggcactactgaaataaactcagaccaggggctcgaaaaggacaactccgagctgggctcggaaaccagatatcccttgttgttgccaaaaggagtggtgctgaaattgaaaccagtcgccgatcggtttcctaaaaaagcttggagacaaaaacggagcagcgttttaaaacccctgctgatacagcccagtccaagccttcagccttcattcaatcctggaaagactcccgcccagagcacacacagtgaagctcccccaagcaagatggtgctgcggatccctcatcctatccagcctgctactgtcctccaaacagtgccaggggtgcctcccctgggagtgagcggtggtgaaagctttgagtcccctgctgcactccccgccatgccaccggaagcccgcaccagctttccattgagcgagagccagactcttctgtcgagtgccccagtgcctaaggtgatgatgcctagtccagcttcgtccatgtttaggaagccctatgtgcggagacgaccatccaagagacgcggtgcccgtgctttccgctgtataaagcccgctcccgtcattcaccctgcgtctgtgatttttacagtccctgctactaccgtcaagatcgtctcactcggtggaggttgcaatatgatccagcccgttaatgcagccgttgcgcaatcccctcagaccatacctatcgccacactcttagtcaaccctaccagctttccttgccctctaaaccaacccttggtggcttcaagtgtgtcccccctgattgtgagcggcaattccgtgaatctcccaatccctagcacacctgaggacaaagcacacatgaatgtggatatcgcttgcgccgttgcggacggggaaaacgcttttcagggactcgaacccaaactggagccccaggaactgtctcccctttcggccaccgtgtttcctaaggttgaacacagccccgggccaccgcctgtggataagcagtgccaggagggcttgtctgaaaacagtgcctaccgatggacagtggttaagaccgaagaggggcgtcaggccctcgaacccttaccccaaggaatccaagaatccctgaacaactcaagtccaggtgatctagaagaagttgtcaaaatggaacccgaagacgctaccgaagagatttcaggctttctttag

SEQ ID NO: 76526 - DNA, 2160 bp, Artificial Sequence
  derived and/or modified sequence
atggggttcagtaacatggaagatgatgggccagaagaagaggagcgagtggcggagcctcaggcaaatttcaatacacctcaagcacttcggtttgaagaactgctcgccaacctcctcaacgaacagcatcagattgcaaaggagctgtttgaacaactcaaaatgaagaagcctagtgcaaagcagcaaaaagaggtggagaaagtcaaaccccagtgcaaggaggttcatcagacccttattctggaccctgctcagcgcaagcgtctgcagcagcaaatgcagcagcatgtgcagttgctcacacagattcacctgctggccacctgcaacccgaacttaaatcctgaagcgtctagtacccggatctgcctgaaggagcttggaacattcgcccagagctcaattgcactgcaccaccagtataaccctaaatttcagaccctctttcagccatgcaatctcatgggagccatgcagctgattgaggatttttccacccatgtcagcattgactgttcgcctcacaagaccgtgaaaaaaaccgccaatgagttcccatgtctgccaaaacaggtggcgtggatcctcgctaccagcaaggtctttatgtacccagaactgctgcccgtctgcagtttaaaggcaaagaacccccaggacaaaatcttattcacgaaagctgaggacaacaagtaccttttaacgtgtaaaacagcccgacaattgactgtgcgcataaaaaaccttaacatgaacagggcaccggacaacattattaagttctataaaaagacgaagcagttgccagtcctgggtaaatgttgtgaggagatccagccgcatcagtggaaaccgcctatcgagagagaagagcatagactccctttctggctaaaggcaagcctgcctagcatccaggaggagcttagacacatggctgacggcgctagagaggtggggaacatgactggcaccacagaaataaattcagaccagggtctcgagaaagacaactccgaactcggctctgaaacccgctacccacttctgcttcctaaaggtgtcgtcttgaagttgaagcctgtggccgatcggttccctaaaaaagcttggaggcagaaacgctcatcagtgcttaagcccctgctgatccagcctagccccagtctgcagccttccttcaaccccggaaagaccccagcgcagagcacccattccgaagctccacccagtaaaatggtactaagaatccctcatcccatccagcctgctaccgttctgcagacagtccccggagtgcccccactgggagtgtcaggcggtgaaagttttgagagtccagccgcacttccagccatgcccccagaagcacgaacatcttttcctctgagcgagagccagactctcctctccagcgcaccagtccctaaggtaatgatgccctctcctgcaagttccatgtttcggaaaccttatgttcggcgtagaccgtcgaagcggaggggcgctcgcgcattccgctgtattaaaccagctcccgtcattcaccctgcctctgtgatattcaccgtgccggctacaactgttaagatcgtctcattgggaggcggttgtaacatgatacagcctgtgaacgcagctgttgctcagtccccacagaccattccaattgccactctcctggtgaaccccacttccttcccgtgcccgctaaatcagcctctggtggcaagcagtgtgtcacccttaattgtgagcggcaactcagtaaacctgccgatcccctcaacccccgaagataaggcgcacatgaacgtagacattgcctgcgccgttgccgatggtgagaatgctttccagggactcgagcccaagttagagccgcaggagctgagccccctatcggctactgtctttcccaaagtggaacacagccccggaccccctcccgtcgataagcagtgccaggagggtttgtcagagaacagcgcctatcgatggacggtggttaaaacagaagagggcaggcaagctcttgagccgcttcctcagggcattcaggaaagcctgaacaactcctcaccaggggatttggaggaagtcgttaagatggaacctgaagatgccacagaagagataagtggcttcctgtag

SEQ ID NO: 76527 - DNA, 2193 bp, Artificial Sequence
  derived and/or modified sequence
atggaggatctattcgagactttccaggacgaaatgggatttagcaacatggaggatgacggcccagaagaggaggagagggtcgccgagcctcaggcaaattttaatacacctcaggccctgcgctttgaggagctgctggcaaatctgctgaacgaacagcatcaaattgccaaagagctgttcgagcagctgaagatgaagaaaccctctgccaagcaacagaaagaagtcgaaaaggtgaagccccaatgcaaggaggtgcatcagactctcattctcgatcccgcacagaggaagagactacagcaacaaatgcaacagcacgttcagctcctgacgcaaatccacctgctcgctacgtgcaaccctaatctcaatcctgaggcgagctccactaggatctgtttaaaagaactggggacttttgctcagtcatctattgccttgcaccatcagtacaaccctaagtttcagacactgtttcagccctgcaatctgatgggggcaatgcaactcatagaggacttctccacacacgttagtatcgactgttcgccccataagacagtgaagaagaccgctaacgagttcccttgcctgccaaagcaagtggcatggatcttggccacttccaaggtctttatgtatcctgagcttcttccagtgtgtagcctgaaggccaaaaacccccaggacaaaatcctgtttacgaaggccgaggacaacaaatacctgttgacctgcaaaaccgcacggcagctgaccgtcagaataaagaacctcaacatgaaccgggcacctgacaacatcattaagttctacaagaagacgaagcagctgcccgtgttaggcaaatgctgcgaagaaatccagcctcatcagtggaaacctcccatagaacgagaagaacatagactgccattttggctgaaggcttcccttcccagcatccaagaagagctgcggcacatggcagatggtgccagggaggtgggtaacatgactggtaccaccgaaatcaattctgatcagggcttggaaaaggacaactctgaattaggctccgagacacgatatccgttactgctccccaaaggggtcgtgttaaagctgaaacccgtggccgaccggttccctaagaaggcctggaggcaaaagcgcagttctgtcctgaagcctttactgattcagccctccccctccctccagccctccttcaatcctggaaaaactcccgctcagagcacccactccgaggcacctcctagcaaaatggtactccggattccacaccctatacagccggctacagttctgcagactgtacccggagttcctccattgggggtttctggcggagagagcttcgaaagcccggctgccctcccagcaatgcccccagaggcgcgaaccagctttccactgtcagagagccaaacgcttctctcatctgcacccgtgcccaaggtcatgatgccctctcccgcatcttcaatgtttcggaagccttacgtgaggagacgtccctcaaagaggcgaggagcacgcgctttcaggtgcattaaacctgcccctgtcatccatcccgcatccgtcatcttcacagtaccggcaactaccgtgaagatcgttagcttgggcggaggatgcaacatgatacagcccgtcaatgcggctgttgctcagtcacctcagactattcccattgctacattgctagtgaatccaacgtctttcccctgccctctgaatcagccactggtcgcgtctagtgtttctcccctcatcgttagtggaaattcagtgaacctgccaatcccctcgacccccgaggataaggctcacatgaatgtcgatattgcctgtgccgtcgcagatggggaaaacgcctttcagggactcgagcctaaactcgaaccacaggagctctcacccctgtcggcaactgtgttcccaaaagtggaacacagccccggaccaccgcctgtcgataaacagtgccaggaggggttgagcgaaaactctgcttacaggtggaccgtcgtgaagaccgaagaggggcgtcaggccctggaaccactgccacagggaatccaggagtcattgaataattcttcgccaggcgatttagaggaagttgtgaagatggagcctgaggacgccactgaggagatatccggcttcctatag

SEQ ID NO: 76528 - DNA, 2160 bp, Artificial Sequence
  derived and/or modified sequence
atgggcttcagcaacatggaagacgacgggcctgaagaagaggagcgcgtagcggagccacaagccaactttaatacgcctcaggccctacgctttgaagagctgttggccaatttgctgaacgaacagcatcagatcgccaaggagctgttcgagcagctgaaaatgaagaaaccttcagccaagcagcagaaagaggttgaaaaagtgaaacctcagtgtaaagaggttcaccagaccctgatactggatccagcccaacgaaagcggctccagcaacaaatgcagcaacacgtgcagttgctgacacagattcatctgctggccacctgcaaccctaacctcaatccggaagcgtcatcgacgcgcatctgtctgaaagaattagggaccttcgctcaatcaagcatagctctgcaccaccaatacaaccccaagttccagactcttttccagccatgtaatctgatgggcgcaatgcaattgatagaggacttctctacacacgtctccatcgactgcagcccccataagacggtaaagaaaactgccaacgagtttccctgtctgcctaagcaggtggcttggattctggccacgtctaaggtgttcatgtatcccgagctgttgccagtgtgttcgctcaaagctaagaacccccaggataagatcctattcactaaagcggaagataataaatacctgctgacctgcaaaactgccaggcagcttacagttagaatcaagaacctgaacatgaatagagctcccgacaacattatcaagttttacaagaaaactaagcagctgccagtgctcggtaaatgttgcgaggaaattcagccacaccagtggaagccccctatcgagcgagaagagcacagactcccgttttggctgaaagcctctttaccatctatccaggaagagcttaggcatatggctgacggtgcacgagaagtgggaaacatgacgggtactactgaaatcaattccgatcagggactggagaaagataattctgagcttggaagcgaaaccagatacccactgcttcttcctaaaggcgtggtgctgaagctcaagcccgtggctgatcgcttccccaagaaagcctggcgacagaagagaagtagtgtcttgaaacccctcctaattcaacctagtccttcattacaaccatcttttaatcctggaaagacacctgctcagagtactcactctgaggcacccccatcgaagatggtcctcaggattccacaccctatccagccggctactgtgctccaaacggtgccgggagtaccgcctctaggcgtgagcggcggagagtcatttgagagcccagctgccttgcccgctatgcccccagaagcacgcaccagctttcctctgagtgaaagtcagaccctactgtcctcggcacccgttccaaaggtcatgatgcctagcccagcctcttctatgttccgtaaaccgtacgtgagaagaaggccaagcaagagaagaggcgctagggcatttaggtgcatcaaacctgcacccgttatccacccagcatctgttatattcacagtgcccgctacgacagtgaaaattgtcagccttggcggagggtgcaatatgattcagcccgtgaatgcggctgtggcacagtccccacagactattccaatcgccactttattagttaatcccactagctttccttgccctttaaatcaaccccttgttgcgagttcagtgtccccgctcatcgtatcaggcaactccgtgaacctcccaattccgagtacacccgaggacaaagcgcatatgaacgtggatatagcgtgcgccgtggccgatggcgaaaatgcatttcagggtctggagccaaaattagaacctcaggaactcagccctttgtctgcgaccgtgtttccgaaggtcgagcatagccctggtccgccaccagttgacaagcagtgtcaggagggcctgtctgagaattctgcttaccgctggaccgtggtaaaaacagaggaggggaggcaagctttagaaccgctaccgcagggcatacaagaatcactgaacaattcaagccctggagacttggaagaggttgtgaagatggaaccagaggatgccactgaggagatcagcggattcttgtag

SEQ ID NO: 76529 - DNA, 1791 bp, Artificial Sequence
  derived and/or modified sequence
atgcagcagaaagaactcggtacatttgctcaaagctcaattgctctccaccaccagtacaatccgaagttccagacacttttccaaccgtgcaacttaatgggagcaatgcaactgattgaggacttcagtactcatgtgtcaatagattgctctccacataaaacagtgaagaagacggctaatgagtttccatgtctccccaagcaggtggcctggattttggctacgagtaaggttttcatgtatccagaactgctccctgtatgtagtctgaaggcaaaaaacccacaagataaaatactttttacaaaagcagaggataataaatacttgctgacttgtaagaccgcacgacagttgactgtgagaattaagaatctaaatatgaatcgagcaccagacaacattatcaaattctacaagaaaacaaaacagttgcccgttctgggaaagtgttgcgaagagattcaaccacaccagtggaagccaccaatcgagcgtgaagaacaccgtctgcctttttggctaaaggcatctctcccatcaatccaggaggagctacggcatatggccgatggggctcgagaagtggggaacatgacaggaacgacagagattaatagcgaccaggggctggagaaagataatagtgagctcggctcagagacccggtaccctttactcctccccaagggagtggttctgaagctgaaaccggtagcagatcggttccccaaaaaagcctggcgacagaagagatcctcagttctgaagccactcttgatacaaccctcacccagtttacagccttccttcaacccgggaaaaacaccagcgcaatcaacccactcagaggcccctcccagcaagatggtgttgcgtatacctcaccccatccagccggcaaccgttcttcaaacggttcccggtgtgccacccctcggggtgagcggaggcgaaagttttgagtcacctgctgcgctgccagcaatgccacccgaggctagaacttcctttccgctgagcgagtcgcagactttgctgagtagcgcacccgtgccgaaagtcatgatgccttccccagcctctagcatgtttcgcaagccttacgtgaggcgcaggccttctaagcgccgaggagcacgagctttccggtgtattaagcccgctcccgtgattcatcccgcatctgtaattttcacggtgccagccaccacggtaaagatcgttagcctgggcggtggatgcaatatgattcagccagttaacgcggcagtggcccagtcgccacagaccatcccaatcgcaacccttctggtcaaccccacatcctttccctgccccctgaatcagcccctcgttgcgagttctgtaagccctctgattgtctcgggaaattcagtgaatttacccatcccttcaacgcctgaggacaaggcccacatgaatgtcgatatcgcctgtgctgtggccgatggcgaaaatgccttccagggcctggagcccaaattggagccacaggagctgagtcccctgtctgccaccgtgtttcccaaagtcgaacatagtcctggtcccccacccgtggacaaacagtgccaggaaggcctgtcagaaaactccgcctaccgatggacagtggttaagactgaggaaggacggcaagcactagagcccctccctcagggaatccaggagtccttaaataactcaagtccaggagacctggaggaggtggtcaagatggagccagaagacgccaccgaggagatctccggctttctttag

SEQ ID NO: 76530 - DNA, 2106 bp, Artificial Sequence
  derived and/or modified sequence
gaagaaaccttcagccaaacagcagaaggaggtagagaaggttaaaccccagtgtaaggaagttcatcagaccctgattctggacccagcacaaaggaagagactccagcagcagatgcagcagaaagagctgggaacctttgctcaaagctccatcgcccttcaccatcagtacaaccccaagtttcagaccctgttccaaccctgtaacttgatgggagctatgcagctgattgaagacttcagcacacatgtcagcattgactgcagccctcataaaactgtcaagaagactgccaatgaatttccctgtttgccaaagcaagtggcttggatcctggccacaagcaaggttttcatgtatccagagttacttccagtgtgttccctgaaggcaaagaatccccaggataagatcctcttcaccaaggctgaggacaacaagtaccttctaacctgcaagactgcccgccaactgacagtgagaatcaagaacctcaacatgaacagagctcctgacaacatcattaaattttataagaagaccaaacagctgccagtcctaggaaaatgctgtgaagagatccagccacatcagtggaagccacctatagagagagaagaacaccggctcccattctggttaaaggccagtctgccatccatccaggaagaactgcggcacatggctgatggtgctagagaggtaggaaatatgactggaaccactgagatcaactcagatcaaggcctagaaaaagacaactcagagttggggagtgaaactcggtacccactgctattgcctaagggtgtagtcctgaaactgaagccagttgccgaccgtttccccaagaaggcttggagacagaagcgttcatcagtcctgaaacccctccttatccaacccagcccctctctccagcccagcttcaaccctgggaaaacaccagcccaatcaactcattcagaagcccctccgagcaaaatggtgctccggattcctcacccaatacagccagccactgttttacagacagttccaggtgtccctccactgggggtcagtggaggtgagagttttgagtctcctgcagcactgcctgctatgccccctgaggccaggacaagcttccctctgtctgagtcccagactttgctctcttctgcccctgtgcccaaggtaatgatgccctcccctgcctcttccatgtttcgaaagccatatgtgagacggagaccctcaaaaagaaggggagccagggcctttcgctgtatcaaacctgcccctgttatccaccctgcatctgttatcttcactgttcctgctaccactgtgaagattgtgagccttggcggtggctgtaacatgatccagcctgtcaatgcggctgtggcccagagtccccagactattcccatcgccaccctcttggttaaccctacttccttcccctgtccattgaaccagccccttgtggcctcctctgtctcacccttaattgtttctggcaattctgtgaatcttcctataccatccacccctgaagataaggcccacatgaatgtggacattgcttgtgctgtggctgatggggaaaatgcctttcagggcctagaacccaaattagagccccaggaactatctcctctctctgctactgttttccccaaagtggaacatagcccagggcctccaccagtcgataaacagtgccaagaaggattgtcagagaacagtgcctatcgctggaccgttgtgaaaacagaggagggaaggcaagctctggagccgctccctcagggcatccaggagtctctaaacaactcttcccctggggatttagaggaagttgtcaagatggaacctgaagatgctacagaggaaatcagtggatttctttgagctaggagaataagagtctggagactgggagccttcacttcggcctccgattggtggcgcatagggtgtaaccaataggaaacccctaaagggtacttaaaccccagattttgcaactggggctcttgagcagcttgctttagcctgctcccactctgtggaatatacttttgcttcaataaatctgtgcttttattgct

SEQ ID NO: 76531 - DNA, 2682 bp, Artificial Sequence
  derived and/or modified sequence
aacgatcccagtgtcggttgcgggatccgcctcctctcagtttgcccctttagccctccacctttcccttctcctctctcgcatttccgccagtcggcttacccgctggccgcctcctgacaagcgggagggatccgcggtggacccagggaagcggaggagcctggcggccaccccctcttcctcacttccctgtactctcatcgctctcggcctccgacacgaaaaggaagcaaatgagctgatggaagatctgtttgaaactgtgagtaatgatcctcaagtgagaacatgggattttccaagatgagatgggattctccaacatggaagatgatggcccagaagaggaggagcgtgtggctgagcctcaagctaactttaacacccctcaagctctacggtttgaggaactactggccaacctactaaatgaacaacatcagatagcgaaggaactatttgaacagctgaagatgaagaaaccttcagccaaacagcagaaggaggtagagaaggttaaaccccagtgtaaggaagttcatcagaccctgattctggacccagcacaaaggaagagactccagcagcagatgcagcagcatgttcagctcttgacacaaatccaccttcttgccacctgcaaccccaatctcaatccggaggccagtagcaccaggatatgtcttaaagagctgggaacctttgctcaaagctccatcgcccttcaccatcagtacaaccccaagtttcagaccctgttccaaccctgtaacttgatgggagctatgcagctgattgaagacttcagcacacatgtcagcattgactgcagccctcataaaactgtcaagaagactgccaatgaatttccctgtttgccaaagcaagtggcttggatcctggccacaagcaaggttttcatgtatccagagttacttccagtgtgttccctgaaggcaaagaatccccaggataagatcctcttcaccaaggctgaggacaacaagtaccttctaacctgcaagactgcccgccaactgacagtgagaatcaagaacctcaacatgaacagagctcctgacaacatcattaaattttataagaagaccaaacagctgccagtcctaggaaaatgctgtgaagagatccagccacatcagtggaagccacctatagagagagaagaacaccggctcccattctggttaaaggccagtctgccatccatccaggaagaactgcggcacatggctgatggtgctagagaggtaggaaatatgactggaaccactgagatcaactcagatcaaggcctagaaaaagacaactcagagttggggagtgaaactcggtacccactgctattgcctaagggtgtagtcctgaaactgaagccagttgccgaccgtttccccaagaaggcttggagacagaagcgttcatcagtcctgaaacccctccttatccaacccagcccctctctccagcccagcttcaaccctgggaaaacaccagcccaatcaactcattcagaagcccctccgagcaaaatggtgctccggattcctcacccaatacagccagccactgttttacagacagttccaggtgtccctccactgggggtcagtggaggtgagagttttgagtctcctgcagcactgcctgctatgccccctgaggccaggacaagcttccctctgtctgagtcccagactttgctctcttctgcccctgtgcccaaggtaatgatgccctcccctgcctcttccatgtttcgaaagccatatgtgagacggagaccctcaaaaagaaggggagccagggcctttcgctgtatcaaacctgcccctgttatccaccctgcatctgttatcttcactgttcctgctaccactgtgaagattgtgagccttggcggtggctgtaacatgatccagcctgtcaatgcggctgtggcccagagtccccagactattcccatcgccaccctcttggttaaccctacttccttcccctgtccattgaaccagccccttgtggcctcctctgtctcacccttaattgtttctggcaattctgtgaatcttcctataccatccacccctgaagataaggcccacatgaatgtggacattgcttgtgctgtggctgatggggaaaatgcctttcagggcctagaacccaaattagagccccaggaactatctcctctctctgctactgttttccccaaagtggaacatagcccagggcctccaccagtcgataaacagtgccaagaaggattgtcagagaacagtgcctatcgctggaccgttgtgaaaacagaggagggaaggcaagctctggagccgctccctcagggcatccaggagtctctaaacaactcttcccctggggatttagaggaagttgtcaagatggaacctgaagatgctacagaggaaatcagtggatttctttgagctaggagaataagagtctggagactgggagccttcacttcggcctccgattggtggcgcatagggtgtaaccaataggaaacccctaaagggtacttaaaccccagattttgcaactggggctcttgagcagcttgctttagcctgctcccactctgtggaatatacttttgcttcaataaatctgtgcttttattgcttcattgtttca

SEQ ID NO: 76532 - DNA, 2160 bp, Artificial Sequence
  derived and/or modified sequence
atgggcttcagcaacatggaggacgacggccccgaggaggaggagagagtggccgagccccaggccaacttcaacaccccccaggccctgagattcgaggagctgctggccaacctgctgaacgagcagcaccagatcgccaaggagctgttcgagcagctgaagatgaagaagcccagcgccaagcagcagaaggaggtggagaaggtgaagccccagtgcaaggaggtgcaccagaccctgatcctggaccccgcccagagaaagagactgcagcagcagatgcagcagcacgtgcagctgctgacccagatccacctgctggccacctgcaaccccaacctgaaccccgaggccagcagcaccagaatctgcctgaaggagctgggcaccttcgcccagagcagcatcgccctgcaccaccagtacaaccccaagttccagaccctgttccagccctgcaacctgatgggcgccatgcagctgatcgaggacttcagcacccacgtgagcatcgactgcagcccccacaagaccgtgaagaagaccgccaacgagttcccctgcctgcccaagcaggtggcctggatcctggccaccagcaaggtgttcatgtaccccgagctgctgcccgtgtgcagcctgaaggccaagaacccccaggacaagatcctgttcaccaaggccgaggacaacaagtacctgctgacctgcaagaccgccagacagctgaccgtgagaatcaagaacctgaacatgaacagagcccccgacaacatcatcaagttctacaagaagaccaagcagctgcccgtgctgggcaagtgctgcgaggagatccagccccaccagtggaagccccccatcgagagagaggagcacagactgcccttctggctgaaggccagcctgcccagcatccaggaggagctgagacacatggccgacggcgccagagaggtgggcaacatgaccggcaccaccgagatcaacagcgaccagggcctggagaaggacaacagcgagctgggcagcgagaccagataccccctgctgctgcccaagggcgtggtgctgaagctgaagcccgtggccgacagattccccaagaaggcctggagacagaagagaagcagcgtgctgaagcccctgctgatccagcccagccccagcctgcagcccagcttcaaccccggcaagacccccgcccagagcacccacagcgaggccccccccagcaagatggtgctgagaatcccccaccccatccagcccgccaccgtgctgcagaccgtgcccggcgtgccccccctgggcgtgagcggcggcgagagcttcgagagccccgccgccctgcccgccatgccccccgaggccagaaccagcttccccctgagcgagagccagaccctgctgagcagcgcccccgtgcccaaggtgatgatgcccagccccgccagcagcatgttcagaaagccctacgtgagaagaagacccagcaagagaagaggcgccagagccttcagatgcatcaagcccgcccccgtgatccaccccgccagcgtgatcttcaccgtgcccgccaccaccgtgaagatcgtgagcctgggcggcggctgcaacatgatccagcccgtgaacgccgccgtggcccagagcccccagaccatccccatcgccaccctgctggtgaaccccaccagcttcccctgccccctgaaccagcccctggtggccagcagcgtgagccccctgatcgtgagcggcaacagcgtgaacctgcccatccccagcacccccgaggacaaggcccacatgaacgtggacatcgcctgcgccgtggccgacggcgagaacgccttccagggcctggagcccaagctggagccccaggagctgagccccctgagcgccaccgtgttccccaaggtggagcacagccccggccccccccccgtggacaagcagtgccaggagggcctgagcgagaacagcgcctacagatggaccgtggtgaagaccgaggagggcagacaggccctggagcccctgccccagggcatccaggagagcctgaacaacagcagccccggcgacctggaggaggtggtgaagatggagcccgaggacgccaccgaggagatcagcggcttcctgtag

SEQ ID NO: 76533 - DNA, 591 bp, Artificial Sequence
  derived and/or modified sequence
atggaggacctgttcgagaccttccaggacgagatgggcttcagcaacatggaggacgacggccccgaggaggaggagagagtggccgagccccaggccaacttcaacaccccccaggccctgagattcgaggagctgctggccaacctgctgaacgagcagcaccagatcgccaaggagctgttcgagcagctgaagatgaagaagcccagcgccaagcagcagaaggaggtggagaaggtgaagccccagtgcaaggaggtgcaccagaccctgatcctggaccccgcccagagaaagagactgcagcagcagatgcagcagcacgtgcagctgctgacccagatccacctgctggccacctgcaaccccaacctgaaccccgaggccagcagcaccagaatctgcctgaaggagctgggcaccttcgcccagagcagcatcgccctgcaccaccagtacaaccccaagttccagaccctgttccagccctgcaacctgatgggcgccatgcagctgatcgaggacttcagcacccacgtgagcatcgactgcagcccccacaagaccgtgaagaagaccgtgtgctag

SEQ ID NO: 76534 - DNA, 498 bp, Artificial Sequence
  derived and/or modified sequence
atggaggacctgttcgagaccttccaggacgagatgggcttcagcaacatggaggacgacggccccgaggaggaggagagagtggccgagccccaggccaacttcaacaccccccaggccctgagattcgaggagctgctggccaacctgctgaacgagcagcaccagatcgccaaggagctgttcgagcagctgaagatgaagaagcccagcgccaagcagcagaaggaggtggagaaggtgaagccccagtgcaaggaggtgcaccagaccctgatcctggaccccgcccagagaaagagactgcagcagcagatgcagcagcacgtgcagctgctgacccagatccacctgctggccacctgcaaccccaacctgaaccccgaggccagcagcaccagaatctgcctgagctgggagcccctgctgaaggcccccagccccttcaccatcagcaccacccccagcttcagaccctgcagcaaccccgtgacctag

SEQ ID NO: 76535 - DNA, 147 bp, Artificial Sequence
  derived and/or modified sequence
atggaggacctgttcgagaccttccaggacgagatgggcttcagcaacatggaggacgacggccccgaggaggaggagagagtggccgagccccaggccaacttcaacaccccccaggccctgagacagctgctgctgctgatgtag

SEQ ID NO: 76536 - DNA, 621 bp, Artificial Sequence
  derived and/or modified sequence
atgggcttcagcaacatggaggacgacggccccgaggaggaggagagagtggccgagccccaggccaacttcaacaccccccaggccctgagattcgaggagctgctggccaacctgctgaacgagcagcaccagatcgccaaggagctgttcgagcagctgaagatgaagaagcccagcgccaagcagcagaaggaggtggagaaggtgaagccccagtgcaaggaggtgcaccagaccctgatcctggaccccgcccagagaaagagactgcagcagcagatgcagcagcacgtgcagctgctgacccagatccacctgctggccacctgcaaccccaacctgaaccccgaggccagcagcaccagaatctgcctgaaggagctgggcaccttcgcccagagcagcatcgccctgcaccaccagtacaaccccaagttccagaccctgttccagccctgcaacctgatgggcgccatgcagctgatcgaggacttcagcacccacgtgagcatcgactgcagcccccacaagaccgtgaagaagaccgccaacgagttcccctgcctgcccaagcaggtggcctggatcctggccaccagcaaggtgttcatgtactag

SEQ ID NO: 76537 - DNA, 585 bp, Artificial Sequence
  derived and/or modified sequence
atggaggacctgttcgagaccttccaggacgagatgggcttcagcaacatggaggacgacggccccgaggaggaggagagagtggccgagccccaggccaacttcaacaccccccaggccctgagattcgaggagctgctggccaacctgctgaacgagcagcaccagatcgccaaggagctgttcgagcagctgaagatgaagaagcccagcgccaagcagcagaaggaggtggagaaggtgaagccccagtgcaaggaggtgcaccagaccctgatcctggaccccgcccagagaaagagactgcagcagcagatgcagcagcacgtgcagctgctgacccagatccacctgctggccacctgcaaccccaacctgaaccccgaggccagcagcaccagaatctgcctgaaggagctgggcaccttcgcccagagcagcatcgccctgcaccaccagtacaaccccaagttccagaccctgttccagccctgcaacctgatgggcgccatgcagctgatcgaggacttcagcacccacgtgagcatcgactgcagcccccacaagaccgtgaagaagacctag

SEQ ID NO: 76538 - DNA, 591 bp, Artificial Sequence
  derived and/or modified sequence
atggaggatctgtttgagacttttcaggacgagatgggcttctccaacatggaggacgatggccctgaggaggaagaaagggtcgccgaacctcaggccaacttcaacaccccccaggccctgaggttcgaagagctgctggccaatctcctcaatgaacagcaccagatcgcaaaggaactcttcgaacaactgaagatgaagaagccttctgctaaacagcagaaggaagtggagaaggtgaagccccagtgtaaagaggtgcaccagacactgatactggaccccgcccagaggaaacggcttcagcaacaaatgcaacagcacgtccagctgttgacacagatccacctcttggctacgtgtaaccccaatctcaatcccgaggccagtagcacacgcatatgcttgaaagaactaggtacttttgcccagtccagcatcgccctccaccatcagtataaccctaaattccagactctatttcagccatgcaacctgatgggcgccatgcaactgatcgaggatttcagcacacacgtgtcaattgactgtagtccgcacaaaactgtcaaaaagacagtttgctag

SEQ ID NO: 76539 - DNA, 498 bp, Artificial Sequence
  derived and/or modified sequence
atggaagatctgttcgagacttttcaggacgaaatggggttttcgaacatggaagacgatggcccagaagaagaagagagagtggcggagccacaggcaaacttcaatactcctcaagctctccggttcgaagaactgctcgccaatctgctgaacgagcagcatcagatcgccaaggagctgtttgaacaactgaagatgaaaaagccatccgctaaacagcaaaaggaggtcgaaaaggtgaagccccagtgcaaagaagtccatcagaccttgatcctagacccagcccagaggaaaaggctccagcaacagatgcaacagcatgtgcagctcctaacccagatccacttgctcgcgacctgcaaccctaacttgaatcctgaagcctcaagtacccgcatctgcttaagttgggaaccacttctgaaagccccaagccccttcacaattagtacaactccaagctttaggccctgcagcaaccccgtgacttag

SEQ ID NO: 76540 - DNA, 147 bp, Artificial Sequence
  derived and/or modified sequence
atggaggacctgttcgagacatttcaggatgaaatgggcttttctaacatggaggacgacggtccggaagaagaggagcgcgtcgcagaaccacaggcaaatttcaacaccccccaagccttgaggcaactcctgctgctgatgtag

SEQ ID NO: 76541 - DNA, 591 bp, Artificial Sequence
  derived and/or modified sequence
atggaggatctttttgaaacctttcaggatgagatgggtttctccaacatggaggacgatgggcccgaagaagaagaaagagtagctgagcctcaagctaatttcaacaccccacaagcactccggttcgaagaattgttagccaacctgctcaacgagcagcatcagattgccaaagagctgtttgagcagctgaaaatgaaaaaaccgtctgccaagcagcagaaggaggtagaaaaggtgaagccacaatgtaaagaggtgcaccagactctgattctcgatccagcccagcgaaagagactccagcagcagatgcaacagcacgtacagttactgactcagattcacttgctagctacatgtaacccgaacctgaatccagaagccagtagcacacgaatctgccttaaggagctcggaacctttgcccagagttccattgccctgcatcaccaatacaaccctaagttccaaacccttttccagccttgtaatctcatgggcgcaatgcagctgatcgaggacttcagtacccacgtcagcatcgactgttccccccacaaaaccgtaaagaagaccgtctgttag

SEQ ID NO: 76542 - DNA, 621 bp, Artificial Sequence
  derived and/or modified sequence
atgggatttagcaacatggaggatgacggacccgaggaggaggagcgcgtggctgaacctcaggctaattttaacactccgcaggcgcttcgcttcgaagaactgttggcaaatttgttaaatgagcagcatcagattgcgaaggagctctttgagcagcttaagatgaagaagccttcagctaagcagcagaaggaagttgagaaggtaaaaccgcagtgcaaggaggtgcaccagactctcattctggatcctgctcagcggaagagacttcagcagcagatgcaacagcacgtgcagctcctgactcagatccatttactggctacctgcaacccaaacctgaacccagaggctagtagcactcggatatgccttaaggaactggggacatttgcccaatcgagtatcgctttgcaccatcagtacaatccaaaatttcagactctgttccagccttgtaatctgatgggagccatgcagctgatagaagattttagcacccatgtcagcatcgattgcagcccacacaaaacagtgaagaaaactgcgaacgagttcccctgtttgcctaagcaggtggcgtggattctagcgacctccaaagtgtttatgtattag

SEQ ID NO: 76543 - DNA, 585 bp, Artificial Sequence
  derived and/or modified sequence
atggaggacttgttcgaaacattccaggacgagatgggtttctcaaatatggaagacgatgggcctgaagaagaggagcgcgtagccgagccccaagcaaatttcaacacgccccaggcgcttagattcgaggagttgctggccaatctccttaatgagcaacaccagatcgccaaagagctgtttgagcagcttaaaatgaagaagccttccgccaaacagcagaaggaggtggagaaggtcaagccgcagtgtaaggaggtgcaccaaaccctgattctcgaccccgcacagcggaaacgtttacagcagcagatgcagcaacacgttcagctgttgactcagatccacctccttgctacctgtaacccaaacctgaatcccgaggcatcttccacccgcatttgtctaaaggaactgggcactttcgcccagagcagcatcgcgctacaccatcagtataaccctaaatttcagacactgtttcagccatgcaacctgatgggagctatgcagttgatcgaggacttctcaactcacgtttcgatagattgttcaccccataagactgtcaaaaagacatag

SEQ ID NO: 76544 - DNA, 591 bp, Artificial Sequence
  derived and/or modified sequence
atggaggacctgtttgagaccttccaggatgagatgggcttcagcaacatggaggatgatggccctgaggaggaggagcgggtggccgagccccaggccaacttcaacaccccccaggccctgcgctttgaggagctgctggccaacctgctgaatgagcagcaccagatcgccaaggagctgtttgagcagctgaagatgaagaagcccagcgccaagcagcagaaggaggtggagaaggtgaagccccagtgcaaggaggtgcaccagaccctcatcctggaccctgcccagaggaagaggctgcagcagcagatgcagcagcacgtgcagctgctgacccagatccacctgctggccacctgcaaccccaacctgaaccctgaggccagcagcacccgcatctgcctgaaggagctgggcacctttgcccagagcagcatcgccctgcaccaccagtacaaccccaagttccagaccctcttccagccctgcaacctgatgggcgccatgcagctgattgaggacttcagcacccacgtgtccattgactgcagcccccacaagacagtgaagaagacagtgtgctag

SEQ ID NO: 76545 - DNA, 498 bp, Artificial Sequence
  derived and/or modified sequence
atggaggacctgtttgagaccttccaggatgagatgggcttcagcaacatggaggatgatggccctgaggaggaggagcgggtggccgagccccaggccaacttcaacaccccccaggccctgcgctttgaggagctgctggccaacctgctgaatgagcagcaccagatcgccaaggagctgtttgagcagctgaagatgaagaagcccagcgccaagcagcagaaggaggtggagaaggtgaagccccagtgcaaggaggtgcaccagaccctcatcctggaccctgcccagaggaagaggctgcagcagcagatgcagcagcacgtgcagctgctgacccagatccacctgctggccacctgcaaccccaacctgaaccctgaggccagcagcacccgcatctgcctgtcctgggagcccctgctgaaggcccccagccccttcaccatcagcaccacccccagcttccggccctgcagcaaccctgtgacctag

SEQ ID NO: 76546 - DNA, 147 bp, Artificial Sequence
  derived and/or modified sequence
atggaggacctgtttgagaccttccaggatgagatgggcttcagcaacatggaggatgatggccctgaggaggaggagcgggtggccgagccccaggccaacttcaacaccccccaggccctgcggcagctgctgctgctgatgtag

SEQ ID NO: 76547 - DNA, 621 bp, Artificial Sequence
  derived and/or modified sequence
atgggcttcagcaacatggaggatgatggccctgaggaggaggagcgggtggccgagccccaggccaacttcaacaccccccaggccctgcgctttgaggagctgctggccaacctgctgaatgagcagcaccagatcgccaaggagctgtttgagcagctgaagatgaagaagcccagcgccaagcagcagaaggaggtggagaaggtgaagccccagtgcaaggaggtgcaccagaccctcatcctggaccctgcccagaggaagaggctgcagcagcagatgcagcagcacgtgcagctgctgacccagatccacctgctggccacctgcaaccccaacctgaaccctgaggccagcagcacccgcatctgcctgaaggagctgggcacctttgcccagagcagcatcgccctgcaccaccagtacaaccccaagttccagaccctcttccagccctgcaacctgatgggcgccatgcagctgattgaggacttcagcacccacgtgtccattgactgcagcccccacaagacagtgaagaagacagccaatgagttcccctgcctgcccaagcaggtggcctggatcctggccaccagcaaggtgttcatgtactag

SEQ ID NO: 76548 - DNA, 585 bp, Artificial Sequence
  derived and/or modified sequence
atggaggacctgtttgagaccttccaggatgagatgggcttcagcaacatggaggatgatggccctgaggaggaggagcgggtggccgagccccaggccaacttcaacaccccccaggccctgcgctttgaggagctgctggccaacctgctgaatgagcagcaccagatcgccaaggagctgtttgagcagctgaagatgaagaagcccagcgccaagcagcagaaggaggtggagaaggtgaagccccagtgcaaggaggtgcaccagaccctcatcctggaccctgcccagaggaagaggctgcagcagcagatgcagcagcacgtgcagctgctgacccagatccacctgctggccacctgcaaccccaacctgaaccctgaggccagcagcacccgcatctgcctgaaggagctgggcacctttgcccagagcagcatcgccctgcaccaccagtacaaccccaagttccagaccctcttccagccctgcaacctgatgggcgccatgcagctgattgaggacttcagcacccacgtgtccattgactgcagcccccacaagacagtgaagaagacctag

SEQ ID NO: 76549 - DNA, 591 bp, Artificial Sequence
  derived and/or modified sequence
atggaggacctgttcgagaccttccaggacgagatgggcttcagcaacatggaagatgacggcccagaagaggaggaacgagtcgcagaacctcaggctaactttaacacacctcaggccctccgttttgaggaattacttgcgaatctgttaaatgaacaacaccagatcgctaaagagttgttcgagcagctgaagatgaagaagccttcagccaagcagcaaaaggaggtggagaaagtaaagccacagtgcaaagaggtacaccagacgttgatccttgaccccgcacaacgcaaacggctgcagcagcagatgcagcagcacgtgcagcttcttacccagattcacctacttgccacgtgcaaccctaacctaaatcccgaggcttctagcacgaggatttgcttgaaggagcttggtacttttgcccagagctccatagctcttcatcaccaatataaccctaaattccaaacactatttcagccctgcaacctgatgggagcaatgcagctgatcgaggacttcagcacacacgtgagcattgattgttccccacataaaactgtcaagaaaactgtgtgctag

SEQ ID NO: 76550 - DNA, 498 bp, Artificial Sequence
  derived and/or modified sequence
atggaggacctgttcgagaccttccaggacgagatgggcttcagcaacatggaagacgacgggcccgaggaggaggaacgcgtggctgaaccccaggcaaatttcaataccccacaggcccttcgttttgaggagctactggccaacctactgaacgaacaacaccagatcgctaaagaattatttgagcagctcaagatgaagaagccctcggctaaacaacaaaaggaggtcgagaaggtcaagccacaatgtaaagaggtacaccagactctgatcctggaccccgcacaaagaaagcggctccagcagcagatgcaacagcacgtacagctactgacccagattcacctgctggctacttgtaacccgaaccttaaccccgaggcatccagcacccgcatttgcctgagctgggagccattgctgaaggccccatccccctttacaatttctactactccgtcgtttaggccttgttcaaatccagttacctag

SEQ ID NO: 76551 - DNA, 147 bp, Artificial Sequence
  derived and/or modified sequence
atggaggacctgttcgagaccttccaggacgagatgggcttcagcaatatggaggatgatggacccgaggaagaggaacgggtggctgagcctcaagcaaactttaatacccctcaggcactgcgccagctgctactgctcatgtag

SEQ ID NO: 76552 - DNA, 591 bp, Artificial Sequence
  derived and/or modified sequence
atggaggacctgttcgagaccttccaggacgagatgggcttcagcaacatggaggacgacggacccgaagaagaagagagggttgctgaaccccaagccaattttaacactccccaggcgctgaggttcgaggagctcttagccaatctgctgaatgaacagcatcaaatcgccaaagaactgttcgaacaacttaagatgaagaaaccttctgccaaacagcagaaagaggtcgagaaggtcaagccacagtgtaaagaagttcaccaaaccctaatccttgatcccgctcaacgcaagcggctgcagcagcagatgcagcagcatgtgcagttgctaacacaaatacacctccttgctacttgcaatccgaaccttaacccagaagcctcttccacaaggatatgtcttaaggaactcggaacatttgcccagtcttccattgcactgcaccatcagtacaaccctaaattccagaccctgttccagccatgcaatttaatgggtgctatgcagctgattgaagacttttctacccatgtttcaattgattgctcccctcacaaaaccgtgaaaaagactgtgtgctag

SEQ ID NO: 76553 - DNA, 621 bp, Artificial Sequence
  derived and/or modified sequence
atgggcttcagcaacatggaggacgacggccccgaggaggaggagcgcgtggccgaaccacaggccaatttcaacaccccgcaggccctgcgctttgaggaactacttgctaacctcctgaacgagcagcaccagatagccaaggagctctttgaacaactcaaaatgaaaaaacccagtgcaaagcagcagaaggaggtggaaaaagtgaagccccagtgtaaagaagttcaccaaaccctgatactggacccggcgcaacgcaaacggctccagcagcagatgcagcaacacgttcagttacttactcagattcacctgctcgccacctgtaatcctaacctgaacccagaggctagttcaactaggatatgtcttaaagaactcgggacctttgcccaaagctccattgcacttcatcatcagtacaatcctaagttccagaccctgttccagccgtgcaaccttatgggagccatgcaattgattgaggatttctctacacacgtcagtatagactgctcgccacacaaaacagtgaaaaagaccgcaaatgaattcccgtgcctgccaaagcaggtggcctggatccttgctacatcgaaggtctttatgtactag

SEQ ID NO: 76554 - DNA, 585 bp, Artificial Sequence
  derived and/or modified sequence
atggaggacctgttcgagaccttccaggacgagatgggcttcagcaacatggaggacgacggccctgaagaggaagagagggtggcggaaccccaggccaattttaatacaccccaagccctgagatttgaagaattactggcaaatctgctcaacgaacagcaccagatcgctaaagaactgtttgaacaactgaaaatgaagaagccaagtgcgaagcaacaaaaggaggtggagaaggtaaaacctcaatgtaaagaagtgcaccagacactcatcctggatcctgcccaacgcaaacgcctccagcaacagatgcaacaacatgtccagttactgacacagatccatttgcttgccacatgtaatcccaatctcaaccctgaagcctccagcacccgaatctgcttaaaagagcttggtactttcgcccagtcctccatagcgctgcaccatcagtacaatcctaaattccagacactgtttcagccctgcaatctcatgggggcgatgcagctaatcgaagacttctcaacgcacgtgtctattgattgttcaccccataagactgtaaaaaagacctag

SEQ ID NO: 76555 - DNA, 591 bp, Artificial Sequence
  derived and/or modified sequence
atggaagatttgttcgagactttccaggacgaaatggggttctctaatatggaagacgatgggccagaagaagaagaaagggtcgctgagccccaagctaacttcaacacaccacaggctctgaggtttgaagagctgcttgccaaccttctaaatgagcagcatcagattgctaaagagttgttcgagcagctgaagatgaagaagccaagcgccaagcagcaaaaggaggtggaaaaggtgaaaccgcagtgtaaagaggtgcaccagactctgattctggatcccgctcagaggaagcggctgcagcagcagatgcagcagcacgtgcagctgctgacacagatccacctgttagcaacctgtaacccaaatctcaatccggaagcttcctctactaggatatgtctaaaagaactcggaacgttcgcacagtcttctatcgctctacaccatcaatataatccaaagttccagacgctgttccagccctgcaacctgatgggcgcaatgcaattgatcgaagatttctctacacatgttagtatcgactgctccccacacaagactgtgaaaaagaccgtttgctag

SEQ ID NO: 76556 - DNA, 498 bp, Artificial Sequence
  derived and/or modified sequence
atggaggatctcttcgaaactttccaagacgaaatggggttctccaatatggaggacgacggcccagaagaagaagagagagtggcagaacctcaagcaaacttcaacaccccacaggcactgcgtttcgaagagttgttagcaaatctgcttaacgagcagcatcagattgcgaaagagctgtttgagcaactcaagatgaagaagccgagcgccaaacagcagaaggaagtcgaaaaggtcaaaccacagtgcaaggaggtgcaccagactttgatactagaccccgctcagagaaagagactgcagcaacaaatgcagcagcatgtacagctgctcacccagatccatctcctcgccacgtgtaacccaaatttgaatcctgaggccagcagtacgcgaatatgcctgtcatgggaaccactcctcaaagcacccagtccttttacaatcagtactacaccctctttccgcccatgcagtaaccccgtgacatag

SEQ ID NO: 76557 - DNA, 147 bp, Artificial Sequence
  derived and/or modified sequence
atggaggacttatttgagactttccaggacgaaatggggttctctaatatggaagacgatgggcctgaggaggaggagcgagtggcggagcctcaagccaactttaacacaccccaagccctgcgccagttgctcctccttatgtag

SEQ ID NO: 76558 - DNA, 591 bp, Artificial Sequence
  derived and/or modified sequence
atggaagacctgtttgagaccttccaggacgagatggggttctctaacatggaggacgatggtccggaggaggaggaacgggtcgcagagccacaggcaaacttcaacactccacaggctctccgatttgaggagttgctcgcgaacttattgaacgagcaacaccagatcgcgaaggaactctttgaacagcttaaaatgaaaaagccatcggccaaacagcagaaggaagtggagaaagtcaagcctcagtgcaaggaggtgcaccagacactgatcctggatccggctcagcggaagaggctgcagcagcagatgcaacagcacgtccagctcctgactcaaatccaccttttggcaacttgcaaccctaacttgaaccccgaggcctcttccacacggatttgcctcaaagagttgggtacattcgcgcagagcagcatcgccttgcaccatcagtataatccgaagttccagacactgttccagccttgcaatctcatgggcgctatgcagcttattgaggacttcagtacgcatgtatccatcgattgtagtccacataaaacggtcaagaagaccgtgtgctag

SEQ ID NO: 76559 - DNA, 621 bp, Artificial Sequence
  derived and/or modified sequence
atgggcttcagtaatatggaggacgatggaccggaagaagaggagcgggtggccgaaccccaggctaactttaacactcctcaagccttacgttttgaagaactgctggcaaaccttctaaacgagcagcaccaaatcgccaaagagctctttgaacagctgaaaatgaagaagcccagcgctaagcagcagaaagaggtagaaaaagtcaagccacagtgcaaggaggtacaccagaccctcatcctggatccagcccaacgaaaaaggcttcagcagcagatgcagcaacatgtgcagttattaacccagatccaccttcttgccacatgtaacccgaacttgaaccctgaggcatcgagtactcggatctgcctgaaagaactcggaacatttgctcaatctagcattgccttgcatcatcagtacaacccaaagttccagacactctttcaaccttgtaacctcatgggcgctatgcagttgatcgaggactttagcacacacgttagcatcgattgttcgccacacaagacggtcaaaaaaacagcaaacgagttcccctgtctgcccaaacaggtggcctggatcctggccacatcaaaggtgttcatgtattag

SEQ ID NO: 76560 - DNA, 585 bp, Artificial Sequence
  derived and/or modified sequence
atggaggatcttttcgagacattccaggacgaaatggggtttagtaacatggaagatgacggcccagaagaagaggagagggtggctgaaccccaggctaattttaacacaccccaggctttgcgttttgaagagcttcttgcaaacctgctcaatgagcagcatcagatcgcaaaggaactcttcgaacagcttaagatgaagaagcccagcgcaaaacagcagaaggaggtggaaaaagtgaaacctcagtgcaaggaagtgcaccagacattgatcttggaccctgcacagaggaaacgattgcagcagcagatgcaacagcatgtccaactgctgactcagattcatctgttggccacgtgtaaccctaacctgaaccccgaggcatcctccactcgcatttgtcttaaagaactagggacattcgcacaatcatccattgccctgcaccaccaatataaccctaagttccagacactgttccaaccttgtaatcttatgggcgctatgcagctaatcgaagacttttcaacccatgtgagcatagattgtagcccgcataagactgtgaagaagacctag

SEQ ID NO: 76561 - DNA, 932 bp, Artificial Sequence
  derived and/or modified sequence
cgccgctgaaggtacgcgtgagggcctgcgctggagccggcttgacaggtcggcttacccgctggccgcctcctgacaagcgggagggatccgcggtggacccagggaagcggaggagcctggcggccaccccctcttcctcacttccctgtactctcatcgctctcggcctccgacacgaaaaggaagcaaatgagctgatggaagatctgtttgaaactagacagggtcttgccatgttctggaactcataggctcaagtaatcttcctgcctcaacctcccaaagtgctggaattacagttccaagatgagatgggattctccaacatggaagatgatggcccagaagaggaggagcgtgtggctgagcctcaagctaactttaacacccctcaagctctacggtttgaggaactactggccaacctactaaatgaacaacatcagatagcgaaggaactatttgaacagctgaagatgaagaaaccttcagccaaacagcagaaggaggtagagaaggttaaaccccagtgtaaggaagttcatcagaccctgattctggacccagcacaaaggaagagactccagcagcagatgcagcagcatgttcagctcttgacacaaatccaccttcttgccacctgcaaccccaatctcaatccggaggccagtagcaccaggatatgtcttaaagagctgggaacctttgctcaaagctccatcgcccttcaccatcagtacaaccccaagtttcagaccctgttccaaccctgtaacttgatgggagctatgcagctgattgaagacttcagcacacatgtcagcattgactgcagccctcataaaactgtcaagaagactgccaatgaatttccctgtttgccaaagcaagtggcttggatcctggccacaagcaaggttttcatgtat

SEQ ID NO: 76562 - DNA, 810 bp, Artificial Sequence
  derived and/or modified sequence
gcgtgagggcctgcgctggagccggcttgacagggtctgagggggagtggagaactgggcgaggaggttcccgtggtcggcttacccgctggccgcctcctgacaagcgggagggatccgcggtggacccagggaagcggaggagcctggcggccaccccctcttcctcacttccctgtactctcatcgctctcggcctccgacacgaaaaggaagcaaatgagctgatggaagatctgtttgaaactttccaagatgagatgggattctccaacatggaagatgatggcccagaagaggaggagcgtgtggctgagcctcaagctaactttaacacccctcaagctctacggtttgaggaactactggccaacctactaaatgaacaacatcagatagcgaaggaactatttgaacagctgaagatgaagaaaccttcagccaaacagcagaaggaggtagagaaggttaaaccccagtgtaaggaagttcatcagaccctgattctggacccagcacaaaggaagagactccagcagcagatgcagcagcatgttcagctcttgacacaaatccaccttcttgccacctgcaaccccaatctcaatccggaggccagtagcaccaggatatgtcttaaagagctgggaacctttgctcaaagctccatcgcccttcaccatcagtacaaccccaagtttcagaccctgttccaaccctgtaacttgatgggagctatgcagctgattgaagacttcagcacacatgtcagcattgactgcagccctcataaaactgtcaagaagactg

SEQ ID NO: 76563 - protein, 147 aa, Artificial Sequence
  derived and/or modified sequence
MAGRGKLIAVIGDEDTVTGFLLGGIGELNKNRHPNFLVVEKDTTINEIEDTFRSLGSLPGSVVEANPNQRDPPLWDEIDSRQFLNRDDIGIILINQYIAEMVRHALDAHQQSIPAVLEIPSKEHPYDAAKDSILRRARGMFTAEDLR

SEQ ID NO: 76564 - DNA, 444 bp, Artificial Sequence
  derived and/or modified sequence
atggccggcagaggcaagctgatcgccgtgatcggcgacgaggacaccgtgaccggcttcctgctgggcggcatcggcgagctgaacaagaacagacaccccaacttcctggtggtggagaaggacaccaccatcaacgagatcgaggacaccttcagaagcctgggcagcctgcccggcagcgtggtggaggccaaccccaaccagagagacccccccctgtgggacgagatcgacagcagacagttcctgaacagagacgacatcggcatcatcctgatcaaccagtacatcgccgagatggtgagacacgccctggacgcccaccagcagagcatccccgccgtgctggagatccccagcaaggagcacccctacgacgccgccaaggacagcatcctgagaagagccagaggcatgttcaccgccgaggacctgagatag

SEQ ID NO: 76565 - DNA, 444 bp, Artificial Sequence
  derived and/or modified sequence
atggcagggaggggcaagttgattgctgtcattggcgatgaggataccgtgaccggcttcttacttgggggtattggggagctgaataaaaataggcaccccaactttctcgttgtggaaaaggataccaccattaatgagatcgaggacacatttaggtcccttggaagtttgccgggctccgtggtggaggccaacccaaatcagagggacccccctctctgggacgagatcgattcacgtcaattcctgaaccgcgacgatataggtattattctcatcaaccagtatatcgccgagatggtgcgtcatgcgctggacgcgcaccaacagagtataccagcggtgttagaaatcccaagtaaggaacatccatatgacgcagcaaaggattccattctccgcagggcccgggggatgttcactgccgaggatttgcgttag

SEQ ID NO: 76566 - DNA, 444 bp, Artificial Sequence
  derived and/or modified sequence
atggccggccggggcaagctgattgctgtgattggagatgaggacacagtgacaggcttcctgctgggcggcattggagagctgaacaagaacagacaccccaacttcctggtggtggagaaggacaccaccatcaatgaaattgaggacaccttccgcagcctgggcagcctgcccggctctgtggtggaggccaaccccaaccagagggacccccccctgtgggatgaaattgacagccggcagttcctgaacagagatgacatcggcatcatcctgatcaaccagtacatcgccgagatggtgagacatgccctggatgcccaccagcagagcatcccagctgtgctggagatccccagcaaggagcacccctatgatgctgccaaggacagcatcctgcggcgggcccggggcatgttcaccgctgaggacctgaggtag

SEQ ID NO: 76567 - DNA, 444 bp, Artificial Sequence
  derived and/or modified sequence
atggccggccggggcaagctgatcgccgtgatcggcgacgaggacaccgtgaccggattcttattaggtgggattggagaactgaataagaaccggcatcctaattttctggtagttgagaaggacaccacaatcaacgagattgaggacacttttagatctcttggatcccttccaggaagcgttgtcgaggctaatcccaaccagagggacccgccgctctgggacgaaatcgatagcagacagttcctgaatcgtgatgatattggcattatccttatcaatcagtatattgccgaaatggtgagacatgcactggacgcacatcagcaatccatcccagccgtcctagagatccctagcaaagaacacccctatgacgccgccaaagattcaatcctcaggcgcgccagaggcatgtttaccgcagaggacctgcgctag

SEQ ID NO: 76568 - DNA, 444 bp, Artificial Sequence
  derived and/or modified sequence
atggccggacggggaaaactgatcgctgtcataggcgatgaggatacggtaacgggctttttactcggtgggattggcgagctgaataagaaccgccacccaaactttctggtggtggaaaaagatacgacaataaacgagatcgaggacacctttagaagcctaggtagtctacctggctctgtagtggaagcaaaccccaaccagcgagatccccctctgtgggatgagatcgatagtaggcagtttctcaaccgcgatgacattgggattatccttatcaaccagtatatcgccgaaatggtgcgccatgctttagatgcccaccaacaaagcattcccgctgtgcttgaaataccaagcaaggaacacccttacgacgccgcaaaagacagcatactaaggcgcgcacgaggaatgttcaccgctgaggatctcaggtag

SEQ ID NO: 76569 - DNA, 711 bp, Artificial Sequence
  derived and/or modified sequence
gatggcggggaggggtaagctcatcgcagtgatcggagacgaggacacggtgactggtttcctgctgggcggcataggggagcttaacaagaaccgccatcccaatttcctggtggtggagaaggatacaaccatcaatgagatcgaagacactttccgttcacttggaagccttccgggcagtgttgtagaagccaaccctaatcagcgtgaccctccgctttgggatgaaattgattctaggcaatttctaaaccgggatgacattggcatcatcctcatcaaccagtacatcgcagagatggtgcggcatgccctggacgcccaccagcagtccatccccgctgtcctggagatcccctccaaggagcacccatatgacgccgccaaggactccatcctgcgcagggccaggggcatgttcactgccgaagacctgcgctaggggactcctcatagccctcagcccttccctcgtttccaggcctctccccaggcttgccatcagccttctttactttttgagcctctgatttccaattccctgctccttcccactccattaagaggctaggtgaggcgcttctaggttgctggggctctgctggttaaggaacaggaagcctgaccatctccctccactacctcttccctgtgctgttacacagtgtcattgttgatgttaaattaaagtcatattcttgcttctct

SEQ ID NO: 76570 - protein, 502 aa, Artificial Sequence
  derived and/or modified sequence
METLQESLNTLLKQLEEEKKTLESQVKYYALKLEQESKAYQKINNERRTYLAEMSQGSGLHQVSKRQQVDQLPRMQENLVKTLLLKEELDPLKAKIDILLVGDVTVGYLADTVQKLFANIAEVTITISDTKEAAALLDDCIFNMVLLKVPSSLSAEELEAIKLIRFGKKKNTHSLFVFIIPENFKGCISGHGMDIALTEPLTMEKMSNVVKYWTTCPSNTVKTENATGPEELGLPLQRSYSEHLGYFPTDLFACSESLRNGNGLELNASLSEFEKNKKISLLHSSKEKLRRERIKYCCEQLRTLLPYVKGRKNDAASVLEATVDYVKYIREKISPAVMAQITEALQSNMRFCKKQQTPIELSLPGTVMAQRENSVMSTYSPERGLQFLTNTCWNGCSTPDAESSLDEAVRVPSSSASENAIGDPYKTHISSAALSLNSLHTVRYYSKVTPSYDATAVTNQNISIHLPSAMPPVSKLLPRHCTSGLGQTCTTHPNCLQQFWAY

SEQ ID NO: 76571 - DNA, 1509 bp, Artificial Sequence
  derived and/or modified sequence
atggaaacgctgcaggaatccctgaacacacttctcaagcagctggaggaggagaaaaagaccctggaatcgcaggtgaagtactatgctctcaaactggagcaagaaagcaaggcgtaccagaagatcaataacgagcgcaggacgtaccttgccgaaatgtcgcagggctcagggctgcaccaagtttcgaagaggcagcaggtggatcagcttccccgcatgcaggagaacctggtaaaaacgctgcttttgaaggaggaactcgacccgctcaaggccaaaatcgatatcctcttggtcggtgatgtgaccgtaggatacttggccgacacagtacagaaactatttgcaaacatcgctgaggtgacgatcaccatttctgataccaaggaagcagctgcactgctggatgattgtatttttaatatggtgctcttaaaggtgcccagtagtctgagtgccgaggagctggaagcaattaagctgattaggttcggcaaaaaaaaaaacacccacagcctttttgtattcataatcccagaaaatttcaaaggctgtataagcggacacggaatggatatagctctgacggagcctctaaccatggagaaaatgagcaatgtcgtgaaatattggaccacctgtccaagtaataccgtaaaaacagagaacgccacggggccagaggagcttgggctgccgctccagagatcctatagtgagcacctaggatactttcctacagacctgtttgcttgtagtgaaagcttgaggaacggcaatggcttagagctgaatgcatccctatccgagttcgagaagaacaaaaaaatttcactcctgcacagctctaaagagaagctgaggagagaacggatcaagtattgctgtgagcaactcagaactttgcttccatacgtgaagggacgcaagaatgacgcagcatccgtgttagaggcgacagtggactacgtgaaatacatccgtgaaaagatttcgccagctgtcatggcacaaattacagaggcccttcagtccaatatgcgcttctgtaagaaacagcagacccccatcgagctctcattgcctggcaccgttatggctcaaagggaaaatagtgtcatgagcacgtacagccctgaacggggactgcagttcctgactaacacttgctggaacgggtgctccactccagatgcagaaagcagtctagatgaggcggtgagagtaccctcctcctccgcctccgagaacgctattggggatccctataagacacacatctcatcggccgccctgtcactgaattctctgcataccgtgaggtattactcaaaggtaacgccatcctacgacgcaacagctgtgaccaaccagaatatcagtatacacttacctagtgccatgcctccggtgtctaagctgcttcccagacattgcacttctggcctgggacaaacatgcaccacccaccccaattgtctgcagcaattttgggcctattag

SEQ ID NO: 76572 - DNA, 1509 bp, Artificial Sequence
  derived and/or modified sequence
atggagaccctccaggaatccttgaataccctgctgaagcagctggaagaggaaaagaagaccttggagtctcaggtgaagtactatgccctgaagttggagcaggaatctaaggcatatcaaaagatcaataacgaacgccgcacatacttggcagagatgtcccaggggtctggcctgcaccaggtgtccaaacggcagcaagtggaccagctgccccgtatgcaggagaatctggtgaaaactttgctgctgaaggaggagcttgatcctctgaaggccaaaatagatatcttactggtcggcgacgtcaccgtgggatacctggcggatactgtccaaaaactgttcgccaatattgccgaagtgacaattactatttcagataccaaggaggccgctgctctgctggatgattgcatatttaacatggtactcctgaaggtgccttcttcactctctgctgaggagctggaagccattaaactcattaggttcgggaagaaaaagaacacgcattcattgtttgtttttatcattcccgaaaactttaagggctgcataagcggccatggaatggacatcgctttgacggagcctctgacaatggaaaagatgtcgaatgttgtaaagtattggactacatgcccttctaatactgtgaagactgaaaacgctactggccccgaagaactgggtctgccgctgcagcggtcgtacagtgagcacctcggttacttcccaaccgatttattcgcttgttccgagtcactgaggaatggaaacggtcttgaactaaacgcaagcctgagtgaatttgagaaaaataaaaaaattagcctgctgcactcgtctaaagagaaactcagacgggagcgaataaaatattgctgtgaacagttgcgcacccttctgccctacgtgaaggggagaaagaacgatgccgcctcagttctcgaggctacagtagattacgtgaaatacattcgcgagaagatatcgcccgctgtaatggctcaaatcactgaagccttgcagagtaatatgcggttttgtaaaaaacaacagaccccaatcgagttgtctctgccagggaccgtaatggcccagagggaaaactctgtcatgagtacgtacagccctgaacgggggctgcagtttctgaccaacacatgttggaacggttgttccacccccgacgccgagagttccttagacgaggcggtgagagtgccaagctcatctgccagcgaaaacgccattggggacccgtacaagacccacatctcatccgccgccctgagcctgaacagcttgcatacggtccggtattattcgaaagtgacgccttcttacgacgcgactgccgttactaatcagaacattagcattcacctcccgtctgccatgccgcccgtgagcaagctacttccacgtcactgcacttcaggcctaggccagacttgcactacacatcctaactgcctgcagcagttctgggcctattag

SEQ ID NO: 76573 - DNA, 1509 bp, Artificial Sequence
  derived and/or modified sequence
atggagaccctgcaggagagcctgaacaccctgctgaagcagctggaggaggagaagaagaccctggagagccaggtgaagtactatgccctgaagctggagcaggagagcaaggcctaccagaagatcaacaatgaaagaaggacctacctggccgagatgagccagggcagcggcctgcaccaggtgtccaagaggcagcaggtggaccagctgcccaggatgcaggagaacctggtgaagaccctgctgctgaaggaggagctggaccccctgaaggccaagattgacatcctgctggtgggagatgtgacagtgggctacctggccgacacagtgcagaagctgtttgccaacattgctgaggtgaccatcaccatcagtgacaccaaggaggccgccgccctgctggatgactgcatcttcaacatggtgctgctgaaggtgcccagcagcctgtctgctgaggagctggaggccatcaagctgatccgctttgggaagaagaagaacacccacagcctgtttgtgttcatcatccctgagaacttcaagggctgcatcagcggccacggcatggacatcgccctgacagagcccctgaccatggagaagatgagcaatgtggtgaagtactggaccacctgccccagcaacacagtgaagacagaaaatgccactggacctgaggagctgggcctgcccctgcagaggagctacagcgagcacctgggctacttccccacagacctgtttgcctgcagcgagagcctgagaaatggaaatggcctggagctgaatgccagcctgtctgaatttgagaagaacaagaagatcagcctgctgcacagcagcaaggagaagctgcggcgggagcgcatcaagtactgctgtgagcagctgcggaccctgctgccctacgtgaagggcaggaagaatgatgctgcctctgtgctggaggccaccgtggactatgtgaagtacatccgggagaagatcagccctgctgtgatggcccagatcacagaggccctgcagagcaacatgaggttctgcaagaagcagcagacccccatcgagctgagcctgcccggcaccgtgatggcccagcgggagaacagcgtgatgagcacctacagccctgagcggggcctgcagttcctgaccaacacctgctggaatggctgcagcaccccagatgctgagagcagcctggatgaggccgtgcgggtgcccagcagcagcgcctctgaaaatgccatcggggacccctacaagacccacatcagcagcgctgccctgagcctgaacagcctgcacacagtgcgctactacagcaaggtgacccccagctatgatgccacagctgtgaccaaccagaacatcagcatccacctgcccagcgccatgcctcctgtgtccaagctgctgcccaggcactgcaccagcggcctgggccagacctgcaccacccaccccaactgcctgcagcagttctgggcctactag

SEQ ID NO: 76574 - DNA, 1509 bp, Artificial Sequence
  derived and/or modified sequence
atggagaccctgcaggagagcctgaacaccctgctgaagcagctggaagaagagaagaaaacgctggagtctcaggtaaagtactatgctctcaagctggagcaggagtcaaaagcgtaccagaagataaataacgagaggcggacttacttggcagagatgtcacagggcagcggtctgcatcaggtttccaagcggcagcaggtggatcagttacctagaatgcaggagaatctggtgaaaacactgctgcttaaagaagagctggaccctctaaaggccaaaatcgacatactgctagtgggggacgtgactgtgggatatttagcggataccgtgcagaaactgttcgctaacatcgctgaagtgacaatcacaattagcgacacgaaggaggctgctgccctactggacgactgcatttttaatatggtgctgttaaaggtacctagtagcctctccgccgaagaattagaagccattaaacttatccggttcggcaaaaaaaagaatacccactcattgtttgttttcatcattccagaaaactttaagggttgcatctcgggccacgggatggacatagcactgacagaaccgctcaccatggaaaaaatgagcaacgtggttaaatactggaccacttgtcccagtaacacggtaaaaactgagaacgctacaggtccagaggaactgggcctgcccctacaacgttcctattcagagcaccttggctattttcctacagacctgttcgcttgcagtgaatcactcagaaatggcaatggattggagttgaacgcttccctgagtgagttcgagaagaataagaaaatctcactccttcactcttcaaaagagaagttgcggcgagaacggatcaaatactgttgtgagcaactccgcacgctcctgccttatgttaaggggcgaaaaaacgacgccgccagcgtgctagaggcaactgtggattacgtgaagtacatccgggaaaagatatctcctgctgtcatggcccagattacagaggccctacaatcaaatatgcggttttgtaagaaacagcagacccccattgagctcagtctccccggcactgttatggctcagcgggagaatagtgtgatgagtacatatagtccagaacgtgggttacagtttctaacaaacacttgttggaatgggtgtagcactcccgacgccgaatctagcctggacgaagccgttcgggtcccttccagttctgcatccgagaacgcaattggggacccttacaaaacccatatctcctcagcagccctttcgctgaattcattgcacactgtccgatactacagcaaggtgacgccgtcctatgatgccacagccgtcacaaatcagaatatctcaatccacctgccttctgcgatgccccccgtgtccaagcttctgcctcggcattgtacttccggactgggtcaaacatgtacaacacaccctaattgtctgcagcagttctgggcctattag

SEQ ID NO: 76575 - DNA, 1509 bp, Artificial Sequence
  derived and/or modified sequence
atggagaccctgcaggagagcctgaacaccctgctgaagcagctggaggaggaaaaaaagaccctagagagccaggttaaatattatgctctaaaattagagcaggagtccaaggcgtaccaaaagattaacaacgagcggaggacatatctcgcagagatgagccagggcagcggactccaccaggtaagtaaaaggcagcaggtcgatcagctccctagaatgcaagagaatctggtgaaaactctcctgctgaaggaggagcttgacccattgaaagctaagatagatatattgttggtgggcgatgttaccgtgggctatctggcagatacggtccagaaacttttcgctaacatcgcagaggtcaccattaccatttctgacactaaggaagccgccgccttactggatgactgtatctttaacatggtactccttaaggtgccttcgagccttagcgcggaggaactggaggccataaagctgatcaggttcggaaaaaaaaaaaatacacatagcctctttgtgttcattatacccgagaactttaaaggttgtatctccgggcacggcatggacatcgccttaacggaacctttgactatggagaagatgtcaaatgttgtgaaatactggaccacctgtccaagcaataccgttaagacagaaaacgccactggccccgaagagttaggactgcctcttcagcgatcatattcagagcatctgggctattttccgactgacctgttcgcatgttccgagtctctccgcaatgggaacggattggaattaaacgctagcttatccgaattcgagaaaaacaagaaaatcagtctcctgcatagctcgaaagagaaattacggcgtgagcgtatcaagtattgctgcgaacaactcaggacactgctgccatacgttaagggccggaaaaacgatgctgcctcagtactggaagcaaccgtggactacgtcaagtacatacgagaaaagatctcaccggctgttatggcccaaatcaccgaggccttacagtccaatatgcgcttctgcaagaagcagcaaactcctatcgagttgtccctgcctggaacagtgatggcccagagggagaattcagtaatgagcacctatagcccagagagaggactgcaattcctcaccaatacctgttggaacgggtgctccacaccagatgcagagagctcactggacgaggccgtaagggttcccagtagttccgccagtgagaatgctattggcgacccctacaagactcacatctccagcgctgccctatcccttaacagtctccacacagttcggtactattccaaggtgaccccttcttacgatgctacagcagtcacaaaccaaaacatatcaatccacctgccatctgctatgccccctgtgtctaaattactcccacgccattgtaccagcgggctcggacaaacttgtactacacatcccaattgcttgcagcagttctgggcatactag

SEQ ID NO: 76576 - DNA, 1509 bp, Artificial Sequence
  derived and/or modified sequence
atggagactcttcaagagagtctgaatactctcctaaaacagcttgaggaggaaaaaaaaaccctggagagtcaagtaaagtactacgccctgaagctcgagcaggaatccaaggcttaccagaaaatcaataacgagcggcgaacctatctcgctgagatgtcccagggcagtggcctgcaccaagtctccaagcgtcaacaggtcgaccaactccccaggatgcaggaaaacctcgtcaagaccctactattaaaggaagagttagacccactgaaggcgaaaattgacatcctgctggtcggcgatgtgacagtgggatacctggctgataccgtacaaaagctgttcgccaacattgccgaagtgacaataaccatttcggacacaaaagaagcagctgctttgctggatgattgtattttcaacatggtcctgctcaaggttccttcatctctcagcgccgaggaactcgaagcaattaagctcattaggttcggtaaaaagaaaaacacacacagcctctttgtgtttatcatccccgaaaactttaaaggttgcatcagcggccacggcatggacattgcattaaccgagccactaactatggagaaaatgagcaacgtggtgaagtattggacaacctgtccaagcaacaccgttaaaaccgaaaacgctactgggcctgaagaactgggtctacctctgcaaaggagctattcagagcacctgggttactttcctacggatctatttgcttgttctgaatcacttcgcaatgggaacggactggaactgaatgcctctctgtccgagtttgagaagaataaaaagattagccttcttcactcctccaaggaaaagctaaggcgtgaaaggattaaatactgttgtgaacagctgagaacattgctcccatatgtcaaggggaggaagaatgacgcggcttccgttttggaggcaaccgtggactatgtaaaatatattagggagaaaataagccccgcagtcatggcacagatcacagaggctctgcagtcaaacatgcgtttttgtaagaagcagcagactcccatagaactctcactcccgggaaccgtaatggcccagcgggagaactctgtcatgtccacttactcccctgaaaggggcctccagtttctcaccaacacttgttggaacggttgctccacccctgatgccgagtcgagccttgacgaggccgtaagggtacccagcagctctgcctctgaaaatgccatcggcgacccttacaaaacccacatcagtagcgccgctctatctctaaacagcctccacacagttcgctactactctaaagttaccccaagctacgatgctacagccgttacgaatcagaatatctcaattcacctgccttctgctatgccccctgtgagcaagctgctacctcgccattgtacgtctggactcggccagacatgtacgacgcaccctaactgtctgcagcagttttgggcctattag

SEQ ID NO: 76577 - DNA, 1509 bp, Artificial Sequence
  derived and/or modified sequence
atggagacgctgcaggaaagcctgaacactctgcttaaacagctagaagaagaaaaaaagacccttgagtctcaggttaaatattatgcactaaaactcgaacaagagagtaaggcgtaccagaaaattaacaacgaaaggcggacctatctggcagaaatgtcacagggttccggcttacatcaggtgtccaaaagacaacaggtcgaccagcttcctaggatgcaggaaaacctcgttaaaacgttactgctgaaagaggaactggatcctttaaaggctaagattgacattttactggtgggtgacgttaccgttggctacctagcagataccgtccagaaactcttcgcaaacattgctgaggtcaccattacgataagcgacacaaaggaagcagctgcgttactagatgattgtatcttcaatatggttctactcaaggtgccctcatccctgtctgccgaggaactggaggctataaagttgattagatttggtaaaaagaaaaacacacacagcttgtttgtgttcattattcctgaaaatttcaaaggctgtataagcggacacggcatggacatcgcccttacagaacctctgacaatggagaagatgtcaaacgtcgtcaaatactggactacgtgcccctccaacacagtcaaaacggaaaacgccaccgggccagaggagctcggactcccattacagcggtcctacagcgagcatctcggatattttcctactgacctcttcgcctgctcggagtctttacgcaacggcaatggcttagaactgaacgcatccttgtccgagttcgaaaaaaataaaaaaatctccttactgcattccagcaaggaaaaacttcgccgtgagcgcatcaagtactgctgcgaacagctccgcactttgttgccatacgtgaagggtagaaaaaacgatgccgcaagtgtactggaggccactgtggattacgttaagtatatcagagagaaaatttcccccgcagtcatggcccagattaccgaagcactccagtctaatatgaggttctgcaaaaaacaacagacgcccattgagctctctcttcctgggacggttatggcacagcgggagaactcagtaatgtccacttactcacccgaaagaggactgcagttcttgacgaacacgtgttggaacggctgctccacacctgacgccgagtcctctctggatgaggccgttcgcgtgcctagcagttcggcctcagagaatgcaattggagacccctacaaaacccacataagttccgccgctctgtcactgaattctcttcacaccgtgcggtactacagcaaagtgacaccgtcttatgacgctactgctgtgactaatcagaacattagcatccacttacccagcgccatgccgcctgtgagcaagttactgccaaggcattgtacttccggattgggacagacctgcaccacccaccccaattgtctacagcaattttgggcttattag

SEQ ID NO: 76578 - DNA, 2051 bp, Artificial Sequence
  derived and/or modified sequence
aggtgcgaccggggggcggttggggttcaccgcctcgtgccgtactggcttctgggtggcccttaatgtcttgtgctctaaggtgctgaggggaaagacgcgggaggtctctggcctgacactatgaaggaagagagaaactacaacttcgacggtgtgagcaccaaccgcctgaaacagcagttgctggaagaagtccgcaagaagtagtgaatggaaaacccgttatgagacacaacttgaattaaatgatgaactagaaaagcaaattgtttatctcaaggagaaagtggaaaaaatccatggaaactcttcaggaatccttaaacacattacttaaacagctagaagaagaaaagaagactcttgaaagtcaagtgaaatactatgcacttaaactggaacaagaatcaaaggcttaccagaagatcaacaatgaacgccgtacatacctagctgaaatgtctcagggttctggtttacatcaagtttctaaaaggcaacaggtggatcaactgcctaggatgcaagagaatctagtgaaaaccctcctcttaaaagaagaattggaccctttaaaggcaaaaatagacatcttattagttggagatgtcactgtgggctacctggctgatactgtacagaaactatttgcaaacatagcagaagtcaccatcaccatcagtgacacgaaggaggcagcagcgcttttggatgattgcatattcaacatggttctcttgaaggtgccttcttcactaagtgccgaggagctggaagccatcaagttaattagatttggcaaaaagaaaaatacacattcactgtttgtttttataatccctgaaaattttaaaggttgtatttcagggcatggaatggatattgctttaactgaaccactgacaatggaaaaaatgagtaatgtggtaaaatactggacaacatgtccctcaaacactgttaagactgaaaacgcaactgggcctgaagaacttggattgcccctgcagaggtcctacagcgaacacctgggatattttcctactgatctatttgcctgctctgaatctttaaggaatggcaatgggcttgaattaaatgcttcgttgtcagagttcgagaaaaacaaaaagatctctcttcttcattcaagcaaggaaaaactaagaagggaaagaatcaaatattgctgtgagcagctgcgtactctcttgccgtatgtaaaagggagaaagaatgatgcggcttcagttcttgaggcaacagttgattatgtgaaatatatccgggagaaaatctctccagccgttatggcccagattacagaagcacttcagagcaacatgaggttttgtaagaaacaacaaacacccattgagctgtctctcccaggcactgtcatggcacagcgggaaaacagtgtgatgagcacttactcccctgagagagggctccaattcctgactaatacgtgctggaatgggtgctccactcctgatgcagagagctccttggatgaagctgtgagagttccatcaagctccgcctcagagaatgctattggtgatccatataaaactcacatttccagtgcagcgctgtctctgaattccttgcatactgtcagatattattctaaagtcaccccttcctacgatgcaactgctgtaacaaatcagaacatttcaattcatttaccttcagccatgcccccggtctcaaagcttctccctcggcactgcacttctgggttgggccagacgtgcactacacatcccaactgtctgcaacagttttgggcgtattaaaagcacatgtttgaaattcacactctcaaccacctactgggcgcagtttgacaatctaggaaaagtggaacaaagaatgattttgaaagctccacccaaagacctaatatcaaaagagttggcatggtttggcttctgataaatgcactcaaagcttctgcagatagaaagaccagcagcgaaaaagctggccacacactgtcactcatcttcatacacacttggatccccgccagccag

SEQ ID NO: 76579 - DNA, 1509 bp, Artificial Sequence
  derived and/or modified sequence
atggagaccctgcaggagagcctgaacaccctgctgaagcagctggaggaggagaagaagaccctggagagccaggtgaagtactacgccctgaagctggagcaggagagcaaggcctaccagaagatcaacaacgagagaagaacctacctggccgagatgagccagggcagcggcctgcaccaggtgagcaagagacagcaggtggaccagctgcccagaatgcaggagaacctggtgaagaccctgctgctgaaggaggagctggaccccctgaaggccaagatcgacatcctgctggtgggcgacgtgaccgtgggctacctggccgacaccgtgcagaagctgttcgccaacatcgccgaggtgaccatcaccatcagcgacaccaaggaggccgccgccctgctggacgactgcatcttcaacatggtgctgctgaaggtgcccagcagcctgagcgccgaggagctggaggccatcaagctgatcagattcggcaagaagaagaacacccacagcctgttcgtgttcatcatccccgagaacttcaagggctgcatcagcggccacggcatggacatcgccctgaccgagcccctgaccatggagaagatgagcaacgtggtgaagtactggaccacctgccccagcaacaccgtgaagaccgagaacgccaccggccccgaggagctgggcctgcccctgcagagaagctacagcgagcacctgggctacttccccaccgacctgttcgcctgcagcgagagcctgagaaacggcaacggcctggagctgaacgccagcctgagcgagttcgagaagaacaagaagatcagcctgctgcacagcagcaaggagaagctgagaagagagagaatcaagtactgctgcgagcagctgagaaccctgctgccctacgtgaagggcagaaagaacgacgccgccagcgtgctggaggccaccgtggactacgtgaagtacatcagagagaagatcagccccgccgtgatggcccagatcaccgaggccctgcagagcaacatgagattctgcaagaagcagcagacccccatcgagctgagcctgcccggcaccgtgatggcccagagagagaacagcgtgatgagcacctacagccccgagagaggcctgcagttcctgaccaacacctgctggaacggctgcagcacccccgacgccgagagcagcctggacgaggccgtgagagtgcccagcagcagcgccagcgagaacgccatcggcgacccctacaagacccacatcagcagcgccgccctgagcctgaacagcctgcacaccgtgagatactacagcaaggtgacccccagctacgacgccaccgccgtgaccaaccagaacatcagcatccacctgcccagcgccatgccccccgtgagcaagctgctgcccagacactgcaccagcggcctgggccagacctgcaccacccaccccaactgcctgcagcagttctgggcctactag

SEQ ID NO: 76580 - protein, 858 aa, Artificial Sequence
  derived and/or modified sequence
MLQQELLSRTSLETQKLDLMAEISNLKLKLTAVEKDRLDYEDKFRDTEGLIQEINDLRLKVSEMDSERLQYEKKLKSTKSLMAKLSSMKIKVGQMQYEKQRMEQKWESLKDELASLKEQLEEKESEVKRLQEKLVCKMKGEGVEIVDRDIEVQKMKKAVESLMAANEEKDRKIEDLRQCLNRYKKMQDTVVLAQGKDGEYEELLNSSSISSLLDAQGFSDLEKSPSPTPVMGSPSCDPFNTSVPEEFHTTILQVSIPSLLPATVSMETSEKSKLTPKPETSFEENDGNIILGATVDTQLCDKLLTSSLQKSSSLGNLKKETSDGEKETIQKTSEDRAPAESRPFGTLPPRPPGQDTSMDDNPFGTRKVRSSFGRGFFKIKSNKRTASAPNLAETEKETAEHLDLAGASSRPKDSQRNSPFQIPPPSPDSKKKSRGIMKLFGKLRRSQSTTFNPDDMSEPEFKRGGTRATAGPRLGWSRDLGQSNSDLDMPFAKWTKEQVCNWLMEQGLGSYLNSGKHWIASGQTLLQASQQDLEKELGIKHSLHRKKLQLALQALGSEEETNHGKLDFNWVTRWLDDIGLPQYKTQFDEGRVDGRMLHYMTVDDLLSLKVVSVLHHLSIKRAIQVLRINNFEPNCLRRRPSDENTIAPSEVQKWTNHRVMEWLRSVDLAEYAPNLRGSGVHGGLMVLEPRFNVETMAQLLNIPPNKTLLRRHLATHFNLLIGAEAQHQKRDAMELPDYVLLTATAKVKPKKLAFSNFGNLRKKKQEDGEEYVCPMELGQASGSASKKGFKPGLDMRLYEEDDLDRLEQMEDSEGTVRQIGAFSEGINNLTHMLKEDDMFKDFAARSPSASITDEDSNV

SEQ ID NO: 76581 - protein, 980 aa, Artificial Sequence
  derived and/or modified sequence
MMSDASDMLAAALEQMDGIIAGSKALEYSNGIFDCQSPTSPFMGSLRALHLVEDLRGLLEMMETDEKEGLRCQIPDSTAETLVEWLQSQMTNGHLPGNGDVYQERLARLENDKESLVLQVSVLTDQVEAQGEKIRDLEFCLEEHREKVNATEEMLQQELLSRTSLETQKLDLMAEISNLKLKLTAVEKDRLDYEDKFRDTEGLIQEINDLRLKVSEMDSERLQYEKKLKSTKDELASLKEQLEEKESEVKRLQEKLVCKMKGEGVEIVDRDIEVQKMKKAVESLMAANEEKDRKIEDLRQCLNRYKKMQDTVVLAQGKDGEYEELLNSSSISSLLDAQGFSDLEKSPSPTPVMGSPSCDPFNTSVPEEFHTTILQVSIPSLLPATVSMETSEKSKLTPKPETSFEENDGNIILGATVDTQLCDKLLTSSLQKSSSLGNLKKETSDGEKETIQKTSEDRAPAESRPFGTLPPRPPGQDTSMDDNPFGTRKVRSSFGRGFFKIKSNKRTASAPNLAETEKETAEHLDLAGASSRPKDSQRNSPFQIPPPSPDSKKKSRGIMKLFGKLRRSQSTTFNPDDMSEPEFKRGGTRATAGPRLGWSRDLGQSNSDLDMPFAKWTKEQVCNWLMEQGLGSYLNSGKHWIASGQTLLQASQQDLEKELGIKHSLHRKKLQLALQALGSEEETNHGKLDFNWVTRWLDDIGLPQYKTQFDEGRVDGRMLHYMTVDDLLSLKVVSVLHHLSIKRAIQVLRINNFEPNCLRRRPSDENTIAPSEVQKWTNHRVMEWLRSVDLAEYAPNLRGSGVHGGLMVLEPRFNVETMAQLLNIPPNKTLLRRHLATHFNLLIGAEAQHQKRDAMELPDYVLLTATAKVKPKKLAFSNFGNLRKKKQEDGEEYVCPMELGQASGSASKKGFKPGLDMRLYEEDDLDRLEQMEDSEGTVRQIGAFSEGINNLTHMLKEDDMFKDFAARSPSASITDEDSNV

SEQ ID NO: 76582 - DNA, 261 bp, Artificial Sequence
  derived and/or modified sequence
atgatgagcgacgccagcgacatgctggccgccgccctggagcagatggacggcatcatcgccggcagcaaggccctggagtacagcaacggcatcttcgactgccagagccccaccagccccttcatgggcagcctgagagccctgcacctggtggaggacctgagaggcctgctggagatgatggagaccgacgagaaggagggcctgagatgccagatccccgacagcaccgccgagaccctggtggagtggctgtag

SEQ ID NO: 76583 - DNA, 2943 bp, Artificial Sequence
  derived and/or modified sequence
atgatgagcgacgccagcgacatgctggccgccgccctggagcagatggacggcatcatcgccggcagcaaggccctggagtacagcaacggcatcttcgactgccagagccccaccagccccttcatgggcagcctgagagccctgcacctggtggaggacctgagaggcctgctggagatgatggagaccgacgagaaggagggcctgagatgccagatccccgacagcaccgccgagaccctggtggagtggctgcagagccagatgaccaacggccacctgcccggcaacggcgacgtgtaccaggagagactggccagactggagaacgacaaggagagcctggtgctgcaggtgagcgtgctgaccgaccaggtggaggcccagggcgagaagatcagagacctggagttctgcctggaggagcacagagagaaggtgaacgccaccgaggagatgctgcagcaggagctgctgagcagaaccagcctggagacccagaagctggacctgatggccgagatcagcaacctgaagctgaagctgaccgccgtggagaaggacagactggactacgaggacaagttcagagacaccgagggcctgatccaggagatcaacgacctgagactgaaggtgagcgagatggacagcgagagactgcagtacgagaagaagctgaagagcaccaaggacgagctggccagcctgaaggagcagctggaggagaaggagagcgaggtgaagagactgcaggagaagctggtgtgcaagatgaagggcgagggcgtggagatcgtggacagagacatcgaggtgcagaagatgaagaaggccgtggagagcctgatggccgccaacgaggagaaggacagaaagatcgaggacctgagacagtgcctgaacagatacaagaagatgcaggacaccgtggtgctggcccagggcaaggacggcgagtacgaggagctgctgaacagcagcagcatcagcagcctgctggacgcccagggcttcagcgacctggagaagagccccagccccacccccgtgatgggcagccccagctgcgaccccttcaacaccagcgtgcccgaggagttccacaccaccatcctgcaggtgagcatccccagcctgctgcccgccaccgtgagcatggagaccagcgagaagagcaagctgacccccaagcccgagaccagcttcgaggagaacgacggcaacatcatcctgggcgccaccgtggacacccagctgtgcgacaagctgctgaccagcagcctgcagaagagcagcagcctgggcaacctgaagaaggagaccagcgacggcgagaaggagaccatccagaagaccagcgaggacagagcccccgccgagagcagacccttcggcaccctgccccccagaccccccggccaggacaccagcatggacgacaaccccttcggcaccagaaaggtgagaagcagcttcggcagaggcttcttcaagatcaagagcaacaagagaaccgccagcgcccccaacctggccgagaccgagaaggagaccgccgagcacctggacctggccggcgccagcagcagacccaaggacagccagagaaacagccccttccagatccccccccccagccccgacagcaagaagaagagcagaggcatcatgaagctgttcggcaagctgagaagaagccagagcaccaccttcaaccccgacgacatgagcgagcccgagttcaagagaggcggcaccagagccaccgccggccccagactgggctggagcagagacctgggccagagcaacagcgacctggacatgcccttcgccaagtggaccaaggagcaggtgtgcaactggctgatggagcagggcctgggcagctacctgaacagcggcaagcactggatcgccagcggccagaccctgctgcaggccagccagcaggacctggagaaggagctgggcatcaagcacagcctgcacagaaagaagctgcagctggccctgcaggccctgggcagcgaggaggagaccaaccacggcaagctggacttcaactgggtgaccagatggctggacgacatcggcctgccccagtacaagacccagttcgacgagggcagagtggacggcagaatgctgcactacatgaccgtggacgacctgctgagcctgaaggtggtgagcgtgctgcaccacctgagcatcaagagagccatccaggtgctgagaatcaacaacttcgagcccaactgcctgagaagaagacccagcgacgagaacaccatcgcccccagcgaggtgcagaagtggaccaaccacagagtgatggagtggctgagaagcgtggacctggccgagtacgcccccaacctgagaggcagcggcgtgcacggcggcctgatggtgctggagcccagattcaacgtggagaccatggcccagctgctgaacatcccccccaacaagaccctgctgagaagacacctggccacccacttcaacctgctgatcggcgccgaggcccagcaccagaagagagacgccatggagctgcccgactacgtgctgctgaccgccaccgccaaggtgaagcccaagaagctggccttcagcaacttcggcaacctgagaaagaagaagcaggaggacggcgaggagtacgtgtgccccatggagctgggccaggccagcggcagcgccagcaagaagggcttcaagcccggcctggacatgagactgtacgaggaggacgacctggacagactggagcagatggaggacagcgagggcaccgtgagacagatcggcgccttcagcgagggcatcaacaacctgacccacatgctgaaggaggacgacatgttcaaggacttcgccgccagaagccccagcgccagcatcaccgacgaggacagcaacgtgtag

SEQ ID NO: 76584 - DNA, 261 bp, Artificial Sequence
  derived and/or modified sequence
atgatgagcgatgcctcggacatgctcgctgccgcactcgagcagatggatggaatcatcgcagggtctaaggcactggagtactccaacggaatcttcgactgccaatcgcctaccagccctttcatgggatccttgcgagctttacatctagtcgaggatttgcgtggactgctggagatgatggaaaccgatgaaaaagagggcctgcgatgtcagatccccgactccacagccgagactctggttgagtggctgtag

SEQ ID NO: 76585 - DNA, 2943 bp, Artificial Sequence
  derived and/or modified sequence
atgatgagcgatgcctctgatatgttggctgcagcactggagcagatggacggcataatcgctggaagcaaggctctggagtatagtaacggcatttttgactgtcagtccccaaccagtccttttatgggctcacttcgtgccctgcatctggtcgaagacctgcggggcctcctggaaatgatggagacggacgagaaagaagggttacggtgtcagatccccgactctactgcagaaacactcgtggaatggcttcagtctcagatgaccaacgggcaccttccaggaaacggagacgtgtatcaagaacggttggcacgtctggagaatgacaaggagtcactcgtgctgcaggtctctgtgttaaccgaccaagttgaggcgcagggcgagaagattagagatctcgagttttgcctcgaggagcatagagaaaaggtgaatgccacagaggagatgctgcagcaagagctgctgtccagaacgagtttagaaacacagaagttagacctgatggccgagatcagcaacctcaagctcaagctgaccgctgtcgagaaggacagactggactatgaggataaattccgggacaccgagggcttgattcaggaaataaatgacctccggctcaaggtatccgagatggactctgagagattacagtacgaaaaaaaacttaagtcaaccaaggacgagctggcaagcctcaaagagcaactggaagagaaggaatccgaagtgaagcgactgcaagagaagcttgtgtgtaagatgaaaggcgagggcgtcgaaattgtggatagagatatagaggttcagaagatgaaaaaggccgtggagtcactgatggctgccaatgaagagaaagaccggaagattgaggacctgcgccaatgcttgaatcgatacaagaagatgcaagacacggtggtgctagctcagggtaaagacggagagtacgaggagctgctgaatagctccagcatcagtagtctactcgatgctcaggggttttctgatttagaaaaatccccatcacctacgccagttatgggcagcccttcgtgcgaccctttcaatacgtccgttccggaggaatttcacacgacgatcttacaggtgtccataccgagtctgttgcctgccacagtttccatggaaaccagtgaaaaatccaaacttacccccaaacccgaaacaagtttcgaggagaacgacgggaacataatcttgggcgctactgttgacacccagctatgcgataagttgctcacctcctccctgcagaagagctcctctctcggcaacttgaagaaggaaacatcagacggcgagaaggagacaattcagaagacaagtgaggacagggcccctgccgagagcaggcctttcggcacacttccgcctagacccccaggtcaggacactagcatggacgacaatccgttcgggacacggaaggtgcgtagcagctttgggaggggcttctttaaaattaaatcaaataaacgcaccgccagtgcgcctaacttggcagagactgaaaaggaaactgctgagcatcttgatctcgccggggcctctagtagacccaaagacagtcagcggaatagcccctttcagatcccccccccttctcccgacagcaaaaagaaaagcaggggcatcatgaaattgttcggaaaacttcgtcgtagccaatcgactacattcaacccagacgatatgagcgagcccgaatttaaacgagggggtaccagagctacagcaggaccccgtctgggttggtcaagagatcttggtcagtccaatagtgaccttgacatgcctttcgctaagtggacgaaggagcaggtgtgcaactggctgatggaacagggcctggggagttatcttaatagcggcaaacattggatagcgagtggccaaactcttctccaggccagccagcaggatctggagaaagaattgggaatcaaacacagtctccacaggaaaaaattgcagctagccttacaggccctcgggagcgaggaagaaacaaatcacggcaagttagatttcaattgggtaactcgctggttagacgatataggtctgccacagtacaagactcagttcgacgaaggccgtgtggatggccggatgttacattatatgacagtcgatgacctactctctctgaaagtggtcagtgtactgcaccacctatcaattaaacgcgctattcaggtgctgcgtatcaataattttgaacctaattgccttcggaggcgtccctcagatgaaaatacaattgccccttccgaagtgcagaagtggacaaaccatagagttatggaatggttaaggagtgtagatcttgcggagtacgcccccaacctgcgtggctcaggagtccacggcggacttatggtcctggaaccaagattcaatgtggaaaccatggcccagctcctcaatatcccacccaataaaactctgctgcgtaggcatcttgcaacgcatttcaacctgttaatcggagcggaggcccaacatcagaaacgcgatgccatggagctgccggattatgtgctgcttactgctacagcaaaagtcaagcctaagaaattggccttcagtaacttcgggaacctgaggaagaagaagcaagaggacggagaggagtacgtatgccccatggagctcggccaggcttctggatcggctagcaaaaagggtttcaagccgggactcgatatgcggctgtatgaggaggatgacctagacagacttgagcagatggaagatagcgagggcaccgtccgccagatcggcgctttctctgagggcataaacaatttgacacacatgcttaaagaggatgatatgttcaaagactttgccgcccgtagtccttccgccagtatcacggatgaggacagcaacgtttag

SEQ ID NO: 76586 - DNA, 261 bp, Artificial Sequence
  derived and/or modified sequence
atgatgtctgatgccagtgacatgctggccgccgccctggagcagatggatggcatcatcgccggcagcaaggccctggagtacagcaatggcatctttgactgccagagccccaccagccccttcatgggcagcctgcgggccctgcacctggtggaggacctgcggggcctgctggagatgatggagacagatgagaaggagggcctgcgctgccagatcccagacagcacagctgagaccctggtggagtggctgtag

SEQ ID NO: 76587 - DNA, 2943 bp, Artificial Sequence
  derived and/or modified sequence
atgatgtctgatgccagtgacatgctggccgccgccctggagcagatggatggcatcatcgccggcagcaaggccctggagtacagcaatggcatctttgactgccagagccccaccagccccttcatgggcagcctgcgggccctgcacctggtggaggacctgcggggcctgctggagatgatggagacagatgagaaggagggcctgcgctgccagatcccagacagcacagctgagaccctggtggagtggctgcagagccagatgaccaacggccacctgcctggaaatggagatgtgtaccaggagcggctggcccggctggagaatgacaaggagagcctggtgctgcaggtgtctgtgctgacagaccaggtggaggcccagggcgagaagatccgggacctggagttctgcctggaggagcaccgggagaaggtgaatgccacagaggagatgctgcagcaggagctgctgagcaggaccagcctggagacccagaagctggacctgatggccgagatcagcaacctgaagctgaagctgacagctgtggagaaggaccggctggactatgaggacaagttccgggacacagagggcctcatccaggagatcaatgacctgcggctgaaggtgtctgagatggattctgagcggctgcagtatgagaagaagctgaagagcaccaaggatgagctggccagcctgaaggagcagctggaggagaaggagagcgaggtgaagaggctgcaggagaagctggtgtgcaagatgaagggggagggcgtggagatcgtggaccgggacatcgaggtgcagaagatgaagaaggctgtggagagcctgatggccgccaatgaggagaaggacaggaagattgaggacctgcggcagtgcctgaaccgctacaagaagatgcaggacacagtggtgctggcccagggcaaggatggagaatatgaggagctgctgaacagcagcagcatcagcagcctgctggatgcccagggcttcagtgacctggagaagagccccagccccacccctgtgatgggcagccccagctgtgaccccttcaacacctctgtgcctgaggagttccacaccaccatcctgcaggtgtccatccccagcctgctgcctgccaccgtgtccatggagaccagcgagaagagcaagctgacccccaagccagagaccagctttgaggagaatgatggcaacatcatcctgggcgccaccgtggacacccagctgtgtgacaagctgctgaccagcagcctgcagaagagcagcagcctgggcaacctgaagaaggagaccagtgatggagagaaggagaccatccagaagaccagcgaggaccgggccccagctgagagccggcccttcggcaccctgccccccaggcctcctggccaggacacctccatggatgacaaccccttcggcaccaggaaggtgcgcagcagctttggccggggcttcttcaagatcaagagcaacaagaggacagccagcgcccccaacctggccgagacagagaaggagacagctgagcacctggacctggccggggccagcagccggcccaaggacagccagaggaacagccccttccagatccccccacccagcccagacagcaagaagaagagccggggcatcatgaagctgtttgggaagctgcggcgcagccagagcaccaccttcaacccagatgacatgtctgagcctgagttcaagaggggcggcacccgggccacagctggcccccggctgggctggagccgggacctgggccagagcaacagcgacctggacatgccctttgccaagtggaccaaggagcaggtgtgcaactggctgatggagcagggcctgggcagctacctgaacagcggcaagcactggatcgccagcggccagaccctgctgcaggccagccagcaggacctggagaaggagctgggcatcaagcacagcctgcacaggaagaagctgcagctggccctgcaggccctgggcagcgaggaggagaccaaccacggcaagctggacttcaactgggtgacccgctggctggatgacatcggcctgccccagtacaagacccagtttgatgagggccgggtggatggccgcatgctgcactacatgacagtggatgacctgctgagcctgaaggtggtgtctgtgctgcaccacctgagcatcaagagggccatccaggtgctgcgcatcaacaactttgagcccaactgcctgcggcggcggcccagtgatgagaacaccatcgcccccagcgaggtgcagaagtggaccaaccaccgggtgatggagtggctgcggtctgtggacctggccgagtatgcccccaacctgcggggcagcggcgtgcatggaggcctgatggtgctggagccccgcttcaacgtggagaccatggcccagctgctgaacatcccccccaacaagaccctgctgcggcggcacctggccacccacttcaacctgctgattggagctgaggcccagcaccagaagagagatgccatggagctgcctgactatgtgctgctgacagccacagccaaggtgaagcccaagaagctggccttcagcaactttggaaacctgaggaagaagaagcaggaggatggagaggagtatgtgtgccccatggagctgggccaggccagcggcagcgccagcaagaagggcttcaagccaggcctggacatgaggctgtatgaggaggatgacctggaccggctggagcagatggaggacagcgagggcaccgtgcggcagattggagccttcagcgagggcatcaacaacctgacccacatgctgaaggaggatgacatgttcaaggactttgctgcccggagccccagcgccagcatcacagatgaggacagcaatgtgtag

SEQ ID NO: 76588 - DNA, 261 bp, Artificial Sequence
  derived and/or modified sequence
atgatgagcgacgccagcgacatgctggccgccgccctggagcagatggacgggattattgccggcagcaaggccctcgaatattcaaatggtatctttgattgtcaatctcctacaagtccattcatgggcagccttcgggccttgcatttggtagaggatcttagggggctcttggagatgatggagacagatgagaaagaggggctgagatgccagatccctgacagcactgccgagacacttgttgaatggctttag

SEQ ID NO: 76589 - DNA, 2943 bp, Artificial Sequence
  derived and/or modified sequence
atgatgagcgacgccagcgacatgctggccgccgccctggagcagatggacggcatcatagccggcagcaaagccctagaatactccaatggcattttcgactgtcagtctccaacctcacccttcatgggctccctccgtgccctgcatctcgtagaggatctgaggggactactggagatgatggaaaccgacgaaaaggaggggctccgttgccagattcctgactcgactgccgagaccctcgttgagtggctacagtcacagatgaccaacggccatcttcccggaaatggcgatgtgtatcaggagaggctggcccgcctggagaacgacaaggagagtctggtcttgcaagtgtctgtgctaactgaccaggtcgaggctcagggcgagaaaattcgagaccttgagttctgcttggaagagcacagagaaaaggttaacgcaactgaggagatgctacagcaggaattattaagtcgtacttcactcgagacacagaaactggatctgatggctgagatttccaatctaaagctgaagctgacggccgttgagaaggacaggctcgattacgaggataaatttcgcgacacagaaggcctgatccaggagatcaatgatctccgcctgaaagtgtccgaaatggactctgagagattacagtacgaaaaaaaattaaaaagcactaaggatgagctggcgtcgcttaaagaacagttggaggagaaagagagcgaagttaagaggctgcaagaaaagttagtttgcaagatgaagggagagggggtcgagattgtcgacagagacattgaagtacagaagatgaaaaaggccgtggaatcattgatggccgccaacgaagagaaagacagaaagattgaagacctgagacagtgcctaaaccgatacaaaaagatgcaggatactgtcgtgctggctcaggggaaagatggggagtatgaggagctgctgaattcctcctcaatcagctcccttctggatgcccagggctttagcgatctcgagaagagtccctctcccacacctgtaatgggaagccccagctgcgacccattcaacacatcagtgccggaggaattccataccacaatcttgcaagtctccattccctcccttcttccagctactgttagcatggaaacttcggagaagtccaagctcacccccaaaccggagacctcatttgaggaaaacgatggcaatattatccttggcgctactgtggatacccagctctgcgataaactgttgaccagctctctccagaaatcctcaagtttgggcaatctgaagaaggaaacaagtgatggggagaaagagaccattcagaagacgagcgaagatcgcgcacccgccgaaagtcggccttttggcaccttgccgcccaggccacccggccaggacacaagcatggatgataacccgtttgggactcgaaaggtcaggagctcttttgggcgaggcttctttaagatcaagagcaacaagagaacagcgtccgcaccgaacctggctgaaaccgagaaggagaccgccgagcaccttgatcttgccggtgccagttctcgccccaaggactctcagcgcaattcgccattccaaatcccacccccaagccctgactcaaagaaaaagtctagggggattatgaagctgttcggcaagctgaggcgatcccagtccaccaccttcaatcccgatgacatgagtgagccagagttcaagcggggcgggacccgcgccacggccggtcctcgactagggtggtctcgggatctgggccagtcaaacagtgatttggacatgccatttgctaagtggacaaaggagcaagtgtgcaattggttgatggagcagggcctcggttcttatctcaactctggtaagcattggatcgccagcggacagacactcctacaggccagtcagcaagacttggaaaaggagctcgggattaaacactccctgcacagaaaaaagcttcaacttgcacttcaggccctgggctctgaagaagagactaaccacggaaaactggattttaattgggttactcgttggctcgacgatatagggttgccacagtacaaaacacagtttgatgagggccgggtagacggccggatgctgcattatatgactgtagatgacctcctgagccttaaggtggtcagcgtactacatcacctgagcattaagagggcaatccaagtgctccgaatcaataatttcgagccaaactgtctccgcagaagaccctccgacgagaatactatagctcctagtgaggttcagaagtggaccaaccatcgggtgatggagtggctcaggtcggttgatctggctgagtacgcaccaaatctccggggttcaggggtgcatggtggcctgatggtcctcgaaccaaggttcaacgtagagacaatggcccagctcctcaatataccaccgaataaaaccctgctgcgccggcacctcgctactcacttcaacctattgatcggagccgaggctcaacaccagaagcgcgacgctatggaactgcctgattacgttctgctgactgccacagcaaaggtgaaaccaaagaagctagctttctccaattttggaaacctgaggaaaaaaaagcaagaggacggagaggagtacgtgtgtccaatggaactgggacaggctagtggtagcgcttccaagaaggggtttaaacccggcctggacatgcggctctatgaagaggacgatttggaccgactcgaacagatggaggattccgaaggcacggtgcggcagataggtgcattctccgaaggaatcaataacctgactcacatgctgaaagaggacgacatgtttaaagactttgccgcaaggtccccatccgctagtattactgatgaagactcaaatgtttag

SEQ ID NO: 76590 - DNA, 559 bp, Artificial Sequence
  derived and/or modified sequence
ccggctccaatccctggatggctttaagtccagcaaacctttctgtttttcctatcgctcttctctttgcttaacctctcctctttcctccagacccacttaaaagcagttcatcaggaaaacttagctgacagtctcagtcagaactcactcgtgcaggaactttgcaggaagcagtataaaagaacgtgtggatcactttgctgagtacatccaagatttgaagaactgaaataaatcagctttaaacctgctttttaaaaatatctgggttggaatttgcccctgacaaataataaaatgatgagtgatgcaagtgacatgttggctgcagcgttggagcagatggatggtatcatagcaggttctaaggctctggaatattccaatgggatttttgattgccaatctcccacctctccattcatgggaagtttgcgagctctgcaccttgtggaagacctgcgtggattgttagagatgatggaaacagatgagaaagaaggcttgagatgccagatcccagattcaacagcagaaacgcttgttgaatggcttc

SEQ ID NO: 76591 - DNA, 3208 bp, Artificial Sequence
  derived and/or modified sequence
agtgcaggcagggtggggaaaggacggggaaggactcgtgtgctgcgagctggcggccgggccggagtgctggggctttgaactccgagaggaggtggaccagaacttttggaactagtgccggcggctctccaccccccagtataaaagaacgtgtggatcactttgctgagtacatccaagatttgaagaactgaaataaatcagctttaaacctgctttttaaaaatatctgggttggaatttgcccctgacaaataataaaatgatgagtgatgcaagtgacatgttggctgcagcgttggagcagatggatggtatcatagcaggttctaaggctctggaatattccaatgggatttttgattgccaatctcccacctctccattcatgggaagtttgcgagctctgcaccttgtggaagacctgcgtggattgttagagatgatggaaacagatgagaaagaaggcttgagatgccagatcccagattcaacagcagaaacgcttgttgaatggcttcagagtcaaatgacaaatggacacctaccagggaacggagatgtgtatcaagaaaggctggcacgtttagaaaatgataaagaatccctcgttcttcaggtaagtgtgttaacagaccaggtggaggctcagggagagaagattcgagatttggagttttgtcttgaagagcacagagagaaggtgaatgccacagaagaaatgctgcagcaggagcttctaagtaggacatccttagaaactcagaagttggatctgatggctgaaatatctaacttgaagttgaaactgacagctgtagagaaggacagattggattatgaagataagttcagagacacagaggggctgattcaggagatcaatgatttgaggttaaaagttagtgaaatggacagtgagagacttcagtatgaaaaaaagcttaaatcaaccaaagatgaactggcatctttaaaagaacaactagaagaaaaggaatctgaagtaaaaaggctacaagaaaaattggtttgcaagatgaaaggagaaggggttgaaattgttgatagagacatcgaagtacaaaaaatgaaaaaagctgtggagtccttgatggcagcaaatgaagaaaaggatcggaaaatagaagatcttcgacagtgcctgaacaggtacaagaaaatgcaagacacggtggtactggcccaaggcaaagatggagaatatgaagagctgctcaattccagttccatctcctctttgctggatgcacagggtttcagtgatctggagaaaagtccatcacccactccagtaatgggatctcccagttgtgacccatttaacacaagtgttcccgaagagttccatactaccatcttgcaagtttccatcccttcattattgccagcaactgtaagcatggaaacttctgaaaaatcaaagttgactcctaagccagagacttcatttgaagaaaatgatggaaacataatccttggtgccactgttgatacccaactgtgtgataaacttttaacttcaagtctgcagaagtccagcagcctgggcaatctgaagaaagagacatctgatggggaaaaggaaactattcagaagacttcagaggacagagctccggcagaaagcaggccatttgggacccttcctcccaggcccccagggcaggacacctccatggatgacaaccccttcggcactcgaaaagtcagatcttcctttggccggggcttttttaaaatcaaaagtaacaagagaacagcaagtgcaccaaacttagctgaaacagaaaaagagacagcagagcacctagatctggctggtgcttcttctcggccaaaagattcacagaggaacagtcccttccagataccgcctccatctccagattccaaaaagaaatccagaggtatcatgaaactctttggaaaacttaggagaagtcaatcaactacattcaacccagatgacatgtctgagcctgaattcaaaagaggagggacaagggcaaccgcggggccccgattaggttggtctcgagacttgggacagtctaacagtgacttggatatgccatttgccaagtggaccaaggagcaggtttgcaattggctgatggaacagggcttgggctcgtacctgaattctggcaagcactggattgcatctggccaaacgcttttgcaggcttctcaacaagatctagagaaggaacttggaatcaagcattcacttcatcgaaagaaactccagctagcactccaagccctgggatctgaagaagaaaccaatcatgggaagctggatttcaactgggtcactagatggttggatgacattggcctccctcaatataagacccagtttgatgaaggacgggttgatggtcgaatgctacattacatgactgttgatgacttactgtctctgaaggttgtaagtgtgctacaccatctcagtatcaaaagggccatccaggtcctgaggatcaataactttgaaccaaactgtctacggaggcggccatctgatgagaataccatcgccccatcagaagttcagaagtggactaaccatcgagtgatggagtggctgcgctccgtggacttggcagaatatgcgcccaatctcagaggcagtggtgtccatggtgggctcatggttctagagcctcgttttaacgtagaaacaatggctcagttattgaacatcccacccaataagactttgctgcgaagacatttggccactcatttcaaccttctgattggggctgaggcacagcaccagaagcgagatgccatggagctgccggattatgtacttctaacagctactgccaaagtgaagccaaagaaacttgcctttagcaattttgggaatttgagaaagaagaaacaggaagatggtgaagaatatgtttgtccaatggaattgggacaggcatcaggaagtgcatctaagaaaggatttaaacctggtttggatatgcgcctgtatgaggaagatgatttggaccggttagagcagatggaagattcagaagggacagtgagacagataggtgcattctctgaaggcatcaacaatctgacgcacatgttaaaagaagatgacatgtttaaagattttgctgcccgttcccccagtgccagcattacagatgaagactcaaacgtttga

SEQ ID NO: 76592 - DNA, 261 bp, Artificial Sequence
  derived and/or modified sequence
atgatgtcggacgcctccgatatgctcgccgctgcactggagcagatggatggtataatcgccggatcaaaggccctagaatactccaatggcattttcgattgccaatcccccacaagccccttcatgggatcgctcagagcacttcatttggtggaagacctgcgcggactgctggagatgatggagacagatgagaaagagggcttgaggtgccagattccagattccactgccgaaacactcgtggaatggttgtag

SEQ ID NO: 76593 - DNA, 2943 bp, Artificial Sequence
  derived and/or modified sequence
atgatgtccgacgccagcgacatgctggctgccgcactcgaacagatggatgggattatcgcaggcagtaaagccctggagtattcaaacggaatctttgactgccaatctccaacctcacccttcatggggagtctaagagccctgcatcttgttgaagatctccggggtctgttggagatgatggaaaccgacgagaaagagggccttaggtgtcagatccccgacagcactgccgagactctagtcgagtggctacagagccagatgaccaatggccatttgccaggaaatggcgacgtctaccaggagagactggctcgcttggagaatgacaaagagtccctggtgcttcaggtgagcgtcctgacagaccaagttgaggcacagggcgaaaaaatcagggacctggagttctgcctggaggagcatagggaaaaagtcaatgctactgaagagatgctgcaacaggagttgcttagcagaacaagcctggagacccagaagttggacctcatggctgaaatatccaacctgaagcttaaacttaccgccgttgaaaaagaccgactggattacgaagataaatttcgagatactgagggccttatccaggaaatcaatgacctgcggctgaaagtttctgagatggattcagaacgcctccaatatgagaagaagctgaagagcacaaaggacgagttagcctctctcaaggagcagctggaagagaaggagagtgaggtcaaacggctgcaggaaaagctggtatgcaagatgaaaggtgagggagtggaaattgttgacagagacatcgaggttcaaaagatgaaaaaggcagttgagtccttaatggcggcaaacgaggaaaaggaccgcaagatagaagacctacgccagtgtcttaaccgctacaagaaaatgcaggatactgttgttcttgctcagggaaaggatggcgagtatgaagagctgctgaattcctcttctatatctagtcttcttgacgcccaaggattttcagacttagagaagagtccatccccaaccccggtgatgggtagtccgtcgtgcgacccctttaatacttccgttcctgaggaattccatacgacgatccttcaggtctctataccttcccttttacctgcaaccgtctctatggagacgagcgagaagagcaaactgactcccaaacctgaaacctcattcgaggaaaacgacggcaacatcattttgggtgcaactgtcgatacccagttgtgtgataagcttctaacaagttctctacagaaatcatctagcctgggaaatctcaagaaagagactagcgatggtgagaaagaaacaattcagaagacttctgaagacagagcgccagctgaaagtcggccattcggaacattgccgccacgaccacctggccaggatacttccatggatgataacccatttggcaccagaaaagtccgatcatcattcggcaggggattcttcaaaattaagagcaataaacgcacagcgtccgcacccaatctcgccgagaccgaaaaggagaccgccgaacatttggaccttgccggtgcgagttccagaccaaaggatagccagaggaattccccttttcagattcccccaccgtcacccgattctaagaaaaagagtagaggcattatgaaactcttcggcaagctccggagaagccagagcacaacatttaatccagatgacatgtccgagcctgagttcaagagagggggaactcgtgccacagctggacctagattgggttggtctcgcgatttaggccagtccaacagcgatctcgacatgcccttcgccaagtggacaaaagaacaagtctgcaattggctcatggagcagggcttggggtcatatcttaacagtggtaagcactggatcgcttccgggcagaccctcctgcaggccagccagcaggatctggaaaaggaacttgggatcaagcacagccttcaccgcaaaaaactgcaactagccctgcaggctctcgggtctgaagaggaaacgaatcacggaaagttagatttcaactgggtgactcgctggttagacgatatcgggttaccccagtacaagactcagttcgatgagggcagagtcgacggaaggatgctccattatatgacagtggatgacctgctttctctcaaggttgtgtcagttctgcaccatcttagcataaagagagctatccaggtccttcggattaacaactttgagcccaactgcttgagacgcagacctagtgacgaaaatacaattgcacctagcgaggttcaaaaatggaccaatcaccgagtgatggagtggcttcgttccgtggatctggctgaatacgctcccaacctccgcggaagcggtgtccatggaggcctgatggtgctggaaccaagattcaacgtagagaccatggcacaacttctcaatataccaccgaacaaaaccctgttgaggcgtcacctggctacccatttcaacctgctaattggggctgaggcccagcaccaaaaaagggatgcaatggagcttcctgattacgtactcctcacagcaactgccaaagtaaagcccaagaaactggctttttcaaactttgggaacctccgcaagaaaaagcaggaggacggggaagagtacgtctgtcccatggagctgggtcaggctagcggatccgcctctaaaaagggatttaagccagggctcgatatgcggctttatgaggaagatgaccttgaccgcctggaacaaatggaagacagcgaaggcacagtgcgacagattggggctttttccgagggcatcaataacctgacacacatgcttaaagaagacgacatgttcaaggacttcgcagccagaagcccatccgcttctatcaccgacgaggactccaacgtatag

SEQ ID NO: 76594 - protein, 1492 aa, Artificial Sequence
  derived and/or modified sequence
MERLLAQLCGSSAAWPLPLWEGDTTGHCFTQLVLSALPHALLAVLSACYLGTPRSPDYILPCSPGWRLRLAASFLLSVFPLLDLLPVALPPGAGPGPIGLEVLAGCVAAVAWISHSLALWVLAHSPHGHSRGPLALALVALLPAPALVLTVLWHCQRGTLLPPLLPGPMARLCLLILQLAALLAYALGWAAPGGPREPWAQEPLLPEDQEPEVAEDGESWLSRFSYAWLAPLLARGACGELRQPQDICRLPHRLQPTYLARVFQAHWQEGARLWRALYGAFGRCYLALGLLKLVGTMLGFSGPLLLSLLVGFLEEGQEPLSHGLLYALGLAGGAVLGAVLQNQYGYEVYKVTLQARGAVLNILYCKALQLGPSRPPTGEALNLLGTDSERLLNFAGSFHEAWGLPLQLAITLYLLYQQVGVAFVGGLILALLLVPVNKVIATRIMASNQEMLQHKDARVKLVTELLSGIRVIKFCGWEQALGARVEACRARELGRLRVIKYLDAACVYLWAALPVVISIVIFITYVLMGHQLTATKVFTALALVRMLILPLNNFPWVINGLLEAKVSLDRIQLFLDLPNHNPQAYYSPDPPAEPSTVLELHGALFSWDPVGTSLETFISHLEVKKGMLVGIVGKVGCGKSSLLAAIAGELHRLRGHVAVRGLSKGFGLATQEPWIQFATIRDNILFGKTFDAQLYKEVLEACALNDDLSILPAGDQTEVGEKGVTLSGGQRARIALARAVYQEKELYLLDDPLAAVDADVANHLLHRCILGMLSYTTRLLCTHRTEYLERADAVLLMEAGRLIRAGPPSEILPLVQAVPKAWAENGQESDSATAQSVQNPEKTKEGLEEEQSTSGRLLQEESKKEGAVALHVYQAYWKAVGQGLALAILFSLLLMQATRNAADWWLSHWISQLKAENSSQEAQPSTSPASMGLFSPQLLLFSPGNLYIPVFPLPKAAPNGSSDIRFYLTVYATIAGVNSLCTLLRAVLFAAGTLQAAATLHRRLLHRVLMAPVTFFNATPTGRILNRFSSDVACADDSLPFILNILLANAAGLLGLLAVLGSGLPWLLLLLPPLSIMYYHVQRHYRASSRELRRLGSLTLSPLYSHLADTLAGLSVLRATGATYRFEEENLRLLELNQRCQFATSATMQWLDIRLQLMGAAVVSAIAGIALVQHQQGLANPGLVGLSLSYALSLTGLLSGLVSSFTQTEAMLVSVERLEEYTCDLPQEPQGQPLQLGTGWLTQGGVEFQDVVLAYRPGLPNALDGVTFCVQPGEKLGIVGRTGSGKSSLLLVLFRLLEPSSGRVLLDGVDTSQLELAQLRSQLAIIPQEPFLFSGTVRENLDPQGLHKDRALWQALKQCHLSEVITSMGGLDGELGEGGRSLSLGQRQLLCLARALLTDAKILCIDEATASVDQKTDQLLQQTICKRFANKTVLTIAHRLNTILNSDRVLVLQAGRVVELDSPATLRNQPHSLFQQLLQSSQQGVPASLGGP

SEQ ID NO: 76595 - DNA, 4479 bp, Artificial Sequence
  derived and/or modified sequence
atggagcgactgctggcacagctgtgtgggagctcagctgcgtggcctctgccactgtgggaaggagatacaactggccactgcttcacacagctcgtcctgtctgcccttccacacgctctcttagccgtgctctctgcctgctacctgggtacccctagatccccagactatatcttaccctgttcaccaggatggaggctgaggttggcagctagcttcctgctgtcggtctttccgctgttggaccttctgcccgtggcactgcctcctggcgctggacccgggcccattgggctggaagtcctcgctggctgtgtagcggcggtagcttggatctctcactccctggccttatgggtcctggcccattccccccatgggcactccagaggacctctcgcactcgccctagtggctctcttgcctgccccggcactggttctaaccgtgttatggcactgtcagcggggcaccctgctgccccctctactccccggccccatggcgaggctgtgtctcctcatactgcaactggcagctctcttagcctacgctctgggctgggccgccccgggcggcccaagagagccctgggcccaagaacctctgttaccggaagaccaagagcccgaagtggccgaggacggagagtcgtggctatctagattttcgtatgcgtggctggctccgctgttagccagaggcgcctgcggtgagcttcgccagccacaagacatctgccgcttgcctcacagactgcagcccacctatctggcaagagtctttcaagcccattggcaggaaggggcccgcctgtggagggccttgtatggagcctttggccggtgttaccttgcgctgggcttgttaaagcttgttggcaccatgctaggtttcagtgggcctctcttactctcgctgctcgtggggtttttggaagagggacaggagcctctgagccacggactcctatatgccctaggcttggccgggggtgcggtgctcggcgcagttctgcagaaccagtacggatacgaggtctataaggtgaccctgcaggctcggggcgccgtcttgaacattctgtattgcaaagccctgcagcttgggccttcccgccctcccaccggcgaggccctaaacctgctggggacagatagcgagaggctgctcaactttgctggttccttccacgaggcctggggcctcccactacagctggcaataaccctgtacctgttatatcagcaggtgggcgtggccttcgtggggggtttaattctagccctactgctggtcccagtcaataaggtcattgccacgaggatcatggcctctaaccaggagatgctacagcataaggacgccagggtgaagcttgtcaccgagctcctttcagggatcagagttataaaattctgcggttgggagcaagccctcggagcacgggttgaggcttgtcgggcgcgcgaactcggccggttgcgtgtaatcaagtatcttgatgccgcctgtgtatacttgtgggccgcccttcccgtggtgataagcattgttattttcatcacatatgtgctgatggggcatcaactaaccgcaaccaaagtctttactgcactagccctcgttagaatgcttattctgcccctgaataatttcccctgggtgatcaacggattgctagaagctaaggtatccctggataggattcaactatttctggacctgccaaatcataaccctcaggcctactattcaccagacccgcccgcagaaccatccactgtactggaactccacggagccctgttctcctgggacccggtggggacctccctggagacattcatttcacacctggaggtgaaaaagggcatgttagttggaatcgtgggaaaggtaggatgtggcaaatcaagtctcctggccgccatcgcaggggagctgcacagattgcgcggacacgttgccgtgcgcgggctaagtaagggatttggcctagcaacacaggagccttggattcagttcgcaacaattagagacaacatcctctttggcaagaccttcgatgcccagctgtataaggaagtgctggaagcatgtgcccttaacgatgatttgtcaatcctcccagcaggagaccaaacggaggttggagagaaaggtgtgacgctgtccggggggcaacgggcgcggatagccctcgcccgagctgtctaccaagagaaagaactgtatctacttgacgatccgctcgcggccgtagacgcagatgtcgcaaaccatctgcttcatcggtgcatcttggggatgctgtcttataccacccggcttttatgcactcaccggactgagtatctcgagcgggcggatgcggtgctgttaatggaagcaggcaggctgatccgtgctggcccaccaagtgagatcctgcctctggtccaagcagtaccgaaagcttgggctgagaatggccaggaatccgacagtgccactgctcagagtgtgcagaaccccgaaaaaacgaaggagggactagaagaagagcagagcacttccggcaggctgttacaggaggaatcaaagaaagagggcgcagtagctcttcatgtctatcaggcttattggaaagccgtgggacagggacttgcactggcaatcctgttcagtctgctgctgatgcaagcaacacgcaatgcggccgattggtggctgtctcactggatcagtcagctgaaggctgaaaactcttctcaagaagctcagccttcaacatcgccagcctcaatgggtctgttttcaccccaattgctcctgttctcgccgggcaatctctatatcccagtattcccgctgcctaaggccgcacctaatggcagttccgacattcgattttacttgacagtctatgccaccatcgccggcgtcaacagcctctgtacgctcttaagagccgtcttatttgctgcaggtacacttcaggcagcagcgaccctgcaccgccggctcctccaccgcgttctgatggccccagtgaccttctttaatgccactcctactgggagaatcctaaatcgcttttcatctgatgtggcctgcgccgatgatagtctccccttcatcttgaacatcctcttggccaatgccgcaggactccttggtctcctggctgttttggggagtggtctgccatggctgttgcttctgctgccaccgctttctatcatgtactaccacgtccagagacattatcgagcctcttcacgagagctgcgccgattgggtagcctaaccctgagccccctttattctcatctggccgacacactcgccggcttaagtgtgctgcgggccactggagccacttacagattcgaggaagaaaatttacggctgctggagctcaatcaaagatgccagtttgccacttctgcaaccatgcaatggctggacattagactccagctcatgggagcggccgttgtgagtgccattgcaggtatcgcgctagtgcagcatcagcaaggtctggccaacccaggattggtggggctgtccctaagctacgctctctccctgacgggactgctgagtgggttggtgtccagtttcactcagacggaggccatgctggtgtcagtcgaaagactcgaggaatacacatgcgacctgcctcaggaaccacaaggtcaacctctgcaattggggaccggctggctgacacagggcggtgtcgaattccaggacgtggtccttgcctatagacctgggctcccgaacgccctggacggcgtcaccttttgtgtgcagcctggtgaaaaactgggcatcgtggggcgcactggctctggcaagagttccttactcttggttctgttccgactgctggaaccgagtagtggacgggtacttttggacggggtggacacatctcagctagagttggcccagttacggtcccagctcgccatcatcccgcaggagccattcttattctcaggaaccgtcagagagaaccttgatccacagggactccataaagacagagcattgtggcaggccctgaaacagtgccacctgagcgaggtgataacttccatgggaggcttggacggggagctgggagaaggcggcaggtcattgtcactgggtcagcggcagttgctgtgcctggcgagggcgctgctcacagacgctaagatcctgtgcatcgacgaggcaacggcttctgttgaccagaaaaccgatcagctactccaacagacaatctgcaagcgattcgccaacaaaacagtgttaacaattgcacataggcttaacaccatcctcaattccgaccgagtcctagtcctgcaggccggtagagtagtcgagctggattcgcctgccacactgcgcaatcagccacattctctgtttcagcagcttttacaatcaagtcagcagggggtgcctgcctcgctcggaggcccttag

SEQ ID NO: 76596 - DNA, 4479 bp, Artificial Sequence
  derived and/or modified sequence
atggagcggctgctggcccagctgtgtggcagcagcgctgcctggcccctgcccctgtgggagggggacaccaccggccactgcttcacccagctggtgctgagcgccctgccccacgccctgctggccgtgctgagcgcctgctacctgggcacccccaggagcccagactacatcctgccctgcagccctggctggaggctgcggctggccgccagcttcctgctgtctgtgttccccctgctggacctgctgcctgtggccctgcccccaggagctggccctggccccatcggcctggaggtgctggccggctgtgtggccgctgtggcctggatcagccacagcctggccctgtgggtgctggcccacagcccccacggccacagccggggccccctggccctggccctggtggccctgctgcctgccccagccctggtgctgactgtgctgtggcactgccagaggggcaccctgctgccccccctgctgcccggccccatggcccggctgtgcctgctgatcctgcagctggccgccctgctggcctatgccctgggctgggccgcccctgggggcccccgggagccctgggcccaggagcccctgctgcctgaggaccaggagcctgaggtggctgaagatggagagagctggctgagccgcttctcctatgcctggctggcccccctgctggcccggggggcctgtggggagctgcggcagccccaggacatctgccgcctgccccaccggctgcagcccacctacctggcccgggtcttccaggcccactggcaggagggcgcccggctgtggagggccctgtatggagccttcggccgctgctacctggccctgggcctgctgaagctggtgggcaccatgctgggcttcagcggccccctgctgctgagcctgctggtgggcttcctggaggagggccaggagcccctgagccacggcctgctgtatgccctgggcctggccggcggcgctgtgctgggcgctgtgctgcagaaccagtatggctatgaggtgtacaaggtgaccctgcaggcccggggagctgtgctgaacatcctgtactgcaaggccctgcagctgggccccagccggcccccaactggagaggccctgaacctgctgggcacagacagcgagcggctgctgaactttgctggcagcttccacgaggcctggggcctgcccctgcagctggccatcaccctgtacctgctgtaccagcaggtgggcgtggcctttgtgggcggcctcatcctggccctgctgctggtgcctgtgaacaaggtgattgccacccgcatcatggccagcaaccaggagatgctgcagcacaaggatgcccgggtgaagctggtgacagagctgctgagcggcatccgggtcatcaagttctgtggctgggagcaggccctgggcgcccgggtggaggcctgccgggcccgggagctgggccgcctgcgggtcatcaagtacctggatgctgcctgtgtgtacctgtgggccgccctgcctgtggtgatcagcatcgtcatcttcatcacctacgtgctgatgggccaccagctgacagccaccaaggtgttcaccgccctggccctggtgaggatgctgatcctgcccctgaacaacttcccctgggtgatcaatggcctgctggaggccaaggtgtccctggaccgcatccagctgttcctggacctgcccaaccacaacccccaggcctactacagcccagaccccccagctgagcccagcacagtgctggagctgcatggagccctcttctcctgggaccctgtgggcaccagcctggagaccttcatcagccacctggaggtgaagaagggcatgctggtgggcatcgtgggcaaggtgggctgcggcaagagcagcctgctggccgccatcgccggggagctgcaccggctgcggggccacgtggccgtgcggggcctgagcaagggcttcggcctggccacccaggagccctggatccagtttgccaccatccgggacaacatcctgtttgggaagacctttgatgcccagctgtacaaggaggtgctggaggcctgtgccctgaatgatgacctgagcatcctgcctgctggggaccagacagaggtgggggagaagggcgtgaccctgagcggcggccagagggcccgcatcgccctggcccgggctgtgtaccaggagaaggagctgtacctgctggatgaccccctggccgctgtggatgctgatgtggccaaccacctgctgcaccgctgcatcctgggcatgctgagctacaccacccggctgctgtgcacccacaggacagagtacctggagcgggcagatgctgtgctgctgatggaggccggccgcctcatccgggccggccccccatctgagatcctgcccctggtgcaggccgtgcccaaggcctgggccgagaatggccaggagagtgacagcgccacagcccagagcgtgcagaaccctgagaagaccaaggagggcctggaggaggagcagagcaccagcggccgcctgctgcaggaggagagcaagaaggagggcgctgtggccctgcacgtgtaccaggcctactggaaggctgtgggccagggcctggccctggccatcctcttcagcctgctgctgatgcaggccaccagaaatgctgctgactggtggctgagccactggatcagccagctgaaggccgagaacagcagccaggaggcccagcccagcaccagccctgcctccatgggcctcttcagcccccagctgctgctcttcagccctggcaacctgtacatccctgtgttccccctgcccaaggccgccccaaatggcagcagtgacatccgcttctacctgactgtgtatgccaccatcgccggcgtgaacagcctgtgcaccctgctgcgggctgtgctgtttgctgctggcaccctgcaggccgccgccaccctgcaccggcggctgctgcaccgggtgctgatggcccctgtgaccttcttcaatgccacccccaccggccgcatcctgaaccgcttcagcagtgatgtggcctgtgctgatgacagcctgcccttcatcctgaacatcctgctggccaatgctgctggcctgctgggcctgctggccgtgctgggcagcggcctgccctggctgctgctgctgctgccccccctgagcatcatgtactaccacgtgcagaggcactaccgggccagcagccgggagctgcggcggctgggcagcctgaccctgagccccctgtacagccacctggccgacaccctggccggcctgtctgtgctgcgggccaccggggccacctacagatttgaggaggagaacctgcggctgctggagctgaaccagcgctgccagtttgccaccagcgccaccatgcagtggctggacatccggctgcagctgatgggcgctgctgtggtgtctgccatcgccggcatcgccctggtgcagcaccagcagggcctggccaaccctggcctggtgggcctgagcctgtcctatgccctgagcctgaccggcctgctgagcggcctggtgagcagcttcacccagacagaggccatgctggtgtctgtggagcggctggaggagtacacctgtgacctgccccaggagccccagggccagcccctgcagctgggcaccggctggctgacccagggcggcgtggagttccaggatgtggtgctggcctacagacctggcctgcccaatgccctggatggagtgaccttctgtgtgcagcccggggagaagctgggcatcgtgggccgcacaggcagcggcaagagcagcctgctgctggtgctcttccggctgctggagcccagcagcggccgggtgctgctggatggagtggacaccagccagctggagctggcccagctgcggagccagctggccatcatcccccaggagcccttcctgttcagcggcaccgtgcgggagaacctggacccccagggcctgcacaaggaccgggccctgtggcaggccctgaagcagtgccacctgtctgaggtgatcacctccatgggcggcctggatggagagctgggggagggcggccgcagcctgagcctgggccagaggcagctgctgtgcctggcccgggccctgctgacagatgccaagatcctgtgcattgatgaggccacagcctctgtggaccagaagacagaccagctgctgcagcagaccatctgcaagagatttgccaacaagacagtgctgaccatcgcccaccggctgaacaccatcctgaacagcgacagagtgctggtgctgcaggccggccgggtggtggagctggacagccctgccaccctgaggaaccagccccacagcctcttccagcagctgctgcagagcagccagcagggcgtgcctgccagcctgggcggcccctag

SEQ ID NO: 76597 - DNA, 4479 bp, Artificial Sequence
  derived and/or modified sequence
atggagcggctgctggcccagctgtgcggcagcagcgccgcctggcctttgccactctgggagggcgatacgaccgggcattgttttacccaacttgttttatctgccctgccccacgcactgcttgctgtgttgtcagcgtgctacctcggtacgccccgatctccagattatatcttaccctgcagcccgggctggagattaagactcgcagcctccttcctgctgtcggtgttccccctgctcgacttactgcctgtcgctttacctcccggggctggcccaggacctattggcctcgaggtgctggcaggatgcgtggcagcagtagcttggatatctcacagccttgccctttgggtgctggcccactccccgcatggccactcccgtggcccccttgcccttgctttggtcgcgttgctgccggctcccgcccttgtgctcaccgtcctgtggcactgccagagggggactctgctgccccccctgctccctggcccaatggccagactgtgcctgttgattctgcaactggctgcactcctggcctacgctttgggatgggccgcccccggaggcccacgtgagccttgggctcaggagccgctgctgcctgaggaccaggagccggaggttgcggaagatggtgaatcctggttgagtcggttcagttatgcatggttggctccactccttgcgcgaggcgcatgtggcgagcttagacagccccaagacatttgcaggctgccacacaggttgcaacccacctacctcgcacgagtgttccaggcccattggcaggagggggcgcgactttggcgggccctctacggcgcctttgggcgctgctacctggcccttggactcctcaagctggtgggaactatgctgggattttcgggcccccttctgctcagcttgctggtgggcttcctcgaggagggacaggagccactctcccatgggctgctctatgcgctggggctagctgggggcgccgtgctcggagctgtcctccagaaccaatacgggtatgaagtctacaaagtgaccctgcaggcccgcggcgcagtattgaatatattgtattgcaaagcactgcagctgggaccttctaggcctcccacgggggaggctttaaacttactcgggacagattctgagagattgctcaactttgccgggagtttccatgaagcatggggtttacctctgcagcttgcaatcacactatacctgctctatcagcaggtgggagtcgccttcgtcggtgggttaatcctggccctgctcctggtacctgtgaacaaggtgattgccacccgaattatggcctccaatcaggagatgttacagcacaaagatgcaagagtgaagctggtaacagagctcctgtcgggaattcgggtcatcaagttctgtggatgggaacaggcccttggggcacgtgtagaggcgtgccgggcaagggaacttggacgactccgtgtgataaaatacctggacgctgcctgcgtatacctgtgggcagctttgcctgtggtcatcagcattgttattttcatcacatatgtgttgatgggccaccagctgacggcgacaaaggtgttcacagctctggcgctggttaggatgctgatacttcccttgaataattttccttgggttattaacgggctactcgaggctaaagtctccctcgaccggatccagctgttcctcgatctgccgaaccataacccccaggcatactactcccctgatccgcccgccgaaccctcaacggtgttagagctgcacggagcactttttagctgggaccccgtgggaacaagtcttgagacctttatatcacacctcgaggtcaagaagggcatgttggtgggaattgtcggcaaggtcgggtgcggcaagtcttcactgttggccgccatcgctggtgagctacatagattaaggggacatgtcgctgtgcgtgggctcagcaaaggatttgggttagctacccaggagccgtggatccagtttgctaccataagagacaacatcttattcggtaagacttttgacgcgcagctttacaaagaggtgctggaagcctgtgctctgaacgatgatctgagcattctgcccgccggagatcaaactgaggtcggtgagaaaggagtaacattgtctggaggacagagggcccggattgcacttgcgcgcgctgtttaccaagaaaaggagctgtacttactggatgatcccctggccgccgtagacgccgacgtggccaaccatcttctccataggtgtattttaggcatgttgtcctataccacaaggctcctgtgcacccatcggaccgagtatttagaacgcgcggatgccgtattactcatggaggcagggaggctgatacgcgcgggccctccatccgaaatattgccacttgtgcaagccgtccctaaggcatgggctgagaatggccaagaatcagattccgcaaccgcacagagcgtccagaaccctgagaagactaaagaagggctggaggaggaacagtccaccagtggtagactcctgcaggaggagagcaagaaggaaggcgccgtagctctccacgtgtaccaggcttattggaaggctgttggtcagggattagctttagccatcctgtttagcctgctgttaatgcaggccacccgaaacgctgctgactggtggttgtcacactggatctcacagctgaaggcagagaactcttcccaggaggcgcagccctccaccagtcccgccagtatgggccttttctcgccgcaactgctgcttttctctcctggcaacttatacattccagtatttcccctccccaaagccgctccaaacggatcctctgacatccgcttttacctaacagtttatgctacaattgcaggggtgaacagtctttgcacactgctgcgcgcagtcctcttcgctgcaggcacgttacaggcggctgcgacgttgcaccgccggcttctccacagagtcctgatggcgccagttaccttcttcaacgcgactcccacagggcggattctgaaccgtttttcatcagacgtggcctgtgcagacgattctctgccttttattctgaacatacttcttgctaatgccgcaggattgctggggctgttggccgtgctgggctcaggtctgccgtggctcctgttactgttaccacccctgtcaattatgtattatcacgtgcagaggcattacagggcttccagccgggaattacggaggctggggtccttaactctatcaccattgtattctcaccttgccgacacgttagctggactctccgttcttcgcgctactggggctacttacagattcgaagaggagaatctacggctgttggaattaaaccagcgatgccagttcgccaccagtgccacaatgcaatggcttgacatccgcttacagctcatgggtgctgcagtcgtcagtgctattgcagggattgctctggtacagcatcagcagggactggccaaccccggcctcgtgggtttgtcactgagttatgccctctcacttactggactgctgtccggactggtgagttctttcacccaaacggaagctatgctcgtcagtgtggaacggctcgaagagtatacctgcgatcttccccaagagccccagggtcagcctctacagctgggcaccgggtggctcactcaggggggggtcgaattccaggacgttgtcctggcttatcgaccgggcttgccgaacgcactcgatggggtcacattttgtgtccagcccggggagaaactgggaatcgtgggaagaaccggtagtggtaagtcctctctgctgcttgtgctcttccgactgctggagcctagttccggcagggtcctcctcgacggcgtagacacttcgcagcttgaactggcccagcttaggtcccagttagcgatcattcctcaggagcccttcctttttagtggaacagtgagggaaaaccttgacccccaggggctccacaaggacagagccctgtggcaggccctcaaacagtgtcatctgtctgaagtgatcactagtatgggcgggctcgacggggaattaggcgaaggcggccgaagtcttagcttgggccagaggcaactcctgtgcctggctagagccctgttaacagacgcaaaaatcctttgcatcgacgaggccactgcctccgtggaccagaagacagaccagctgttgcaacagactatatgcaaacggttcgctaacaagaccgtacttactatcgctcatcgcctgaatactatactaaattctgatcgtgtcctggtgctccaggccggtcgggtagtcgagctggactcaccagccactctcaggaaccaaccgcattctctattccagcagctgctccagtctagccagcagggggtgcctgccagtctgggcggaccttag

SEQ ID NO: 76598 - DNA, 4479 bp, Artificial Sequence
  derived and/or modified sequence
atggagcgactgctcgctcagctgtgtggctccagcgccgcttggcccctccctctgtgggaaggggacacgacgggccattgctttacccagcttgtcttaagcgccttgccgcatgctttactggccgtcctttctgcttgttacctggggacccccaggtcacccgattacattctgccctgcagcccaggatggcggctgagacttgctgccagctttttactgagcgtgtttccactccttgatttgctgcccgtggcactgcctcctggcgctggacctgggcctattggactagaggtgctggcagggtgtgtggctgccgtcgcctggatctcacatagcctggcactgtgggttctagcccatagcccccacggtcacagtaggggccctttagctcttgctcttgtggcactactgccagcacctgccctggttctcacagtattgtggcactgtcagagaggaacactgttaccccctctccttcctgggcctatggccagactgtgcttgctgatactccagctagctgcgctgcttgcttacgctctcgggtgggctgcaccaggagggccacgggagccatgggctcaggaaccgctgttgcctgaagatcaggagcccgaagtggccgaagacggcgaatcgtggctgtccagattctcctacgcgtggctagccccattgctggcacgcggagcatgcggagaattgaggcagccacaggacatatgcagactgccccaccggttgcagcctacatacctggcaagggtgttccaagcccactggcaggagggagctcgtctttggagagcactgtatggggctttcggcaggtgttacctagccctgggcctgctcaagctcgtcggtacaatgctgggcttcagtggaccgctgcttctctccctgctggttgggtttctcgaggagggacaagaaccgctttctcacggcctgttatatgctctgggcctggcaggaggcgcagtgcttggggctgtccttcagaaccagtatggatatgaggtctacaaagtgacccttcaggccaggggagccgtacttaacattctgtattgtaaggccttacagctaggaccaagtcggccacctactggagaagctctgaatctcttaggcacagactccgagcgattactgaatttcgctggatcatttcacgaggcatggggacttcctctacagctggccattactctgtacctgttgtaccagcaggtgggggtggcatttgtcggaggactcatactcgcgctactgttggtgccagtgaacaaggtgatcgcgaccagaattatggcttccaatcaagagatgctccagcacaaagacgctagggtgaagctggtcacagaattactctccggcattcgagttataaagttctgcgggtgggagcaggctcttggtgctcgggtggaggcctgcagggcgagggaattaggcaggctgcgggtgattaagtacttagacgccgcatgcgtgtacttgtgggccgctcttccagtggtgatctccatcgtgatcttcatcacctacgtcctgatgggacatcagctcacggctaccaaggtgttcacagcactagcactcgtccgcatgctcatactacccctcaacaattttccgtgggtcattaatggtcttctggaagccaaggtgagtctagatcggatacaactgttcttggatctgccaaaccataatccacaggcttactatagccccgatcctcctgcagaacccagcacagtgttggagttgcacggagcgctgttctcttgggatcccgtggggacttccctcgaaacattcatcagccatttggaggtgaagaaaggcatgctggtgggcattgtagggaaggttggttgtggcaagagtagcctccttgccgctattgctggcgagttgcacaggctgcgagggcatgtggcggttcgaggccttagcaaaggctttggcttggcgacccaggaaccttggatacaattcgcgacaatcagggacaacattctgtttgggaaaacctttgacgcccagctgtacaaggaagtgctggaggcctgtgcacttaatgatgacttgtcaatcctgcccgcaggtgatcaaacggaggttggcgaaaagggcgttacactctcaggcggacaaagagcaagaattgctctggcaagggctgtctatcaggaaaaggaactgtacctgctggatgatccactggcagctgtggacgctgacgtcgcgaatcacctgcttcatcggtgcatccttggcatgctgtcctacaccacccgcttgctctgtacacaccggactgagtacctggagcgcgctgacgccgtgctgctgatggaggccggaaggctcattcgggctggaccaccgtccgaaatactcccattagtgcaggccgttcccaaagcttgggccgagaatgggcaggaatccgatagtgccaccgcacagagcgtccaaaatcctgagaagaccaaggagggcctggaggaggaacagagcacttcgggacggctactgcaagaggagtctaaaaaagagggtgcagtagcgctacacgtgtatcaggcttactggaaagcagtggggcaaggtctggccctcgccatcctcttctccctgcttctcatgcaggctacaagaaatgctgccgattggtggctgtcacactggatcagccagcttaaggccgaaaacagtagccaggaggcacaaccctctacctcgcccgctagcatgggtttatttagcccccagctgcttctttttagtccaggtaatctgtacattcccgtattcccactgccaaaggccgctcccaatgggagtagcgacatcagattttaccttacggtttacgcgactatcgcaggcgtcaattccttgtgtacactgcttagggcggtccttttcgcagccggaactctgcaagcagccgctacgctgcatcggaggctgcttcatagggtgctgatggcccctgttacattttttaacgccactcccacaggcaggattttaaatcggttcagtagcgatgtggcctgcgctgacgattccctgccattcatcctgaatatcctgctcgctaatgcggctgggcttcttggtttactcgcagtgctgggtagtgggctgccatggcttttgttgctgctaccaccactctccatcatgtactaccatgttcagcgccactatcgggcttcctcacgggagctgaggcgcctcggtagtctgactctgagccccctgtattctcatctggccgacactttagcgggactgtctgtgcttagagccaccggcgcaacctaccgtttcgaagaagagaatctaagattgttagaactgaatcagcgctgtcaatttgcaacgtccgccacaatgcagtggttggacatcagactgcaactgatgggcgcagctgtggtcagcgctattgccggtattgctctcgtccaacatcaacagggacttgccaacccaggactagttggactgtctttgagctacgcattgtctcttactggtctgctctctggactcgtgtccagttttacacaaacggaggcgatgctagtgagtgtggagcgcctggaggagtacacctgcgatctgcctcaggagccgcaggggcaacccctccagctaggaacaggatggctgacgcagggtggtgtagaattccaggacgtggttctagcgtacagacccggattgcccaatgccttggatggagtgacgttttgcgtgcaacctggcgagaaactggggatcgtggggagaactgggtctggtaaaagctctctcctcttggtgctgttccgcctgctggagccctcctccggcagagtactgctggacggagtagatacttcgcaactggaactggctcagctgcgatcgcagcttgcaataatccctcaggagcctttcctgttctctgggactgtgagagaaaaccttgatccccaggggttgcacaaggaccgcgcactatggcaggctctcaagcagtgccacctgagcgaggtcatcacctccatgggaggtctcgatggagagctgggtgagggcggaagatctctaagtttgggacagcgccaactgctctgtctggccagagctctgctcacagatgccaagattctgtgtatcgacgaggcaaccgcatccgtcgaccagaagactgatcagctcctccaacagacaatttgtaaacgattcgccaataagaccgtgctgactatagcacaccggttaaataccatcttaaacagcgacagggtcctggtgctgcaggcaggcagggtcgttgagttggactcacccgctaccctcagaaaccagcctcactccttgttccagcaactcctccagagctcccaacaaggcgtgcctgctagcctcggtggaccatag

SEQ ID NO: 76599 - DNA, 5033 bp, Artificial Sequence
  derived and/or modified sequence
ggcgaatagcgccggctaggtcttccaacctctaggtggggtgccagccggggcgggcccagcaccccggccgggcagtactttttttttttttgcatacaccagttctcaggatatcggaatccggtgcacagcagcttcttcaggtttgaggttccggatgcctgggggcggagaaacgggaggggaaaaacagatggcaaggtgaggcgtccatggaacgacttctggcccagctgtgcggcagcagcgcagcgtggccgctcccgctgtgggagggggacaccacaggccactgcttcacccagctggtgctcagcgccctgccccacgcgctcctcgccgtgctcagtgcctgttacttgggcaccccgaggagtccagattacatcctaccctgcagtcctggatggcgcctccgacttgcagcttccttcctgctttccgtcttcccgctgctagaccttcttccagttgctttgccaccaggggcaggcccaggacccatagggctagaggtgttggcagggtgcgtggcagctgtggcctggatcagccacagcctggccctgtgggtgttggcacattcccctcatggccactcccggggtcccttggccttggccctggtagccttgctgccagctccagccctagtgctgaccgtgttgtggcattgccagcgaggcacacttctgcccccacttctcccagggcccatggcccgcctatgcttgctcatcctgcagctggctgcactcttggcctatgcactgggatgggcagctcctgggggaccacgagaaccctgggctcaggagcccctcctgcccgaggatcaagaacctgaggtggctgaagatggggagagttggctgtcacgcttttcctatgcctggctggcacccttgctggcccgtggggcctgtggagagctccggcagcctcaggacatttgccgcctcccccacagactgcagccaacctacctggctcgtgtcttccaggcacactggcaggagggggcacggctgtggagggccttgtatggggcctttggacggtgctatctggcacttggactgctgaagctggtggggaccatgttgggattctcagggcccctgttgctctccctactggtgggcttcctggaagaggggcaggagccactaagccacggcctgctctatgctctggggctagccggtggggctgtgctgggtgctgtgctgcagaatcagtatgggtatgaggtatataaggtaacacttcaggcacggggggctgtgctgaacatcctgtactgcaaggctttacagctggggcccagccgccctcctactggggaggccctgaacctactaggcactgactctgaacggctgcttaactttgctgggagcttccatgaagcctggggcctgcccctgcaactggccatcaccctctacctgctgtaccagcaggtaggcgtggccttcgtgggtggtctcatcttggcactgctgctggtacccgtcaacaaagtgattgccacccgcatcatggccagcaaccaggaaatgctacagcacaaggatgcgcgggttaagcttgtgacagagctgctgagtggcattcgggtcatcaagttctgcgggtgggagcaggcactgggagcccgagtagaggcctgccgggctcgagagctggggcgactccgggtcatcaaatacctggatgcggcctgtgtatacctgtgggctgccctaccggttgtcatctccatcgttatcttcatcacctatgtcctcatggggcaccagctcactgccaccaaggtgttcacggccctggcactggtgcgaatgctcattcttcctctcaacaacttcccttgggtgatcaatggtctcctggaggccaaagtgtccttggaccggatccagcttttcctcgaccttccaaaccacaacccccaggcctactacagcccagatccccctgcagagccatctacagtattggagctgcatggagccttgttctcctgggacccagttggaaccagcctggagaccttcatcagtcatctcgaagtgaaaaagggtatgctggtgggcatcgtggggaaggtcggctgtgggaagagctccctgctggctgccatcgctggagagctccacaggctgcgtgggcatgtggcagtgcgggggctgtccaagggctttggcctggccacccaggaaccctggatccagtttgccaccatccgagacaacatcctctttgggaagacatttgatgcacagctgtacaaggaggtgctagaagcctgcgccctcaatgatgacctcagtatcctgcctgctggagaccagacagaggtgggggagaagggtgtcacccttagcggaggacagcgtgcccggattgcccttgctcgtgctgtctaccaggaaaaggagctctatctcctcgatgaccctctggccgctgtggatgcagatgtggccaaccacctgctgcacaggtgcatcctgggcatgctgagctacaccacacggctgctctgcacccaccgcactgagtacctggagagggctgacgcggtgctgctgatggaggccgggcgcctcatccgggctggacctccctctgagattctgccactggtacaagctgtccccaaagcctgggctgagaatggacaagagtctgactcagccacagcccagtcagtacagaacccagagaaaacaaaggaggggctggaggaggagcagagcacatctggtcgcctgctgcaggaagaaagcaagaaggagggcgccgtggccttgcacgtgtaccaagcttactggaaggccgtgggccagggcttggccttagccatcctcttctctctgcttctcatgcaagccacgcggaacgctgctgactggtggctctcccactggatctctcagctgaaggctgagaatagctcccaggaggcgcaaccctccaccagcccagcttctatggggctcttctctccgcagctgctcctcttttcccctggaaacctctacatcccagtgttcccactgcccaaagctgcccccaatggctcctcagacatccgtttctacctcaccgtgtatgcgaccattgctggtgtaaattccctctgcacccttctccgggcagtgctctttgcagcaggcacccttcaagcagctgccactctgcatcgccgcctgctgcatcgagtccttatggcaccagtgactttcttcaatgccacacccacgggccggatcctaaaccgcttctcctctgatgtggcctgtgcggatgacagcctgcccttcatcctcaacatcctcctggccaacgcggcaggcctgctggggctcctggccgtgctgggctctggcctgccctggctgctgctcctgctgccgcctttgagcatcatgtactatcacgtgcagcgccactacagggcctcctcacgggagctgcggcgcctgggcagcctcaccctgtctccactgtatagccatctggccgataccttggctggcctctctgtgctccgggccacaggggccacctacaggtttgaggaggagaacctgcgactccttgagctaaaccagaggtgccagtttgccaccagtgccacaatgcagtggctggacattcggctacagctcatgggggcggcagtggtcagcgctatcgcaggcatcgctctggtgcagcaccagcagggcctcgctaacccagggctggtgggcttgtcgctgtcttatgccctgtccctgacgggcctgctctcgggcctggtgagcagcttcacacagacagaggccatgctggtgagcgtcgagcggctggaagagtacacctgtgacctgccccaggaaccccagggccagccactgcagctgggcaccggctggctgacccaggggggcgtggagttccaggacgtggtgttggcgtaccggccagggctgccgaatgccctggatggagtgaccttctgcgtgcagcctggagagaagttgggcatcgtgggccgcacaggctccggcaagtcttccctgttgttggtgctcttccggctgctagagcccagttcagggcgagtgctgctggacggcgtggacaccagccagctggagctggcccagctcagatcccagttggctatcatcccccaggagccctttttgttcagtgggactgttcgggaaaacctggacccccagggcctacataaggacagggccttgtggcaggccctgaagcagtgccacctgagtgaggtgattacatccatgggtggtctggatggtgagctgggtgaggggggccggagcttatctcttgggcagaggcagctgttgtgtttggccagggctctcctcacagatgccaagatcctgtgtatcgatgaggccacagcaagtgtggaccagaagacagaccagctgctccagcagaccatctgcaaacgctttgccaacaagacagtgctgaccattgcccataggctcaacacgatcctgaactcagaccgggtgctggtgctacaagcggggagagtggtagagctggactccccggccaccctgcgcaaccagccccactccctgttccagcagctgctgcagagcagccagcagggagtccctgcctcactcggaggtccctgagcccaatcccacaccctgcagagttctcccctctctctgatccaggccgggcctatacagaggtgctggctgcttgtttacattctcctctggggctctacctctccacacttccccagaagggaaaagggcaccctggattactctttggaaatcactccttggtgggcagcatcctgaggcttccccagaaccaggcctctgctctggccctcttgcatctggaacgccaggtgggtttttctggcataggagcccacttgcattttcatagttttatttgataaaattccatcttacattctgtgtattaaaaaaataatatttctggtgtgaggc

SEQ ID NO: 76600 - DNA, 4479 bp, Artificial Sequence
  derived and/or modified sequence
atggagagactgctggcccagctgtgcggcagcagcgccgcctggcccctgcccctgtgggagggcgacaccaccggccactgcttcacccagctggtgctgagcgccctgccccacgccctgctggccgtgctgagcgcctgctacctgggcacccccagaagccccgactacatcctgccctgcagccccggctggagactgagactggccgccagcttcctgctgagcgtgttccccctgctggacctgctgcccgtggccctgccccccggcgccggccccggccccatcggcctggaggtgctggccggctgcgtggccgccgtggcctggatcagccacagcctggccctgtgggtgctggcccacagcccccacggccacagcagaggccccctggccctggccctggtggccctgctgcccgcccccgccctggtgctgaccgtgctgtggcactgccagagaggcaccctgctgccccccctgctgcccggccccatggccagactgtgcctgctgatcctgcagctggccgccctgctggcctacgccctgggctgggccgcccccggcggccccagagagccctgggcccaggagcccctgctgcccgaggaccaggagcccgaggtggccgaggacggcgagagctggctgagcagattcagctacgcctggctggcccccctgctggccagaggcgcctgcggcgagctgagacagccccaggacatctgcagactgccccacagactgcagcccacctacctggccagagtgttccaggcccactggcaggagggcgccagactgtggagagccctgtacggcgccttcggcagatgctacctggccctgggcctgctgaagctggtgggcaccatgctgggcttcagcggccccctgctgctgagcctgctggtgggcttcctggaggagggccaggagcccctgagccacggcctgctgtacgccctgggcctggccggcggcgccgtgctgggcgccgtgctgcagaaccagtacggctacgaggtgtacaaggtgaccctgcaggccagaggcgccgtgctgaacatcctgtactgcaaggccctgcagctgggccccagcagaccccccaccggcgaggccctgaacctgctgggcaccgacagcgagagactgctgaacttcgccggcagcttccacgaggcctggggcctgcccctgcagctggccatcaccctgtacctgctgtaccagcaggtgggcgtggccttcgtgggcggcctgatcctggccctgctgctggtgcccgtgaacaaggtgatcgccaccagaatcatggccagcaaccaggagatgctgcagcacaaggacgccagagtgaagctggtgaccgagctgctgagcggcatcagagtgatcaagttctgcggctgggagcaggccctgggcgccagagtggaggcctgcagagccagagagctgggcagactgagagtgatcaagtacctggacgccgcctgcgtgtacctgtgggccgccctgcccgtggtgatcagcatcgtgatcttcatcacctacgtgctgatgggccaccagctgaccgccaccaaggtgttcaccgccctggccctggtgagaatgctgatcctgcccctgaacaacttcccctgggtgatcaacggcctgctggaggccaaggtgagcctggacagaatccagctgttcctggacctgcccaaccacaacccccaggcctactacagccccgacccccccgccgagcccagcaccgtgctggagctgcacggcgccctgttcagctgggaccccgtgggcaccagcctggagaccttcatcagccacctggaggtgaagaagggcatgctggtgggcatcgtgggcaaggtgggctgcggcaagagcagcctgctggccgccatcgccggcgagctgcacagactgagaggccacgtggccgtgagaggcctgagcaagggcttcggcctggccacccaggagccctggatccagttcgccaccatcagagacaacatcctgttcggcaagaccttcgacgcccagctgtacaaggaggtgctggaggcctgcgccctgaacgacgacctgagcatcctgcccgccggcgaccagaccgaggtgggcgagaagggcgtgaccctgagcggcggccagagagccagaatcgccctggccagagccgtgtaccaggagaaggagctgtacctgctggacgaccccctggccgccgtggacgccgacgtggccaaccacctgctgcacagatgcatcctgggcatgctgagctacaccaccagactgctgtgcacccacagaaccgagtacctggagagagccgacgccgtgctgctgatggaggccggcagactgatcagagccggcccccccagcgagatcctgcccctggtgcaggccgtgcccaaggcctgggccgagaacggccaggagagcgacagcgccaccgcccagagcgtgcagaaccccgagaagaccaaggagggcctggaggaggagcagagcaccagcggcagactgctgcaggaggagagcaagaaggagggcgccgtggccctgcacgtgtaccaggcctactggaaggccgtgggccagggcctggccctggccatcctgttcagcctgctgctgatgcaggccaccagaaacgccgccgactggtggctgagccactggatcagccagctgaaggccgagaacagcagccaggaggcccagcccagcaccagccccgccagcatgggcctgttcagcccccagctgctgctgttcagccccggcaacctgtacatccccgtgttccccctgcccaaggccgcccccaacggcagcagcgacatcagattctacctgaccgtgtacgccaccatcgccggcgtgaacagcctgtgcaccctgctgagagccgtgctgttcgccgccggcaccctgcaggccgccgccaccctgcacagaagactgctgcacagagtgctgatggcccccgtgaccttcttcaacgccacccccaccggcagaatcctgaacagattcagcagcgacgtggcctgcgccgacgacagcctgcccttcatcctgaacatcctgctggccaacgccgccggcctgctgggcctgctggccgtgctgggcagcggcctgccctggctgctgctgctgctgccccccctgagcatcatgtactaccacgtgcagagacactacagagccagcagcagagagctgagaagactgggcagcctgaccctgagccccctgtacagccacctggccgacaccctggccggcctgagcgtgctgagagccaccggcgccacctacagattcgaggaggagaacctgagactgctggagctgaaccagagatgccagttcgccaccagcgccaccatgcagtggctggacatcagactgcagctgatgggcgccgccgtggtgagcgccatcgccggcatcgccctggtgcagcaccagcagggcctggccaaccccggcctggtgggcctgagcctgagctacgccctgagcctgaccggcctgctgagcggcctggtgagcagcttcacccagaccgaggccatgctggtgagcgtggagagactggaggagtacacctgcgacctgccccaggagccccagggccagcccctgcagctgggcaccggctggctgacccagggcggcgtggagttccaggacgtggtgctggcctacagacccggcctgcccaacgccctggacggcgtgaccttctgcgtgcagcccggcgagaagctgggcatcgtgggcagaaccggcagcggcaagagcagcctgctgctggtgctgttcagactgctggagcccagcagcggcagagtgctgctggacggcgtggacaccagccagctggagctggcccagctgagaagccagctggccatcatcccccaggagcccttcctgttcagcggcaccgtgagagagaacctggacccccagggcctgcacaaggacagagccctgtggcaggccctgaagcagtgccacctgagcgaggtgatcaccagcatgggcggcctggacggcgagctgggcgagggcggcagaagcctgagcctgggccagagacagctgctgtgcctggccagagccctgctgaccgacgccaagatcctgtgcatcgacgaggccaccgccagcgtggaccagaagaccgaccagctgctgcagcagaccatctgcaagagattcgccaacaagaccgtgctgaccatcgcccacagactgaacaccatcctgaacagcgacagagtgctggtgctgcaggccggcagagtggtggagctggacagccccgccaccctgagaaaccagccccacagcctgttccagcagctgctgcagagcagccagcagggcgtgcccgccagcctgggcggcccctag

SEQ ID NO: 76601 - protein, 724 aa, Artificial Sequence
  derived and/or modified sequence
MIEDSGKRGNTMAERRQLFAEMRAQDLDRIRLSTYRTACKLRFVQKKCNLHLVDIWNVIEALRENALNNLDPNTELNVSRLEAVLSTIFYQLNKRMPTTHQIHVEQSISLLLNFLLAAFDPEGHGKISVFAVKMALATLCGGKIMDKLRYIFSMISDSSGVMVYGRYDQFLREVLKLPTAVFEGPSFGYTEQSARSCFSQQKKVTLNGFLDTLMSDPPPQCLVWLPLLHRLANVENVFHPVECSYCHSESMMGFRYRCQQCHNYQLCQDCFWRGHAGGSHSNQHQMKEYTSWKSPAKKLTNALSKSLSCASSREPLHPMFPDQPEKPLNLAHIVPPRPVTSMNDTLFSHSVPSSGSPFITRSMLESSNRLDEEHRLIARYAARLAAESSSSQPPQQRSAPDISFTIDANKQQRQLIAELENKNREILQEIQRLRLEHEQASQPTPEKAQQNPTLLAELRLLRQRKDELEQRMSALQESRRELMVQLEGLMKLLKTQGAGSPRSSPSHTISRPIPMPIRSASACSTPTHTPQDSLTGVGGDVQEAFAQSSRRNLRNDLLVAADSITNTMSSLVKELNSEVGSETESNVDSEFARTQFEDLVPSPTSEKAFLAQIHARKPGYIHSGATTSTMRGDMVTEDADPYVQPEDENYENDSVRQLENELQMEEYLKQKLQDEAYQLHVSTETRLEHPCPVSETKWRVLFWGFVFFGGFLSLALQIYFWGLF

SEQ ID NO: 76602 - DNA, 2175 bp, Artificial Sequence
  derived and/or modified sequence
atgatcgaagactcaggaaagcgaggtaataccatggccgaaaggcggcagctgttcgccgaaatgagagcccaggacttagaccgtatccgtctgtccacatatcggacagcctgcaaactgcgctttgtgcagaaaaaatgtaatctgcatctggtagacatatggaacgttattgaagccctgcgggaaaatgcccttaacaatctggaccctaatacagagctgaacgtgtctagactcgaagccgttttaagtaccatcttctatcaactgaataagcggatgcctactacccaccagattcatgttgaacaaagcatctcactgctcctgaatttcctgcttgccgcattcgacccggaaggccatgggaagatctccgtctttgccgtcaagatggctttggctactctatgcggagggaagataatggacaagttacggtatatcttctccatgatctctgactccagcggcgtgatggtatacggccgatacgaccaattcctgagagaggtgctcaaactacccaccgccgtgttcgaaggaccttcctttggctacaccgagcagtctgcacgttcctgcttctcacaacagaaaaaggtcacactcaacggctttctggataccctgatgagtgatcctcccccccagtgcctagtctggttacctctgctgcacagactggccaacgttgaaaatgtatttcacccagtggagtgttcgtattgtcattccgagagtatgatggggttccgatatcgttgccagcaatgccacaattaccagctttgccaagactgcttttggaggggccacgctggaggctcacactcaaaccagcaccagatgaaagaatacacatcctggaagtcccccgcaaaaaagcttacgaatgcactcagtaagtcattgtcttgtgcatcttcacgcgagcccctccatcctatgttccccgaccagcccgagaagcccttgaaccttgcccacattgtcccacccagacctgtaaccagcatgaatgataccctattctctcactcagtacccagctccggttccccttttattacacggtctatgctggaatcatcaaatcgattggatgaggagcaccgcctcatcgccaggtacgccgcccgtctcgcagccgagagttcatcttcccagccaccgcagcaaagaagtgccccagatatttcctttaccattgatgccaataaacagcagcgccagctgatcgccgagctggaaaataagaatagagagatcctgcaagagatccaaagacttaggcttgagcacgaacaggcgagccagcctactccagaaaaggcacagcagaatcctacgcttctggctgagctgaggctgctgcgccagcgcaaggatgaattagagcaacggatgagtgctctccaggagagccgaagggagctcatggtgcagcttgaaggtttgatgaaattgctgaaaacacaaggggccggctctcctaggtcctccccttcacataccatcagcaggccaatccccatgcccatcaggagtgcatcggcatgtagcacgccaacacacacccctcaggacagtctaactggggtgggaggcgatgtccaggaggctttcgcacagagcagccggcggaatctgagaaacgatcttctggtggccgccgacagcatcaccaatactatgtcctctctcgtcaaggaactcaactccgaagtgggcagcgaaacagagtccaacgtcgacagtgaatttgctcgaacccagtttgaggacctcgtgccctcaccaacatccgaaaaagcctttttggcccagatacacgcaagaaaaccaggatatatccattctggcgcaaccacgagtactatgagaggtgacatggtgaccgaggatgcagacccttatgtgcagcctgaagatgaaaactatgagaacgactcagtcagacaacttgagaacgagctgcagatggaggagtacctcaagcagaagctacaggacgaggcttatcaactccacgtcagtactgagactcgacttgaacacccatgtcccgtgtccgaaactaaatggcgtgtgctcttctggggtttcgtcttctttggtgggttcctctcccttgcactccaaatttatttttggggcctgttctag

SEQ ID NO: 76603 - DNA, 2175 bp, Artificial Sequence
  derived and/or modified sequence
atgattgaagattctgggaagaggggcaacaccatggccgagcggcggcagctgtttgctgagatgagggcccaggacctggaccgcatccggctgagcacctacagaacagcctgcaagctgcgctttgtgcagaagaagtgcaacctgcacctggtggacatctggaatgtgattgaggccctgcgggagaatgccctgaacaacctggaccccaacacagagctgaatgtgtcccggctggaggccgtgctgagcaccatcttctaccagctgaacaagaggatgcccaccacccaccagatccacgtggagcagagcatcagcctgctgctgaacttcctgctggccgcctttgatcctgagggccacggcaagatctctgtgtttgctgtgaagatggccctggccaccctgtgtggcggcaagatcatggacaagctgcgctacatcttctccatgatcagtgacagcagtggagtgatggtgtatggccgctatgaccagttcctgcgggaggtgctgaagctgcccacagctgtgtttgagggccccagctttggctacacagagcagagcgcccggagctgcttcagccagcagaagaaggtgaccctgaatggcttcctggacaccctgatgtctgaccccccaccccagtgcctggtgtggctgcccctgctgcaccggctggccaacgtggagaatgtgttccaccctgtggagtgcagctactgccacagcgagagcatgatgggcttccgctaccgctgccagcagtgccacaactaccagctgtgccaggactgcttctggaggggccacgccggcggcagccacagcaaccagcaccagatgaaggagtacacctcctggaagagccctgccaagaagctgaccaatgccctgagcaagagcctgagctgtgccagcagccgggagcccctgcaccccatgtttcctgaccagcctgagaagcccctgaacctggcccacatcgtgccccccaggcctgtgacctccatgaatgacaccctcttcagccacagcgtgcccagcagcggcagccccttcatcaccaggtccatgctggagagcagcaaccggctggatgaggagcaccggctgattgcccgctatgctgcccggctggccgctgagagcagcagcagccagcccccccagcagaggtctgccccagacatctccttcaccattgatgccaacaagcagcagaggcagctgattgctgagctggagaacaagaaccgggagatcctgcaggagatccagaggctgcggctggagcacgagcaggccagccagcccaccccagagaaggcccagcagaaccccaccctgctggccgagctgcggctgctgcggcagaggaaggatgagctggagcagaggatgtctgccctgcaggagagcagaagagagctgatggtgcagctggagggcctgatgaagctgctgaagacccagggcgccggcagccccaggagcagccccagccacaccatcagccggcccatccccatgcccatccgcagcgccagcgcctgcagcacccccacccacaccccccaggacagcctgactggagtgggcggagatgtgcaggaggcctttgcccagagcagcagaagaaacctgagaaatgacctgctggtggccgctgacagcatcaccaacaccatgagcagcctggtgaaggagctgaacagcgaggtgggcagcgagacagagagcaatgtggacagcgagtttgcccggacccagtttgaggacctggtgcccagccccaccagcgagaaggccttcctggcccagatccacgccaggaagccaggctacatccacagcggggccaccaccagcaccatgagaggagacatggtgacagaagatgctgacccctacgtgcagccagaagatgagaactatgaaaatgacagcgtgcggcagctggagaatgagctgcagatggaggagtacctgaagcagaagctgcaggatgaggcctaccagctgcacgtgtccacagagacccggctggagcacccctgccctgtgtctgagaccaagtggagggtgctcttctggggctttgtgttcttcggcggcttcctgagcctggccctgcagatctacttctggggcctcttctag

SEQ ID NO: 76604 - DNA, 2175 bp, Artificial Sequence
  derived and/or modified sequence
atgatcgaggacagcggcaagcggggcaacaccatggccgagcggagacagctcttcgcagaaatgcgggctcaggatcttgaccgcataagactctccacatacaggactgcatgtaaactacgattcgtgcaaaaaaagtgtaatctgcacctcgtggacatatggaacgtaatcgaggccctgcgggaaaatgctctgaacaatctcgatccaaataccgagctgaacgtttcaaggctcgaagccgtcttgtcaaccatattttatcaactgaacaaacggatgcctacaacccaccaaatccacgtggagcagagtatttcactgctgctgaactttctcctggccgctttcgacccagagggacacggaaagatctctgtcttcgccgtcaagatggccctcgcaactttgtgcggaggcaagatcatggacaagctacgctatatcttttccatgatttctgattcctccggcgtcatggtgtatgggcgatatgaccagtttctgagagaggtgttaaaactgccgaccgctgtgttcgagggcccaagcttcggctatacagagcaaagcgccagaagttgctttagccagcaaaagaaggtgaccctgaacggatttctggacacactcatgagtgaccctccaccccagtgcttagtttggctgccccttctccaccgtctcgccaacgtggagaatgtttttcatccagtcgagtgtagttattgccactctgaaagcatgatgggcttcagatatagatgccagcagtgccataactatcagctgtgtcaagactgtttttggaggggtcacgcgggtgggtctcactccaatcagcatcagatgaaggaatatacgtcctggaaatcacccgccaagaagctgacgaatgccctgtcaaagtccctgtcctgcgccagcagcagggaacccttgcatcctatgttccctgatcaacccgagaagccactgaaccttgcccatatagtgcctccccgccctgtgacaagtatgaatgatacgttgttttctcacagcgtcccatcgtcagggtcgccttttataacaagatccatgctggagagcagcaatcgcctggatgaggagcaccgactgattgcacggtacgctgccaggctagcagcagagtcatcttcttcacagcctccccagcaaagatcagcccctgacatcagtttcaccattgacgcgaacaaacagcagaggcagttgattgctgagctggagaataaaaacagagaaatcctccaggaaatccaaagacttcgcctggagcatgagcaggctagtcaacctacaccggagaaagctcaacagaacccaacattattagccgagctccgcctcttgagacagcgaaaggacgaacttgagcagagaatgtcagctctgcaggaatcgagacgggaactgatggtgcagttagaaggtttaatgaaattgctcaagacccaaggcgctggatcccccagatccagcccatctcatacaatctccagaccaattcctatgcctatccgaagtgccagcgcatgcagcacacctacccacaccccccaggattctctaacaggcgttggaggcgacgtgcaggaggcctttgctcaatctagtcgcaggaacttacggaacgacctcttggtggccgcagatagcattacaaataccatgagctctctcgtaaaggagctgaactcggaggtgggaagtgagacggaaagcaacgtcgactccgagttcgcccgcactcagtttgaagatctagttccctcacctacgagtgaaaaagcctttttagcacagattcacgcccgtaagcccggatatatacactctggcgccaccacttctaccatgcggggagatatggttactgaggatgccgacccctatgttcagccagaagatgagaactatgaaaatgattcagtgagacagctcgagaacgaattacagatggaggagtatttaaaacagaagctccaggacgaggcctatcagctgcatgtaagtaccgagacaaggctcgagcacccttgccccgtgtctgagaccaagtggagagtactgttctggggatttgtgttcttcgggggctttctatctcttgcacttcagatctacttttggggactcttctag

SEQ ID NO: 76605 - DNA, 2175 bp, Artificial Sequence
  derived and/or modified sequence
atgatcgaagatagcggcaagagagggaatacgatggctgagcgcaggcagttgttcgcggaaatgcgagcacaggatctagaccggatccggctgtctacctacagaacagcatgtaagctgagattcgtccagaagaaatgtaatctgcacctggtagatatttggaatgtcatcgaggccctgcgtgaaaatgcactcaataatctggatcctaataccgagctaaatgtgagccgcctagaagccgtcctttccaccattttctatcaactcaataagcgcatgcccaccacacaccaaatccacgtggagcagtctatcagcctgcttctcaatttcctgcttgccgcatttgatccagagggccacggtaagatctctgttttcgccgttaaaatggctctggctactctctgtgggggaaagattatggacaaactccgttatatcttcagtatgatcagcgattccagtggcgtgatggtgtacggcaggtatgaccaatttcttcgcgaggtgttaaaactgcctactgccgtgtttgagggtccttctttcggatatacagagcagagcgcaaggagctgtttctctcagcagaagaaagtaactttgaacggattcctcgataccctcatgtccgatccaccaccacaatgtctggtatggcttccactgctgcatcgtcttgccaatgtagagaacgtgtttcaccccgtcgagtgctcctattgtcactcagaatcaatgatgggctttcgttacaggtgccaacagtgtcacaattaccagctgtgtcaagactgtttctggaggggacatgccggtgggtctcattctaatcagcatcagatgaaggaatacacgagttggaaaagtccagcaaagaaactgacgaacgccttgtcaaaaagcttgagttgtgctagctcacgggagccccttcatccaatgttcccagatcagccagagaaacctctgaatttagcgcacatcgtcccccctcggccagtcaccagcatgaatgacaccttgttttcacactccgtgccctcaagtgggtcccccttcatcaccaggagcatgctcgaatcaagcaacaggttagatgaagagcatcggctcatagcaagatatgccgcaagactggcagcagaaagttcctcgtctcaaccacctcagcagcgcagcgcacctgacattagttttaccattgacgctaacaagcagcagcggcagctcattgccgagctagagaataaaaaccgtgagattctgcaggagatccagcgcctcagactggagcacgaacaagcaagtcagcccacacccgagaaggcccagcaaaatcccaccctcctggccgagctgcgactacttcgacagagaaaggatgaattggaacagcgaatgagcgccctgcaagagtcacggcgtgagctgatggtgcagctcgaaggcttgatgaagcttctgaagacccagggagccggatctcctagatctagtccgtcgcacactatctccagacccattcctatgccaatccgttcagcatcagcctgttctacgccaacccatacacctcaggattctcttaccggagttgggggagacgtacaggaggcctttgctcagtcttctagacgcaacttgagaaatgatctcctggtggccgctgactcgatcactaataccatgtccagcctcgtaaaggaattgaactctgaagtcggcagcgaaaccgaaagcaatgtggactccgaatttgccaggactcagtttgaggatttagtgccgtcacctacatcagagaaagcctttctcgcccaaattcacgcgaggaagcctgggtacatccacagcggcgctaccacgtccactatgaggggggatatggtgactgaagacgcggatccatatgtccaacccgaggacgagaactacgaaaatgactctgtgaggcagcttgagaacgaactccagatggaagaatacttgaagcagaaacttcaggatgaggcctatcagctgcacgtctctaccgagactaggttggagcacccctgtcccgtctcggaaaccaagtggcgggtcctgttttggggtttcgtattctttggaggtttcctgagcctggcactccagatctacttctggggcctgttctag

SEQ ID NO: 76606 - DNA, 2175 bp, Artificial Sequence
  derived and/or modified sequence
atgatcgaggacagcggcaagagaggcaacaccatggccgagagaagacagctgttcgccgagatgagagcccaggacctggacagaatcagactgagcacctacagaaccgcctgcaagctgagattcgtgcagaagaagtgcaacctgcacctggtggacatctggaacgtgatcgaggccctgagagagaacgccctgaacaacctggaccccaacaccgagctgaacgtgagcagactggaggccgtgctgagcaccatcttctaccagctgaacaagagaatgcccaccacccaccagatccacgtggagcagagcatcagcctgctgctgaacttcctgctggccgccttcgaccccgagggccacggcaagatcagcgtgttcgccgtgaagatggccctggccaccctgtgcggcggcaagatcatggacaagctgagatacatcttcagcatgatcagcgacagcagcggcgtgatggtgtacggcagatacgaccagttcctgagagaggtgctgaagctgcccaccgccgtgttcgagggccccagcttcggctacaccgagcagagcgccagaagctgcttcagccagcagaagaaggtgaccctgaacggcttcctggacaccctgatgagcgacccccccccccagtgcctggtgtggctgcccctgctgcacagactggccaacgtggagaacgtgttccaccccgtggagtgcagctactgccacagcgagagcatgatgggcttcagatacagatgccagcagtgccacaactaccagctgtgccaggactgcttctggagaggccacgccggcggcagccacagcaaccagcaccagatgaaggagtacaccagctggaagagccccgccaagaagctgaccaacgccctgagcaagagcctgagctgcgccagcagcagagagcccctgcaccccatgttccccgaccagcccgagaagcccctgaacctggcccacatcgtgccccccagacccgtgaccagcatgaacgacaccctgttcagccacagcgtgcccagcagcggcagccccttcatcaccagaagcatgctggagagcagcaacagactggacgaggagcacagactgatcgccagatacgccgccagactggccgccgagagcagcagcagccagcccccccagcagagaagcgcccccgacatcagcttcaccatcgacgccaacaagcagcagagacagctgatcgccgagctggagaacaagaacagagagatcctgcaggagatccagagactgagactggagcacgagcaggccagccagcccacccccgagaaggcccagcagaaccccaccctgctggccgagctgagactgctgagacagagaaaggacgagctggagcagagaatgagcgccctgcaggagagcagaagagagctgatggtgcagctggagggcctgatgaagctgctgaagacccagggcgccggcagccccagaagcagccccagccacaccatcagcagacccatccccatgcccatcagaagcgccagcgcctgcagcacccccacccacaccccccaggacagcctgaccggcgtgggcggcgacgtgcaggaggccttcgcccagagcagcagaagaaacctgagaaacgacctgctggtggccgccgacagcatcaccaacaccatgagcagcctggtgaaggagctgaacagcgaggtgggcagcgagaccgagagcaacgtggacagcgagttcgccagaacccagttcgaggacctggtgcccagccccaccagcgagaaggccttcctggcccagatccacgccagaaagcccggctacatccacagcggcgccaccaccagcaccatgagaggcgacatggtgaccgaggacgccgacccctacgtgcagcccgaggacgagaactacgagaacgacagcgtgagacagctggagaacgagctgcagatggaggagtacctgaagcagaagctgcaggacgaggcctaccagctgcacgtgagcaccgagaccagactggagcacccctgccccgtgagcgagaccaagtggagagtgctgttctggggcttcgtgttcttcggcggcttcctgagcctggccctgcagatctacttctggggcctgttctag

SEQ ID NO: 76607 - DNA, 3201 bp, Artificial Sequence
  derived and/or modified sequence
acagtacacaccaggatctagaggctggatttcatactcatagctctccctagaatttcagagagttctgttatgatctctgttgtaattaccaatttggttcaagtttgttctttaaatgaatatgcttagaattcacatatgttctggatgtactggaattaaaaggatttaagagatcatggtgtgcatgttctaggataaataggatttaccaatccttggatgaagtgcttgggaagtctttaagtgccataatcaactgccatttcaaagaatatagatggttttgaaaagttcatgctgtcccttcattgaattttagaatgattgaagatagtgggaaaagaggaaataccatggcagaaagaagacagctgtttgcagagatgagggctcaagatctggatcgcatccgactctccacctacagaacagcatgcaagcttaggtttgttcagaagaaatgcaatttgcacctggtggacatatggaatgtcatagaagcattgcgggaaaatgctctgaacaacctggacccaaacactgaactcaacgtgtcccgcttagaggctgtgctctccactattttttaccagctcaacaaacggatgccaaccactcaccaaatccatgtggagcagtccatcagcctcctccttaacttcctgcttgcagcgtttgatccggaaggccatggtaaaatttcagtatttgctgtcaaaatggctttagccacattgtgtggagggaagatcatggacaaattaagatatattttctcaatgatttctgactccagtggggtgatggtttatggacgatatgaccaattccttcgggaagttctcaaactacccacggcagtttttgaaggtccttcatttggttacacagaacagtcagccagatcctgtttctcccaacagaaaaaagtcacgttaaatggtttcttggacacgcttatgtcagatcctcccccgcagtgtctggtctggttgcctcttctgcatcgactagcaaatgtggaaaatgtcttccatccggttgagtgttcctactgccacagtgagagtatgatgggatttcgctaccgatgccaacagtgtcacaattaccagctctgtcaggactgcttctggaggggacatgccggtggttctcatagcaaccagcaccaaatgaaagagtacacgtcatggaaatcacctgctaagaagctgactaatgcattaagcaagtccctgagctgtgcttccagccgtgaacctttgcaccccatgttcccagatcagcctgagaagccactcaacttggctcacatcgtgcctcccagacctgtaaccagcatgaacgacaccctgttctcccactctgttccctcctcaggaagtccttttattaccaggagcatgcttgagagttcaaaccggcttgatgaagaacacaggctaattgccaggtatgcggcaaggctggcagcagagtcctcttcgtctcagccacctcagcagagaagtgctcctgacatctctttcaccatcgatgcgaataagcagcaaaggcagctgattgctgagctagaaaacaagaacagagaaatcttacaggagatccagagacttcggctagagcatgaacaagcttctcagcccacgccagagaaggcacagcaaaaccccaccctgctggcagaactccggctcctcagacagcgcaaagatgagctggaacagagaatgtctgctctccaggagagccggagagagctaatggtccagttggagggtctcatgaagctactaaagactcagggggcaggctctccccgctcctcccccagccacaccatcagcaggccaattcccatgcccatccggtcagcgtcagcctgctccaccccgacgcacacgccgcaggactccctcacaggagtagggggagatgtacaagaggcatttgcacaaagttcaagaagaaacttaaggaatgacttgctagtggctgcagattccatcactaacactatgtcctctcttgtgaaagagctgaattctgaggttgggagtgaaacagagagtaatgtggattctgaatttgcacggactcagtttgaggatcttgttccctcaccaacctctgaaaaggcttttctagcgcaaatccatgcccgaaaacctgggtacattcacagtggagctaccacaagtaccatgcgtggcgacatggttacggaggatgcagatccctatgtgcagcctgaagatgaaaactatgaaaatgactctgtccggcagctggagaatgagctccagatggaggaatacctgaaacagaagctgcaagatgaagcttatcagctccacgtcagcactgagaccagactcgagcacccctgtcctgtaagcgagacaaaatggcgtgtgttattttggggttttgtgttttttggtgggtttctttccttggctctccagatttacttttggggcctgttctaagtgcaaacccagcaagtttcacttgtcctgtccattagatacaactacatcttgcgggggttgtttctttcttgttccacaatgaattgcacatccatctccatcagagctgatagcctgttaataagcactggtctaacacagccaaccctcctccacagcgccatattaatggaggaggggaggaaggtgaaatctactgcatgggattcaggaaacagttgtggttggtcaggacggaagttggggtaagtttggttggtcagagggagttgtgctggagattgtgaaaaatgggttcttgaatgatctactataaggcagggaaggttcatttgtaagtagtaatgtgaactgaattgcattaagagtgtgtggcctttgttgtgatatactatgtattttcttatatgcatgagccaaactgttgcatcataatttagcactgatgtctgcttttattttgatcatctttgtccacccttattagttcttggctgttaaccgtagatagatcttgtaaatccagcaacctttggttgctgcattccccttggttcgattccacgcaaggagccacaagtgagaactccactgtccttagaagaaagggcatttttacttttgaaccaaaaagagaaaaaaaaatcagaagtgttgcatcttgaggcgaattaactgtaagacatttttaattatg

SEQ ID NO: 76608 - protein, 690 aa, Artificial Sequence
  derived and/or modified sequence
MIEDSGKRGNTMAERRQLFAEMRAQDLDRIRLSTYRTACKLRFVQKKCNLHLVDIWNVIEALRENALNNLDPNTELNVSRLEAVLSTIFYQLNKRMPTTHQIHVEQSISLLLNFLLAAFDPEGHGKISVFAVKMALATLCGGKIMDKLRYIFSMISDSSGVMVYGRYDQFLREVLKLPTAVFEGPSFGYTEQSARSCFSQQKKVTLNGFLDTLMSDPPPQCLVWLPLLHRLANVENVFHPVECSYCHSESMMGFRYRCQQCHNYQLCQDCFWRGHAGGSHSNQHQMKEYTSWKSPAKKLTNALSKSLSCASSREPLHPMFPDQPEKPLNLAHIVPPRPVTSMNDTLFSHSVPSSGSPFITRSMLESSNRLDEEHRLIARYAARLAAESSSSQPPQQRSAPDISFTIDANKQQRQLIAELENKNREILQEIQRLRLEHEQASQPTPEKAQQNPTLLAELRLLRQRKDELEQRMSALQESRRELMVQLEGLMKLLKEEELKQGTQGAGSPRSSPSHTISRPIPMPIRSASACSTPTHTPQDSLTGVGGDVQEAFAQSSRRNLRNDLLVAADSITNTMSSLVKELNSEVGSETESNVDSEFARTQFEDLVPSPTSEKAFLAQIHARKPGYIHSGATTSTMRGDMVTEDADPYVQPEDENYENDSVRQLENELQMEEYLKQKLQDEAYQVSLQG

SEQ ID NO: 76609 - DNA, 2073 bp, Artificial Sequence
  derived and/or modified sequence
atgattgaagactcgggtaagcggggtaatacaatggcagagcgacggcagttattcgctgagatgagagcccaggatctcgaccgaatacggctgtctacatataggacggcatgcaaattgcgatttgtgcagaaaaagtgtaaccttcacttggtcgacatttggaacgtcattgaagccctgcgagagaacgcactcaataacctggaccccaacacggagctcaatgtgtccaggctcgaagctgtactgtcaactatcttttaccagttaaacaagcgcatgccgaccacccaccaaatccacgtggaacaaagcataagcttacttctaaacttcctgctggccgcctttgatcccgagggccacgggaagatatctgtttttgccgtaaagatggcactcgcaacactttgtgggggcaaaataatggacaaattacggtatatcttcagcatgatttcagatagttccggggttatggtctatggccgctacgaccagttcctgagggaggtcctgaagctccccactgccgtgtttgagggtcccagttttggctacacagaacaaagcgctaggagctgctttagccaacaaaagaaggtgacactcaacggattcctggataccctgatgtctgatcctcccccacagtgcttagtgtggttgcctttactccacaggttagccaacgtagagaatgttttccacccagtggaatgctcgtactgccattctgaatccatgatgggatttcgatacagatgccagcagtgtcacaattatcagctttgccaggactgtttttggagagggcacgccggcggttcacatagcaatcagcaccagatgaaagaatatacctcctggaagtcaccagccaaaaagcttacaaacgccctgagtaaatctctgtcttgcgcctcctctagggaacccttacatcccatgttcccagaccaaccagagaaacccttgaatcttgctcatattgtgcctccgaggcccgtgacgtccatgaatgatacactcttcagccactccgtgccttcttcaggctcccctttcatcactcgctccatgctggaaagttccaaccggttagatgaagagcaccgcttgatcgccaggtacgcggctcggctggccgccgaatcaagctccagccagcccccacagcaacgaagcgcccctgacattagcttcacgattgacgcaaacaaacaacagcgccaactgattgccgaactggaaaacaagaatcgagagatcctgcaggaaattcagcgtcttaggttagagcacgagcaggcatcacagccgacaccagaaaaagcccaacaaaatccaacactgctcgcggagctgcggttgttacgccagcgcaaggacgaactggagcaaagaatgtcagcacttcaggagagccggcgcgagctgatggtgcagttagagggactaatgaaacttttgaaggaggaagagttaaagcagggcacccagggggccggcagcccacgaagcagtccttcacacaccatatctcgtcctataccgatgccaatacgctctgcatctgcatgctctacaccgacacacactccacaggattccctgactggagtgggcggagacgtgcaagaagcatttgcgcagtcatcaaggcgcaatctcaggaatgacctgctggtggctgctgactctatcaccaacaccatgagcagtcttgtgaaagagctgaacagcgaggtcggcagcgagaccgaatctaatgtcgatagtgagtttgccaggactcagttcgaggacctggttccttcacctacctcagagaaagcttttttagcccagatccatgcacgtaaaccaggatacattcatagtggcgcgaccacatccacaatgcggggagatatggtgaccgaggacgccgatccttatgtacaacccgaagacgaaaattacgagaatgactctgtacggcaactcgaaaatgagttgcaaatggaagaatatctgaagcagaaactgcaagacgaggcctaccaggtgagcttgcagggatag

SEQ ID NO: 76610 - DNA, 2073 bp, Artificial Sequence
  derived and/or modified sequence
atgattgaagattctgggaagaggggcaacaccatggccgagcggcggcagctgtttgctgagatgagggcccaggacctggaccgcatccggctgagcacctacagaacagcctgcaagctgcgctttgtgcagaagaagtgcaacctgcacctggtggacatctggaatgtgattgaggccctgcgggagaatgccctgaacaacctggaccccaacacagagctgaatgtgtcccggctggaggccgtgctgagcaccatcttctaccagctgaacaagaggatgcccaccacccaccagatccacgtggagcagagcatcagcctgctgctgaacttcctgctggccgcctttgatcctgagggccacggcaagatctctgtgtttgctgtgaagatggccctggccaccctgtgtggcggcaagatcatggacaagctgcgctacatcttctccatgatcagtgacagcagtggagtgatggtgtatggccgctatgaccagttcctgcgggaggtgctgaagctgcccacagctgtgtttgagggccccagctttggctacacagagcagagcgcccggagctgcttcagccagcagaagaaggtgaccctgaatggcttcctggacaccctgatgtctgaccccccaccccagtgcctggtgtggctgcccctgctgcaccggctggccaacgtggagaatgtgttccaccctgtggagtgcagctactgccacagcgagagcatgatgggcttccgctaccgctgccagcagtgccacaactaccagctgtgccaggactgcttctggaggggccacgccggcggcagccacagcaaccagcaccagatgaaggagtacacctcctggaagagccctgccaagaagctgaccaatgccctgagcaagagcctgagctgtgccagcagccgggagcccctgcaccccatgtttcctgaccagcctgagaagcccctgaacctggcccacatcgtgccccccaggcctgtgacctccatgaatgacaccctcttcagccacagcgtgcccagcagcggcagccccttcatcaccaggtccatgctggagagcagcaaccggctggatgaggagcaccggctgattgcccgctatgctgcccggctggccgctgagagcagcagcagccagcccccccagcagaggtctgccccagacatctccttcaccattgatgccaacaagcagcagaggcagctgattgctgagctggagaacaagaaccgggagatcctgcaggagatccagaggctgcggctggagcacgagcaggccagccagcccaccccagagaaggcccagcagaaccccaccctgctggccgagctgcggctgctgcggcagaggaaggatgagctggagcagaggatgtctgccctgcaggagagcagaagagagctgatggtgcagctggagggcctgatgaagctgctgaaggaggaggagctgaagcagggcacccagggcgccggcagccccaggagcagccccagccacaccatcagccggcccatccccatgcccatccgcagcgccagcgcctgcagcacccccacccacaccccccaggacagcctgactggagtgggcggagatgtgcaggaggcctttgcccagagcagcagaagaaacctgagaaatgacctgctggtggccgctgacagcatcaccaacaccatgagcagcctggtgaaggagctgaacagcgaggtgggcagcgagacagagagcaatgtggacagcgagtttgcccggacccagtttgaggacctggtgcccagccccaccagcgagaaggccttcctggcccagatccacgccaggaagccaggctacatccacagcggggccaccaccagcaccatgagaggagacatggtgacagaagatgctgacccctacgtgcagccagaagatgaaaattatgaaaatgattctgtgcggcagctggagaatgagctgcagatggaggagtacctgaagcagaagctgcaggatgaggcctaccaggtgtccctgcagggctag

SEQ ID NO: 76611 - DNA, 2073 bp, Artificial Sequence
  derived and/or modified sequence
atgatcgaggacagcggcaagcggggcaacaccatggccgagcggaggcagctgttcgccgagatgcgggcacaggacctggaccggatccggctgtcgacatatcgaaccgcatgtaaactgaggtttgttcagaagaagtgtaatttacacctggtggacatctggaatgtgattgaagcattgcgcgaaaacgccttaaataacctagatccgaatactgagttgaatgtcagcagattggaggctgttctgagtaccatattctaccaactgaacaaacgcatgcctactacacatcagatccacgtagagcaatcaatctctcttttacttaacttcctgctcgcggcttttgatcccgagggtcatggtaagatttcagtgtttgcagtgaaaatggctctggccaccctgtgtggcgggaagattatggacaaacttcggtacatattctcaatgataagcgatagttccggtgttatggtttacggaaggtacgatcaatttttgagggaagtccttaaactgcccacggccgtttttgagggcccctcattcggctacacggagcagagtgctaggtcttgtttttcccaacagaaaaaggttacactcaatgggttcctggatactttaatgtcggatcctcccccccagtgcttggtatggctgccattgctgcacaggctggctaatgtggagaacgtgttccatccggtcgaatgctcttactgccattcggaaagcatgatgggcttccgctacaggtgtcagcagtgccataactatcagctgtgtcaggattgcttctggagggggcacgccggcggatcgcactcaaatcagcatcagatgaaggaatacacaagttggaagagtccggcaaaaaagcttactaacgccctgtccaagtctctaagttgcgcatcatcacgcgagccattgcaccccatgtttccagatcagcctgagaaacctctgaacctggcccacatcgtcccacccaggcctgtcacttcgatgaacgatacgctcttttctcactcagtgccctcgtctgggtccccatttatcactaggtccatgctggaatcctccaatcgattggatgaagagcaccgtctaatcgcccgttacgcagcccggttggccgccgaaagcagttcctcccagccacctcagcaaagaagcgccccagatatttcttttacgatagacgctaacaaacagcagagacaacttattgcggagctggagaacaaaaatagggagatacttcaggagatccagagactgaggctggaacacgaacaggcgtcccagccaactcctgaaaaggcgcagcagaaccctaccctcctggccgagctgaggttgcttaggcaacggaaggacgaattagaacagcggatgtcagcactgcaggagagcaggagagaattgatggtgcagttagagggtttaatgaaactgttgaaagaggaggagctgaaacaggggacccagggcgccgggagtcctcgctctagcccaagtcatactatctcaagacccattcccatgccaatcaggtccgccagcgcttgttcgactccaacccatacaccacaggattcactgaccggggttggcggtgatgttcaagaagcctttgcgcagtctagtcggcggaatctgcggaacgatctgctggtagccgctgattctattaccaacacgatgagcagcctggtcaaggagcttaattctgaagtaggaagtgagactgagagcaacgtcgattccgagtttgccagaactcagttcgaggatctagtgccatccccaacctcagagaaagcatttctggctcagatccatgcgcgcaagccaggctatatccacagtggcgcaactaccagtactatgcgcggtgatatggtgaccgaggatgcagacccgtacgtccagcccgaggacgagaactatgagaatgactccgtgcggcagttggaaaacgagctgcagatggaggaatatctaaaacagaagcttcaggacgaagcttaccaggtgagtctccagggatag

SEQ ID NO: 76612 - DNA, 2073 bp, Artificial Sequence
  derived and/or modified sequence
atgatcgaagactccggcaaacgaggcaacactatggccgagcggagacagttattcgcagaaatgagggcccaggacctggatcggatccgcctttcaacatacagaacagcttgtaagctcagattcgtgcaaaagaagtgtaaccttcatctcgtggatatttggaatgttattgaggctctaagggaaaacgcactgaataatttggatccaaatacagagttgaatgtgagccggcttgaggctgtcctgagcacaatcttctaccagctcaataagcgaatgcccactacacatcagatacatgtggaacagtcgattagcctgttattaaactttctccttgcagcctttgaccctgagggtcatggaaaaatttctgtcttcgcagtaaagatggcgctggcaacactgtgtggaggtaaaataatggacaaactgaggtacatcttcagtatgataagcgattcctcaggggtcatggtgtacggacgctacgatcagtttcttcgggaggtcctgaagctaccaacagcagtgttcgaaggtcctagctttggctatacggagcaaagcgcacgctcatgtttctcacaacaaaagaaagttaccctcaatggctttctggatactctgatgagcgaccccccaccccagtgcctggtgtggctgccgctgcttcataggctcgccaacgttgagaacgtgttccacccggtggaatgctcgtattgccactccgaatcgatgatgggatttagatataggtgccagcagtgccataactatcaactgtgtcaggattgtttctggagaggtcacgcaggcggatcccactccaaccagcatcagatgaaagagtacacttcctggaaatcccctgccaaaaagctgaccaacgctctgagcaagtccctctcttgcgccagctcccgggagcctctgcacccaatgtttcctgaccaacccgaaaaacctctgaatctggcacacattgtgccccctagacccgtcacctccatgaatgatacactcttttcccatagtgtgccctctagtggttctccctttatcacccgcagtatgcttgaatcttcaaataggttagatgaagagcacagactcatcgcacgctatgcggctaggctggccgctgagtcctcatcttcgcagccacctcagcagaggagtgctcccgatatttcttttaccattgacgccaataaacagcagcgtcagctaatcgccgagttggagaacaagaatagagagatactgcaggaaatccaacgcctccggctggagcacgagcaggcctcccagcccacccctgaaaaagcccagcagaaccccaccctgctagccgaacttcggttattgagacagcggaaggatgagctggaacaacgaatgtccgctctccaggagagccgtagggaactcatggtgcagctcgaaggacttatgaaattgctaaaagaagaagagctgaagcagggaactcagggggctgggagcccacgttctagtcctagtcatacaataagccgccctattccaatgccgatcagatctgcctcagcctgtagtacccccacccatacacctcaagattctctgaccggcgtggggggagacgtgcaggaagcctttgcccagtcatcacgccgtaacttacgcaacgacctgttagtggccgcagatagtattaccaacaccatgtcctctctcgttaaggagcttaattccgaagtggggagtgagacagagtctaatgtggactcagagtttgccaggacccaattcgaagatctggtgccatcacctaccagtgaaaaagcattcttggcgcagatacacgctcgtaagcccggatacatccactctggtgcaaccacatcgacaatgaggggtgatatggtcaccgaagatgccgatccttacgtgcagcctgaagacgaaaattatgagaacgacagtgttcgccagttggaaaatgagctgcagatggaagagtacctgaagcagaaactccaggatgaagcctaccaggtgagtctgcaggggtag

SEQ ID NO: 76613 - DNA, 2073 bp, Artificial Sequence
  derived and/or modified sequence
atgatcgaggacagcggcaagagaggcaacaccatggccgagagaagacagctgttcgccgagatgagagcccaggacctggacagaatcagactgagcacctacagaaccgcctgcaagctgagattcgtgcagaagaagtgcaacctgcacctggtggacatctggaacgtgatcgaggccctgagagagaacgccctgaacaacctggaccccaacaccgagctgaacgtgagcagactggaggccgtgctgagcaccatcttctaccagctgaacaagagaatgcccaccacccaccagatccacgtggagcagagcatcagcctgctgctgaacttcctgctggccgccttcgaccccgagggccacggcaagatcagcgtgttcgccgtgaagatggccctggccaccctgtgcggcggcaagatcatggacaagctgagatacatcttcagcatgatcagcgacagcagcggcgtgatggtgtacggcagatacgaccagttcctgagagaggtgctgaagctgcccaccgccgtgttcgagggccccagcttcggctacaccgagcagagcgccagaagctgcttcagccagcagaagaaggtgaccctgaacggcttcctggacaccctgatgagcgacccccccccccagtgcctggtgtggctgcccctgctgcacagactggccaacgtggagaacgtgttccaccccgtggagtgcagctactgccacagcgagagcatgatgggcttcagatacagatgccagcagtgccacaactaccagctgtgccaggactgcttctggagaggccacgccggcggcagccacagcaaccagcaccagatgaaggagtacaccagctggaagagccccgccaagaagctgaccaacgccctgagcaagagcctgagctgcgccagcagcagagagcccctgcaccccatgttccccgaccagcccgagaagcccctgaacctggcccacatcgtgccccccagacccgtgaccagcatgaacgacaccctgttcagccacagcgtgcccagcagcggcagccccttcatcaccagaagcatgctggagagcagcaacagactggacgaggagcacagactgatcgccagatacgccgccagactggccgccgagagcagcagcagccagcccccccagcagagaagcgcccccgacatcagcttcaccatcgacgccaacaagcagcagagacagctgatcgccgagctggagaacaagaacagagagatcctgcaggagatccagagactgagactggagcacgagcaggccagccagcccacccccgagaaggcccagcagaaccccaccctgctggccgagctgagactgctgagacagagaaaggacgagctggagcagagaatgagcgccctgcaggagagcagaagagagctgatggtgcagctggagggcctgatgaagctgctgaaggaggaggagctgaagcagggcacccagggcgccggcagccccagaagcagccccagccacaccatcagcagacccatccccatgcccatcagaagcgccagcgcctgcagcacccccacccacaccccccaggacagcctgaccggcgtgggcggcgacgtgcaggaggccttcgcccagagcagcagaagaaacctgagaaacgacctgctggtggccgccgacagcatcaccaacaccatgagcagcctggtgaaggagctgaacagcgaggtgggcagcgagaccgagagcaacgtggacagcgagttcgccagaacccagttcgaggacctggtgcccagccccaccagcgagaaggccttcctggcccagatccacgccagaaagcccggctacatccacagcggcgccaccaccagcaccatgagaggcgacatggtgaccgaggacgccgacccctacgtgcagcccgaggacgagaactacgagaacgacagcgtgagacagctggagaacgagctgcagatggaggagtacctgaagcagaagctgcaggacgaggcctaccaggtgagcctgcagggctag

SEQ ID NO: 76614 - DNA, 6490 bp, Artificial Sequence
  derived and/or modified sequence
agaggctggatttcatactcatagctctccctagaatttcagagagttctgttatgatctctgttgtaattaccaatttggttcaagtttgttctttaaatgaatatgcttagaattcacatatgttctggatgtactggaattaaaaggatttaagagatcatggtgtgcatgttctaggataaataggatttaccaatccttggatgaagtgcttgggaagtctttaagtgccataatcaactgccatttcaaagaatatagatggttttgaaaagttcatgctgtcccttcattgaattttagaatgattgaagatagtgggaaaagaggaaataccatggcagaaagaagacagctgtttgcagagatgagggctcaagatctggatcgcatccgactctccacctacagaacagcatgcaagcttaggtttgttcagaagaaatgcaatttgcacctggtggacatatggaatgtcatagaagcattgcgggaaaatgctctgaacaacctggacccaaacactgaactcaacgtgtcccgcttagaggctgtgctctccactattttttaccagctcaacaaacggatgccaaccactcaccaaatccatgtggagcagtccatcagcctcctccttaacttcctgcttgcagcgtttgatccggaaggccatggtaaaatttcagtatttgctgtcaaaatggctttagccacattgtgtggagggaagatcatggacaaattaagatatattttctcaatgatttctgactccagtggggtgatggtttatggacgatatgaccaattccttcgggaagttctcaaactacccacggcagtttttgaaggtccttcatttggttacacagaacagtcagccagatcctgtttctcccaacagaaaaaagtcacgttaaatggtttcttggacacgcttatgtcagatcctcccccgcagtgtctggtctggttgcctcttctgcatcgactagcaaatgtggaaaatgtcttccatccggttgagtgttcctactgccacagtgagagtatgatgggatttcgctaccgatgccaacagtgtcacaattaccagctctgtcaggactgcttctggaggggacatgccggtggttctcatagcaaccagcaccaaatgaaagagtacacgtcatggaaatcacctgctaagaagctgactaatgcattaagcaagtccctgagctgtgcttccagccgtgaacctttgcaccccatgttcccagatcagcctgagaagccactcaacttggctcacatcgtgcctcccagacctgtaaccagcatgaacgacaccctgttctcccactctgttccctcctcaggaagtccttttattaccaggagcatgcttgagagttcaaaccggcttgatgaagaacacaggctaattgccaggtatgcggcaaggctggcagcagagtcctcttcgtctcagccacctcagcagagaagtgctcctgacatctctttcaccatcgatgcgaataagcagcaaaggcagctgattgctgagctagaaaacaagaacagagaaatcttacaggagatccagagacttcggctagagcatgaacaagcttctcagcccacgccagagaaggcacagcaaaaccccaccctgctggcagaactccggctcctcagacagcgcaaagatgagctggaacagagaatgtctgctctccaggagagccggagagagctaatggtccagttggagggtctcatgaagctactaaaggaagaagaactgaagcagggaactcagggggcaggctctccccgctcctcccccagccacaccatcagcaggccaattcccatgcccatccggtcagcgtcagcctgctccaccccgacgcacacgccgcaggactccctcacaggagtagggggagatgtacaagaggcatttgcacaaagttcaagaagaaacttaaggaatgacttgctagtggctgcagattccatcactaacactatgtcctctcttgtgaaagagctgaattctgaggttgggagtgaaacagagagtaatgtggattctgaatttgcacggactcagtttgaggatcttgttccctcaccaacctctgaaaaggcttttctagcgcaaatccatgcccgaaaacctgggtacattcacagtggagctaccacaagtaccatgcgtggcgacatggttacggaggatgcagatccctatgtgcagcctgaagatgaaaactatgaaaatgactctgtccggcagctggagaatgagctccagatggaggaatacctgaaacagaagctgcaagatgaagcttatcaggtcagcttgcaaggttgaatgcaatatccttttatcacactcctctcaagcaagctatagtcagacagatgatgaaagtaacatgaaaactggtgatgatggagagccctgtggccacacagaggaggaagacagcagcctggcagcagcctcaccgaagagaggaaccaccacacccagcagctcctgacagacccccacccctaaagatgtgtcctgatgactatagtgcagctaactttttgttctcagatttgtagtgcataggtgtgtgtttcaagaaggaaaaaaaaagacttctgttcaaagttaacttatcagctacatcctctgtaacgtggttcatccctggttaaaaagcaaacaaacacaggctgaaaacccatgctgctgttatacacaatggcagtattaacaagcattttaaacctttgcacatgatattgaacctgttcagtttacaatgacaatattaatactgtttatagctagaagtttgatttctgaattctttgagattttagcaaaacagtttattatacactgtacatttttttcacagcaattggaaaaaaacaaccacttgcaatcattcaataaccctgaagaatttggttcctgagtgtacaaactcagagcccggaagccaagaagggtccttggcctgcacggtctgtagttgactccaagtctctgtgagcagtgacttgaaccaaacacaccaggaataatccattctttggggcctctttccaactcgaggttgttttctttcaagatactctaatcagccatagaatttagtgtaaatatttttttttccaaatagatatcatattcaaaaaaggcagcattcaaattatatagaatctagtttttaaaatcagcacagatcttcttaaaaactgtgaactatgttttgaaatactcgttactaaagctgtttataaaccacaggtgccataagatccccaaacggactaaagttatctctgctcttccatggtcttgttcctctcgttttggctttaggaagcatgtctttaacagcaccgctcgttcacaagttcccccatcaagttgtttggaggccttcagctttaaatgtacaggcttaaagtgcgcttgcaaacgtttgctctcctttttttctgaatgttgattgccttagctggccacctggtgttctgcatgtagccttctgtggtcatgtgaaaggagacaggctcttctaagttgagttgggatttttgcactcagtgaaaagctgaagtgcaaaagagctatcaaagacaagaggataaaagactgggatagtcttttccaaggaccctctttagagggccctaaagacctcctttgggaattctggggaaaaagaaaaagtaatcttctacttgcttcaagatttgatttttttaaaaaagcctgcgacctattcaatacattatgcttaaattagcagtttctctggaattcctgtctctcctttaaaagaaaggagagaacattttagaacaatagttctcaaagtgtgttccccggacaagcagcatctgcaacacttaggaaggtcttcgaaatactaatttgtaagccccacctcaggcctactgaatcagaagctctgggggttgggtccagaagtctgttttagtcaaccctctaggtgattctgatgctcgctaaaggttgagaactactgctttagaatgaagtcgtataataaagtctctgaaaaggccttattcagaataagcaagaaaggttctgtgattcacttttgcttctggggctggcaaaaaccttctctgaacccacacaccaagttcgtagttggtaggtgcccagccaagtcctgacatcttcatgccccctctgcagagggcggctgtacgatgttcacatgtctgcgtttggtcagacatcatctccttggctgccctttgaaaccaaatcacttgccttggggataaagtgctcaattggcattagtgagaagcccatcctatcccttgacatacttaatcatatatctctccagagaactcacctgacaaatgtctctgagcacaggctgacaccaaagtggcacaactgcacagttctcagatttctttgcacagattgatttttattgcgggttttgttggggtgtcttaatgttcatctcttttccactgcccatcctctgtgaacccatacctctctagatggagcaggtggccactggtgcctcatactcagtattgaaaaccactacatcccagctacctataatgctgtcagctcaaaatcatagccaggtagttcttgaactcagaacttaaatcctgcacgtggcactccaccactgactggaccgagctggcatatgttgtttctttgtgtttctacatcaaaatgttcgtctaagatttgaactgttctgctgataaccttccccgttgtcatagctatttcattgccaaccaactccatcacatggttgttgatatcgtcatataaagccattgcaaggactctggaaactgccgccaatgaccaatttctgactaaccagccaccttttctctctcttagctccacgtcagcactgagaccagactcgagcacccctgtcctgtaagcgagacaaaatggcgtgtgttattttggggttttgtgttttttggtgggtttctttccttggctctccagatttacttttggggcctgttctaagtgcaaacccagcaagtttcacttgtcctgtccattagatacaactacatcttgcgggggttgtttctttcttgttccacaatgaattgcacatccatctccatcagagctgatagcctgttaataagcactggtctaacacagccaaccctcctccacagcgccatattaatggaggaggggaggaaggtgaaatctactgcatgggattcaggaaacagttgtggttggtcaggacggaagttggggtaagtttggttggtcagagggagttgtgctggagattgtgaaaaatgggttcttgaatgatctactataaggcagggaaggttcatttgtaagtagtaatgtgaactgaattgcattaagagtgtgtggcctttgttgtgatatactatgtattttcttatatgcatgagccaaactgttgcatcataatttagcactgatgtctgcttttattttgatcatctttgtccacccttattagttcttggctgttaaccgtagatagatcttgtaaatccagcaacctttggttgctgcattccccttggttcgattccacgcaaggagccacaagtgagaactccactgtccttagaagaaagggcatttttacttttgaaccaaaaagagaaaaaaaaatcagaagtgttgcatcttgaggcgaattaactgtaagacatttttaattatgactactgcaatttgacaccatttgaaataatcaattcagagacactaaagatttcacaatattcattggtattgtaaaaaaaaaatactattgtatggatttttgtattgctgttaagtattgttttgtgtgtgtgtgtgtgtgtgtgtgttggaacctcctggggacatgttatattttgaagtgattaaactatttaattgtgtgtctatattttggagtggaataatttcttcattaaaaaatgtttttaaaaacactatatcttgggtggtttattcctttgtttcagtgaatctttcctaaagcaacgtggagtcagtctgttgaaagaaggaaggcaggtacttgcagtttaaagcaggacccattgatggaatattgagccaccgaggcaaaatagctcaccttctcttgccttgggggatgcatggtttttaccattctactgttttattagcatctgtgagcatctaatagaaatactattctgctatttatggaaatccttattataattgatatggaagtgagtttgaaattctaacagctaacatatttcatgtttgtatcacacactgttcttaacactttatgtgacttcactcaattctttgaatcctctgcatctagccatgtattctgcaaatattaagtgctcaatggtttttttgttgaattactgaataaatgaattagtggtg

SEQ ID NO: 76615 - DNA, 1359 bp, Artificial Sequence
  derived and/or modified sequence
atgtttcccgaccagcccgagaagcctctgaacctggctcacatcgtgccaccaagacccgttaccagcatgaatgatactctgttttcccactctgttcccagttctggtagtccatttatcactcgccgattgcccgagggtattagtgcaagctcacccgtcgccgaggaacattcgttgatcaaactttatgttaaccagttggaccatggggcccggtcccctcccaaggacagcgaggttgaacagaacaagctgctggcgagagcggctccagctttcctaaaaggcaaggggatccagtatagtctgaacgtcgccgaccgccttgccgatgagcacgtgctgataggcctttacgtcaatatgctcagaaacaacccaagctgcatgctcgagtcctccaatcgactggacgaggagcaccgcctgatcgcccgctatgctgcacgtctagcagccgagtcgagcagcagccagcctccccagcagcgatccgcaccagatataagcttcaccattgatgccaataaacaacagcgacaacttattgccgagcttgagaacaagaacagagaaatcctgcaagagatacagaggctgaggcttgagcacgaacaagccagccaacccacccctgagaaggcacagcagaaccctacactcctcgccgagttacgtctgctccgacaacgcaaagacgagctagaacaaaggatgagcgccctccaagaatccaggcgggaattaatggtgcagctggagggcctcatgaaactgctaaagacccagggggccggtagtccccggtctagtcccagtcacactatttcccggccaatccccatgccaatccggtctgcatctgcatgtagtactcctacgcacactccccaagattctctaaccggggtgggcggcgatgttcaggaagcctttgcacaatcctcacgccggaatctccgtaatgatttgctggtggctgccgactccataacaaacacaatgtccagcctcgttaaggaactgaattctgaagtgggctctgagaccgagtctaacgtggactcagaatttgcaaggacccaatttgaggaccttgtcccgagccccacttccgagaaggcattcctggcacagatccatgcacgcaagccaggttacatccatagtggagctactacatctaccatgaggggggatatggtcacagaagacgccgatccgtacgtgcaacccgaagatgaaaattacgaaaatgacagcgtcaggcagcttgaaaatgaactgcagatggaggagtatctgaagcagaagctccaggacgaggcatatcaggtgagtctgcaggggtag

SEQ ID NO: 76616 - DNA, 1359 bp, Artificial Sequence
  derived and/or modified sequence
atgtttcctgaccagcctgagaagcccctgaacctggcccacatcgtgccccccaggcctgtgacctccatgaatgacaccctcttcagccacagcgtgcccagcagcggcagccccttcatcacccggcggctgcctgagggcatcagcgccagcagccctgtggccgaggagcacagcctcatcaagctgtatgtgaaccagctggaccatggagcccggagcccccccaaggacagcgaggtggagcagaacaagctgctggcccgggccgccccagccttcctgaagggcaagggcatccagtacagcctgaatgtggccgaccggctggctgatgaacatgtgctgattggcctgtatgtgaacatgctgaggaacaaccccagctgcatgctggagagcagcaaccggctggatgaggagcacaggctcatcgcccgctatgctgcccggctggccgctgagagcagcagcagccagcccccccagcagaggtctgccccagacatctccttcaccattgatgccaacaagcagcagaggcagctgattgctgagctggagaacaagaaccgggagatcctgcaggagatccagaggctgcggctggagcacgagcaggccagccagcccaccccagagaaggcccagcagaaccccaccctgctggccgagctgcggctgctgcggcagaggaaggatgagctggagcagaggatgtctgccctgcaggagagccggcgggagctgatggtgcagctggagggcctgatgaagctgctgaagacccagggcgccggcagccccaggagcagccccagccacaccatcagccggcccatccccatgcccatccgcagcgccagcgcctgcagcacccccacccacaccccccaggacagcctgactggagtgggcggagatgtgcaggaggcctttgcccagagcagcagaagaaacctgagaaatgacctgctggtggccgctgacagcatcaccaacaccatgagcagcctggtgaaggagctgaacagcgaggtgggcagcgagacagagagcaatgtggacagcgagtttgcccggacccagtttgaggacctggtgcccagccccaccagcgagaaggccttcctggcccagatccacgccaggaagccaggctacatccacagcggggccaccaccagcaccatgagaggagacatggtgacagaagatgctgacccctacgtgcagccagaagatgaaaattatgaaaatgattctgtgcggcagctggagaatgagctgcagatggaggagtacctgaagcagaagctgcaggatgaggcctaccaggtgtccctgcagggctag

SEQ ID NO: 76617 - DNA, 1359 bp, Artificial Sequence
  derived and/or modified sequence
atgttccccgaccagcccgagaagcccctgaacctggcccacatcgtgcctccacgtccggtgaccagcatgaatgataccctcttcagccattctgttcctagcagtggaagcccgttcatcacgcgacgacttcccgagggtattagcgcctcttcccccgttgcagaggagcactcattaattaaactgtacgtgaatcagttagatcacggtgctcgatctcccccaaaggactctgaggtcgaacagaacaagctcctcgctcgcgctgcgcccgcattccttaaaggaaaaggcatccagtattcattgaacgtggccgatcggctggccgatgagcacgtgctcattggtctctatgtgaatatgctgcgaaataatccctcttgcatgctcgaatcctcaaaccgccttgacgaagagcaccggcttattgcacggtacgccgctcgcctggcagcggagagttcctcatctcagcctccacagcagcggagcgccccagacatctctttcaccatcgacgctaataagcagcagcgtcaattaattgccgagctcgaaaacaaaaatagggaaatcctgcaggagatccagaggctccgcctggagcacgagcaggcctctcagccgacccctgagaaggcccagcagaatcctactcttctcgccgagctccgtttactccgccagcgtaaagacgaacttgagcagaggatgagcgccctccaggagtcccggcgcgagctcatggtgcagctggaaggattgatgaaacttttaaaaacccagggcgcgggaagcccacgctcgtccccctcccatacaatcagcagaccaatccccatgccaattcggagtgcatctgcctgttccacccctacccacaccccacaggactccctcaccggggtcggcggggatgtccaagaagccttcgcgcaatcaagccgcaggaacctgagaaacgacctgctagtcgccgccgattccattacaaacacgatgagctccttggtgaaagaactgaattcagaggtggggtcagaaactgagtccaacgttgactctgagtttgctcgtacccagttcgaggacctggtgccaagtccaacgagcgagaaggctttcctggcgcagattcacgcccggaaaccaggctatattcactccggcgctaccacatcgaccatgcggggagatatggtcacggaggacgcagatccatatgtacagcctgaggacgagaactacgaaaatgactctgtgaggcagctggagaatgagctccagatggaagaatatcttaaacagaaactccaggatgaagcctatcaggtcagtctgcagggatag

SEQ ID NO: 76618 - DNA, 1359 bp, Artificial Sequence
  derived and/or modified sequence
atgtttccagatcagcccgaaaagcccctgaatttggctcatattgtgcctccaagacccgttaccagcatgaatgacaccctgttcagtcacagtgtaccatcaagtgggtccccatttattactcgtcgactaccagagggtatatccgcttcatcacctgtggcggaagagcattctctcataaagctttacgtgaatcaactggaccatggtgccaggtctccacccaaggactcggaggtggagcagaacaaactgttggccagagccgctcctgcttttctaaagggtaaaggaatccagtattccctaaatgtcgctgatcgcctggccgacgagcacgtcctcatcggcctgtacgttaatatgctgagaaacaatcctagttgtatgctggagagttcaaacaggcttgatgaagagcacagactgatcgccaggtacgccgcaagattagccgcagagagttcaagctcacaacctccacagcagcgcagcgcgccagatattagtttcacaatcgacgctaataagcaacagcggcagcttatcgctgaactagaaaacaaaaatagggaaattctccaggagattcagcgattgcgtctggagcacgaacaggcgtcacagccgacccccgagaaagcccagcagaatcctactctactggctgagctgagattgctacgccaaagaaaagacgaactggagcaaagaatgagcgcgctgcaagaatctagacgagaacttatggttcagttagaaggccttatgaagcttctgaaaacgcagggggcaggcagtcccaggtcatcacccagccacacaattagtaggccgattcctatgccaataaggtctgcaagtgcttgttccactcctacccacaccccacaggattctctcactggcgtgggaggggacgtgcaggaggccttcgctcagagttcacgacgcaatttgaggaatgacctgctagttgctgccgactctattacaaacaccatgtcatcactggtgaaagaacttaattccgaggtgggcagcgagactgagtccaacgtagacagcgagttcgctaggactcagttcgaagatttggtgccttcaccgacctcagagaaggcgttcttggctcaaatccacgcgagaaagcccggttatattcactctggcgcaaccacgtccactatgaggggggacatggtcaccgaggatgcggacccgtacgtgcagccggaggacgagaattacgagaatgacagcgtacggcagctggaaaacgagctccagatggaagaatatctaaagcagaagctccaggatgaggcctatcaagtatcactgcaggggtag

SEQ ID NO: 76619 - DNA, 1359 bp, Artificial Sequence
  derived and/or modified sequence
atgttccccgaccagcccgagaagcccctgaacctggcccacatcgtgccccccagacccgtgaccagcatgaacgacaccctgttcagccacagcgtgcccagcagcggcagccccttcatcaccagaagactgcccgagggcatcagcgccagcagccccgtggccgaggagcacagcctgatcaagctgtacgtgaaccagctggaccacggcgccagaagcccccccaaggacagcgaggtggagcagaacaagctgctggccagagccgcccccgccttcctgaagggcaagggcatccagtacagcctgaacgtggccgacagactggccgacgagcacgtgctgatcggcctgtacgtgaacatgctgagaaacaaccccagctgcatgctggagagcagcaacagactggacgaggagcacagactgatcgccagatacgccgccagactggccgccgagagcagcagcagccagcccccccagcagagaagcgcccccgacatcagcttcaccatcgacgccaacaagcagcagagacagctgatcgccgagctggagaacaagaacagagagatcctgcaggagatccagagactgagactggagcacgagcaggccagccagcccacccccgagaaggcccagcagaaccccaccctgctggccgagctgagactgctgagacagagaaaggacgagctggagcagagaatgagcgccctgcaggagagcagaagagagctgatggtgcagctggagggcctgatgaagctgctgaagacccagggcgccggcagccccagaagcagccccagccacaccatcagcagacccatccccatgcccatcagaagcgccagcgcctgcagcacccccacccacaccccccaggacagcctgaccggcgtgggcggcgacgtgcaggaggccttcgcccagagcagcagaagaaacctgagaaacgacctgctggtggccgccgacagcatcaccaacaccatgagcagcctggtgaaggagctgaacagcgaggtgggcagcgagaccgagagcaacgtggacagcgagttcgccagaacccagttcgaggacctggtgcccagccccaccagcgagaaggccttcctggcccagatccacgccagaaagcccggctacatccacagcggcgccaccaccagcaccatgagaggcgacatggtgaccgaggacgccgacccctacgtgcagcccgaggacgagaactacgagaacgacagcgtgagacagctggagaacgagctgcagatggaggagtacctgaagcagaagctgcaggacgaggcctaccaggtgagcctgcagggctag

SEQ ID NO: 76620 - DNA, 1188 bp, Artificial Sequence
  derived and/or modified sequence
atgttcccagaccagccagagaagccacttaatctggcacacatcgtaccaccaagacccgtaacatctatgaatgacaccctgttctcccactctgtcccctccagcgggtccccattcattactcgtaggctgcccgagggcatcagtgcttcctctcctgtcgcagaggaacattccctgataaaactgtacgtcaaccagcttgaccacggtgcacgtatgctggagtcttctaacagactagatgaagaacatcgcctcatcgcaaggtacgctgcacgccttgctgctgaatcatcctcctcacagcccccgcagcaaagatccgcccccgatatttcattcacaattgacgcaaataagcagcagcgccaactgattgcagaactggagaataaaaatcgagagatcctccaagagatccagcggttgcgattagagcatgaacaagccagccagccaactcccgaaaaagcacaacaaaatcccaccctgcttgccgagctccggttgctgcggcagcgaaaagatgaactcgagcaacgcatgtccgccctccaggaatctcgcagagagctgatggtgcagctggaagggttgatgaagctcctcaaaacacaaggcgcggggagcccaaggtcttctcctagccacaccatttccagaccaattcctatgcctatcagatctgcctctgcttgctctactccaactcatactccccaagactcattgacgggggtgggtggggatgtgcaggaggccttcgcacagtcatcacgtcggaatttgcgcaacgacctgcttgtggctgcggactccataactaatactatgagcagccttgtgaaggagctgaactccgaggtgggcagcgaaacagaatccaacgttgattcggagttcgccaggacccaatttgaggatctcgtaccttctccaacatctgaaaaggcttttctggcccagatacacgctagaaagccaggatacatccattctggcgccactacctctaccatgcgaggggatatggtgaccgaagatgccgatccctatgtgcaacccgaagatgagaactacgaaaacgacagcgtacgtcagctggagaatgagttgcaaatggaagagtaccttaagcagaagctacaggacgaggcttaccaggtgtcattgcaaggttag

SEQ ID NO: 76621 - DNA, 1188 bp, Artificial Sequence
  derived and/or modified sequence
atgtttcctgaccagcctgagaagcccctgaacctggcccacatcgtgccccccaggcctgtgacctccatgaatgacaccctcttcagccacagcgtgcccagcagcggcagccccttcatcacccggcggctgcctgagggcatcagcgccagcagccctgtggccgaggagcacagcctcatcaagctgtatgtgaaccagctggaccatggagccaggatgctggagagcagcaaccggctggatgaggagcaccggctgattgcccgctatgctgcccggctggccgctgagagcagcagcagccagcccccccagcagaggtctgccccagacatctccttcaccattgatgccaacaagcagcagaggcagctgattgctgagctggagaacaagaaccgggagatcctgcaggagatccagaggctgcggctggagcacgagcaggccagccagcccaccccagagaaggcccagcagaaccccaccctgctggccgagctgcggctgctgcggcagaggaaggatgagctggagcagaggatgtctgccctgcaggagagcagaagagagctgatggtgcagctggagggcctgatgaagctgctgaagacccagggcgccggcagccccaggagcagccccagccacaccatcagccggcccatccccatgcccatccgcagcgccagcgcctgcagcacccccacccacaccccccaggacagcctgactggagtgggcggagatgtgcaggaggcctttgcccagagcagcagaagaaacctgagaaatgacctgctggtggccgctgacagcatcaccaacaccatgagcagcctggtgaaggagctgaacagcgaggtgggcagcgagacagagagcaatgtggacagcgagtttgcccggacccagtttgaggacctggtgcccagccccaccagcgagaaggccttcctggcccagatccacgccaggaagccaggctacatccacagcggggccaccaccagcaccatgagaggagacatggtgacagaagatgctgacccctacgtgcagccagaagatgagaactatgaaaatgacagcgtgcggcagctggagaatgagctgcagatggaggagtacctgaagcagaagctgcaggatgaggcctaccaggtgtccctgcagggctag

SEQ ID NO: 76622 - DNA, 1188 bp, Artificial Sequence
  derived and/or modified sequence
atgttccccgaccagcccgagaagcccctgaacctggcccacatcgtacccccccggccagtgactagcatgaacgacaccctcttcagccactctgtgcccagtagcggctcaccttttattaccaggagactgcctgaaggaatctctgcttctagcccagtagctgaagagcactctctcattaagttgtatgtcaatcagttagatcatggagctagaatgcttgaatcttccaacaggcttgatgaggaacaccgcctcattgcgcgctacgctgcaagacttgccgccgaaagcagctccagccaaccgccgcaacagcgctcggcacccgacatctcattcactatcgacgctaataaacaacaacgacagcttatcgcggagctggagaataagaaccgggagatcctccaggaaatacagcgcctccggttagaacacgagcaggcctcgcaacctactccagaaaaggcgcagcagaacccaacactcctagcagagctgcgacttctgcggcaaagaaaagacgaattggagcagcgaatgtccgctctccaggaatcgcgcagagagctgatggttcagttggaggggcttatgaaactgctgaagacccaaggcgccggttcaccacgatcttcccctagtcacaccatctctcgccccatcccaatgccgatcaggtccgcttcagcctgctccacccctacccacacaccacaggatagcctgacaggcgtgggcggtgatgtgcaggaggcttttgctcagagtagtaggagaaacttaaggaatgacttgctggtggctgccgattctatcacgaacactatgtctagtctcgtgaaggaactaaacagcgaggttggaagcgaaacagaatccaatgtagactcagagttcgccagaacacaatttgaggacctggtcccaagccccacctccgagaaagcctttctcgcccagatccacgcccgaaagccaggatacattcatagcggcgcgactacttctaccatgcggggggatatggtgaccgaggatgccgatccctatgtccagcccgaggacgagaattatgagaacgactccgtgcggcagctcgagaacgaactgcaaatggaggagtatctgaagcaaaagctgcaggacgaggcttatcaggtgtcactccagggctag

SEQ ID NO: 76623 - DNA, 1188 bp, Artificial Sequence
  derived and/or modified sequence
atgttccccgaccagccagaaaagcccctgaacctggcacatattgtcccacccagaccagtgacttctatgaatgatacactctttagtcacagcgttccctcctcagggtctccttttattacacggaggctgcctgaaggtatatcagcttcatcacctgtagcagaggaacatagtttgatcaagctttatgtaaatcaactggatcatggggctagaatgctggagagctccaatcgactggacgaggaacaccggctcatcgcacggtatgcagcaagactagcggcagagtcatcctcatcacagccccctcagcaaagaagcgccccagacatcagctttacaatagacgccaacaagcaacagaggcaactcatcgccgagcttgagaacaagaatcgcgagattttgcaggagattcagcggctaagactcgaacacgagcaggcctcacagcctaccccggagaaggcccagcagaatccaactctgcttgcagaactgcggctgctccggcaaaggaaagacgagttggaacaacgcatgtccgcactacaggagtccaggagagaactgatggtccagctggaaggtctcatgaagctgttaaagacccagggagctgggagtccaaggagcagcccttcccacaccatctccagaccaattcctatgcccattaggtcagcatctgcatgtagcacccccacacatactcctcaggattcactcaccggcgtggggggtgacgtgcaggaggcattcgctcagagttctcgtcgcaacctgagaaacgatcttctcgtggcagcagatagcataacgaacaccatgagctcactcgttaaggagctgaattccgaagtcggctctgaaacggagagcaacgtcgattccgagtttgcgaggacacagttcgaagatcttgtgccttctccaacaagcgaaaaagcattcctcgcacagatccacgctcgaaagcctggctacattcactctggagctacaaccagcaccatgcggggtgatatggtaaccgaggatgccgatccctatgtccagcccgaggacgaaaactatgagaatgactccgtgagacagctggagaacgaactccagatggaagagtatctgaagcagaagttacaggacgaggcatatcaagtatccttacagggttag

SEQ ID NO: 76624 - DNA, 1188 bp, Artificial Sequence
  derived and/or modified sequence
atgttccccgaccagcccgagaagcccctgaacctggcccacatcgtgccccccagacccgtgaccagcatgaacgacaccctgttcagccacagcgtgcccagcagcggcagccccttcatcaccagaagactgcccgagggcatcagcgccagcagccccgtggccgaggagcacagcctgatcaagctgtacgtgaaccagctggaccacggcgccagaatgctggagagcagcaacagactggacgaggagcacagactgatcgccagatacgccgccagactggccgccgagagcagcagcagccagcccccccagcagagaagcgcccccgacatcagcttcaccatcgacgccaacaagcagcagagacagctgatcgccgagctggagaacaagaacagagagatcctgcaggagatccagagactgagactggagcacgagcaggccagccagcccacccccgagaaggcccagcagaaccccaccctgctggccgagctgagactgctgagacagagaaaggacgagctggagcagagaatgagcgccctgcaggagagcagaagagagctgatggtgcagctggagggcctgatgaagctgctgaagacccagggcgccggcagccccagaagcagccccagccacaccatcagcagacccatccccatgcccatcagaagcgccagcgcctgcagcacccccacccacaccccccaggacagcctgaccggcgtgggcggcgacgtgcaggaggccttcgcccagagcagcagaagaaacctgagaaacgacctgctggtggccgccgacagcatcaccaacaccatgagcagcctggtgaaggagctgaacagcgaggtgggcagcgagaccgagagcaacgtggacagcgagttcgccagaacccagttcgaggacctggtgcccagccccaccagcgagaaggccttcctggcccagatccacgccagaaagcccggctacatccacagcggcgccaccaccagcaccatgagaggcgacatggtgaccgaggacgccgacccctacgtgcagcccgaggacgagaactacgagaacgacagcgtgagacagctggagaacgagctgcagatggaggagtacctgaagcagaagctgcaggacgaggcctaccaggtgagcctgcagggctag

SEQ ID NO: 76625 - DNA, 3492 bp, Artificial Sequence
  derived and/or modified sequence
caggttgctttcagctatgtaacgtttttcgatcccatgagatggaaatcgaccagtgcttgctagagtcccttccccttggccaacggcagcgtctagtgaagcgcatgcgctgtgagcaaatcaaagcctactatgagcgcgagaaggcttttcagaagcaggaagggttcctgaaaaggctgaagcatgcgaagaatccgaaagttcacttcaacctcacggacatgctacaggacgcgattatccaccacaatgacaaagaagtgcttcggctcctgaaggagggggcagacccccacaccctcgtctcctcgggagggtccctgctccatctgtgtgctcggtatgataatgccttcattgcagaaattctgattgacagaggagtcaacgtcaaccaccaggatgaagacttctggacgcccatgcacattgcctgtgcctgcgataaccctgatattgtcctgcttcttgtattagctggagccaatgtccttctccaggatgtgaatggaaatatcccattagattatgctgtagaagggacagaatccagctctatcctgttgacctatctggatgaaaatggagtggatttgacctcactgcgccagatgaagcttcagagaccaatgagtatgttaacagatgtcaaacacttcttatcatctggaggaaatgtcaatgagaaaaacgatgaaggagtaaccctgttacacatggcgtgtgcgagtggctacaaggaggtggtgtctcttatcctggaacatggtggagacctcaacatagtagatgatcagtactggactcccctccacttggcagccaaatatggccagacaaatctggtgaaacttctcctgatgcatcaggcaaacccacacctcgtgaactgtaatgaggagaaggcgtcagatattgctgcctctgagtttattgaggaaatgctgctgaaagccgaaattgcctgggaagaaaaaatgaaagagcctttatctgcttctaccttagctcaagaagagccctatgaagagatcattcacgatcttcccgtactgtcgagtaagctcagtcccctggtgttaccaattgccaagcaagacagtttgttggaaaaagacattatgttcaaagatgcaacaaaaggtctgtgtaagcagcagtctcaggacagcatccctgaaaaccccatgatgagcggttccaccaaacccgagcaggtcaagctaatgcctcctgccccaaacgatgacctggcaacgctcagcgagctcaatgatggcagcctgctctatgagattcagaagcgctttgggaacaatcagatctatacattcattggagacattcttttgcttgttaacccatacaaggagcttccaatttattcttccatggtgtcccagctgtatttcagctcctcagggaagctgtgttcctcgctgcctcctcacctcttctcctgtgtggagagagcctttcaccagctcttccgggaacagcggcctcagtgtttcatcctcagtggagaaaggggatcaggaaagtctgaagccagcaaacaaatcataagacacctcacctgcagggctggcgccagcagggccacactggattccagattcaaacatgtcgtgtgcatcttagaagcctttggacatgccaagaccacacttaatgatttgtccagttgcttcatcaagtattttgaactgcagttctgtgagaggaaacaacagctaaccggagccagaatttatacatatttgctagagaaatccagacttgtttcacaacctcttggccagagcaattttctcattttctacttgttgatggatgggttatctgctgaagaaaaatatggacttcatcttaataatttatgtgcacaccggtatttgaaccagaccatacaggatgatgcatccacaggggagcgttctctgaacagggagaaattggctgttttgaaacgagccctgaatgtagttggcttcagcagcttggaggtggagaatctgttcgtaattctagcagcaatattgcaccttggagacattcggtttactgccctgaatgaggggaactccgccttcgtttctgacctccagctcctggaacaagtggctggaatgttacaagtatcaacagatgaattggcatctgccttaacaactgatattcaatattttaaaggggatatgataatacgacgacataccatacagattgctgagtttttccgagacctcttggccaagtccctgtacagtcgtttgtttagctttttggtgaataccatgaattcttgcctccacagtcaagatgaacagaaaagcatgcagacattggatattggaatattggacatttttggttttgaagagtttcaaaagaatgaatttgaacaactttgtgtcaacatgaccaatgagaagatgcaccactatatcaatgaagtgctttttctccacgagcaagtggaatgtgtacaagagggagttaccatggaaacagcatattctcctggtaaccagaatggagttttggacttttttttccagaagccatctggatttctcaccttattggatgaagaaagtcaaatgatttggtcagtggaatcaaattttccaaaaaaactacaaagtctcctagaatcctcaaacacaaatgcggtgtactcccccatgaaggatgggaatgggaatgttgccctcaaagaccacggtacagccttcaccatcatgcactacgcaggaagggtaatgtatgatgttgttggggcgattgaaaaaaataaagactccctttcacagaatcttctatttgtaatgaaaagaggaaggtgcttctgagcaaaaggacagaatttacaatgtacccttttgtatttatacaggaggtgtcagatttttttttttgtaaagggctagagaataaatattttagaccttgtgcaccataagatccttgttgcagttactcacctctgctgttataatgtgaaaaacagctgtagacaatacaaatggatgtgactgtattctgataaaattttatttacaaaaacaggcagtgggccatgtttggctcaggagccatgattgctcactcactctatcataaaagcaaaatatttgtggttgccatcatgttttatgaatctgtgaaatactttgatgcttgtacatatttattaaaagcaagtgtaattcataaataataatttttatttgcaggtactttgcttatagtatctaattcaattttcgtagcatcaaaaagctcccagttgaggaagatggtgaggtctgttgtagaatgtacacaagcagagctgagtctctgagaccactaaccaggtacagtcagggagcttggagacagctcatagagacacacagcaaatacactcattagtgcctaagattagaagtaaagtctacttcactcaaaaggaggcagaaaaaaaaaaaaaaaaaa

SEQ ID NO: 76626 - DNA, 6874 bp, Artificial Sequence
  derived and/or modified sequence
ctgcgctcggagactttcagtgaaagcagaggagagatttccaaaggttgtattttccttctggttggagcctctcatccacattgtggttgctttcagctatgtaacgtttttcgatcccatgagatggaaatcgaccagtgcttgctagagtcccttccccttggccaacggcagcgtctagtgaagcgcatgcgctgtgagcaaatcaaagcctactatgagcgcgagaaggcttttcagaagcaggaagggttcctgaaaaggctgaagcatgcgaagaatccgaaagttcacttcaacctcacggacatgctacaggacgcgattatccaccacaatgacaaagaagtgcttcggctcctgaaggagggggcagacccccacaccctcgtctcctcgggagggtccctgctccatctgtgtgctcggtatgataatgccttcattgcagaaattctgattgacagaggagtcaacgtcaaccaccaggatgaagacttctggacgcccatgcacattgcctgtgcctgcgataaccctgatattgtcctgcttcttgtattagctggagccaatgtccttctccaggatgtgaatggaaatatcccattagattatgctgtagaagggacagaatccagctctatcctgttgacctatctggatgaaaatggagtggatttgacctcactgcgccagatgaagcttcagagaccaatgagtatgttaacagatgtcaaacacttcttatcatctggaggaaatgtcaatgagaaaaacgatgaaggagtaaccctgttacacatggcgtgtgcgagtggctacaaggaggtggtgtctcttatcctggaacatggtggagacctcaacatagtagatgatcagtactggactcccctccacttggcagccaaatatggccagacaaatctggtgaaacttctcctgatgcatcaggcaaacccacacctcgtgaactgtaatgaggagaaggcgtcagatattgctgcctctgagtttattgaggaaatgctgctgaaagccgaaattgcctgggaagaaaaaatgaaagagcctttatctgcttctaccttagctcaagaagagccctatgaagagatcattcacgatcttcccgtactgtcgagtaagctcagtcccctggtgttaccaattgccaagcaagacagtttgttggaaaaagacattatgttcaaagatgcaacaaaaggtctgtgtaagcagcagtctcaggacagcatccctgaaaaccccatgatgagcggttccaccaaacccgagcaggtcaagctaatgcctcctgccccaaacgatgacctggcaacgctcagcgagctcaatgatggcagcctgctctatgagattcagaagcgctttgggaacaatcagatctatacattcattggagacattcttttgcttgttaacccatacaaggagcttccaatttattcttccatggtgtcccagctgtatttcagctcctcagggaagctgtgttcctcgctgcctcctcacctcttctcctgtgtggagagagcctttcaccagctcttccgggaacagcggcctcagtgtttcatcctcagtggagaaaggggatcaggaaagtctgaagccagcaaacaaatcataagacacctcacctgcagggctggcgccagcagggccacactggattccagattcaaacatgtcgtgtgcatcttagaagcctttggacatgccaagaccacacttaatgatttgtccagttgcttcatcaagtattttgaactgcagttctgtgagaggaaacaacagctaaccggagccagaatttatacatatttgctagagaaatccagacttgtttcacaacctcttggccagagcaattttctcattttctacttgttgatggatgggttatctgctgaagaaaaatatggacttcatcttaataatttatgtgcacaccggtatttgaaccagaccatacaggatgatgcatccacaggggagcgttctctgaacagggagaaattggctgttttgaaacgagccctgaatgtagttggcttcagcagcttggaggtggagaatctgttcgtaattctagcagcaatattgcaccttggagacattcggtttactgccctgaatgaggggaactccgccttcgtttctgacctccagctcctggaacaagtggctggaatgttacaagtatcaacagatgaattggcatctgccttaacaactgatattcaatattttaaaggggatatgataatacgacgacataccatacagattgctgagtttttccgagacctcttggccaagtccctgtacagtcgtttgtttagctttttggtgaataccatgaattcttgcctccacagtcaagatgaacagaaaagcatgcagacattggatattggaatattggacatttttggttttgaagagtttcaaaagaatgaatttgaacaactttgtgtcaacatgaccaatgagaagatgcaccactatatcaatgaagtgctttttctccacgagcaagtggaatgtgtacaagagggagttaccatggaaacagcatattctcctggtaaccagaatggagttttggacttttttttccagaagccatctggatttctcaccttattggatgaagaaagtcaaatgatttggtcagtggaatcaaattttccaaaaaaactacaaagtctcctagaatcctcaaacacaaatgcggtgtactcccccatgaaggatgggaatgggaatgttgccctcaaagaccacggtacagccttcaccatcatgcactacgcaggaagggtaatgtatgatgttgttggggcgattgaaaaaaataaagactccctttcacagaatcttctatttgtaatgaaaactagtgaaaatgtcgtgatcaatcatttgttccagtcgaaattgtcacaaacaggatccctcgtatctgcctatccttcctttaaattccgaggacataagtctgccctgctcagtaagaaaatgacagcttcttcaattattggagaaaacaagaattatctagaacttagtaagttattaaaaaagaaaggaacttctacatttcttcaaagattggaacgaggagatccagtcaccatagcatcacaactcaggaaatcactaatggatattattggaaaacttcagaagtgcactccacacttcattcattgcatcaggcccaataactcaaagctgccagatacttttgataatttttacgtgtctgctcagctacaatatattggggtcctggagatggtgaagatcttccgatatggataccctgttcgcctttccttctcggatttcctgtcaaggtataagccactggctgatacattcctgcgtgagaagaaggaacagtcagctgccgagcgatgtcgacttgttctccagcagtgtaaattacaaggctggcagatgggagtccgaaaagtgtttctaaaatactggcatgctgaccaactcaatgatttgtgcctacagttgcagagaaaaattataacctgccaaaaagttatcagaggatttttagcacgccagcacctgcttcagagaataagcatcagacaacaagaggtgacttctatcaatagctttctgcagaacacagaggacatggggctgaaaacctacgatgccctggtcattcagaatgcttcagacattgcccgggaaaatgaccggctccgtagtgaaatgaacgctccctaccataaagagaagttagaggtcaggaacatgcaagaggaaggaagcaaaagaaccgatgacaagagtggacccaggcatttccaccccagctccatgtcagtctgcgcggccgtggatggcctgggccagtgcctcgttggcccgtccatctggtctccttcgctgcactcggtgttcagcatggatgacagcagcagcctcccgtctccacggaaacagcccccgcccaagccaaagagggaccccaacacccggctgagtgcttcctatgaggctgtgagcgcctgcctctccgcggccagggaagcggccaacgaagctctggcccggcccagaccgcacagcgacgactacagcaccatgaagaagattcctcctcgaaagcccaagcgcagccccaacaccaagctcagcggctcctacgaggagatatcggggtcccggcccggggacgcgaggcccgcgggcgccccgggggcagcagcgcgcgttctgacccccgggactccgcagtgcgcgctgcccccggcggcgcctccgggtgacgaggacgacagcgagcctgtgtacatcgagatgctggggcacgcggccaggcccgatagcccggaccccggggagtccgtgtacgaggagatgaagtgttgcctgcccgacgacggcggcccgggcgcgggctccttcctgctccacggcgcatcgccgcccctgctccaccgcgcgccggaggacgaggcggcggggcccccaggggacgcgtgcgacatcccgccgcccttccccaacctgctgccgcaccggccgcccctgctggtgttccccccgacccccgtcacctgctcccccgcctccgacgagtcgcccctgacacccctggaggtgaagaagctgccagtcctggagaccaacctcaagtaccccgtgcagccggaggggtcgagcccgctgtccccgcagtactccaagagccagaagggcgacggcgacaggcccgcgtcccccggcctggcgctgttcaacgggtccggccgagcctccccgccgtccacgccgcccccgcccccgcccccgcccgggccgccccccgcgccctacaggccctgcgcgcacttggccttcccgccggagcccgccccggtgaacgcggggaaagcggggccgagcgcagaggcgcccaaggttcacccaaagccaaactctgcccccgtggccgggccctgcagctccttccccaagatcccatattcccccgtgaaggccaccagggcggacgccaggaaggccggctccagtgcctcgccccccgcgccctacagccctcccagctccaggcctctcagcagccccctggacgagctcgccagcctcttcaactcggggaggagtgtgcttcggaaatccgcggcgggaagaaaaatcagggaagcagaaggttttgaaactaacatgaacataagtagccgagatgaccctagtacgtcagaaattacttccgagactcaagacagaaatgcaaataaccatggaattcagttatctaattcactatctagtgctataactgctgaaaatggaaattccatctcaaatggtttacctgaagaagatggatactcacggttgtctataagtggcacagggacttcgacatttcaaagacacagggacagtcacaccactcaggtaatccatcagctgaggctctcagagaatgaaagtgtggccctgcaggaactcttggactggaggagaaagctctgtgaggaaggacaagactggcagcagatcctgcaccacgctgagcccagggtgcctcccccaccaccttgcaagaagcccagccttctgaagaagccggaaggggcctcctgcaacaggctgccgtctgagctctgggacaccaccatttgatgtggcctgaactgcagacttacaaaatagaactgcctactgattccgggctgcaacaacagaaggctgccttctgacatgcgctggggcttctctccacgcatttagacaaaaaaagcacaggacacagacactaaatatatgagatcccgtgtgtgtgtgtgtgtgtttgtgtgtgtgtgtgtgggttctttcttatccatctcgtggtgatacactctgattttcaagctcctcatttacggctctgtgctacccctaggtagcaagagagaggctgggaaaagtgtggacgtggccagagcgagagagtagcggaggaaaggagcaatccatgcacactctgtacagttgtttttctacggttcaacagtctgtttattgtacttccaatggttttattataatacagtatacgggacatatattttatttctttgtagctacttgtgttttattggtattataaacctgataattatttacatgtttattactgtaattttataaatttatgcaattggtggtgcttcctttcttcaaaatacagattttaaaaaatcatttctagattatttttttcctccacagtccttttttttcacctaacgcacctaaatcttgaaactacattgttgttttagcttcgccagtgtcaccccttgcaaaactatgaattgagccccatgttttaggtgttactcatggatgaggaggctgttctttcctatgccctgtatttctggataagtggattgtgtaccctttagttaaatttcacctcccgacttcagcatagatcacaggaaatcacatggcacacggttaaacacgtatggcttcaaatccatagccggtggtgtaaaatgatcatattcattcaaaggcctacacagtacaaatgagcacgctgccatgtactggtttgagcagtaggggctgcatcgcacagcgctcgtcccccgggacttacactgcatgattccctcactgtatatcctcaaccctcccataatgcaaggccttgttcattgatgtgctttcgtcggctgtcggaaagttctgagcagtggctccagaccaccttgtcttgctacttggaactttttattcataccagcctttgaaaagttactgtgccaataaagaggtacaactgtgttcttctatt

SEQ ID NO: 76627 - DNA, 6775 bp, Artificial Sequence
  derived and/or modified sequence
caggttgctttcagctatgtaacgtttttcgatcccatgagatggaaatcgaccagtgcttgctagagtcccttccccttggccaacggcagcgtctagtgaagcgcatgcgctgtgagcaaatcaaagcctactatgagcgcgagaaggcttttcagaagcaggaagggttcctgaaaaggctgaagcatgcgaagaatccgaaagttcacttcaacctcacggacatgctacaggacgcgattatccaccacaatgacaaagaagtgcttcggctcctgaaggagggggcagacccccacaccctcgtctcctcgggagggtccctgctccatctgtgtgctcggtatgataatgccttcattgcagaaattctgattgacagaggagtcaacgtcaaccaccaggatgaagacttctggacgcccatgcacattgcctgtgcctgcgataaccctgatattgtcctgcttcttgtattagctggagccaatgtccttctccaggatgtgaatggaaatatcccattagattatgctgtagaagggacagaatccagctctatcctgttgacctatctggatgaaaatggagtggatttgacctcactgcgccagatgaagcttcagagaccaatgagtatgttaacagatgtcaaacacttcttatcatctggaggaaatgtcaatgagaaaaacgatgaaggagtaaccctgttacacatggcgtgtgcgagtggctacaaggaggtggtgtctcttatcctggaacatggtggagacctcaacatagtagatgatcagtactggactcccctccacttggcagccaaatatggccagacaaatctggtgaaacttctcctgatgcatcaggcaaacccacacctcgtgaactgtaatgaggagaaggcgtcagatattgctgcctctgagtttattgaggaaatgctgctgaaagccgaaattgcctgggaagaaaaaatgaaagagcctttatctgcttctaccttagctcaagaagagccctatgaagagatcattcacgatcttcccgtactgtcgagtaagctcagtcccctggtgttaccaattgccaagcaagacagtttgttggaaaaagacattatgttcaaagatgcaacaaaaggtctgtgtaagcagcagtctcaggacagcatccctgaaaaccccatgatgagcggttccaccaaacccgagcaggtcaagctaatgcctcctgccccaaacgatgacctggcaacgctcagcgagctcaatgatggcagcctgctctatgagattcagaagcgctttgggaacaatcagatctatacattcattggagacattcttttgcttgttaacccatacaaggagcttccaatttattcttccatggtgtcccagctgtatttcagctcctcagggaagctgtgttcctcgctgcctcctcacctcttctcctgtgtggagagagcctttcaccagctcttccgggaacagcggcctcagtgtttcatcctcagtggagaaaggggatcaggaaagtctgaagccagcaaacaaatcataagacacctcacctgcagggctggcgccagcagggccacactggattccagattcaaacatgtcgtgtgcatcttagaagcctttggacatgccaagaccacacttaatgatttgtccagttgcttcatcaagtattttgaactgcagttctgtgagaggaaacaacagctaaccggagccagaatttatacatatttgctagagaaatccagacttgtttcacaacctcttggccagagcaattttctcattttctacttgttgatggatgggttatctgctgaagaaaaatatggacttcatcttaataatttatgtgcacaccggtatttgaaccagaccatacaggatgatgcatccacaggggagcgttctctgaacagggagaaattggctgttttgaaacgagccctgaatgtagttggcttcagcagcttggaggtggagaatctgttcgtaattctagcagcaatattgcaccttggagacattcggtttactgccctgaatgaggggaactccgccttcgtttctgacctccagctcctggaacaagtggctggaatgttacaagtatcaacagatgaattggcatctgccttaacaactgatattcaatattttaaaggggatatgataatacgacgacataccatacagattgctgagtttttccgagacctcttggccaagtccctgtacagtcgtttgtttagctttttggtgaataccatgaattcttgcctccacagtcaagatgaacagaaaagcatgcagacattggatattggaatattggacatttttggttttgaagagtttcaaaagaatgaatttgaacaactttgtgtcaacatgaccaatgagaagatgcaccactatatcaatgaagtgctttttctccacgagcaagtggaatgtgtacaagagggagttaccatggaaacagcatattctcctggtaaccagaatggagttttggacttttttttccagaagccatctggatttctcaccttattggatgaagaaagtcaaatgatttggtcagtggaatcaaattttccaaaaaaactacaaagtctcctagaatcctcaaacacaaatgcggtgtactcccccatgaaggatgggaatgggaatgttgccctcaaagaccacggtacagccttcaccatcatgcactacgcaggaagggtaatgtatgatgttgttggggcgattgaaaaaaataaagactccctttcacagaatcttctatttgtaatgaaaactagtgaaaatgtcgtgatcaatcatttgttccagtcgaaattgtcacaaacaggatccctcgtatctgcctatccttcctttaaattccgaggacataagtctgccctgctcagtaagaaaatgacagcttcttcaattattggagaaaacaagaattatctagaacttagtaagttattaaaaaagaaaggaacttctacatttcttcaaagattggaacgaggagatccagtcaccatagcatcacaactcaggaaatcactaatggatattattggaaaacttcagaagtgcactccacacttcattcattgcatcaggcccaataactcaaagctgccagatacttttgataatttttacgtgtctgctcagctacaatatattggggtcctggagatggtgaagatcttccgatatggataccctgttcgcctttccttctcggatttcctgtcaaggtataagccactggctgatacattcctgcgtgagaagaaggaacagtcagctgccgagcgatgtcgacttgttctccagcagtgtaaattacaaggctggcagatgggagtccgaaaagtgtttctaaaatactggcatgctgaccaactcaatgatttgtgcctacagttgcagagaaaaattataacctgccaaaaagttatcagaggatttttagcacgccagcacctgcttcagagaataagcatcagacaacaagaggtgacttctatcaatagctttctgcagaacacagaggacatggggctgaaaacctacgatgccctggtcattcagaatgcttcagacattgcccgggaaaatgaccggctccgtagtgaaatgaacgctccctaccataaagagaagttagaggtcaggaacatgcaagaggaaggaagcaaaagaaccgatgacaagagtggacccaggcatttccaccccagctccatgtcagtctgcgcggccgtggatggcctgggccagtgcctcgttggcccgtccatctggtctccttcgctgcactcggtgttcagcatggatgacagcagcagcctcccgtctccacggaaacagcccccgcccaagccaaagagggaccccaacacccggctgagtgcttcctatgaggctgtgagcgcctgcctctccgcggccagggaagcggccaacgaagctctggcccggcccagaccgcacagcgacgactacagcaccatgaagaagattcctcctcgaaagcccaagcgcagccccaacaccaagctcagcggctcctacgaggagatatcggggtcccggcccggggacgcgaggcccgcgggcgccccgggggcagcagcgcgcgttctgacccccgggactccgcagtgcgcgctgcccccggcggcgcctccgggtgacgaggacgacagcgagcctgtgtacatcgagatgctggggcacgcggccaggcccgatagcccggaccccggggagtccgtgtacgaggagatgaagtgttgcctgcccgacgacggcggcccgggcgcgggctccttcctgctccacggcgcatcgccgcccctgctccaccgcgcgccggaggacgaggcggcggggcccccaggggacgcgtgcgacatcccgccgcccttccccaacctgctgccgcaccggccgcccctgctggtgttccccccgacccccgtcacctgctcccccgcctccgacgagtcgcccctgacacccctggaggtgaagaagctgccagtcctggagaccaacctcaagtaccccgtgcagccggaggggtcgagcccgctgtccccgcagtactccaagagccagaagggcgacggcgacaggcccgcgtcccccggcctggcgctgttcaacgggtccggccgagcctccccgccgtccacgccgcccccgcccccgcccccgcccgggccgccccccgcgccctacaggccctgcgcgcacttggccttcccgccggagcccgccccggtgaacgcggggaaagcggggccgagcgcagaggcgcccaaggttcacccaaagccaaactctgcccccgtggccgggccctgcagctccttccccaagatcccatattcccccgtgaaggccaccagggcggacgccaggaaggccggctccagtgcctcgccccccgcgccctacagccctcccagctccaggcctctcagcagccccctggacgagctcgccagcctcttcaactcggggaggagtgtgcttcggaaatccgcggcgggaagaaaaatcagggaagcagaaggttttgaaactaacatgaacataagtagccgagatgaccctagtacgtcagaaattacttccgagactcaagacagaaatgcaaataaccatggaattcagttatctaattcactatctagtgctataactgctgaaaatggaaattccatctcaaatggtttacctgaagaagatggatactcacggttgtctataagtggcacagggacttcgacatttcaaagacacagggacagtcacaccactcaggtaatccatcagctgaggctctcagagaatgaaagtgtggccctgcaggaactcttggactggaggagaaagctctgtgaggaaggacaagactggcagcagatcctgcaccacgctgagcccagggtgcctcccccaccaccttgcaagaagcccagccttctgaagaagccggaaggggcctcctgcaacaggctgccgtctgagctctgggacaccaccatttgatgtggcctgaactgcagacttacaaaatagaactgcctactgattccgggctgcaacaacagaaggctgccttctgacatgcgctggggcttctctccacgcatttagacaaaaaaagcacaggacacagacactaaatatatgagatcccgtgtgtgtgtgtgtgtgtttgtgtgtgtgtgtgtgggttctttcttatccatctcgtggtgatacactctgattttcaagctcctcatttacggctctgtgctacccctaggtagcaagagagaggctgggaaaagtgtggacgtggccagagcgagagagtagcggaggaaaggagcaatccatgcacactctgtacagttgtttttctacggttcaacagtctgtttattgtacttccaatggttttattataatacagtatacgggacatatattttatttctttgtagctacttgtgttttattggtattataaacctgataattatttacatgtttattactgtaattttataaatttatgcaattggtggtgcttcctttcttcaaaatacagattttaaaaaatcatttctagattatttttttcctccacagtccttttttttcacctaacgcacctaaatcttgaaactacattgttgttttagcttcgccagtgtcaccccttgcaaaactatgaattgagccccatgttttaggtgttactcatggatgaggaggctgttctttcctatgccctgtatttctggataagtggattgtgtaccctttagttaaatttcacctcccgacttcagcatagatcacaggaaatcacatggcacacggttaaacacgtatggcttcaaatccatagccggtggtgtaaaatgatcatattcattcaaaggcctacacagtacaaatgagcacgctgccatgtactggtttgagcagtaggggctgcatcgcacagcgctcgtcccccgggacttacactgcatgattccctcactgtatatcctcaaccctcccataatgcaaggccttgttcattgatgtgctttcgtcggctgtcggaaagttctgagcagtggctccagaccaccttgtcttgctacttggaactttttattcataccagcctttgaaaagttactgtgccaataaagaggtacaac

SEQ ID NO: 76628 - DNA, 2946 bp, Artificial Sequence
  derived and/or modified sequence
ctgcgctcggagactttcagtgaaagcagaggagagatttccaaaggttgtattttccttctggttggagcctctcatccacattgtggttgctttcagctatgtaacgtttttcgatcccatgagatggaaatcgaccagtgcttgctagagtcccttccccttggccaacggcagcgtctagtgaagcgcatgcgctgtgagcaaatcaaagcctactatgagcgcgagaaggcttttcagaagcaggaagggttcctgaaaaggctgaagcatgcgaagaatccgaaagttcacttcaacctcacggacatgctacaggacgcgattatccaccacaatgacaaagaagtgcttcggctcctgaaggagggggcagacccccacaccctcgtctcctcgggagggtccctgctccatctgtgtgctcggtatgataatgccttcattgcagaaattctgattgacagaggagtcaacgtcaaccaccaggatgaagacttctggacgcccatgcacattgcctgtgcctgcgataaccctgatattgtcctgcttcttgtattagctggagccaatgtccttctccaggatgtgaatggaaatatcccattagattatgctgtagaagggacagaatccagctctatcctgttgacctatctggatgaaaatggagtggatttgacctcactgcgccagatgaagcttcagagaccaatgagtatgttaacagatgtcaaacacttcttatcatctggaggaaatgtcaatgagaaaaacgatgaaggagtaaccctgttacacatggcgtgtgcgagtggctacaaggaggtggtgtctcttatcctggaacatggtggagacctcaacatagtagatgatcagtactggactcccctccacttggcagccaaatatggccagacaaatctggtgaaacttctcctgatgcatcaggcaaacccacacctcgtgaactgtaatgaggagaaggcgtcagatattgctgcctctgagtttattgaggaaatgctgctgaaagccgaaattgcctgggaagaaaaaatgaaagagcctttatctgcttctaccttagctcaagaagagccctatgaagagatcattcacgatcttcccgtactgtcgagtaagctcagtcccctggtgttaccaattgccaagcaagacagtttgttggaaaaagacattatgttcaaagatgcaacaaaaggtctgtgtaagcagcagtctcaggacagcatccctgaaaaccccatgatgagcggttccaccaaacccgagcaggtcaagctaatgcctcctgccccaaacgatgacctggcaacgctcagcgagctcaatgatggcagcctgctctatgagattcagaagcgctttgggaacaatcagatctatacattcattggagacattcttttgcttgttaacccatacaaggagcttccaatttattcttccatggtgtcccagctgtatttcagctcctcagggaagctgtgttcctcgctgcctcctcacctcttctcctgtgtggagagagcctttcaccagctcttccgggaacagcggcctcagtgtttcatcctcagtggagaaaggggatcaggaaagtctgaagccagcaaacaaatcataagacacctcacctgcagggctggcgccagcagggccacactggattccagattcaaacatgtcgtgtgcatcttagaagcctttggacatgccaagaccacacttaatgatttgtccagttgcttcatcaagtattttgaactgcagttctgtgagaggaaacaacagctaaccggagccagaatttatacatatttgctagagaaatccagacttgtttcacaacctcttggccagagcaattttctcattttctacttgttgatggatgggttatctgctgaagaaaaatatggacttcatcttaataatttatgtgcacaccggtatttgaaccagaccatacaggatgatgcatccacaggggagcgttctctgaacagggagaaattggctgttttgaaacgagccctgaatgtagttggcttcagcagcttggaggtggagaatctgttcgtaattctagcagcaatattgcaccttggagacattcggtttactgccctgaatgaggggaactccgccttcgtttctgacctccagctcctggaacaagtggctggaatgttacaagtatcaacagatgaattggcatctgccttaacaactgatattcaatattttaaaggggatatgataatacgacgacataccatacagattgctgagtttttccgagacctcttggccaagtccctgtacagtcgtttgtttagctttttggtgaataccatgaattcttgcctccacagtcaagatgaacagaaaagcatgcagacattggatattggaatattggacatttttggttttgaagagtttcaaaagaatgaatttgaacaactttgtgtcaacatgaccaatgagaagatgcaccactatatcaatgaagtgctttttctccacgagcaagtggaatgtgtacaagagggagttaccatggaaacagcatattctcctggtaaccagaatggagttttggacttttttttccagaagccatctggatttctcaccttattggatgaagaaagtcaaatgatttggtcagtggaatcaaattttccaaaaaaactacaaagtctcctagaatcctcaaacacaaatgcggtgtactcccccatgaaggatgggaatgggaatgttgccctcaaagaccacggtacagccttcaccatcatgcactacgcaggaagggtaatgtatgatgttgttggggcgattgaaaaaaataaagactccctttcacagaatcttctatttgtaatgaaaaataggagatgtttt

SEQ ID NO: 76629 - DNA, 2058 bp, Artificial Sequence
  derived and/or modified sequence
atgtggctgaagctgttcttcctgctgctgtacttcctggtgctgttcgtgctggccagattcttcgaggccatcgtgtggtacgagaccggcatcttcgccacccagctggtggaccccgtggccctgagcttcaagaagctgaagaccatcctggagtgcagaggcctgggctacagcggcctgcccgagaagaaggacgtgagagagctggtggagaagagcggcgacctgatggagggcgagctgtacagcgccctgaaggaggaggaggccagcgagagcgtgagcagcaccaacttcagcggcgagatgcacttctacgagctggtggaggacaccaaggacggcatctggctggtgcaggtgatcgccaacgacagaagccccctggtgggcaagatccactgggagaagatggtgaagaaggtgagcagattcggcatcagaaccggcaccttcaactgcagcagcgaccccagatactgcagaagaagaggctgggtgagaagcaccctgatcatgagcgtgccccagaccagcaccagcaagggcaaggtgatgctgaaggagtacagcggcagaaagatcgaggtggagcacatcttcaagtggatcaccgcccacgccgccagcagaatcaagaccatctacaacgccgagcacctgaaggaggagtggaacaagagcgaccagtactggctgaagatctacctgttcgccaacctggaccagccccccgccttcttcagcgccctgagcatcaagttcaccggcagagtggagttcatcttcgtgaacgtggagaactgggacaacaagagctacatgaccgacatcggcatctacaacatgcccagctacatcctgagaacccccgagggcatctacagatacggcaaccacaccggcgagttcatcagcctgcaggccatggacagcttcctgagaagcctgcagcccgaggtgaacgacctgttcgtgctgagcctggtgctggtgaacctgatggcctggatggacctgttcatcacccagggcgccaccatcaagagattcgtggtgctgatcagcaccctgggcacctacaacagcctgctgatcatcagctggctgcccgtgctgggcttcctgcagctgccctacctggacagcttctacgagtacagcctgaagctgctgagatacagcaacaccaccaccctggccagctgggtgagagccgactggatgttctacagcagccaccccgccctgttcctgagcacctacctgggccacggcctgctgatcgactacttcgagaagaagagaagaagaaacaacaacaacgacgaggtgaacgccaacaacctggagtggctgagcagcctgtgggactggtacaccagctacctgttccaccccatcgccagcttccagaacttccccgtggagagcgactgggacgaggaccccgacctgttcctggagagactggccttccccgacctgtggctgcaccccctgatccccaccgactacatcaagaacctgcccatgtggagattcaagtgcctgggcgtgcagagcgaggaggagatgagcgagggcagccaggacaccgagaacgacagcgagagcgagaacaccgacaccctgagcagcgagaaggaggtgttcgaggacaagcagagcgtgctgcacaacagccccggcaccgccagccactgcgacgccgaggcctgcagctgcgccaacaagtactgccagaccagcccctgcgagagaaagggcagaagctacggcagctacaacaccaacgaggacatggagcccgactggctgacctggcccgccgacatgctgcactgcaccgagtgcgtggtgtgcctggagaacttcgagaacggctgcctgctgatgggcctgccctgcggccacgtgttccaccagaactgcatcgtgatgtggctggccggcggcagacactgctgccccgtgtgcagatggcccagctacaagaagaagcagccctacgcccagcaccagcccctgagcaacgacgtgcccagctag

SEQ ID NO: 76630 - DNA, 2058 bp, Artificial Sequence
  derived and/or modified sequence
atgtggttgaagctattctttctgttactctacttccttgtgttgtttgtccttgcccggttcttcgaagcaattgtttggtacgaaacagggattttcgcaacccagctggtggatcctgtggcgttgtcgttcaagaaactgaagacaatcctggagtgtcgcggcctcggctactcaggtttgccagagaaaaaagacgttcgtgaattagtggagaaatccggcgacctgatggagggagaactgtacagcgccctgaaagaagaagaagctagtgaaagcgtgagtagtaccaacttttccggggagatgcatttctatgagcttgttgaggatacgaaagatggcatctggctggtccaggttatcgctaacgacaggtcaccacttgtgggaaaaatccactgggagaaaatggtcaagaaagtaagtagattcggaatcagaacaggtacctttaactgcagctctgacccaagatattgcaggcggaggggttgggtcagatcaacgctgatcatgagcgtaccccaaacatcgacatcaaagggaaaagtgatgctcaaggagtatagcggaaggaaaatcgaggtagagcacatatttaaatggataacagctcacgcagcttcaagaatcaagaccatctacaacgccgaacatctaaaagaagaatggaacaaatcggatcagtattggcttaagatttatttattcgccaacctggatcagccccccgcgttcttctccgcgcttagtatcaagttcaccggccgagtcgaatttattttcgtcaacgttgaaaactgggataacaagagctacatgacagatatcggcatatacaacatgccttcatacattcttagaactccggaaggcatttaccggtatgggaatcatacaggggaattcatttcactgcaggctatggactcattcctgcgcagcctgcagcctgaggtcaacgacctattcgtactaagtcttgttttggtcaatctcatggcctggatggacctgtttattacccagggagctacaataaagagattcgttgtgctaatctctactctcgggacgtataattccttattgattatcagctggttaccagtcctaggctttcttcaactcccttacttggactccttctatgaatatagtttgaaattattgcgctactctaacactaccacattggcatcatgggtgagggctgattggatgttctactcttcacatccagccctattcctgagtacatacttggggcacggtctgctgattgactattttgagaaaaagaggcgtcggaacaacaacaatgacgaggtgaacgccaataatctggaatggcttagctccctgtgggattggtacacctcatacctgtttcaccccatagcgtctttccagaacttccctgtcgaatctgactgggatgaggaccccgatctgtttttggagagactggctttccctgatctgtggttgcaccctctgataccaaccgattacattaaaaacctccctatgtggcggttcaagtgtctgggggtccagtcggaggaagagatgtccgaaggttcccaggacactgaaaacgattccgaaagtgagaacacagacaccctgagtagcgaaaaagaagtctttgaggacaagcagtcagtcctgcacaattcaccagggacagccagccattgcgatgctgaggcctgcagctgcgccaacaagtactgccagaccagtccctgtgaaagaaaggggaggagttacgggagctataatactaacgaagatatggagccagattggctgacttggcccgcagatatgttacactgcaccgagtgtgtggtctgtctggagaattttgaaaatgggtgtcttctcatgggactgccttgtggtcatgtgttccatcagaactgcatagtgatgtggcttgctggaggtaggcactgttgccccgtgtgccgatggccctcctacaagaagaaacagccttatgcacagcaccagccgttgtcgaacgacgttcccagctag

SEQ ID NO: 76631 - DNA, 2058 bp, Artificial Sequence
  derived and/or modified sequence
atgtggctgaagctgttcttcctgctgctgtacttcctggtgctgtttgtgctggcccgcttctttgaggccatcgtgtggtatgagaccggcatctttgccacccagctggtggaccctgtggccctgtccttcaagaagctgaagaccatcctggagtgccggggcctgggctacagcggcctgcctgagaagaaggatgtgcgggagctggtggagaagagcggggacctgatggagggggagctgtacagcgccctgaaggaggaggaggccagcgagagcgtgagcagcaccaacttcagcggggagatgcacttctatgagctggtggaggacaccaaggatggcatctggctggtgcaggtgattgccaatgacaggagccccctggtgggcaagatccactgggagaagatggtgaagaaggtgtccagatttggcatcagaacaggcaccttcaactgcagcagtgacccccgctactgcagaagaagaggctgggtgcgcagcaccctcatcatgtctgtgccccagaccagcaccagcaagggcaaggtgatgctgaaggagtacagcggcaggaagattgaggtggagcacatcttcaagtggatcacagcccacgccgccagccgcatcaagaccatctacaatgctgagcacctgaaggaggagtggaacaagagtgaccagtactggctgaagatctacctgtttgccaacctggaccagcccccagccttcttcagcgccctgagcatcaagttcaccggccgggtggagttcatctttgtgaatgtggagaactgggacaacaagagctacatgacagacatcggcatctacaacatgcccagctacatcctgcggaccccagagggcatctaccgctatggcaaccacactggagagttcatcagcctgcaggccatggacagcttcctgcggagcctgcagcctgaggtgaatgacctgtttgtgctgagcctggtgctggtgaacctgatggcctggatggacctcttcatcacccagggcgccaccatcaagagatttgtggtgctgatcagcaccctgggcacctacaacagcctgctgatcatctcctggctgcctgtgctgggcttcctgcagctgccctacctggacagcttctatgagtacagcctgaagctgctgcgctacagcaacaccaccaccctggcctcctgggtgcgggctgactggatgttctacagcagccacccagccctcttcctgagcacctacctgggccacggcctgctgattgactactttgagaagaagagaagaagaaacaacaacaatgatgaggtgaatgccaacaacctggagtggctgagcagcctgtgggactggtacaccagctacctgttccaccccatcgccagcttccagaacttccctgtggagagtgactgggatgaggaccctgacctcttcctggagcggctggccttcccagacctgtggctgcaccccctcatccccacagactacatcaagaacctgcccatgtggaggttcaagtgcctgggcgtgcagagcgaggaggagatgtctgagggcagccaggacacagaaaatgattctgagagcgagaacacagacaccctgagcagcgagaaggaggtgtttgaggacaagcagagcgtgctgcacaacagccctggaacagccagccactgtgatgctgaggcctgcagctgtgccaacaagtactgccagaccagcccctgtgagaggaagggccgctcctatggcagctacaacaccaatgaagacatggagccagactggctgacctggccagctgacatgctgcactgcacagaatgtgtggtgtgcctggagaactttgaaaatggctgcctgctgatgggcctgccctgtggccacgtgttccaccagaactgcatcgtgatgtggctggccggcggccgccactgctgccctgtgtgccgctggcccagctacaagaagaagcagccctatgcccagcaccagcccctgagcaatgatgtgcccagctag

SEQ ID NO: 76632 - DNA, 2058 bp, Artificial Sequence
  derived and/or modified sequence
atgtggctgaagctgttcttcctgctgctgtacttcctggtgctgtttgtccttgccagatttttcgaggctattgtgtggtatgaaaccgggattttcgcaactcaactggtggatccggttgcactgagcttcaaaaagttgaagactatactggagtgccgcggtctaggatactctggtcttcccgagaagaaggatgtccgcgaactggtggaaaagagtggcgacttaatggaaggcgagttgtatagtgcgctaaaagaagaggaggcgagcgaatctgttagttccacaaattttagcggcgagatgcacttctacgagctggtagaagataccaaggatggtatttggctggtacaggtcattgcgaacgatcgtagtcccctagtggggaaaatacattgggaaaaaatggtgaaaaaggtgtcaaggttcgggatccgcaccggtacctttaattgttcctctgaccctaggtattgtcgccggcggggatgggtgcgctcaacactcattatgtccgtgccgcagacctcaacatccaaggggaaggttatgctgaaggagtactcaggccgcaagattgaggtcgaacacattttcaagtggataactgctcacgctgcctctcgcatcaaaacaatatacaatgctgagcacctcaaagaggagtggaataaatccgaccagtactggctgaaaatctatctcttcgcaaacctggatcagcctcccgcctttttcagtgccctgagtataaaattcaccggccgggtggagtttatcttcgttaacgtggagaattgggacaacaagagctatatgaccgacattggtatctataacatgccatcttatatactgagaacaccagaaggtatttatcgctatggcaatcatacgggagagttcatatctctccaggccatggatagtttcctgagaagcctgcagcccgaggtgaatgatttgtttgtactctccctcgtgctcgttaaccttatggcgtggatggatctatttatcactcaaggtgctaccattaaacgtttcgtggtgctgataagcactctgggcacttacaatagcttattgatcatcagctggctgccagtcctcggttttttacagctcccatacctggacagtttttacgagtattcactgaaacttctccgctattccaacaccactactttggcctcttgggtccgggcggactggatgttctacagcagccatccggccctattcctgagtacatacctcggtcacggcctacttattgattacttcgagaagaaacgccgccgcaacaataataacgatgaggttaacgccaataaccttgaatggctatcatccctgtgggattggtatacatcctacctgttccatccgatcgctagcttccagaattttccagtcgagagcgattgggacgaagatccggacctgtttctggagaggcttgctttcccagatctgtggctgcacccactgattcccacagattacatcaaaaatctgcccatgtggcggttcaagtgcctgggcgtgcagagtgaagaagagatgtctgaagggtctcaagatactgaaaatgacagtgaatcagagaatactgacactctaagcagtgagaaggaggtgtttgaagataaacagagtgtgctgcacaacagccccgggaccgctagccattgcgacgctgaagcatgttcctgcgcaaataaatactgtcaaactagcccatgcgagcgcaagggccgtagctatggttcttacaacacaaatgaagacatggaacccgactggttgacttggccggcagatatgctgcattgtaccgaatgcgtcgtctgcctggaaaacttcgagaacgggtgcctccttatgggcctgccttgcggtcatgtttttcatcagaactgcatcgtcatgtggctggcagggggtagacattgttgccccgtgtgccgctggccctcgtacaagaagaagcagccctacgctcaacaccagccactgagcaacgacgtgccctcttag

SEQ ID NO: 76633 - DNA, 2058 bp, Artificial Sequence
  derived and/or modified sequence
atgtggctgaaactgttttttttgctcctgtatttcctggtgctgttcgtgctcgctcggtttttcgaggccattgtatggtacgagaccggtatattcgccacccagcttgtggaccccgtcgcactatcattcaagaagctgaagaccatcctggagtgccgaggactgggatacagtgggctgcccgagaagaaagacgtgagggaattagtcgaaaaaagcggcgacctgatggaaggagagctgtattccgcgcttaaggaagaggaggcttcagagagcgtctcttccaccaatttctccggcgagatgcatttctacgagctcgtggaggacaccaaagatgggatttggcttgtgcaagtgattgcaaacgaccgcagtcctttggtgggtaagatccactgggagaagatggtgaagaaagtttctcggtttggcattcgcacggggacatttaattgctcatcagatcctcgctattgcaggcggaggggatgggtgagaagcaccctcattatgtctgtcccccagacttcaacctctaagggcaaggtcatgctgaaggaatattctggccgtaagatcgaagtggagcacatctttaagtggattactgcgcacgctgcctctcgcattaaaactatttacaatgcggaacatctcaaggaggagtggaataagagtgatcaatactggctcaagatctacctgtttgcaaaccttgaccaaccccctgcctttttttccgctttgtctatcaagttcaccggcagagtggaattcatctttgtcaacgtggaaaattgggataataaaagctacatgacagatatcggtatttacaacatgcctagttacattcttaggacgccggagggcatataccgttatggcaaccacaccggcgaatttatctcactgcaagctatggactcatttttgaggagcctccagcctgaggtgaacgatttgttcgtgctctcgctcgtgttggttaatctgatggcatggatggacctatttattacccaaggggctactattaagcgcttcgtcgttctgatttcaacacttggcacatataactccctcttgatcatcagctggttgcccgtgcttggttttctgcagctgccttatctggacagtttttacgaatacagcctgaaacttttgagatactctaatacaacaactttggctagttgggttcgggctgattggatgttctactcaagtcacccagccctcttcctgagcacctacctcgggcacgggctgttgattgactacttcgagaagaagcgacggagaaataataataatgatgaagtgaacgccaataacctagaatggctgagtagcctctgggactggtacacctcctatcttttccaccctatcgcatcgtttcagaactttcccgtcgaaagcgactgggatgaggatccggacctattcctggaaaggctagctttccctgacttgtggcttcaccccctgattcccacagactatatcaaaaatctgcctatgtggcgcttcaagtgtctcggtgtccagtctgaggaggagatgagtgaaggcagccaagatacggagaacgactctgagtccgaaaacaccgacactctctctagcgagaaggaggtgttcgaagataaacagagtgtgttgcacaattcccccggtaccgcctcccactgcgatgccgaagcttgttcatgcgctaacaaatactgtcagaccagtccatgtgagcgcaaaggacgctcatacgggtcctacaacaccaatgaagacatggaacccgattggctgacttggccggcagacatgttgcactgtactgaatgtgtagtgtgtcttgaaaactttgagaatggatgcctcctgatgggcctgccatgtggacacgtgtttcaccagaactgcatcgtgatgtggctcgcaggagggagacattgctgtcctgtctgccgctggccatcatacaagaaaaagcagccctacgcccagcatcagcccctcagcaatgatgttccctcatag

SEQ ID NO: 76634 - DNA, 3477 bp, Artificial Sequence
  derived and/or modified sequence
ggctccggccgcggccgccgctgatacacggttgtggagggtacggccgcggtctccggaggtggcgggggtgttggggacgggtgctgcgaccggcactgcccatccgagcgggacgggcgctgagtggccgggaggcagccgggtagccgcctggaggagcagtctcggggcctattattggttttttccctccgagaccgattccatctgcagagaccgcgacgccccatcctgggccgggccgcagtgcccgcccgcctgagaggcgccgcccgccagccggcccgagcgaacctggagccgccgccgtgcccgccgctcttctcgcggagcctgggcggtcggcggggcctggggcctgggcttcgggcgcggcgttgcggcggccgctcctccccgcgcagaacacgctgggccccgggcctggcccggccgagcgccgcgccctcctgacccgcggccgcgggagtccggcccccacggcccctcgggccccggcctgccgcccggatccccgcctcctgggcggatctgagttattttttggtctccccctcccccttgagatcgcggcaccggagggccgaccccgccacctgggtcagtgcccgccccgggggaagcgtccctcgttttgttcttccccgcgagctctccccgcgcccctctcctttctgtgcttaatggatgggggttttgagtttttcccctttatttttgtcggctcttgactgggaggcccggcgcgaggctctgcgtctctgcgtccctcgtcgccgcctcgcgcccgcgcggatcccgtcacctgcttccccgccggggatggccggccagtgacggcgccgggtggcccgcgcgtggacacggggccctcgcccaagctgccaccgagccgcggcccccgccctcgacccttctctctcccgtattccgagctctctggaaagagaggaaactccagggaagatgtggctgaagctttttttcttgctcctctatttcctggtcctgttcgtcctggccaggttttttgaggccattgtgtggtatgaaactggcatctttgccacccagctggtggatccggtggcgctgagcttcaagaagctgaagaccattttggagtgccgggggttgggctactcagggttgcccgagaagaaggatgtccgggagctggtggaaaagtcaggtgacttgatggagggtgagctctattctgctctcaaggaagaagaagcatccgaatcggtttctagtaccaatttcagtggtgaaatgcacttctatgagcttgtggaagacacaaaagatggcatctggctggttcaggtcatagcaaatgacagaagtcccttggtgggcaaaattcactgggagaaaatggttaaaaaggtgtcaagatttggaatacgtacaggcacatttaactgttccagtgatcccagatattgcaggagaagaggctgggtccgatccacactcattatgtctgttccacaaacaagtacttcaaaagggaaagtcatgcttaaagaatacagtggacgcaagattgaagtagagcacatttttaaatggataactgctcatgcagcttctcggatcaaaaccatttataatgctgaacacttgaaagaagaatggaataaaagtgatcagtattggttaaaaatatacctatttgcaaaccttgaccagcccccagctttcttctctgcactaagtataaagtttactggaagagttgagtttatttttgttaatgtagaaaattgggacaacaagagttatatgacagatattggcatatataatatgccatcatacatacttagaactcctgaaggaatttacaggtatggaaaccacacaggcgaatttatatcccttcaggccatggattcatttttgcgctcattacaacccgaggtaaatgatctgtttgttttgagcttggttctagttaatcttatggcttggatggacttatttattacacaaggagctaccataaagcgatttgtggttctcataagcactttagggacatataattctctattaattatttcctggctacctgtgttgggctttttacagctaccttacttagatagcttttatgaatatagcttaaaattgttgagatattccaatacaaccacactggcttcatgggtaagggcagactggatgttttactcttcacacccagccctgtttctcagtacataccttggtcatggtttactaattgattactttgagaagaagagaaggcgcaacaacaacaatgatgaagtcaatgccaataacttagaatggttatcaagtctgtgggactggtacaccagctacctcttccacccgattgcttcttttcagaactttcctgtagaatctgattgggacgaagaccctgacttattcttggagcgcttagctttccctgacctttggcttcaccctctgataccaactgattatattaaaaacttaccaatgtggcgatttaaatgtcttggagtccagtctgaagaggaaatgtcggaggggtctcaagatactgaaaatgactcggaaagtgagaacacagacactttgagtagtgagaaggaagtatttgaagataagcaaagcgtacttcacaattctccaggaacagcaagtcactgtgatgctgaggcttgttcatgtgccaataaatattgtcagaccagcccatgtgaaaggaaggggaggtcatatggatcatataacactaatgaagatatggaacctgattggttaacttggcctgctgatatgctgcactgtactgaatgtgttgtttgcctagagaattttgaaaatggatgtttgctaatggggttgccttgtggtcatgtgtttcatcagaattgcattgtgatgtggttggctgggggccgacattgttgccctgtttgccggtggccttcttataaaaaaaagcagccatatgcacaacaccagcccttgtcaaatgatgtcccatcttaaccatgtgcaatttgtcctttataagctttgagtatcttacagcttgcctttttaatgttagtcacaatgtttttgtggtttgaagtttagtttaatgttagtgcagtgacgggaaatacacattatgctaatgttgatgacagaatttatttggttgccttgtgtgttaattgaatgcatacctaattgtaaaatttttttatttacaacattggaaattcagaagttaatgtttttttgtaagcacaaaagaagtattatagaaatttatcctagcaagactttacaagataggatcaaattctaatggaattgagccggtttcttatcctaaatgtttcctccctttttacaatctctgtccagcacctcttggttaaataatgtatgctgtgagacatgaaattaaaacagacctatgaaataaattattttaaaaccagaagatta

SEQ ID NO: 76635 - protein, 252 aa, Artificial Sequence
  derived and/or modified sequence
MSSEVSARRDAKKLVRSPSGLRMVPEHRAFGSPFGLEEPQWVPDKECRRCMQCDAKFDFLTRKHHCRRCGKCFCDRCCSQKVPLRRMCFVDPVRQCAECALVSLKEAEFYDKQLKVLLSGATFLVTFGNSEKPETMTCRLSNNQRYLFLDGDSHYEIEIVHISTVQILTEGFPPGEKDIHAYTSLRGSQPASEGGNARATGMFLQYTVPGTEGVTQLKLTVVEDVTVGRRQAVAWLVAMHKAAKLLYESRDQ

SEQ ID NO: 76636 - DNA, 759 bp, Artificial Sequence
  derived and/or modified sequence
atgagcagcgaggtgagcgccagaagagacgccaagaagctggtgagaagccccagcggcctgagaatggtgcccgagcacagagccttcggcagccccttcggcctggaggagccccagtgggtgcccgacaaggagtgcagaagatgcatgcagtgcgacgccaagttcgacttcctgaccagaaagcaccactgcagaagatgcggcaagtgcttctgcgacagatgctgcagccagaaggtgcccctgagaagaatgtgcttcgtggaccccgtgagacagtgcgccgagtgcgccctggtgagcctgaaggaggccgagttctacgacaagcagctgaaggtgctgctgagcggcgccaccttcctggtgaccttcggcaacagcgagaagcccgagaccatgacctgcagactgagcaacaaccagagatacctgttcctggacggcgacagccactacgagatcgagatcgtgcacatcagcaccgtgcagatcctgaccgagggcttcccccccggcgagaaggacatccacgcctacaccagcctgagaggcagccagcccgccagcgagggcggcaacgccagagccaccggcatgttcctgcagtacaccgtgcccggcaccgagggcgtgacccagctgaagctgaccgtggtggaggacgtgaccgtgggcagaagacaggccgtggcctggctggtggccatgcacaaggccgccaagctgctgtacgagagcagagaccagtag

SEQ ID NO: 76637 - DNA, 759 bp, Artificial Sequence
  derived and/or modified sequence
atgtcaagtgaagtatcagctcgcagagacgccaaaaaactggtccgaagcccttcaggtctgcgcatggtgcccgagcacagggccttcgggagtcctttcggcctggaggagccacagtgggtccccgacaaagagtgtaggcgctgcatgcagtgcgacgccaaatttgacttccttactagaaagcatcactgtagacggtgcggcaagtgtttctgtgatcgctgttgttcccagaaagtgccccttagacggatgtgtttcgtcgaccccgttcgccaatgtgctgagtgtgctctggtaagcctaaaagaagccgaattttacgacaagcaacttaaggtcctgctgagcggtgccacgtttctggtaacgtttggaaattcagagaaacccgaaacaatgacctgtcgtctttctaataatcagaggtacctgttcctggatggcgactcccactacgaaatagaaattgtgcacatctccacggtgcagattctcacggaggggtttcccccaggagagaaagatattcatgcatatactagcttgagaggatcacagccagcgagcgagggtgggaacgcccgcgccactggcatgttcttacaatataccgtgcccggcaccgagggcgtaacacagttaaagctgactgtagttgaggacgtcaccgtgggcaggcgtcaggctgtggcctggttggtcgccatgcacaaggccgccaagctgctctacgaatctcgagaccagtag

SEQ ID NO: 76638 - DNA, 759 bp, Artificial Sequence
  derived and/or modified sequence
atgagcagcgaggtgtctgccaggagagatgccaagaagctggtgcgcagccccagcggcctgaggatggtgcctgagcaccgggccttcggcagccccttcggcctggaggagccccagtgggtgcctgacaaggagtgccgccgctgcatgcagtgtgatgccaagtttgacttcctgaccaggaagcaccactgcagaagatgtgggaagtgcttctgtgaccgctgctgcagccagaaggtgcccctgcggaggatgtgctttgtggaccctgtgcggcagtgtgccgagtgtgccctggtgtccctgaaggaggccgagttctatgacaagcagctgaaggtgctgctgagcggggccaccttcctggtgacctttggaaacagcgagaagccagagaccatgacctgccgcctgagcaacaaccagcgctacctgttcctggatggagacagccactatgaaattgaaattgtgcacatcagcacagtgcagatcctgacagagggcttccccccaggagagaaggacatccacgcctacaccagcctgcggggcagccagcctgccagcgagggcggcaatgcccgggccaccggcatgttcctgcagtacacagtgcctggaacagaaggagtgacccagctgaagctgactgtggtggaggatgtgacagtgggccggcggcaggccgtggcctggctggtggccatgcacaaggccgccaagctgctgtatgagagccgggaccagtag

SEQ ID NO: 76639 - DNA, 759 bp, Artificial Sequence
  derived and/or modified sequence
atgagcagcgaggtgagcgcccggcgggacgccaagaagctggtgcggtccccttccgggcttcgaatggtcccagagcacagagcctttggaagtcccttcggtctggaggagccgcagtgggtgcccgataaagagtgcaggaggtgtatgcagtgtgacgccaagtttgactttctcacacgcaagcaccactgtcgtaggtgcggaaagtgtttctgcgatagatgctgttcccagaaagtgcctctccgacggatgtgctttgtggatcctgtccggcagtgtgctgaatgtgccctcgtgagcctgaaggaggcagagttctatgataagcagttaaaagtgctgctttctggtgctaccttcttggttaccttcggcaatagtgaaaaacccgagactatgacctgtagattgagcaacaatcagcgctatctgtttctagatggcgactctcactatgagattgagatcgtccacatatctactgtgcagatcctcacagaagggtttcctccaggggagaaggacatacacgcttacacctcattacgcggaagccaaccagcgagcgagggcgggaatgcaagagccacaggcatgtttctgcaatacaccgtgccaggtactgagggagttactcagctgaagctgactgttgtggaggatgtgaccgtgggaaggaggcaggccgtggcctggttggtggccatgcacaaggccgctaagctgctttatgaatcacgggatcagtag

SEQ ID NO: 76640 - DNA, 759 bp, Artificial Sequence
  derived and/or modified sequence
atgtcatcggaggtttcggccagacgggatgcaaagaagttggtgcggtcccccagcggcctaaggatggttcctgaacacagggcctttggcagcccttttggtcttgaggagccccagtgggtgcctgacaaggagtgtcggaggtgcatgcaatgcgatgccaaattcgattttctaacccgtaaacatcactgtcgccgttgcggcaagtgcttctgcgacaggtgctgctcacagaaagtacccttgcggaggatgtgctttgtggaccctgtccgccagtgtgcagaatgcgccctcgtatcactgaaggaggcagagttttatgataaacagttaaaagttttactctcaggggcaacttttctggtaaccttcggcaattccgaaaaacccgaaacgatgacctgtagactcagcaacaaccagagatatctctttttggacggagattcccattatgaaatcgaaattgtgcacatttccaccgtacagattctgacagagggcttcccgccaggagaaaaggacatccacgcttacacaagcttacgcggtagtcaacccgcttccgagggcggaaacgcaagggccaccgggatgttcctccagtatacagtccccggtacagagggcgttacgcagctgaagctgactgtcgtcgaagatgtgaccgtgggtagacggcaagcggtcgcctggctggtcgccatgcacaaggcagccaagttgctatacgagagccgggatcagtag

SEQ ID NO: 76641 - DNA, 1521 bp, Artificial Sequence
  derived and/or modified sequence
gattggacgccggcgctgtcagccgcgcgcggaccggggcggggcgggcggtgccccgggctgggcgaggggccgggtgcggggccgctggccgagaggctgaggcggcgtcatgtcctccgaggtgtccgcgcgccgcgacgccaagaagctggtgcgctccccgagcggcctgcgcatggtgcccgaacaccgcgccttcggaagcccgttcggcctggaggagccgcagtgggtcccggacaaggagtgtcggagatgtatgcagtgtgacgccaagtttgactttctcaccagaaagcaccactgtcgccgctgcgggaagtgcttctgcgacaggtgctgcagccagaaggtgccgctgcggcgcatgtgctttgtggaccccgtgcggcagtgcgcggagtgcgccctcgtgtccctcaaggaggcggagttctacgacaagcagctcaaagtgctcctgagcggagccaccttcctcgtcacgtttggaaactcagagaaacctgaaactatgacttgtcgtctttccaataaccagagatacttgtttctggatggagacagccactatgaaatcgaaattgtacacatttccaccgtgcagatcctcacagaaggcttccctcctggagaaaaagacattcacgcttacaccagcctccgggggagccagcctgcctctgaaggaggcaacgcacgggccacaggcatgttcctgcagtatacagtgccggggacggagggtgtgacccagctgaagctgacagtggtggaggacgtgactgtgggcaggaggcaggcggtggcgtggctagtggccatgcacaaggctgccaagctcctctatgaatctcgggaccagtaactctacgtggggctgagcttggagtacgtgtggtcaccaggactgagtcgcttggaacagcagagcctgctccttgcgtaccacagggattaatcctgcttgtgctgggaaatgcaactcactcatgtatttggagaaacaggagtgttcacttatctagtgcaatatgttcacagtttattaatgctttaaacagcttcatgttttagaatttgtgtattgtcaatacttaattgggggtgggagagactgagctacactactgctaaactatttttagcataatatataccatttttatgagttcgcaggtctactagaaggttctggcccatcaatattcatttcatttaattcttccacagaaccagtttgggcagtaggaactcaggcttctggtctgcagtggagcctgttcgcctctaatagccagtttacagcacttgccttagcctgtttcacagacttgtccacttaccttgtcactaatttggggcttctgggctgtgagtgatcctttgatacttcaccaaggggaacgtgggggctttgtgttttgtacttttcactcactatttcactttattaagatgactgtacagcaatttgtatataaagcttatgattaaaaactattttgaacatacgga

SEQ ID NO: 76642 - protein, 156 aa, Artificial Sequence
  derived and/or modified sequence
MIRSRKAVSKLYASKAHMNSVLMGMKNQLAVLRVAGSLQKSTEVMKAMQSLVKIPEIQATMRELSKEMMKAGIIEEMLEDTFESMDDQEEMEEEAEMEIDRILFEITAGALGKAPSKVTDALPEPEPPGAMAASEDEEEEEEALEAMQSRLATLRS

SEQ ID NO: 76643 - protein, 251 aa, Artificial Sequence
  derived and/or modified sequence
MEGELYSALKEEEASESVSSTNFSGEMHFYELVEDTKDGIWLVQVNEWSLKIRKEMRVVDRQIRDIQREEEKVKRSVKDAAKKGQKDVCIVLAKEMIRSRKAVSKLYASKAHMNSVLMGMKNQLAVLRVAGSLQKSTEVMKAMQSLVKIPEIQATMRELSKEMMKAGIIEEMLEDTFESMDDQEEMEEEAEMEIDRILFEITAGALGKAPSKVTDALPEPEPPGAMAASEDEEEEEEALEAMQSRLATLRS

SEQ ID NO: 76644 - DNA, 756 bp, Artificial Sequence
  derived and/or modified sequence
atggaaggggaactttatagcgccctgaaggaggaagaggcaagcgagtccgtgagttctacaaacttctcgggcgaaatgcatttttatgaattggtcgaagacacaaaggacggaatttggctcgtgcaagttaacgagtggtcactgaagattcgaaaagaaatgagagtggtggaccgacagattagggatatccagagagaggaggagaaagtcaaaaggtcagtaaaggatgctgcgaaaaagggccagaaggatgtttgcatcgtgctcgcaaaggaaatgatacgtagccgaaaggcagtcagcaagttatacgcctccaaggcccacatgaacagtgttttgatgggtatgaaaaaccagttagctgtattaagagtggccgggagcttgcagaaaagcacagaggtaatgaaggcaatgcaaagtctggttaagatacccgaaattcaagcgacgatgagggagctgtccaaagaaatgatgaaggcaggcattatagaggagatgcttgaggacacttttgaatcaatggatgaccaggaggaaatggaagaggaagccgagatggagattgaccgtatcttgttcgagattactgccggggccctcggtaaggccccttccaaggtcacagatgcactgcccgaaccggagcccccgggcgctatggccgcctccgaggatgaggaggaggaagaggaagcgctggaagccatgcaatcgcgacttgccaccctccggtcctag

SEQ ID NO: 76645 - DNA, 756 bp, Artificial Sequence
  derived and/or modified sequence
atggagggggagctgtacagcgccctgaaggaggaggaggccagcgagagcgtgagcagcaccaacttcagcggggagatgcacttctatgagctggtggaggacaccaaggatggcatctggctggtgcaggtgaatgagtggagcctgaagatcaggaaggagatgagggtggtggaccggcagatccgggacatccagcgggaggaggagaaggtgaagaggtctgtgaaggatgctgccaagaagggccagaaggatgtgtgcatcgtgctggccaaggagatgatccgcagcaggaaggctgtgtccaagctgtatgccagcaaggcccacatgaacagcgtgctgatgggcatgaagaaccagctggccgtgctgcgggtggccggcagcctgcagaagagcacagaggtgatgaaggccatgcagagcctggtgaagatccctgagatccaggccaccatgagggagctgagcaaggagatgatgaaggccggcatcatcgaggagatgctggaggacacctttgagagcatggatgaccaggaggagatggaggaggaggccgagatggagattgaccgcatcctgtttgagatcacagctggggccctgggcaaggcccccagcaaggtgacagatgccctgcctgagcctgagcccccaggggccatggccgcctctgaagatgaggaggaggaggaggaggccctggaggccatgcagagccggctggccaccctgcggagctag

SEQ ID NO: 76646 - DNA, 756 bp, Artificial Sequence
  derived and/or modified sequence
atggagggcgagctgtacagcgccctgaaggaggaggaggccagcgaaagcgtgagctccactaacttctccggggagatgcacttctacgagctggttgaggacaccaaagacggtatctggctcgtacaggtgaacgagtggagtctaaaaattcgaaaagagatgcgtgtagttgaccgacagattagggatatacagcgagaagaggaaaaagtcaaaaggagcgtgaaggatgcggccaaaaagggacagaaggacgtgtgtattgtccttgccaaggagatgattaggtccaggaaagccgtaagcaaattatatgcctcaaaagctcatatgaactcggtgctgatgggcatgaaaaaccaattagccgttctgcgggtggctggttctctacagaaatcaactgaagtaatgaaggcgatgcagtcgctcgtaaaaattcctgagattcaggctactatgcgggagctgtcaaaggagatgatgaaggctggaataatcgaggagatgttggaggatactttcgagtctatggatgaccaggaggagatggaggaggaggccgaaatggagatcgatcggatccttttcgaaatcacagctggggcactgggcaaagcgcctagcaaagttacggatgcattgcctgagcccgaacctccaggagctatggccgcttcggaagatgaggaggaagaggaagaagcactggaagccatgcagtctcggctggcgactctgcgcagttag

SEQ ID NO: 76647 - DNA, 756 bp, Artificial Sequence
  derived and/or modified sequence
atggagggcgaactttattctgcactgaaggaagaggaagcctccgagagcgtttccagcaccaactttagcggcgaaatgcatttctatgaactggttgaagatacaaaggatggcatttggctggtgcaggtaaatgagtggtcactgaaaataaggaaggagatgcgggtggtggaccggcagattcgagatattcagagagaggaagagaaggtgaaacgctcagttaaggacgctgccaaaaaaggacagaaagatgtttgtatcgtgctcgccaaagagatgattagatcacgcaaggcggtaagcaagctgtacgccagtaaagcacacatgaattcagtcctgatggggatgaaaaaccagctggcagtactgagggtcgccggatctcttcagaagtccacggaggttatgaaggccatgcagtctctggtgaagattcccgagatccaggccaccatgagggaactgtctaaggaaatgatgaaagccggaatcatcgaggagatgcttgaagacacattcgagtcaatggatgaccaggaggagatggaagaggaagccgagatggaaatcgaccggatacttttcgaaattactgccggtgccctcggcaaggcacctagcaaagttactgacgcactccccgaacccgagccccctggcgcaatggcagcgtctgaggacgaagaggaggaagaggaggcactggaggccatgcagtcccggctggctaccctcaggtcttag

SEQ ID NO: 76648 - DNA, 1135 bp, Artificial Sequence
  derived and/or modified sequence
actcgggggtcggcagtttgcaggtgcgatgggcggccccctcacccacgtttatccggactggagcccgccgctcccggctgggtttccgggtggttcgcgctccttctgaattggcagcgaggtcgcggcaggttcgaggctttgacaccagcacctctctatgaagaaaagagtgtgttgtgaacgaagtcagaatttcctgtgttccctttgccgctcctggagttcactggtgacttgatggagggtgagctctattctgctctcaaggaagaagaagcatccgaatcggtttctagtaccaatttcagtggtgaaatgcacttctatgagcttgtggaagacacaaaagatggcatctggctggttcaggtcaatgagtggtcattgaagataagaaaggaaatgagagttgttgacaggcaaataagggatatccaaagagaagaagaaaaagtgaaacgatctgtgaaagatgctgccaagaagggccagaaggatgtctgcatagttctggccaaggagatgatcaggtcaaggaaggctgtgagcaagctgtatgcatccaaagcacacatgaactcagtgctcatggggatgaagaaccagctcgcggtcttgcgagtggctggttccctgcagaagagcacagaagtgatgaaggccatgcaaagtcttgtgaagattccagagattcaggccaccatgagggagttgtccaaagaaatgatgaaggctgggatcatagaggagatgttagaggacacttttgaaagcatggacgatcaggaagaaatggaggaagaagcagaaatggaaattgacagaattctctttgaaattacagcaggggccttgggcaaagcacccagtaaagtgactgatgcccttccagagccagaacctccaggagcgatggctgcctcagaggatgaggaggaggaggaagaggctctggaggccatgcagtcccggctggccacactccgcagctaggggctgcctaccccgctgggtgtgcacacactcctctcaagagctgccattttatgtgtctcttgcactacacctctgttgtgaggactaccattttggagaaggttctgtttgtctcttttcattctctgcccag

SEQ ID NO: 76649 - DNA, 756 bp, Artificial Sequence
  derived and/or modified sequence
atggagggcgagctgtacagcgccctgaaggaggaggaggccagcgagagcgtgagcagcaccaacttcagcggcgagatgcacttctacgagctggtggaggacaccaaggacggcatctggctggtgcaggtgaacgagtggagcctgaagatcagaaaggagatgagagtggtggacagacagatcagagacatccagagagaggaggagaaggtgaagagaagcgtgaaggacgccgccaagaagggccagaaggacgtgtgcatcgtgctggccaaggagatgatcagaagcagaaaggccgtgagcaagctgtacgccagcaaggcccacatgaacagcgtgctgatgggcatgaagaaccagctggccgtgctgagagtggccggcagcctgcagaagagcaccgaggtgatgaaggccatgcagagcctggtgaagatccccgagatccaggccaccatgagagagctgagcaaggagatgatgaaggccggcatcatcgaggagatgctggaggacaccttcgagagcatggacgaccaggaggagatggaggaggaggccgagatggagatcgacagaatcctgttcgagatcaccgccggcgccctgggcaaggcccccagcaaggtgaccgacgccctgcccgagcccgagccccccggcgccatggccgccagcgaggacgaggaggaggaggaggaggccctggaggccatgcagagcagactggccaccctgagaagctag

SEQ ID NO: 76650 - protein, 951 aa, Artificial Sequence
  derived and/or modified sequence
MSRGGSYPHLLWDVRKRSLGLEDPSRLRSRYLGRREFIQRLKLEATLNVHDGCVNTICWNDTGEYILSGSDDTKLVISNPYSRKVLTTIRSGHRANIFSAKFLPCTNDKQIVSCSGDGVIFYTNVEQDAETNRQCQFTCHYGTTYEIMTVPNDPYTFLSCGEDGTVRWFDTRIKTSCTKEDCKDDILINCRRAATSVAICPPIPYYLAVGCSDSSVRIYDRRMLGTRATGNYAGRGTTGMVARFIPSHLNNKSCRVTSLCYSEDGQEILVSYSSDYIYLFDPKDDTARELKTPSAEERREELRQPPVKRLRLRGDWSDTGPRARPESERERDGEQSPNVSLMQRMSDMLSRWFEEASEVAQSNRGRGRSRPRGGTSQSDISTLPTVPSSPDLEVSETAMEVDTPAEQFLQPSTSSTMSAQAHSTSSPTESPHSTPLLSSPDSEQRQSVEASGHHTHHQSEFLRGPEIALLRKRLQQLRLKKAEQQRQQELAAHTQQQPSTSDQSSHEGSSQDPHASDSPSSVVNKQLGSMSLDEQQDNNNEKLSPKPGTGEPVLSLHYSTEGTTTSTIKLNFTDEWSSIASSSRGIGSHCKSEGQEESFVPQSSVQPPEGDSETKAPEESSEDVTKYQEGVSAENPVENHINITQSDKFTAKPLDSNSGERNDLNLDRSCGVPEESASSEKAKEPETSDQTSTESATNENNTNPEPQFQTEATGPSAHEETSTRDSALQDTDDSDDDPVLIPGARYRAGPGDRFNIRGTTIGDRIMRRSAVARIQEFFRRRKERKEMEELDTLNIRRPLVKMVYKGHRNSRTMIKEANFWGANFVMSGSDCGHIFIWDRHTAEHLMLLEADNHVVNCLQPHPFDPILASSGIDYDIKIWSPLEESRIFNRKLADEVITRNELMLEETRNTITVPASFMLRMLASLNHIRADRLEGDRSEGSGQENENEDEE

SEQ ID NO: 76651 - DNA, 2856 bp, Artificial Sequence
  derived and/or modified sequence
atgagcagagggggcagctacccgcatttactttgggatgtccgtaaaaggtctctgggactggaggatcccagtcgattgcgctctcgatatttgggccgccgggaattcattcagcgactgaagctcgaggctaccctcaacgttcatgacggctgcgtgaatacaatatgttggaacgatacgggcgaatatatcttaagcggcagtgacgatacaaaactcgtgatctcaaacccctatagccgcaaggtgctgacaaccatccggtcaggccacagggctaatatcttctcggcaaagttcctgccctgcaccaatgacaagcagatcgtgtcttgcagtggcgacggcgtgatcttttacaccaacgtcgaacaagatgccgaaacaaaccggcagtgccagtttacctgccactacggcacgacttatgagatcatgacggtaccgaatgacccctatactttcctcagctgtggggaggatggaacagttaggtggttcgacactcgtataaagacatcatgcactaaggaggattgtaaagatgacatcctgattaactgtcgccgcgccgctacctccgttgcaatctgtcctccaattccctactatcttgccgtggggtgctcagattcctctgtgcggatttacgaccgcaggatgctggggacacgggccactggcaactacgcaggccgcggtactacaggaatggtggccagatttatcccatctcacctgaataataagtcttgccgggtaacttctctctgttatagtgaagacggtcaagagattctggtctcttacagctcggactacatctatctgttcgatccaaaagacgatactgccagagagctcaagaccccctccgccgaggagcgtagagaggagctcagacagcctccagtgaaacgcctgcgactacgaggggactggagtgataccggacccagagcccggccagagtccgagcgggagcgggacggagagcaatcccccaacgtctccctgatgcagagaatgtccgatatgctaagtcggtggttcgaggaagcctctgaggtggctcagagcaatcgggggcgggggcgcagtcggccccgaggcggaacgagtcaatctgacatatccacactccctactgtgccttcgtcccctgaccttgaagtgagtgaaactgccatggaggtcgatacaccggctgagcagtttctgcaaccgagcacatcttctactatgtccgcccaggcacatagtactagttcccccaccgaatccccccattctacacccctgctttcttccccagatagcgagcaaaggcagtcagttgaggcgagcggtcaccatactcatcaccagtccgagttcctcaggggaccggagatcgccctgctacgtaaaaggctgcagcagttacgcctgaagaaggccgagcaacaacggcagcaagaattagccgcgcatacccagcagcaacctagtacttctgatcagtcttctcacgagggttcctctcaggatccccatgccagcgattcaccaagctcggtcgtgaataaacagctggggagcatgtccctggacgagcaacaggacaacaataacgaaaagttgagccccaagcctggcactggagagcctgtcttgagtctgcactactccaccgaaggtaccaccacatctaccatcaaactcaacttcaccgacgaatggtctagcattgcctctagttctagaggtatagggtcacactgtaagtcagagggacaggaagagtcgtttgtgccacagagtagcgtccaacctcctgaaggcgatagcgagaccaaggctcctgaagagtcctcggaagatgtcactaagtaccaggagggagtttctgcagaaaacccagtcgagaaccacattaatattactcaatcagacaaattcacggccaagcctctcgatagtaattccggtgagaggaacgatctgaacttggatcgcagttgtggggtgcctgaggagagtgctagcagcgaaaaggccaaagagcctgagacttctgaccagacctccactgagtccgcgactaatgaaaacaacacaaaccccgagcctcagtttcagacagaggcgaccggcccttccgctcatgaggagacaagtacacgggacagtgctttgcaggatacagacgatagcgatgatgatccggttcttattcctggcgctcgctaccgagccggccccggtgatcgttttaatattcgcggcactacaattggcgaccggataatgcgcagatcagcagttgcgagaatacaggaattcttccgtagaagaaaagagcgcaaagaaatggaagaactggatacactaaatatccggcgccctctggtaaagatggtgtacaagggacacagaaattcacgcactatgattaaggaagccaacttctggggtgccaacttcgtcatgtctggtagtgattgcggccacatctttatttgggatcggcacacagccgaacacctcatgcttctggaggctgataatcatgtagtcaactgcttgcagcctcacccgtttgatcctatcctggcttcttctggcatcgactatgatattaagatctggagccctttggaagaatcaaggatctttaacagaaaactggccgatgaagttataacgagaaatgaactcatgcttgaagaaacccggaacacaatcacagtccccgctagctttatgttacgaatgctcgctagcctcaatcacataagggctgacaggttagagggggaccgctctgaggggtccggtcaagagaatgagaacgaggacgaagagtag

SEQ ID NO: 76652 - DNA, 2856 bp, Artificial Sequence
  derived and/or modified sequence
atgagccggggcggcagctacccccacctgctgtgggatgtgaggaagaggagcctgggcctggaggaccccagccggctgcggagccgctacctgggccggcgggagttcatccagaggctgaagctggaggccaccctgaatgtgcatgatggctgtgtgaacaccatctgctggaatgacaccggggagtacatcctgagcggcagtgatgacaccaagctggtgatcagcaacccctacagcaggaaggtgctgaccaccatccgcagcggccaccgggccaacatcttcagcgccaagttcctgccctgcaccaatgacaagcagatcgtgtcctgcagcggagatggagtcatcttctacaccaacgtggagcaggatgctgagaccaaccggcagtgccagttcacctgccactacggcaccacctatgagatcatgacagtgcccaatgacccctacaccttcctgagctgtggggaggatggcaccgtgcgctggtttgacacccgcatcaagaccagctgcaccaaggaggactgcaaggatgacatcctgatcaactgcagaagagctgccacctctgtggccatctgcccccccatcccctactacctggccgtgggctgcagcgacagctctgtgcgcatctatgacaggaggatgctgggcacccgggccactggaaattatgccggccggggcaccaccggcatggtggcccgcttcatccccagccacctgaacaacaagagctgccgggtgaccagcctgtgctacagtgaagatggccaggagatcctggtgtcctacagcagtgactacatctacctgtttgaccccaaggatgacacagcccgggagctgaagacccccagcgctgaggagcggcgggaggagctgcggcagccccctgtgaagaggctgcggctgcggggggactggagcgacaccggcccccgggcccggcctgagagcgagcgggagagagatggagagcagagccccaacgtgtccctgatgcagaggatgtctgacatgctgagccgctggtttgaggaggccagcgaggtggcccagagcaacagaggccggggccgcagccggccccggggcggcaccagccagagcgacatcagcaccctgcccaccgtgcccagcagcccagacctggaggtgtctgaaacagccatggaggtggacaccccagctgagcagttcctgcagcccagcaccagcagcaccatgtctgcccaggcccacagcaccagcagccccacagagagcccccacagcacccccctgctgagcagcccagacagcgagcagaggcagagcgtggaggccagcggccaccacacccaccaccagagcgagttcctgcggggccctgagatcgccctgctgaggaagaggctgcagcagctgcggctgaagaaggccgagcagcagaggcagcaggagctggccgcccacacccagcagcagcccagcaccagtgaccagagcagccatgagggcagcagccaggacccccacgccagtgacagccccagctctgtggtgaacaagcagctgggctccatgagcctggatgagcagcaggacaacaacaatgagaagctgagccccaagccaggcactggagagcctgtgctgagcctgcactacagcacagagggcaccaccaccagcaccatcaagctgaacttcacagatgagtggagcagcatcgccagcagcagccggggcatcggcagccactgcaagtctgagggccaggaggagagctttgtgccccagagctctgtgcagcccccagagggggacagcgagaccaaggcccctgaggagagcagtgaagatgtgaccaagtaccaggagggcgtgtctgctgagaaccctgtggagaaccacatcaacatcacccagagcgacaagttcaccgccaagcccctggacagcaacagcggggagagaaatgacctgaacctggacaggagctgtggggtgcctgaggagagcgccagcagcgagaaggccaaggagcctgagaccagtgaccagaccagcacagaaagtgccaccaatgaaaacaacaccaaccctgagccccagttccagacagaggccaccggccccagcgcccacgaggagaccagcacccgggacagcgccctgcaggacacagatgacagtgatgatgatcctgtgctgatccctggggcccgctaccgggccggccctggggaccgcttcaacatccggggcaccaccatcggggaccgcatcatgagaagatctgctgtggcccgcatccaggagttcttcagaagaaggaaggagaggaaggagatggaggagctggacaccctgaacatccggcggcccctggtgaagatggtgtacaagggccacaggaacagcaggaccatgatcaaggaggccaacttctggggcgccaactttgtgatgagcggcagtgactgtggccacatcttcatctgggacagacacacagctgagcacctgatgctgctggaggccgacaaccacgtggtgaactgcctgcagccccacccctttgaccccatcctggccagcagcggcatcgactatgacatcaagatctggagccccctggaggagagccgcatcttcaacaggaagctggctgatgaggtgatcaccagaaatgagctgatgctggaggagaccaggaacaccatcaccgtgcctgccagcttcatgctgaggatgctggccagcctgaaccacatccgggctgaccggctggagggggacagaagtgagggcagcggccaggagaatgaaaatgaagatgaggagtag

SEQ ID NO: 76653 - DNA, 2856 bp, Artificial Sequence
  derived and/or modified sequence
atgagccggggcggcagctacccccacctgctgtgggacgtgcggaagaggtcgttaggcctggaggatcccagtcgcctccgctctagatatctaggtcggcgggagtttattcaaaggttgaaacttgaagctactctgaatgtgcatgatggctgcgtgaatactatttgctggaacgataccggtgaatacatcctctcaggttccgatgacactaaactagtgatttccaatccctattcacgaaaagtactcaccactataagatctggtcacagggccaacatcttctcagcgaaattcttgccatgcacaaacgataagcagattgtctcttgctcaggtgatggcgtcatattctatactaacgtggagcaggacgcagaaaccaaccggcagtgtcagttcacatgtcattacggcacaacatatgagatcatgacagtgcctaacgacccgtatacgttcctgtcttgtggtgaggatggaacagttcgctggttcgatacgcggattaagacgtcttgtacaaaggaggattgtaaggacgacatactgataaactgtcggcgcgctgctacatctgtcgccatctgcccacccatcccgtattatctggctgtcggatgttccgatagctccgtgcgaatttacgatagacgaatgctgggcacgagggcgactggcaattacgccggcaggggaactaccggcatggttgctcgcttcattcctagtcatctgaataacaaatcctgccgggtcacttccttatgctactcagaggacggtcaagagattttggtgagctactcctctgattatatttacctgttcgacccgaaggacgacacggcccgggagctcaagacccccagtgccgaggagcgcagagaggagctgcgccagccccctgtgaaacgtctgcggctaagaggcgactggtctgacacaggccctcgggctaggcccgagtctgagcgtgaacgcgacggcgaacaaagcccaaacgtctccctgatgcaacggatgtccgacatgctgtcccggtggttcgaagaggcttcagaagtggcccaatctaaccggggccgtggaaggtcccgccccagaggcgggactagccagtctgacatcagtacactccccactgtaccatcctcacccgatctcgaggtgtctgaaacagctatggaagtggacacccctgctgaacagtttctgcagccctctacatcctccacaatgtccgcgcaggctcactctacctccagccctacagagagcccccattctacccccctgctctctagtcctgactccgagcagcgccaaagtgtggaagcatcaggtcaccatacccaccaccaaagcgaattcttgcgcgggccagaaattgcgctactgagaaagcgactccaacagctgcgcttgaagaaagccgaacagcagcgccagcaagagcttgccgcccatacacaacagcagccctctacctctgatcagagttcccatgagggaagttcccaggacccacacgcatctgacagtccatcaagcgtggtcaataaacaactggggtcaatgtctctggatgagcagcaagacaacaataacgagaagctgtctccaaaaccgggaaccggggagccagtgctatcactccactattccacagaagggactacaacatccaccatcaagctaaactttactgacgagtggtcctcaatcgctagttcctcaaggggtattgggagtcactgcaaatcagagggccaggaggagtccttcgttccccaaagcagcgttcaacctcccgagggcgattccgaaacaaaagccccagaggagtcttctgaggacgtaacaaaataccaggagggagtcagcgccgagaaccctgtggagaaccatataaacatcactcaatcagataagtttacagctaagccacttgatagcaacagtggtgagcgcaatgaccttaaccttgatcgaagctgcggagtcccagaggaatcagccagttctgaaaaggccaaagagcccgaaactagtgaccagacctcaactgagtccgccacgaacgagaataacacaaaccccgagccgcagttccaaactgaggccacaggtccctcggcacacgaagaaacttccacgagggactctgctctccaagacacagacgactctgacgacgacccggtgctcatacccggcgcaaggtatagagctgggccaggtgacaggtttaatatccgaggcactaccatcggcgatcggatcatgagaaggagcgccgtcgctcgcattcaggagttcttcaggcgacgaaaggaacgcaaggagatggaagaacttgacactttgaatatcagaaggcctcttgtgaaaatggtctacaaagggcaccggaactctaggaccatgattaaggaggctaacttttggggggctaactttgtgatgtccggaagtgattgcggacatatctttatctgggatcgtcataccgccgagcacctgatgctcctggaagctgataaccacgtggtgaattgcctacagcctcatcctttcgaccctatcctcgcgtcctccgggattgattacgatattaaaatttggagccctttggaagaatcccgcatctttaatcgcaagctcgcggacgaagtaatcaccagaaatgaactgatgctagaagagaccaggaatacaatcacagtgcccgcttcattcatgctgagaatgctagcttcactgaatcatattcgcgcggacagactggaaggtgacaggagtgaaggctctggtcaggagaatgagaacgaagacgaagaatag

SEQ ID NO: 76654 - DNA, 2856 bp, Artificial Sequence
  derived and/or modified sequence
atgagccgaggaggctcctacccccatctactttgggatgttagaaagagaagcttgggcctggaggacccatccagattgcgatcccgataccttgggagaagagaatttatccagaggctgaagcttgaagccactctgaatgtgcacgatggttgtgtgaacacaatctgctggaatgatacaggggagtatattctttccgggtctgacgacacaaagttggtaatcagtaatccctactcccgcaaggtgctcacaactatccgttccggacacagagccaacatttttagtgctaagtttctgccttgcacaaatgataaacaaatcgtctcttgtagtggcgacggggtcattttctatactaatgtggaacaggatgccgagactaatagacagtgccaattcacatgccattatggaactacctacgaaataatgactgtgcctaatgacccttacacgtttctgtcatgcggagaagacggtacggtccggtggttcgacaccaggatcaagacctcgtgcacgaaagaagactgcaaagacgatatcctgatcaactgcagaagggccgcaacttcggttgctatctgtccaccaattccatattatcttgccgtcggctgttctgacagttccgtgcgcatctacgataggcgaatgctcggaacccgtgccacgggcaactatgcaggacggggaaccactgggatggtggcacggttcattccttcccatctgaataataagtcatgcagagtcacaagtctttgctatagtgaggacggccaggaaatcctagtgagctacagtagcgactacatttacctttttgatcccaaagacgatacggccagagagctgaaaaccccttccgccgaggaacgtcgtgaagaactgaggcagcctcccgtcaagagactgcgtctaaggggtgactggagcgacactgggcctagagccaggcccgagtccgaaagggagagagacggggaacaatcaccgaatgtcagtctgatgcaaagaatgtcggacatgctttcaagatggttcgaagaggcctccgaggtagctcagtctaatcgcggacggggtcggtccaggcccaggggcggtacatcacagtccgatatttcgacactgcctaccgtgcccagcagtcctgacttagaagtctcagaaaccgccatggaggttgacacccctgctgagcagttcctgcaaccatccacttcatctactatgtcggcccaggcccatagcacatcctctccgacggagtctccacactctaccccattgttgtcttcgcctgactccgaacagcgccaatcagtcgaagcttcaggacaccacactcaccaccagagcgaatttctgcggggtccggagattgccctgctgcgcaaaagactgcaacaactgagattaaaaaaggccgaacagcaacggcagcaggagttagccgctcacacccaacaacagccctctacctcagaccagagctctcatgaagggtcatcccaggatccacacgcaagcgattctccgtctagcgtggtcaacaagcaactgggaagcatgtctcttgatgaacaacaggataacaacaacgagaagcttagccctaaaccgggaacaggcgaacctgtgctctcactgcattacagcacagaaggcactacaacgtccaccatcaagctcaatttcacggacgaatggagctcaatcgcctcctcttcacgaggtattggatcccactgcaagagcgaagggcaagaagagtcttttgtccctcagtcatccgtgcaacctcctgaaggtgactcagagacgaaggccccagaggagtcaagcgaggacgtcactaaatatcaggaaggagttagcgcagaaaacccggtcgagaaccacattaatatcacccagagtgataaattcactgctaaacctctagacagtaactccggtgagcgtaacgacctgaacttggatagaagttgtggggtgccggaagagagcgctagttccgagaaagctaaggagcctgagacttctgaccagacatccacagagagcgccacgaatgagaacaacaccaatcccgagccgcagttccaaaccgaagcgaccggcccttccgctcacgaggaaacttccacgagggacagcgcactgcaggatactgatgacagcgacgatgatcctgtccttatccccggagcacggtatcgtgcgggtccaggcgacaggtttaatattagggggacaaccattggcgacaggatcatgcggaggagtgcagtggccaggattcaggaattcttccgtcgccgtaaggagcgaaaggagatggaagaactcgataccctcaatatccggagacctctagtgaagatggtgtataagggacaccgaaatagccggacaatgatcaaagaggccaatttctggggagcaaactttgtgatgtccggcagcgactgcggccacattttcatctgggataggcataccgccgaacaccttatgttactggaggccgataaccatgtggtgaactgtttgcagccacaccctttcgatccaatcctcgcctcctccgggatagactatgacattaaaatatggtctcctttagaagagtctcggattttcaatcgtaaattggccgacgaggtgattacaaggaacgagctcatgttggaagagacgcgcaacactattactgtgcccgcttcctttatgttgaggatgctggcctccctgaatcacattagggcagaccgcctggagggtgatcgcagtgagggtagtggccaagagaatgaaaacgaagatgaagagtag

SEQ ID NO: 76655 - DNA, 3349 bp, Artificial Sequence
  derived and/or modified sequence
gccggtgcggctcgggtgttgaaacgggtgtcccctccccctcctcccctcccccacgcggtggtctcccctcccacccggctcaggcagagccatgtctcggggtggctcctacccacacctgttgtgggacgtgaggaaaaggtccctcgggctggaggacccgtcccggctgcggagtcgatacctgggaagaagagaatttatccaaagattaaaacttgaagcaacccttaatgtgcatgatggttgtgttaatacaatctgttggaatgacactggagaatatattttatctggctcagatgacaccaaattagtaattagtaatccttacagcagaaaggttttgacaacaattcgttcagggcaccgagcaaacatatttagtgcaaagttcttaccttgtacaaatgataaacagattgtatcctgctctggagatggagtaatattttataccaacgttgagcaagatgcagaaaccaacagacaatgccaatttacgtgtcattatggaactacttatgagattatgactgtacccaatgacccttacacttttctctcttgtggtgaagatggaactgttaggtggtttgatacacgcatcaaaactagctgcacaaaagaagattgtaaagatgatattttaattaactgtcgacgtgctgccacgtctgttgctatttgcccaccaataccatattaccttgctgttggttgttctgacagctcagtacgaatatatgatcggcgaatgctgggcacaagagctacagggaattatgcaggtcgagggactactggaatggttgcccgttttattccttcccatcttaataataagtcctgcagagtgacatctctgtgttacagtgaagatggtcaagagattctcgttagttactcttcagattacatatatctttttgacccgaaagatgatacagcacgagaacttaaaactccttctgcggaagagagaagagaagagttgcgacaaccaccagttaagcgtttgagacttcgtggtgattggtcagatactggacccagagcaaggccggagagtgaacgagaacgagatggagagcagagtcccaatgtgtcattgatgcagagaatgtctgatatgttatcaagatggtttgaagaagcaagtgaggttgcacaaagcaatagaggacgaggaagatctcgacccagaggtggaacaagtcaatcagatatttcaactcttcctacggtcccatcaagtcctgatttggaagtgagtgaaactgcaatggaagtagatactccagctgaacaatttcttcagccttctacatcctctacaatgtcagctcaggctcattcgacatcatctcccacagaaagccctcattctactcctttgctatcttctccagacagtgaacaaaggcagtctgttgaggcatctggacaccacacacatcatcagtctgaatttttaaggggccctgagatagctttgcttcgtaagcgcctgcaacaactgaggcttaagaaggctgagcagcagaggcagcaagagctagctgcacatacccagcaacagccttccacttctgatcagtcttctcatgagggctcttcacaggaccctcatgcttcagattctccttcttctgtggttaacaaacagctcggatccatgtcacttgacgagcaacaggataacaataatgaaaagctgagccccaaaccagggacaggtgaaccagttttaagtttgcactacagcacagaaggaacaactacaagcacaataaaactgaactttacagatgaatggagcagtatagcatcaagttctagaggaattgggagccattgcaaatctgagggtcaggaggaatctttcgtcccacagagctcagtgcaaccaccagaaggagacagtgaaacaaaagctcctgaagaatcatcagaggatgtgacaaaatatcaggaaggagtatctgcagaaaacccagttgagaaccatatcaatataacacaatcagataagttcacagccaagccattggattccaactcaggagaaagaaatgacctcaatcttgatcgctcttgtggggttccagaagaatctgcttcatctgaaaaagccaaggaaccagaaacttcagatcagactagcactgagagtgctaccaatgaaaataacaccaatcctgagcctcagttccaaacagaagccactgggccttcagctcatgaagaaacatccaccagggactctgctcttcaggacacagatgacagtgatgatgacccagtcctgatcccaggtgcaaggtatcgagcaggacctggtgatagatttaatatcagaggaacaacaataggtgatagaataatgagacgctctgctgttgcccgtattcaggagttcttcagacggagaaaagaaaggaaagaaatggaagaattggatactttgaacattagaaggccgctagtaaaaatggtttataaaggccatcgcaactccaggacaatgataaaagaagccaatttctggggtgctaactttgtaatgagtggttctgactgtggccacattttcatctgggatcggcacactgctgagcatttgatgcttctggaagctgataatcatgtggtaaactgcctgcagccacatccgtttgacccaattttagcctcatctggcatagattatgacataaagatctggtcaccattagaagagtcaaggatttttaaccgaaaacttgctgatgaagttataactcgaaacgaactcatgctggaagaaactagaaacaccattacagttccagcctctttcatgttgaggatgttggcttcacttaatcatatccgagctgaccggttggagggtgacagatcagaaggctctggtcaagagaatgaaaatgaggatgaggaataataaactctttttggcaagcacttaaatgttctgaaatttgtataagacatttattatatttttttctttacagagctttagtgcaattttaaggttatggtttttggagtttttccctttttttgggataacctaacattggtttggaatgattgtgtgcatgaatttgggagattgtataaaacaaaactagcagaatgtttttaaaactttttgccgtgtatgaggagtgctagaaaatgcaaagtgcaatattttccctaaccttcaaatgtgggagcttggatcaatgttgaagaataattttcatcatagtgaaaatgttggttcaaataaatttctacacttgccatttgcatgtttgttgctttctaattaaagaaactggttgttttaaga

SEQ ID NO: 76656 - DNA, 2856 bp, Artificial Sequence
  derived and/or modified sequence
atgagcagaggcggcagctacccccacctgctgtgggacgtgagaaagagaagcctgggcctggaggaccccagcagactgagaagcagatacctgggcagaagagagttcatccagagactgaagctggaggccaccctgaacgtgcacgacggctgcgtgaacaccatctgctggaacgacaccggcgagtacatcctgagcggcagcgacgacaccaagctggtgatcagcaacccctacagcagaaaggtgctgaccaccatcagaagcggccacagagccaacatcttcagcgccaagttcctgccctgcaccaacgacaagcagatcgtgagctgcagcggcgacggcgtgatcttctacaccaacgtggagcaggacgccgagaccaacagacagtgccagttcacctgccactacggcaccacctacgagatcatgaccgtgcccaacgacccctacaccttcctgagctgcggcgaggacggcaccgtgagatggttcgacaccagaatcaagaccagctgcaccaaggaggactgcaaggacgacatcctgatcaactgcagaagagccgccaccagcgtggccatctgcccccccatcccctactacctggccgtgggctgcagcgacagcagcgtgagaatctacgacagaagaatgctgggcaccagagccaccggcaactacgccggcagaggcaccaccggcatggtggccagattcatccccagccacctgaacaacaagagctgcagagtgaccagcctgtgctacagcgaggacggccaggagatcctggtgagctacagcagcgactacatctacctgttcgaccccaaggacgacaccgccagagagctgaagacccccagcgccgaggagagaagagaggagctgagacagccccccgtgaagagactgagactgagaggcgactggagcgacaccggccccagagccagacccgagagcgagagagagagagacggcgagcagagccccaacgtgagcctgatgcagagaatgagcgacatgctgagcagatggttcgaggaggccagcgaggtggcccagagcaacagaggcagaggcagaagcagacccagaggcggcaccagccagagcgacatcagcaccctgcccaccgtgcccagcagccccgacctggaggtgagcgagaccgccatggaggtggacacccccgccgagcagttcctgcagcccagcaccagcagcaccatgagcgcccaggcccacagcaccagcagccccaccgagagcccccacagcacccccctgctgagcagccccgacagcgagcagagacagagcgtggaggccagcggccaccacacccaccaccagagcgagttcctgagaggccccgagatcgccctgctgagaaagagactgcagcagctgagactgaagaaggccgagcagcagagacagcaggagctggccgcccacacccagcagcagcccagcaccagcgaccagagcagccacgagggcagcagccaggacccccacgccagcgacagccccagcagcgtggtgaacaagcagctgggcagcatgagcctggacgagcagcaggacaacaacaacgagaagctgagccccaagcccggcaccggcgagcccgtgctgagcctgcactacagcaccgagggcaccaccaccagcaccatcaagctgaacttcaccgacgagtggagcagcatcgccagcagcagcagaggcatcggcagccactgcaagagcgagggccaggaggagagcttcgtgccccagagcagcgtgcagccccccgagggcgacagcgagaccaaggcccccgaggagagcagcgaggacgtgaccaagtaccaggagggcgtgagcgccgagaaccccgtggagaaccacatcaacatcacccagagcgacaagttcaccgccaagcccctggacagcaacagcggcgagagaaacgacctgaacctggacagaagctgcggcgtgcccgaggagagcgccagcagcgagaaggccaaggagcccgagaccagcgaccagaccagcaccgagagcgccaccaacgagaacaacaccaaccccgagccccagttccagaccgaggccaccggccccagcgcccacgaggagaccagcaccagagacagcgccctgcaggacaccgacgacagcgacgacgaccccgtgctgatccccggcgccagatacagagccggccccggcgacagattcaacatcagaggcaccaccatcggcgacagaatcatgagaagaagcgccgtggccagaatccaggagttcttcagaagaagaaaggagagaaaggagatggaggagctggacaccctgaacatcagaagacccctggtgaagatggtgtacaagggccacagaaacagcagaaccatgatcaaggaggccaacttctggggcgccaacttcgtgatgagcggcagcgactgcggccacatcttcatctgggacagacacaccgccgagcacctgatgctgctggaggccgacaaccacgtggtgaactgcctgcagccccaccccttcgaccccatcctggccagcagcggcatcgactacgacatcaagatctggagccccctggaggagagcagaatcttcaacagaaagctggccgacgaggtgatcaccagaaacgagctgatgctggaggagaccagaaacaccatcaccgtgcccgccagcttcatgctgagaatgctggccagcctgaaccacatcagagccgacagactggagggcgacagaagcgagggcagcggccaggagaacgagaacgaggacgaggagtag

SEQ ID NO: 76657 - protein, 920 aa, Artificial Sequence
  derived and/or modified sequence
MSRGGSYPHLLWDVRKRSLGLEDPSRLRSRYLGRREFIQRLKLEATLNVHDGCVLTTIRSGHRANIFSAKFLPCTNDKQIVSCSGDGVIFYTNVEQDAETNRQCQFTCHYGTTYEIMTVPNDPYTFLSCGEDGTVRWFDTRIKTSCTKEDCKDDILINCRRAATSVAICPPIPYYLAVGCSDSSVRIYDRRMLGTRATGNYAGRGTTGMVARFIPSHLNNKSCRVTSLCYSEDGQEILVSYSSDYIYLFDPKDDTARELKTPSAEERREELRQPPVKRLRLRGDWSDTGPRARPESERERDGEQSPNVSLMQRMSDMLSRWFEEASEVAQSNRGRGRSRPRGGTSQSDISTLPTVPSSPDLEVSETAMEVDTPAEQFLQPSTSSTMSAQAHSTSSPTESPHSTPLLSSPDSEQRQSVEASGHHTHHQSEFLRGPEIALLRKRLQQLRLKKAEQQRQQELAAHTQQQPSTSDQSSHEGSSQDPHASDSPSSVVNKQLGSMSLDEQQDNNNEKLSPKPGTGEPVLSLHYSTEGTTTSTIKLNFTDEWSSIASSSRGIGSHCKSEGQEESFVPQSSVQPPEGDSETKAPEESSEDVTKYQEGVSAENPVENHINITQSDKFTAKPLDSNSGERNDLNLDRSCGVPEESASSEKAKEPETSDQTSTESATNENNTNPEPQFQTEATGPSAHEETSTRDSALQDTDDSDDDPVLIPGARYRAGPGDRFNIRGTTIGDRIMRRSAVARIQEFFRRRKERKEMEELDTLNIRRPLVKMVYKGHRNSRTMIKEANFWGANFVMSGSDCGHIFIWDRHTAEHLMLLEADNHVVNCLQPHPFDPILASSGIDYDIKIWSPLEESRIFNRKLADEVITRNELMLEETRNTITVPASFMLRMLASLNHIRADRLEGDRSEGSGQENENEDEE

SEQ ID NO: 76658 - DNA, 2763 bp, Artificial Sequence
  derived and/or modified sequence
atgtctcggggaggctcctatccgcacctcctgtgggatgtgcgaaagaggtccctggggctggaagacccttcccgcctacgatctcggtatctggggagacgggagttcatccagcgcctgaaattggaggccacgttgaacgtgcacgacggctgcgtcctaacaactatacgctccggtcacagagccaacatctttagcgccaagtttctgccttgtaccaatgacaagcagattgtgtcctgttcaggggacggagtcatcttttataccaacgtggagcaggatgctgagactaaccgccagtgccagtttacgtgccattatgggactacatacgagatcatgacagtcccaaatgacccatacaccttcttgtcttgtggagaagacggaacagttaggtggttcgacacaaggatcaaaaccagctgcactaaagaggactgtaaagatgacattctcattaactgtcggagggcggcgacgtcagtggcaatttgcccaccaatcccttactatttagctgtgggttgttcagactcaagtgttcggatttatgataggcgaatgctgggcacaagagccaccggaaactatgccggtaggggcaccaccggcatggtggcaaggttcattcctagccaccttaataacaaatcctgccgcgtcacttctctgtgctactctgaagatggccaggagatcctggtgtcgtatagctctgactacatatacctgtttgacccaaaggacgacacagcccgggaattgaaaaccccatccgctgaggaacgccgggaagaactacgccagcctccggtcaaaagactcagattacggggggattggtcagacactggtccacgcgctcgcccagagtccgagagggaacgggacggggaacagagtccaaatgtcagcctaatgcagaggatgtcagacatgctaagtcgctggtttgaggaggctagtgaggttgcccaatccaaccggggccggggtcggtctcgccctagggggggtacttcccagtccgacatctccacactccccacggtgcccagcagtccggacttagaggtcagtgagaccgctatggaagtcgacacaccggcagagcaattcctccagccgagcacttcaagcaccatgtccgcccaagctcatagcaccagctctcccaccgagagccctcactccaccccgctcctttccagtccagatagtgaacagcgacagtcagtggaagctagcggacaccacacgcaccaccagtcagagttcctgcggggaccggagattgcactcctgagaaagcgcctgcaacagttgcgtctgaaaaaggctgagcagcaaagacagcaggaactggctgcccatacacagcaacagccctctacctcagatcaaagttctcacgagggttcctcgcaggatcctcatgccagtgacagccctagttccgtggtcaacaagcagttaggctctatgtccctcgacgaacagcaggacaataacaacgagaagctgtctcccaagccaggtacaggagagcccgtcctctccctgcactactcaacggaggggacaactacttccacaattaaattgaattttaccgacgaatggagctctatcgcaagctcatcgagagggattggtagccattgtaaatctgaggggcaggaagaatccttcgtgcctcagtcaagtgtgcagccgccagaaggagattccgagaccaaagcgccagaggagagtagtgaggatgtcacaaagtaccaggaaggagtttccgcagagaatcccgttgaaaaccatatcaacataacccaaagtgacaaattcactgcaaagccactggattcaaatagcggcgagcggaatgatttaaatcttgaccgaagttgcggagttcccgaggaatccgcatcgagcgagaaggcgaaggagcccgaaactagtgaccagacatccactgaatccgcaacaaatgagaataacacgaatccggagccccagttccagaccgaggcaactggcccgagcgcccacgaggagacaagcacccgagacagcgccctgcaagacacagacgactccgatgatgatcccgtcctgatacccggcgccaggtatcgtgcaggccctggagaccgtttcaacatccgagggaccacaataggggatcgtattatgcggaggtcagctgtggctagaattcaggagtttttccgccgccgaaaagagcgaaaagagatggaggagctggataccctaaacatcaggagaccattggtgaaaatggtttacaagggccatcgcaattcccggactatgatcaaggaggcgaacttctggggcgcaaactttgtaatgagcggctcggactgcggccatatatttatctgggataggcatacagcagagcacttgatgctgctggaggcagataatcacgtcgtaaattgtcttcaaccgcaccctttcgaccctatactggcttcaagcggcattgactacgatatcaagatctggtcaccacttgaagaaagtagaatctttaaccgaaaactggctgacgaagtaattacccggaacgaacttatgctagaagagaccagaaacaccatcacagtccctgcatctttcatgttacggatgctggcttctctcaaccacattcgcgcagacagattagagggggacaggtcagaggggtctggccaggagaacgaaaacgaggacgaggaatag

SEQ ID NO: 76659 - DNA, 2763 bp, Artificial Sequence
  derived and/or modified sequence
atgagccggggcggcagctacccccacctgctgtgggatgtgaggaagaggagcctgggcctggaggaccccagccggctgcggagccgctacctgggccggcgggagttcatccagaggctgaagctggaggccaccctgaatgtgcatgatggctgtgtgctgaccaccatccgcagcggccaccgggccaacatcttcagcgccaagttcctgccctgcaccaatgacaagcagatcgtgtcctgcagcggagatggagtcatcttctacaccaacgtggagcaggatgctgagaccaaccggcagtgccagttcacctgccactacggcaccacctatgagatcatgacagtgcccaatgacccctacaccttcctgagctgtggagaagatggcaccgtgcgctggtttgacacccgcatcaagaccagctgcaccaaggaggactgcaaggatgacatcctgatcaactgccggcgggccgccacctctgtggccatctgcccccccatcccctactacctggccgtgggctgcagcgacagctctgtgcgcatctatgacaggaggatgctgggcacccgggccaccggcaactatgccggccggggcaccaccggcatggtggcccgcttcatccccagccacctgaacaacaagagctgccgggtgaccagcctgtgctacagtgaagatggccaggagatcctggtgtcctacagcagtgactacatctacctgtttgaccccaaggatgacacagcccgggagctgaagaccccatctgctgaggagcggcgggaggagctgcggcagccccctgtgaagaggctgcggctgcggggggactggagcgacaccggcccccgggcccggcctgagagcgagcgggagagagatggagagcagagccccaacgtgtccctgatgcagaggatgtctgacatgctgagccgctggtttgaggaggccagcgaggtggcccagagcaacagaggccggggccgcagccggccccggggcggcaccagccagagcgacatcagcaccctgcccaccgtgcccagcagcccagacctggaggtgtctgaaacagccatggaggtggacaccccagctgagcagttcctgcagcccagcaccagcagcaccatgtctgcccaggcccacagcaccagcagccccacagagagcccccacagcacccccctgctgagcagcccagattctgagcagaggcagagcgtggaggccagcggccaccacacccaccaccagagcgagttcctgcggggccctgagatcgccctgctgaggaagaggctgcagcagctgcggctgaagaaggccgagcagcagaggcagcaggagctggccgcccacacccagcagcagcccagcaccagtgaccagagcagccatgagggcagcagccaggacccccacgccagtgacagccccagctctgtggtgaacaagcagctgggctccatgagcctggatgagcagcaggacaacaacaatgagaagctgagccccaagccaggcaccggggagcctgtgctgagcctgcactacagcacagagggcaccaccaccagcaccatcaagctgaacttcacagatgagtggagcagcatcgccagcagcagccggggcatcggcagccactgcaagtctgagggccaggaggagagctttgtgccccagagctctgtgcagcccccagagggggacagcgagaccaaggcccctgaggagagcagtgaagatgtgaccaagtaccaggagggcgtgtctgcagaaaatcctgtggagaaccacatcaacatcacccagagcgacaagttcaccgccaagcccctggacagcaacagcggggagagaaatgacctgaacctggacaggagctgtggggtgcctgaggagagcgccagcagcgagaaggccaaggagcctgagaccagtgaccagaccagcacagagagcgccaccaatgaaaacaacaccaaccctgagccccagttccagacagaggccaccggccccagcgcccacgaggagaccagcacccgggacagcgccctgcaggacacagatgacagtgatgatgatcctgtgctgatccctggggcccgctacagagctggccctggggaccgcttcaacatccggggcaccaccatcggggaccgcatcatgagaagatctgctgtggcccgcatccaggagttcttcagaagaaggaaggagaggaaggagatggaggagctggacaccctgaacatcagaagacccctggtgaagatggtgtacaagggccacaggaacagcaggaccatgatcaaggaggccaacttctggggcgccaactttgtgatgagcggcagtgactgtggccacatcttcatctgggacagacacacagctgagcacctgatgctgctggaggccgacaaccacgtggtgaactgcctgcagccccacccctttgaccccatcctggccagcagcggcattgattatgacatcaagatctggagccccctggaggagagccgcatcttcaacaggaagctggctgatgaagtcatcaccagaaatgagctgatgctggaggagaccaggaacaccatcaccgtgcctgccagcttcatgctgaggatgctggccagcctgaaccacatccgggctgaccggctggagggggacagaagtgagggcagcggccaggagaatgaaaatgaagatgaggagtag

SEQ ID NO: 76660 - DNA, 2763 bp, Artificial Sequence
  derived and/or modified sequence
atgagccggggcggcagctacccccacctgctgtgggacgtgcggaaacgcagcctggggcttgaggatccctcccgacttcgctcacgatacctgggccggcgagagttcatccagcggctaaaactggaagctactctaaacgtccacgatgggtgcgtactgacaaccatacgcagtggccaccgagctaatatattcagcgctaagttcctgccatgtacaaatgacaaacagatagtgtcatgctcaggcgatggtgtgattttctacactaacgtagagcaagacgccgagaccaaccggcagtgccagtttacctgccactatggcaccacatatgaaataatgaccgttcctaatgacccgtacacctttctctcttgcggcgaggatgggaccgtgcgatggttcgatacaagaattaagacttcctgtaccaaagaggactgtaaagacgatatcttgattaactgcaggagagcagcaacgagcgtcgctatctgtccgccaatcccctactacctcgccgtgggctgctcagattcatcggtgagaatctacgacagacggatgctcggcacaagggccacgggaaattatgcaggcaggggcactaccggcatggtcgcacgcttcattccttctcacctgaacaacaagagctgcagggtcacgtctttgtgctattctgaggatgggcaggagatcttagttagttactcttctgactatatctacctgttcgaccctaaggatgatacggccagggagctgaagacaccatctgccgaggagcgaagagaagaactcaggcagcctcccgtgaagaggcttagactgcgcggagattggagtgataccgggcctagggcccgccccgagagcgagcgagaaagggatggtgaacaatccccaaacgtgtcactgatgcagcgaatgtcggacatgctgtcccggtggtttgaggaggcctccgaagtagcacagtctaacagagggcgaggccgctctaggcctcgcggtggcacttctcagtccgacatctcgaccctgcccactgtccccagctccccggatctcgaagtgtcagagaccgctatggaagtggacacccctgccgagcagtttctgcaaccaagcaccagctccaccatgagcgcgcaggcacactccacgtcttcgccaaccgaaagtccccacagtaccccactcctctcatcacctgacagtgaacagcgacagtcggtagaggcttctgggcaccatactcatcaccagtcagaattcttgcgcgggcccgaaatcgctctgctacgcaagcgtctgcaacaacttcgactgaagaaagcagaacagcagaggcagcaggaactagctgcccatacccagcagcagccatcaacctcagaccaatcttctcacgagggctcatctcaggacccacacgcatccgactcacccagctctgtggtgaacaaacagctgggttctatgtcattagatgaacaacaggataacaacaatgaaaaattgtcccctaaaccaggcaccggcgagccagtgctctcattgcattattcgacagaaggcaccaccacctctaccatcaaattgaatttcacggatgagtggtcctctattgcgagtagctcccggggtattggaagccactgcaaaagcgagggccaggaggaatccttcgtcccgcaaagcagcgtgcagccccccgaaggagacagcgagacgaaagccccggaggagagcagcgaggacgtgaccaaataccaggagggcgtctccgctgaaaaccctgtcgagaaccatatcaatatcacccaatcagataaatttacagccaaacctctggatagcaattcaggcgagcgcaacgacctgaacctcgaccgttcatgcggcgtgcctgaggaatccgcgagctcagagaaggccaaagagccggaaaccagcgaccagacctcaactgaatctgccacaaatgagaacaacaccaaccctgagcctcagtttcaaactgaggcaaccggccctagtgcccatgaagagacctctacccgggattctgcgctgcaggacaccgacgactctgacgacgatccagttctgatacccggagccagataccgtgcagggcccggtgacagattcaacattcgggggacaacaatcggggataggatcatgcgacgatcagccgtggcgcggatccaggagttctttcgaagacgcaaggagaggaaagagatggaggagcttgacaccttgaacatccggcgccccttagtcaagatggtctataagggacaccggaatagccggacaatgatcaaggaagcaaatttttggggcgctaactttgtgatgtccggcagcgattgcggacacattttcatttgggacagacatactgcagaacaccttatgctgcttgaagcagacaatcacgttgtaaactgtctgcagccacatccctttgacccaatcttggcctccagtggaatcgactatgatatcaagatctggagtccattggaggagtcccgaatctttaatcggaaactggcagatgaagtgatcacaagaaatgagctgatgctggaggaaactagaaacactataaccgtccctgcttctttcatgctgcgtatgttggcatccctaaaccacatccgggccgatagacttgaaggtgatcggtctgagggaagcgggcaggaaaatgaaaatgaggatgaagagtag

SEQ ID NO: 76661 - DNA, 2763 bp, Artificial Sequence
  derived and/or modified sequence
atgtctcgcggaggaagttatccgcatctgctctgggatgttcggaagaggagccttggcttggaggatccttctcgcctgcgcagcaggtacttgggcaggcgcgagttcatccagcggttgaagctggaagcaaccctcaacgtccacgacggatgtgttctcacaactatcagatccgggcatcgagccaatatcttttcagctaaatttcttccctgtacaaacgataaacaaatagtgtcttgctctggggatggcgtcatcttctacactaacgttgagcaggatgctgaaactaataggcaatgccagttcacatgtcactacggcaccacatatgaaatcatgacggtcccgaacgatccctatacatttctttcctgtggagaggatggcaccgtgcgctggttcgacaccaggattaaaacctcctgtactaaagaagactgcaaggacgatattctgatcaattgccgaagagccgctacaagtgtggcaatctgcccaccaattccctactacttggccgtcggctgtagtgactcatccgttagaatctacgatcggagaatgctcggcactcgcgctaccgggaactatgccggacgagggaccactgggatggtggccagatttatccccagtcacttaaataacaaatcctgcagagtgacttctttgtgttactccgaagacggccaggaaattctggtttcttacagcagcgattacatctatctgtttgaccctaaggacgatactgcccgagagttgaaaacacctagcgcggaggagcgtagagaagaactacggcaaccaccggtgaagagactgcgcctgaggggggactggagtgataccggaccgagggcccgtcccgagagcgaacgcgaacgcgatggggagcagagccctaatgtaagcttaatgcagagaatgtctgacatgctatccaggtggtttgaggaagcctcagaggttgcacaatctaacagaggccgaggaagatcccggccaagaggcggtacttcccagtccgatattagtaccctgcccaccgtccctagtagtccagatttagaagtttctgagactgcaatggaagtcgacacccctgccgagcaattccttcagccatcaacctcttcaactatgagcgcccaggcgcactctacctccagccctacagaaagccctcattccactccactgctttcctcaccagattccgagcaaagacaaagcgtggaagctagcggacatcacacccaccaccagtctgagtttttgcggggacctgaaatcgccttgttgcgaaaacgtttgcagcaactgcggttgaaaaaggccgaacagcagaggcagcaagagctggctgcacatactcaacagcagccttccacctcagatcagagttcccatgagggatcgagccaggatcctcatgccagtgactcccctagtagcgtggttaacaaacagctggggtccatgtccctggacgagcagcaggataacaataatgaaaaactcagccccaaacctggaaccggtgagcctgtcctatctctgcattactccaccgaaggtaccacaacaagcacaattaagctgaatttcacagatgagtggtcatccatcgcctcttcttctcgcggaataggatctcattgcaagagcgagggtcaagaagagagctttgtgccacagtctagcgttcaaccccctgaaggggactccgagactaaggccccagaggaatcctcagaagacgttaccaaataccaggagggagtgagcgccgagaacccagtggagaatcacattaatatcacacagtctgataaattcactgccaaaccactagattccaactctggggagcggaatgatttgaatttagacagatcatgcggagtccccgaggaaagtgcctcgagtgagaaggctaaagagcccgagacctctgatcaaacctcaacagaatcggcaactaacgagaacaatacaaatcccgaaccccaatttcagaccgaggccacaggacccagtgctcacgaggaaacatctactagggactccgcgctgcaggataccgatgattccgatgatgatccagtgttgattcccggagcacgatatagggcaggaccgggagatcggtttaatattcggggtacaacgattggagaccgaatcatgaggcgctccgccgtggcccgtattcaggagttcttccggaggcgcaaagaacgtaaagaaatggaggagctggatacgctcaacatcagaagacctcttgtcaagatggtgtacaagggacacaggaactcaagaactatgataaaggaggccaatttttggggggcaaatttcgtgatgagtggctcagactgcggccacattttcatttgggataggcacacagccgaacatttaatgctgctggaagccgacaaccacgtcgttaactgcctgcagccccacccatttgaccccattctggcctctagcggtattgattacgacatcaaaatctggagcccactcgaagagtcgagaatcttcaacagaaaattggccgatgaggttatcacgaggaacgagctgatgctggaggaaaccaggaacacaattacagtgcctgcaagtttcatgcttcgcatgctggccagccttaaccatatccgcgcagaccgattggagggagatcgtagtgaaggtagcgggcaagagaatgagaacgaagatgaggagtag

SEQ ID NO: 76662 - DNA, 3172 bp, Artificial Sequence
  derived and/or modified sequence
ctaagaaggagagtatgaggcgagctccggcccgggtgcggccgggcttcaggggcccaggcgccgctgctgccaccgccatctaacgctgcgccctggaggcccggcgcgcggatggtgccggtgcggctcgggtgttgaaacgggtgtcccctccccctcctcccctcccccacgcggtggtctcccctcccacccggctcaggcagagccatgtctcggggtggctcctacccacacctgttgtgggacgtgaggaaaaggtccctcgggctggaggacccgtcccggctgcggagtcgatacctgggaagaagagaatttatccaaagattaaaacttgaagcaacccttaatgtgcatgatggttgtgttttgacaacaattcgttcagggcaccgagcaaacatatttagtgcaaagttcttaccttgtacaaatgataaacagattgtatcctgctctggagatggagtaatattttataccaacgttgagcaagatgcagaaaccaacagacaatgccaatttacgtgtcattatggaactacttatgagattatgactgtacccaatgacccttacacttttctctcttgtggtgaagatggaactgttaggtggtttgatacacgcatcaaaactagctgcacaaaagaagattgtaaagatgatattttaattaactgtcgacgtgctgccacgtctgttgctatttgcccaccaataccatattaccttgctgttggttgttctgacagctcagtacgaatatatgatcggcgaatgctgggcacaagagctacagggaattatgcaggtcgagggactactggaatggttgcccgttttattccttcccatcttaataataagtcctgcagagtgacatctctgtgttacagtgaagatggtcaagagattctcgttagttactcttcagattacatatatctttttgacccgaaagatgatacagcacgagaacttaaaactccttctgcggaagagagaagagaagagttgcgacaaccaccagttaagcgtttgagacttcgtggtgattggtcagatactggacccagagcaaggccggagagtgaacgagaacgagatggagagcagagtcccaatgtgtcattgatgcagagaatgtctgatatgttatcaagatggtttgaagaagcaagtgaggttgcacaaagcaatagaggacgaggaagatctcgacccagaggtggaacaagtcaatcagatatttcaactcttcctacggtcccatcaagtcctgatttggaagtgagtgaaactgcaatggaagtagatactccagctgaacaatttcttcagccttctacatcctctacaatgtcagctcaggctcattcgacatcatctcccacagaaagccctcattctactcctttgctatcttctccagacagtgaacaaaggcagtctgttgaggcatctggacaccacacacatcatcagtctgaatttttaaggggccctgagatagctttgcttcgtaagcgcctgcaacaactgaggcttaagaaggctgagcagcagaggcagcaagagctagctgcacatacccagcaacagccttccacttctgatcagtcttctcatgagggctcttcacaggaccctcatgcttcagattctccttcttctgtggttaacaaacagctcggatccatgtcacttgacgagcaacaggataacaataatgaaaagctgagccccaaaccagggacaggtgaaccagttttaagtttgcactacagcacagaaggaacaactacaagcacaataaaactgaactttacagatgaatggagcagtatagcatcaagttctagaggaattgggagccattgcaaatctgagggtcaggaggaatctttcgtcccacagagctcagtgcaaccaccagaaggagacagtgaaacaaaagctcctgaagaatcatcagaggatgtgacaaaatatcaggaaggagtatctgcagaaaacccagttgagaaccatatcaatataacacaatcagataagttcacagccaagccattggattccaactcaggagaaagaaatgacctcaatcttgatcgctcttgtggggttccagaagaatctgcttcatctgaaaaagccaaggaaccagaaacttcagatcagactagcactgagagtgctaccaatgaaaataacaccaatcctgagcctcagttccaaacagaagccactgggccttcagctcatgaagaaacatccaccagggactctgctcttcaggacacagatgacagtgatgatgacccagtcctgatcccaggtgcaaggtatcgagcaggacctggtgatagatttaatatcagaggaacaacaataggtgatagaataatgagacgctctgctgttgcccgtattcaggagttcttcagacggagaaaagaaaggaaagaaatggaagaattggatactttgaacattagaaggccgctagtaaaaatggtttataaaggccatcgcaactccaggacaatgataaaagaagccaatttctggggtgctaactttgtaatgagtggttctgactgtggccacattttcatctgggatcggcacactgctgagcatttgatgcttctggaagctgataatcatgtggtaaactgcctgcagccacatccgtttgacccaattttagcctcatctggcatagattatgacataaagatctggtcaccattagaagagtcaaggatttttaaccgaaaacttgctgatgaagttataactcgaaacgaactcatgctggaagaaactagaaacaccattacagttccagcctctttcatgttgaggatgttggcttcacttaatcatatccgagctgaccggttggagggtgacagatcagaaggctctggtcaagagaatgaaaatgaggatgaggaataataaactctttttggcaagcacttaaatgttctgaaatttgtataagacatttattatatttttttctttacagagctttagtgcaattttaaggttatggtttttggagtttttccctttttttgggataacctaacattggtttggaatgattgtgtgcatgaatttgggagattgtataaaacaaaactagcag

SEQ ID NO: 76663 - DNA, 2763 bp, Artificial Sequence
  derived and/or modified sequence
atgagcagaggcggcagctacccccacctgctgtgggacgtgagaaagagaagcctgggcctggaggaccccagcagactgagaagcagatacctgggcagaagagagttcatccagagactgaagctggaggccaccctgaacgtgcacgacggctgcgtgctgaccaccatcagaagcggccacagagccaacatcttcagcgccaagttcctgccctgcaccaacgacaagcagatcgtgagctgcagcggcgacggcgtgatcttctacaccaacgtggagcaggacgccgagaccaacagacagtgccagttcacctgccactacggcaccacctacgagatcatgaccgtgcccaacgacccctacaccttcctgagctgcggcgaggacggcaccgtgagatggttcgacaccagaatcaagaccagctgcaccaaggaggactgcaaggacgacatcctgatcaactgcagaagagccgccaccagcgtggccatctgcccccccatcccctactacctggccgtgggctgcagcgacagcagcgtgagaatctacgacagaagaatgctgggcaccagagccaccggcaactacgccggcagaggcaccaccggcatggtggccagattcatccccagccacctgaacaacaagagctgcagagtgaccagcctgtgctacagcgaggacggccaggagatcctggtgagctacagcagcgactacatctacctgttcgaccccaaggacgacaccgccagagagctgaagacccccagcgccgaggagagaagagaggagctgagacagccccccgtgaagagactgagactgagaggcgactggagcgacaccggccccagagccagacccgagagcgagagagagagagacggcgagcagagccccaacgtgagcctgatgcagagaatgagcgacatgctgagcagatggttcgaggaggccagcgaggtggcccagagcaacagaggcagaggcagaagcagacccagaggcggcaccagccagagcgacatcagcaccctgcccaccgtgcccagcagccccgacctggaggtgagcgagaccgccatggaggtggacacccccgccgagcagttcctgcagcccagcaccagcagcaccatgagcgcccaggcccacagcaccagcagccccaccgagagcccccacagcacccccctgctgagcagccccgacagcgagcagagacagagcgtggaggccagcggccaccacacccaccaccagagcgagttcctgagaggccccgagatcgccctgctgagaaagagactgcagcagctgagactgaagaaggccgagcagcagagacagcaggagctggccgcccacacccagcagcagcccagcaccagcgaccagagcagccacgagggcagcagccaggacccccacgccagcgacagccccagcagcgtggtgaacaagcagctgggcagcatgagcctggacgagcagcaggacaacaacaacgagaagctgagccccaagcccggcaccggcgagcccgtgctgagcctgcactacagcaccgagggcaccaccaccagcaccatcaagctgaacttcaccgacgagtggagcagcatcgccagcagcagcagaggcatcggcagccactgcaagagcgagggccaggaggagagcttcgtgccccagagcagcgtgcagccccccgagggcgacagcgagaccaaggcccccgaggagagcagcgaggacgtgaccaagtaccaggagggcgtgagcgccgagaaccccgtggagaaccacatcaacatcacccagagcgacaagttcaccgccaagcccctggacagcaacagcggcgagagaaacgacctgaacctggacagaagctgcggcgtgcccgaggagagcgccagcagcgagaaggccaaggagcccgagaccagcgaccagaccagcaccgagagcgccaccaacgagaacaacaccaaccccgagccccagttccagaccgaggccaccggccccagcgcccacgaggagaccagcaccagagacagcgccctgcaggacaccgacgacagcgacgacgaccccgtgctgatccccggcgccagatacagagccggccccggcgacagattcaacatcagaggcaccaccatcggcgacagaatcatgagaagaagcgccgtggccagaatccaggagttcttcagaagaagaaaggagagaaaggagatggaggagctggacaccctgaacatcagaagacccctggtgaagatggtgtacaagggccacagaaacagcagaaccatgatcaaggaggccaacttctggggcgccaacttcgtgatgagcggcagcgactgcggccacatcttcatctgggacagacacaccgccgagcacctgatgctgctggaggccgacaaccacgtggtgaactgcctgcagccccaccccttcgaccccatcctggccagcagcggcatcgactacgacatcaagatctggagccccctggaggagagcagaatcttcaacagaaagctggccgacgaggtgatcaccagaaacgagctgatgctggaggagaccagaaacaccatcaccgtgcccgccagcttcatgctgagaatgctggccagcctgaaccacatcagagccgacagactggagggcgacagaagcgagggcagcggccaggagaacgagaacgaggacgaggagtag

SEQ ID NO: 76664 - protein, 430 aa, Artificial Sequence
  derived and/or modified sequence
MSRINKNVVLALLTLTSSAFLLFQLYYYKHYLSTKNGAGLSKSKGSRIGFDSTQWRAVKKFIMLTSNQNVPVFLIDPLILELINKNFEQVKNTSHGSTSQCKFFCVPRDFTAFALQYHLWKNEEGWFRIAENMGFQCLKIESKDPRLDGIDSLSGTEIPLHYICKLATHAIHLVVFHERSGNYLWHGHLRLKEHIDRKFVPFRKLQFGRYPGAFDRPELQQVTVDGLEVLIPKDPMHFVEEVPHSRFIECRYKEARAFFQQYLDDNTVEAVAFRKSAKELLQLAAKTLNKLGVPFWLSSGTCLGWYRQCNIIPYSKDVDLGIFIQDYKSDIILAFQDAGLPLKHKFGKVEDSLELSFQGKDDVKLDVFFFYEETDHMWNGGTQAKTGKKFKYLFPKFTLCWTEFVDMKVHVPCETLEYIEANYGKNQQGA

SEQ ID NO: 76665 - protein, 160 aa, Artificial Sequence
  derived and/or modified sequence
  misc_feature (1)..(1): Xaa can be any naturally occurring amino acid
XWYRQCNIIPYSKDVDLGIFIQDYKSDIILAFQDAGLPLKHKFGKVEDSLELSFQGKDDVKLDVFFFYEETDHMWNGGTQAKTGKKFKYLFPKFTLCWTEFVDMKVHVPCETLEYIEANYGKEAESYILSMLFRTTFWSLADFPLTPENNSSLKNGNLNV

SEQ ID NO: 76666 - DNA, 1602 bp, Artificial Sequence
  derived and/or modified sequence
tctttaaaaatatcttttttgttcacagaaaacaaaattatcttcctttccaaatccaaaaagatgaaaacgactgagatactttcaaaagacaaccaagtgagcagcacagactaatgagtagaatcaataagaacgtggttttggcccttttaacgctgacaagttctgcatttctgctgtttcagttgtactactacaagcactatttatcaacaaagaatggagctggtttgtcaaaatccaaaggaagccgaattggatttgatagcacacagtggcgtgcagttaaaaaatttattatgttaacatccaaccaaaatgtaccagtgtttcttattgatcctttgatactggaattgattaataagaactttgaacaagtcaaaaatacttctcatggctctacttcacaatgcaagtttttctgtgttccaagagactttactgcatttgcactgcagtatcacctatggaagaatgaggaaggctggtttcggatagctgagaatatgggatttcagtgcctaaagattgagagtaaagatccccggctagacgggatagactcactctctggaactgaaatccccctgcactatatctgcaaactggccactcatgcgatccacttggtagtctttcatgagaggagtggcaactacctctggcacggccacttgagacttaaagaacacattgacaggaaatttgttcccttccgaaagttacagtttggtcgttatccaggagcttttgacaggccagagttacagcaagttactgttgatggactggaagttctcattccaaaggatccaatgcactttgtagaagaagtaccacactctaggtttattgagtgtaggtataaagaagctcgagcattctttcagcagtaccttgatgataacactgtggaagctgtggcctttcggaagagtgcaaaggaattactgcaactagcagcgaaaacattaaacaaattgggagtaccattctggctgagcagtggaacttgtctaggatggtatcgacaatgcaacattattccttatagcaaagatgttgacctaggaatttttatacaagattacaaatctgatattattttagcatttcaggatgcaggacttccgctcaaacacaaatttgggaaggtagaagacagcttggaactatccttccagggaaaagatgatgtaaaacttgatgtttttttcttctatgaagaaactgatcacatgtggaatggaggcactcaggccaaaacaggaaaaaaattcaaatacctgtttccgaagtttacactgtgctggactgagtttgtagacatgaaggtccatgtaccctgtgaaaccctcgaatacattgaagccaactatggcaagaatcagcagggtgcatgatgccattttaagctgcttcacatcagactgaaatcctaattacagttcataagtgaaacagactaattcaatggcaataccttttgtataggtcctgtgcttaaaggaggcaagtataaattttctaataagaaatccctgcttcttttgggtgcagtggctcacacctgtaataccagcagtttgagaagct

SEQ ID NO: 76667 - DNA, 606 bp, Artificial Sequence
  derived and/or modified sequence
gatggtatcgacaatgcaacattattccttatagcaaagatgttgacctaggaatttttatacaagattacaaatctgatattattttagcatttcaggatgcaggacttccgctcaaacacaaatttgggaaggtagaagacagcttggaactatccttccagggaaaagatgatgtaaaacttgatgtttttttcttctatgaagaaactgatcacatgtggaatggaggcactcaggccaaaacaggaaaaaaattcaaatacctgtttccgaagtttacactgtgctggactgagtttgtagacatgaaggtccatgtaccctgtgaaaccctcgaatacattgaagccaactatggaaaggaagctgaatcttatatcttatctatgctatttaggactactttctggagcttggcagattttcctctgacaccagagaacaatagtagtctcaagaatggaaacctgaatgtctgagggaatgggctggtagactttttcgaaaacaaattagagaaagtaacttacaaccacccattccggatttgtaaagcaacatgaaaacctttgataaatgataaccaacagtcttctgtcctaa

SEQ ID NO: 76668 - DNA, 1293 bp, Artificial Sequence
  derived and/or modified sequence
atgagtcgtatcaacaagaacgtggtcttagccttattaacccttacgagtagtgctttcctcttgtttcaactgtactactataaacactatttaagcactaaaaatggtgcgggattgagtaagtcaaagggctctcggattgggtttgacagtacccagtggcgcgccgtgaaaaaatttatcatgttaacctctaatcaaaacgtcccagtgtttctcatcgaccctctcatcttggaactgattaacaagaacttcgagcaagtcaagaatacatcacatggatcgacatcacagtgtaagttcttttgcgtgcctcgggatttcacagccttcgctctgcagtatcacctgtggaaaaacgaagagggttggttccggattgctgaaaacatggggttccagtgtctcaaaatcgagtcaaaggacccacgcctcgacggcatcgatagcctgtcagggaccgaaatacctttgcattacatctgcaagttagccacacacgccatacatctagtggttttccatgagcggagtggtaactacctttggcatgggcatcttcgcttaaaggagcacatagatcgtaaatttgtccccttcaggaaacttcaatttggtcgctatcctggcgcgtttgatcggccagagctgcagcaggtgacagtggatggtcttgaggtgctgattcccaaggaccccatgcatttcgttgaggaagtgccccactcacgtttcatcgaatgtcggtataaagaagccagagctttcttccagcagtacctggacgacaacactgtggaagccgtggcattccgcaagagcgccaaagaactcctgcagttggccgctaagaccctgaacaaactgggggtcccattttggttatcgtcaggcacttgcctcggatggtacagacagtgcaatattatcccttattctaaggacgtcgatctgggcattttcatccaggactataagtcggacataattttagcgttccaggacgctggcctccctcttaaacataaattcggtaaggttgaggacagcctcgagttgtcctttcaggggaaagacgatgttaagctggatgtttttttcttttacgaggagactgaccacatgtggaatggtgggacccaggcaaaaaccgggaagaaatttaagtacctgtttcctaagtttacactctgttggacagagttcgtggatatgaaggtgcacgtgccctgcgagacactcgagtatatagaagctaattacgggaagaaccagcagggggcatag

SEQ ID NO: 76669 - DNA, 483 bp, Artificial Sequence
  derived and/or modified sequence
tagtggtaccggcaatgtaatattataccatactccaaggacgtggacctgggcatttttatccaggactacaagtctgatatcatcttggctttccaggatgccggccttccacttaagcataaattcggcaaagtcgaggactctctggaactctctttccagggtaaggatgacgtgaagctagacgtgttctttttctacgaggagacagaccacatgtggaatggcggcactcaggccaagactgggaaaaaattcaagtacctgtttcctaaatttactctgtgttggacagagtttgtcgatatgaaggtgcacgtgccatgcgagacactcgaatacattgaagccaactatggaaaggaagccgaaagttacatattgtctatgctctttcgcactactttctggagcctcgcagactttcccctgacgcctgaaaacaacagcagcctgaaaaatgggaacctcaatgtttag

SEQ ID NO: 76670 - DNA, 1293 bp, Artificial Sequence
  derived and/or modified sequence
atgagccgcatcaacaagaatgtggtgctggccctgctgaccctgaccagcagcgccttcctgctcttccagctgtactactacaagcactacctgagcaccaagaatggagctggcctgagcaagagcaagggcagccgcatcggctttgacagcacccagtggagggctgtgaagaagttcatcatgctgaccagcaaccagaatgtgcctgtgttcctgattgaccccctcatcctggagctgatcaacaagaactttgagcaggtgaagaacaccagccacggcagcaccagccagtgcaagttcttctgtgtgccccgggacttcaccgcctttgccctgcagtaccacctgtggaagaatgaggagggctggttcagaattgctgagaacatgggcttccagtgcctgaagattgagagcaaggacccccggctggatggcatcgacagcctgagcggcacagagatccccctgcactacatctgcaagctggccacccacgccatccacctggtggtgttccacgagaggagcggcaactacctgtggcacggccacctgcggctgaaggagcacatcgacaggaagtttgtgcccttcaggaagctgcagtttggccgctacccaggggcctttgacaggcctgagctgcagcaggtgacagtggatggcctggaggtgctgatccccaaggaccccatgcactttgtggaggaggtgccccacagccgcttcattgaatgtcgctacaaggaggcccgggccttcttccagcagtacctggatgacaacacagtggaggccgtggccttcaggaagagcgccaaggagctgctgcagctggccgccaagaccctgaacaagctgggcgtgcccttctggctgagcagcggcacctgcctgggctggtaccggcagtgcaacatcatcccctacagcaaggatgtggacctgggcatcttcatccaggactacaagagtgacatcatcctggccttccaggatgctggcctgcccctgaagcacaagtttgggaaggtggaggacagcctggagctgtccttccagggcaaggatgatgtgaagctggatgtgttcttcttctatgaggagacagaccacatgtggaatggaggcacccaggccaagacaggcaagaagttcaagtacctgttccccaagttcaccctgtgctggacagaatttgtggacatgaaggtgcacgtgccctgtgagaccctggagtacatcgaggccaactacggcaagaaccagcagggcgcctag

SEQ ID NO: 76671 - DNA, 483 bp, Artificial Sequence
  derived and/or modified sequence
tgatggtaccggcagtgcaacatcatcccctacagcaaggatgtggacctgggcatcttcatccaggactacaagagtgacatcatcctggccttccaggatgctggcctgcccctgaagcacaagtttgggaaggtggaggacagcctggagctgtccttccagggcaaggatgatgtgaagctggatgtgttcttcttctatgaggagacagaccacatgtggaatggaggcacccaggccaagacaggcaagaagttcaagtacctgttccccaagttcaccctgtgctggacagaatttgtggacatgaaggtgcacgtgccctgtgagaccctggagtacatcgaggccaactacggcaaggaggccgagagctacatcctgtccatgctgttccgcaccaccttctggagcctggccgacttccccctgaccccagagaacaacagcagcctgaagaatggaaacctgaatgtgtag

SEQ ID NO: 76672 - DNA, 1293 bp, Artificial Sequence
  derived and/or modified sequence
atgagccggatcaacaagaacgtggtgctggccctgctgaccctgactagctctgcttttctgctgttccagttgtattactacaagcactacctctctacaaaaaacggtgctggtctgagtaaaagcaaggggagtagaatagggttcgacagcacacagtggcgagccgtgaagaagttcatcatgttgacttctaaccaaaacgtcccggtctttctcatcgatccactgattctggagctgatcaacaagaactttgagcaggttaagaacacatcccatggcagtacttctcaatgcaaatttttctgcgtgcctcgagactttaccgcatttgcactccagtaccacctgtggaaaaacgaggaaggctggttcagaatcgccgaaaacatgggttttcagtgtctcaagatagaaagtaaggatccccgcctggatggcatagatagtctatcgggaaccgaaatacccctccattacatatgtaagcttgcgacccacgctattcaccttgtggttttccatgagcgcagtggtaattatctctggcatggtcacctgagactgaaagagcacattgatagaaagttcgtccccttcaggaagcttcaattcgggcggtatccgggtgctttcgatcgacccgagttgcaacaagtgacagttgacggcctggaggtgctgatcccgaaagatcccatgcatttcgtcgaggaagtgccacattcgcggttcatcgagtgcagatacaaagaagctagggctttttttcaacaatatctggacgataacaccgtggaggcggttgcattcaggaagtccgccaaagagttgctgcagctggccgccaaaacgctgaacaagttgggcgtgccattctggctgtcctccggcacatgcctgggctggtaccgccagtgtaacatcataccatactcaaaagatgtcgacctaggaatcttcattcaggactacaagtcagacatcattctggcctttcaggatgctggattgcccctcaaacacaagtttgggaaagttgaggactctctggaattgagtttccagggcaaggacgatgtgaaactggacgtgtttttcttctatgaagagaccgaccacatgtggaatgggggaacccaggctaaaaccgggaagaagtttaagtatctgtttcccaagttcacattatgttggacagaattcgtggatatgaaggtccacgtgccttgtgagactctggaatatattgaggcgaactacggaaaaaatcaacagggggcctag

SEQ ID NO: 76673 - DNA, 483 bp, Artificial Sequence
  derived and/or modified sequence
tgatggtaccggcagtgcaacatcatcccctacagcaaggacgtggaccttggaatcttcattcaagactacaaaagcgacattatcctcgccttccaagacgctggtctgccactgaaacataagttcggaaaagtcgaggattccctggagctgtctttccaggggaaagacgacgtcaaactagacgtcttctttttctacgaggagacagaccacatgtggaacggcggaactcaggctaaaactggaaagaagtttaagtacttatttccgaaattcaccctgtgttggacagaattcgtagatatgaaggttcacgtcccttgcgagacacttgagtacatcgaagccaattatggaaaagaggcagagagctacatactatctatgctgttccgcacgaccttttggtcgttagccgacttccctctcacccctgagaacaactccagcctgaagaatggcaacctcaacgtgtag

SEQ ID NO: 76674 - DNA, 1293 bp, Artificial Sequence
  derived and/or modified sequence
atgagccggattaacaagaacgtggtcttagcactgttgacgcttacgtcctctgccttccttctgttccagctatactattacaagcactacctgagtaccaagaatggcgcaggactcagcaaaagtaaaggctcacgcattggctttgattcaacacagtggagggccgtaaagaaatttatcatgcttactagcaaccaaaatgtgccagtcttccttattgacccactgatcctcgagctcatcaataagaattttgagcaagtgaagaatacatctcacggctcaacatcacagtgcaagttcttttgtgtgcctcgagacttcacggcgtttgcacttcagtatcatctttggaagaatgaagagggctggttccggatcgctgagaatatgggcttccaatgcctgaaaatcgaaagcaaggacccacgcctcgatggaattgacagtctctctgggacagagatacctctgcattatatttgtaagcttgctacacatgcgatccatctggtcgtgttccacgaacgcagtggaaactatctgtggcatggccacctccggctgaaagagcacatcgatagaaagtttgtgccgttccgaaaactgcaattcgggagatatcccggagctttcgaccggccagaactccagcaggttacagtagacggactggaggtcttaatacctaaggacccaatgcatttcgtcgaagaggtgccacacagtcgctttatcgaatgcaggtataaagaagctcgggctttttttcagcaatacctggacgataatactgttgaagcggtcgcttttcggaagtctgccaaggaactgttgcagctcgccgctaagacactcaacaaattgggggtgcccttttggctatccagtggcacatgccttggctggtacaggcagtgtaacataattccctattccaaagacgtggacctgggcatctttatccaggactataagagcgacattatcctggcctttcaggatgccggtctgccactgaaacacaagttcggaaaagtggaagatagcctggagttgtcttttcagggaaaggacgacgttaaacttgacgtgttcttcttttatgaagagacagaccacatgtggaatggcggaactcaggccaagaccgggaagaaatttaagtacctgttcccaaagttcaccctgtgctggaccgagtttgttgacatgaaggtgcacgtgccctgcgagacactggaatatatcgaggccaactatggaaagaaccagcagggagcatag

SEQ ID NO: 76675 - DNA, 483 bp, Artificial Sequence
  derived and/or modified sequence
tgatggtataggcagtgtaatatcataccctattcaaaagatgtcgacctgggaatcttcatacaggactataagtcggacatcattctcgcattccaggacgccggacttccactgaagcataaattcggcaaggtggaagacagtctggaattgtcgtttcaggggaaagacgacgtgaaacttgacgtgtttttcttctatgaagagaccgaccatatgtggaacggcggaacacaggcgaaaacaggaaagaaattcaagtacctgtttcctaaatttactttgtgttggactgagtttgtggatatgaaagtacatgtcccttgcgagacactcgagtatattgaggcgaactacggcaaagaggctgaatcttatatcctttcaatgctcttcaggacaactttctggtccctcgccgactttccactgactccggaaaacaactcgagcttgaagaacggaaatctcaacgtgtag

SEQ ID NO: 76676 - DNA, 1290 bp, Artificial Sequence
  derived and/or modified sequence
atgagccgcatcaacaagaacgtggtgctggccctgctgaccctgaccagcagcgccttcctgctgttccagctgtactactacaagcactacctgagcaccaagaacggcgccggcctgagcaagagcaagggcagccgcatcggcttcgacagcacccagtggcgcgccgtgaagaagttcatcatgctgaccagcaaccagaacgtgcccgtgttcctgatcgaccccctgatcctggagctgatcaacaagaacttcgagcaggtgaagaacaccagccacggcagcaccagccagtgcaagttcttctgcgtgccccgcgacttcaccgccttcgccctgcagtaccacctgtggaagaacgaggagggctggttccgcatcgccgagaacatgggcttccagtgcctgaagatcgagagcaaggacccccgcctggacggcatcgacagcctgagcggcaccgagatccccctgcactacatctgcaagctggccacccacgccatccacctggtggtgttccacgagcgcagcggcaactacctgtggcacggccacctgcgcctgaaggagcacatcgaccgcaagttcgtgcccttccgcaagctgcagttcggccgctaccccggcgccttcgaccgccccgagctgcagcaggtgaccgtggacggcctggaggtgctgatccccaaggaccccatgcacttcgtggaggaggtgccccacagccgcttcatcgagtgccgctacaaggaggcccgcgccttcttccagcagtacctggacgacaacaccgtggaggccgtggccttccgcaagagcgccaaggagctgctgcagctggccgccaagaccctgaacaagctgggcgtgcccttctggctgagcagcggcacctgcctgggctggtaccgccagtgcaacatcatcccctacagcaaggacgtggacctgggcatcttcatccaggactacaagagcgacatcatcctggccttccaggacgccggcctgcccctgaagcacaagttcggcaaggtggaggacagcctggagctgagcttccagggcaaggacgacgtgaagctggacgtgttcttcttctacgaggagaccgaccacatgtggaacggcggcacccaggccaagaccggcaagaagttcaagtacctgttccccaagttcaccctgtgctggaccgagttcgtggacatgaaggtgcacgtgccctgcgagaccctggagtacatcgaggccaactacggcaagaaccagcagggcgcc

SEQ ID NO: 76677 - DNA, 477 bp, Artificial Sequence
  derived and/or modified sequence
tggtaccgccagtgcaacatcatcccctacagcaaggacgtggacctgggcatcttcatccaggactacaagagcgacatcatcctggccttccaggacgccggcctgcccctgaagcacaagttcggcaaggtggaggacagcctggagctgagcttccagggcaaggacgacgtgaagctggacgtgttcttcttctacgaggagaccgaccacatgtggaacggcggcacccaggccaagaccggcaagaagttcaagtacctgttccccaagttcaccctgtgctggaccgagttcgtggacatgaaggtgcacgtgccctgcgagaccctggagtacatcgaggccaactacggcaaggaggccgagagctacatcctgagcatgctgttccgcaccaccttctggagcctggccgacttccccctgacccccgagaacaacagcagcctgaagaacggcaacctgaacgtg

SEQ ID NO: 76678 - DNA, 1293 bp, Artificial Sequence
  derived and/or modified sequence
atgagcagaatcaacaagaacgtggtgctggccctgctgaccctgaccagcagcgccttcctgctgttccagctgtactactacaagcactacctgagcaccaagaacggcgccggcctgagcaagagcaagggcagcagaatcggcttcgacagcacccagtggagagccgtgaagaagttcatcatgctgaccagcaaccagaacgtgcccgtgttcctgatcgaccccctgatcctggagctgatcaacaagaacttcgagcaggtgaagaacaccagccacggcagcaccagccagtgcaagttcttctgcgtgcccagagacttcaccgccttcgccctgcagtaccacctgtggaagaacgaggagggctggttcagaatcgccgagaacatgggcttccagtgcctgaagatcgagagcaaggaccccagactggacggcatcgacagcctgagcggcaccgagatccccctgcactacatctgcaagctggccacccacgccatccacctggtggtgttccacgagagaagcggcaactacctgtggcacggccacctgagactgaaggagcacatcgacagaaagttcgtgcccttcagaaagctgcagttcggcagataccccggcgccttcgacagacccgagctgcagcaggtgaccgtggacggcctggaggtgctgatccccaaggaccccatgcacttcgtggaggaggtgccccacagcagattcatcgagtgcagatacaaggaggccagagccttcttccagcagtacctggacgacaacaccgtggaggccgtggccttcagaaagagcgccaaggagctgctgcagctggccgccaagaccctgaacaagctgggcgtgcccttctggctgagcagcggcacctgcctgggctggtacagacagtgcaacatcatcccctacagcaaggacgtggacctgggcatcttcatccaggactacaagagcgacatcatcctggccttccaggacgccggcctgcccctgaagcacaagttcggcaaggtggaggacagcctggagctgagcttccagggcaaggacgacgtgaagctggacgtgttcttcttctacgaggagaccgaccacatgtggaacggcggcacccaggccaagaccggcaagaagttcaagtacctgttccccaagttcaccctgtgctggaccgagttcgtggacatgaaggtgcacgtgccctgcgagaccctggagtacatcgaggccaactacggcaagaaccagcagggcgcctag

SEQ ID NO: 76679 - DNA, 483 bp, Artificial Sequence
  derived and/or modified sequence
tgatggtacagacagtgcaacatcatcccctacagcaaggacgtggacctgggcatcttcatccaggactacaagagcgacatcatcctggccttccaggacgccggcctgcccctgaagcacaagttcggcaaggtggaggacagcctggagctgagcttccagggcaaggacgacgtgaagctggacgtgttcttcttctacgaggagaccgaccacatgtggaacggcggcacccaggccaagaccggcaagaagttcaagtacctgttccccaagttcaccctgtgctggaccgagttcgtggacatgaaggtgcacgtgccctgcgagaccctggagtacatcgaggccaactacggcaaggaggccgagagctacatcctgagcatgctgttcagaaccaccttctggagcctggccgacttccccctgacccccgagaacaacagcagcctgaagaacggcaacctgaacgtgtag

SEQ ID NO: 76680 - DNA, 2385 bp, Artificial Sequence
  derived and/or modified sequence
atgggcgccgccagctgcgaggacgaggagctggagttcaagctggtgttcggcgaggagaaggaggccccccccctgggcgccggcggcctgggcgaggagctggacagcgaggacgcccccccctgctgcagactggccctgggcgagccccccccctacggcgccgcccccatcggcatccccagaccccccccccccagacccggcatgcacagccccccccccagacccgcccccagccccggcacctgggagagccagcccgccagaagcgtgagactgggcggccccggcggcggcgccggcggcgccggcggcggcagagtgctggagtgccccagcatcagaatcaccagcatcagccccacccccgagccccccgccgccctggaggacaaccccgacgcctggggcgacggcagccccagagactaccccccccccgagggcttcggcggctacagagaggccggcggccagggcggcggcgccttcttcagccccagccccggcagcagcagcctgagcagctggagcttcttcagcgacgccagcgacgaggccgccctgtacgccgcctgcgacgaggtggagagcgagctgaacgaggccgccagcagattcggcctgggcagccccctgcccagccccagagccagccccagaccctggacccccgaggacccctggagcctgtacggccccagccccggcggcagaggccccgaggacagctggctgctgctgagcgcccccggccccacccccgccagccccagacccgccagcccctgcggcaagagaagatacagcagcagcggcacccccagcagcgccagccccgccctgagcagaagaggcagcctgggcgaggagggcagcgagccccccccccccccccccctgcccctggccagagaccccggcagccccggccccttcgactacgtgggcgccccccccgccgagagcatcccccagaagaccagaagaaccagcagcgagcaggccgtggccctgcccagaagcgaggagcccgccagctgcaacggcaagctgcccctgggcgccgaggagagcgtggccccccccggcggcagcagaaaggaggtggccggcatggactacctggccgtgcccagccccctggcctggagcaaggccagaatcggcggccacagccccatcttcagaaccagcgccctgccccccctggactggcccctgcccagccagtacgagcagctggagctgagaatcgaggtgcagcccagagcccaccacagagcccactacgagaccgagggcagcagaggcgccgtgaaggccgcccccggcggccaccccgtggtgaagctgctgggctacagcgagaagcccctgaccctgcagatgttcatcggcaccgccgacgagagaaacctgagaccccacgccttctaccaggtgcacagaatcaccggcaagatggtggccaccgccagctacgaggccgtggtgagcggcaccaaggtgctggagatgaccctgctgcccgagaacaacatggccgccaacatcgactgcgccggcatcctgaagctgagaaacagcgacatcgagctgagaaagggcgagaccgacatcggcagaaagaacaccagagtgagactggtgttcagagtgcacgtgccccagggcggcggcaaggtggtgagcgtgcaggccgccagcgtgcccatcgagtgcagccagagaagcgcccaggagctgccccaggtggaggcctacagccccagcgcctgcagcgtgagaggcggcgaggagctggtgctgaccggcagcaacttcctgcccgacagcaaggtggtgttcatcgagagaggccccgacggcaagctgcagtgggaggaggaggccaccgtgaacagactgcagagcaacgaggtgaccctgaccctgaccgtgcccgagtacagcaacaagagagtgagcagacccgtgcaggtgtacttctacgtgagcaacggcagaagaaagagaagccccacccagagcttcagattcctgcccgtgatctgcaaggaggagcccctgcccgacagcagcctgagaggcttccccagcgccagcgccacccccttcggcaccgacatggacttcagcccccccagacccccctaccccagctacccccacgaggaccccgcctgcgagaccccctacctgagcgagggcttcggctacggcatgccccccctgtacccccagaccggccccccccccagctacagacccggcctgagaatgttccccgagaccagaggcaccaccgtgagcgagatcatcggcagagacctgagcggcttccccgccccccccggcgaggagccccccgcctag

SEQ ID NO: 76681 - DNA, 432 bp, Artificial Sequence
  derived and/or modified sequence
atgggcgccgccagctgcgaggacgaggagctggagttcaagctggtgttcggcgaggagaaggaggccccccccctgggcgccggcggcctgggcgaggagctggacagcgaggacgcccccccctgctgcagactggccctgggcgagccccccccctacggcgccgcccccatcggcatccccagaccccccccccccagacccggcatgcacagccccccccccagacccgcccccagccccggcacctgggagagccagcccgccagaagcgtgagactgggcggccccggcggcggcgccggcggcgccggcggcggcagagtgctggagtgccccagcatcagaatcaccagcatcagccccacccccgagccccccgccgccctggaggacaaccccgacgcctggggcgacggcagcccctag

SEQ ID NO: 76682 - DNA, 2385 bp, Artificial Sequence
  derived and/or modified sequence
atgggtgccgccagctgtgaagacgaagagctcgagttcaagttggtttttggcgaagaaaaagaggcaccacctctaggtgccgggggtttgggcgaggaacttgattcggaagacgctccaccctgctgccggttggccctgggcgagccccccccctacggggccgctccgatcggcatccctaggcctcctccacctagaccaggcatgcactctccgcctccccgaccagctccaagcccaggcacatgggagagtcagcctgcacgctcagtgcgcctgggaggacccggcggcggggcaggcggagctggaggggggagagtgctcgagtgtccctctatacgcataacgtctatctcgcctacaccggagcctcccgcagctctcgaggacaatcccgacgcctggggtgatgggagcccacgtgactacccccccccggagggattcggaggctaccgcgaagccggggggcagggaggaggggcattcttctctccgagccctggctcctcatctctcagcagctggtctttcttttccgatgcctccgacgaagcagccttgtacgccgcttgtgatgaggtagagagcgaactgaatgaggccgcgtctcgtttcgggctcggcagtccacttcctagcccaagggccagtccccgaccatggacgcctgaagatccctggtctctctacggcccaagtcctgggggaaggggccccgaggattcatggctgctgctttctgccccaggtcccacacccgcaagccccaggccggcatcgccctgtggcaagaggcgttattcgtcctccggaacccctagttctgcctctcccgccctctcccgtaggggatctctcggggaggaaggctcggagccgccgccgcccccccccctgcctctggcacgggacccggggagtcctggcccttttgactatgtgggcgccccccccgccgagtccatcccgcagaagactcggaggacaagctcagaacaagccgtggctctgccccgatctgaagagcctgcttcttgcaatggaaagctgcctttaggtgcagaggagtccgtcgctccccctggaggctcgagaaaggaagtagccggaatggattatctggccgttcccagccccctcgcctggtccaaggctcgtatcggaggccattcccctatttttcgcacctctgcactgcctccccttgactggccactgcctagccagtacgaacagctggagctgagaattgaagtgcagccccgggcccatcaccgcgcgcattacgagacagagggatccaggggagctgtgaaagcagcaccaggtgggcatcccgtggtcaagctgcttggatacagcgaaaagccgttgacattacagatgttcataggcactgcagacgagcggaacctgcggccacacgcattttaccaagtccatcgcattacagggaaaatggtggccactgcttcctacgaggccgtggtatccggcaccaaggtgctggagatgactctattacccgagaacaatatggccgcgaacattgactgcgctggaattctgaagctccggaactcagacatcgagctgaggaagggggaaactgatattgggagaaaaaataccagagtgcgtctggtgttccgggttcatgtgccccaggggggcggcaaggtcgtaagcgtccaggccgcttccgttcctatcgagtgtagccaacggagcgcgcaagagctccctcaagtggaagcttattctccttccgcctgtagcgtgcgtggtggggaggagcttgttctcacgggatcaaactttcttccggattcgaaggtcgtttttatcgagcggggccccgatggcaagctccagtgggaagaagaggcaactgtgaaccggttgcagagtaatgaggtaaccctgactttaacggtccccgaatactccaataaacgggtctcccgacccgttcaggtgtacttttacgtgtctaacggccgacgcaagaggagtcccacacagagttttaggttcctaccagtcatctgtaaggaagagcctttaccagacagctccctgagaggcttcccttctgccagcgcaactccctttggtaccgacatggactttagcccccccagaccaccatatccatcttaccctcacgaggatcctgcatgcgagacaccatatctgtctgaaggattcggatacgggatgcctcctctgtaccctcaaacgggacctccaccttcatatcgcccagggctgaggatgtttcctgagacacgcggtacaactgtttctgaaattataggtcgagacctgtctggatttcctgccccccccggagaggagcctccggcttag

SEQ ID NO: 76683 - DNA, 432 bp, Artificial Sequence
  derived and/or modified sequence
atgggggctgcttcctgcgaggatgaagaactcgaatttaagctggtattcggcgaagagaaagaagctcctccacttggggcaggcggcttaggagaagagctcgactccgaagacgcacccccttgctgcaggctggcccttggggaaccccccccttacggtgcggcacccattggaattccgagacccccaccccctcgacccgggatgcacagcccaccccccaggcctgcaccctcgccagggacgtgggagtctcagcctgcgcgatctgtgagactcggcggccccggcggcggagcaggtggagccggcggcggcagggtgctcgagtgtccctctatcaggataacatcaatctcccctacccccgaaccccctgctgccttagaggataatcccgacgcctggggcgacgggtctccgtag

SEQ ID NO: 76684 - DNA, 2385 bp, Artificial Sequence
  derived and/or modified sequence
atgggcgccgccagctgtgaagatgaggagctggagttcaagctggtgtttggagaggagaaggaggccccacccctgggcgctgggggcctgggggaggagctggacagtgaagatgccccaccctgctgccgcctggccctgggggagcccccaccctacggggccgcccccatcggcatcccccggcccccaccacccaggcctggcatgcacagccccccacccaggcctgcccccagccctggcacctgggagagccagcctgcccggtctgtgcggctgggcggccctgggggcggggccggcggggccggcggcggccgggtgctggagtgccccagcatccgcatcaccagcatcagccccaccccagagcccccagctgccctggaggacaacccagatgcctggggagatggcagcccccgggactacccacctcctgagggctttggaggctaccgggaggccggcggccagggcggcggggccttcttcagccccagccctggcagcagcagcctgagctcctggagcttcttcagtgatgccagtgatgaagctgccctgtatgctgcctgtgatgaggtggagagcgagctgaatgaagctgccagcagatttggcctgggcagccccctgcccagcccccgggccagcccccggccctggaccccagaggacccctggagcctgtatggccccagccctgggggccggggccctgaggacagctggctgctgctgagcgcccctggccccaccccagccagccccaggcctgccagcccctgtgggaagaggcgctacagcagcagcggcacccccagcagcgccagccctgccctgagccggcggggcagcctgggggaggagggcagcgagcccccacctcctccacccctgcccctggcccgggaccccggcagccctggcccctttgattatgtgggcgcccctcctgctgagagcatcccccagaagaccaggaggaccagcagcgagcaggccgtggccctgcccaggtctgaggagcccgccagctgcaatggcaagctgcccctgggcgctgaggagagcgtggcccctcctgggggcagcaggaaggaggtggccggcatggactacctggccgtgcccagccccctggcctggagcaaggccagaattggaggccacagccccatcttccgcaccagcgccctgccccccctggactggcccctgcccagccagtatgagcagctggagctgagaattgaggtgcagccccgggcccaccaccgggcccactatgaaacagagggcagcagaggagctgtgaaggccgcccctgggggccaccctgtggtgaagctgctgggctacagcgagaagcccctgaccctgcagatgttcatcggcacagcagatgagaggaacctgcggccccacgccttctaccaggtgcaccgcatcaccgggaagatggtggccacagccagctatgaagctgtggtgtctggcaccaaggtgctggagatgaccctgctgcctgagaacaacatggccgccaacatcgactgtgccggcatcctgaagctgaggaacagcgacatcgagctgaggaagggggagacagacattggaaggaagaacaccagggtgcggctggtgttccgggtgcacgtgccccagggcggcggcaaggtggtgtctgtgcaggccgcctctgtgcccatcgagtgcagccagaggtctgcccaggagctgccccaggtggaggcctacagccccagcgcctgcagcgtgcggggcggggaggagctggtgctgaccggcagcaacttcctgcctgacagcaaggtggtgttcatcgagcggggcccagatggcaagctgcagtgggaggaggaggccaccgtgaaccggctgcagagcaatgaggtgaccctgaccctgactgtgcctgagtacagcaacaagagggtgtccaggcctgtgcaggtgtacttctacgtgtccaatggccgcaggaagaggagccccacccagagcttccgcttcctgcctgtgatctgcaaggaggagcccctgcctgacagcagcctgcggggcttccccagcgccagcgccaccccatttggaacagacatggacttcagccccccccggcccccctaccccagctacccccatgaggaccctgcctgtgagaccccctacctgtctgagggcttcggctacggcatgccacccctgtacccccagacaggccccccacccagctaccggcccggcctgaggatgtttcctgagacccggggcaccaccgtgtctgagatcatcggccgggacctgagcggcttccctgcccctcctggagaggagcccccagcctag

SEQ ID NO: 76685 - DNA, 432 bp, Artificial Sequence
  derived and/or modified sequence
atgggcgccgccagctgtgaagatgaggagctggagttcaagctggtgtttggagaggagaaggaggccccacccctgggcgctgggggcctgggggaggagctggacagtgaagatgccccaccctgctgccgcctggccctgggggagcccccaccctacggggccgcccccatcggcatcccccggcccccaccacccaggcctggcatgcacagccccccacccaggcctgcccccagccctggcacctgggagagccagcctgcccggtctgtgcggctgggcggccctgggggcggggccggcggggccggcggcggccgggtgctggagtgccccagcatccgcatcaccagcatcagccccaccccagagcccccagctgccctggaggacaacccagatgcctggggagatggcagcccctag

SEQ ID NO: 76686 - DNA, 2385 bp, Artificial Sequence
  derived and/or modified sequence
atgggcgccgccagctgcgaggacgaggagctggagttcaagctggtatttggcgaagaaaaggaggcccctcctctgggcgctggcggcctaggggaggagctggacagtgaagacgcacccccatgttgtcgcttggccctgggggagcctccgccttatggcgcagcgcctattggaataccccgccccccacccccccgccctggtatgcactcaccaccaccccgccctgcaccctctcccggcacctgggagtcacagccggcaaggagcgtgagactgggcggacccggcgggggcgccggcggggctggaggcggccgcgtgttagagtgtcccagcattcgcatcacatctatttcgccgacacctgaaccgccagccgcacttgaggataatcctgatgcttggggcgatgggtcacctagggactacccccccccagagggcttcggaggctacagagaagctggggggcaggggggcggggctttcttctctccctcaccagggtccagctctctttctagttggtccttcttctccgatgctagcgatgaagccgctctatatgcggcatgcgacgaggttgagagcgaattaaatgaggcggcctcccgttttggcctcggcagtcctctcccatccccccgcgcatctccgaggccctggacccctgaagatccctggtcgctgtacgggcccagccccggcggcagaggaccggaagattcctggttgctcctgagcgctcctggacctaccccggctagtccacgccccgcaagcccttgtggcaagcgtagatattcttcttctgggactccgtcatcagcatctccagctttaagtaggcggggctcactcggagaagaaggaagcgagccaccgccaccccccccattgccactcgccagggatccaggttcccccggcccattcgattacgtaggcgctccaccagctgagtcgatccctcaaaaaacacgacgcacgagctcggagcaggccgtcgccctcccaaggagtgaggaacccgcttcttgcaacggaaagctccccttgggcgcggaagaatctgtggccccacccggggggtcaagaaaggaggttgccggaatggattatctggcggtgccatctcccctcgcttggtctaaggccaggatcgggggccactcgccgatctttaggacctctgctctgcctcccctggactggcccctgccatcgcaatatgagcagctcgaacttaggatcgaggtccagccaagagcccaccacagggcccactacgaaacggagggtagcaggggggccgttaaggcagccccgggagggcatcccgtcgtgaaactgctggggtatagtgaaaaaccgcttacgctgcagatgtttattggaaccgctgacgagaggaatctaaggccacatgctttctaccaagtgcaccgcattaccggcaagatggtggcaaccgccagctatgaagccgtggtaagcgggaccaaagttctggagatgaccctgctgcccgaaaataatatggctgcaaacatcgattgcgcaggtatcctcaagctgcggaattcggatattgagctccggaagggagagacagatatcggcagaaaaaacacaagagtcagactggtgtttagagtccatgtgccgcagggcggcggtaaggtggttagcgtgcaggcggcttcagtgcccatcgaatgttcccagcggtctgctcaggaattaccgcaggttgaggcctattctccctcagcatgttccgtgcggggcggggaagagctggtcctcaccggtagcaatttcctgcctgactcaaaagtggtgtttatcgaacgcggaccagatggaaaattgcagtgggaggaagaggctaccgtgaatagactgcagtcgaatgaggtgaccttaactctgacagtcccggagtattctaataaacgcgtgtcaagaccggttcaagtctacttctatgtgagtaacggcagacgaaagagaagtcctactcagtcttttcgctttcttcccgtgatttgtaaggaggagcccctgccggacagctcgctgcggggctttccatccgccagcgctactcccttcggcaccgatatggatttttcgccccctcgacctccatacccatcttatccgcatgaggatcccgcttgtgaaacaccctacctgagtgaaggattcggttatggtatgcccccactgtaccctcaaaccgggccccctccttcctataggccaggtctcaggatgtttcccgaaactaggggcacaacggtgagcgagattattgggcgggatctatcagggttccctgctcctccgggagaagagcctcctgcctag

SEQ ID NO: 76687 - DNA, 432 bp, Artificial Sequence
  derived and/or modified sequence
atgggcgccgccagctgcgaggacgaggagctggagttcaagctggtttttggagaggagaaagaagcacctcctcttggagccggcggactgggcgaagaattagatagcgaggatgcccccccatgttgtagattggccttgggggagccccctccctatggggccgccccaatcggcatcccccggccgccacctccccggccagggatgcattctcctcctccccggcccgccccctcccccgggacgtgggagagccagcctgcaaggtcagtgcgtctgggaggaccaggtggcggagctgggggcgcaggtggggggcgcgtgctcgaatgccccagcatccggataaccagcatctcccccactcccgaaccgcctgctgctctcgaggataatcctgacgcgtggggagatgggagtccctag

SEQ ID NO: 76688 - DNA, 2385 bp, Artificial Sequence
  derived and/or modified sequence
atgggagcggcatcatgtgaggacgaggaattggagtttaagctggtttttggcgaggagaaggaagccccacctctgggtgcaggtggcctgggcgaggagctcgactcggaagatgctccgccatgctgtcggctggctctgggcgagcctcccccttacggtgcggcacctattggtatacctagacccccaccaccaaggcccggtatgcattcaccccctccgagacctgctccatcacccggtacttgggagtctcagccggctcggagcgttcgcctgggtggcccaggaggcggagccggaggggctggtggtggcagggtcctcgagtgtccttccatccggatcacctctatttcccctacccctgagccaccagccgcattagaagacaatcctgacgcttggggagatggctcccccagagattacccccctccggagggattcggtggctatagggaggcgggtggacaggggggaggtgccttcttctccccgagccccggatcatcttctctcagtagctggagttttttttcagacgcatctgacgaagccgctttgtacgccgcatgtgatgaggttgaaagcgaacttaatgaggccgctagtcgcttcggattaggctccccgctgccatcgcccagggcaagcccaaggccctggacccctgaggacccatggtccctttacggcccatcacctggtggcagggggccagaggattcctggcttctactgagtgctcctggtcccactcctgcaagccccagacccgctagcccctgcggtaaacggaggtatagctcatcaggaacgccctcatctgcatcaccagccctgtccaggagggggtctctcggcgaggagggctccgaacccccaccgccaccaccactccccctggcaagagatccgggtagcccgggtcccttcgactatgttggggcaccacccgctgaatccattccccagaagacccggagaacctcgagtgagcaggctgtggcattaccccgttcagaggaacctgcgtcatgtaacggaaagctgccactgggagcggaggagagcgtggcccctcccggagggtcaaggaaggaggttgctgggatggattatctggccgtcccctccccgctggcctggtctaaggccaggatcggtgggcattcacccatcttccgaacaagcgcattgcctcctctggactggccacttccaagtcagtacgaacagctggagctgaggatcgaagtgcaaccgcgtgctcaccaccgagcacattacgagacagagggatctcgcggagccgttaaagctgctccaggcggacaccccgtggtcaaactgttgggttacagtgagaaacccctgaccctgcagatgtttatcggcactgcagacgagagaaacctgcgcccacatgctttctaccaggtacataggatcactgggaagatggtggccacagcgtcttatgaggccgtcgtgagcgggaccaaagtgttggaaatgacccttcttcctgagaacaatatggctgccaatatagactgtgccggtatcttgaagctgagaaattcagatatcgaactacggaaaggagaaacagacatcgggaggaaaaacacgagagtgaggctggtttttcgagtacacgtgccccaaggtggcggaaaggtggtgagtgtccaggccgcttcggtgcctatagaatgtagccagcgcagtgcccaagaacttccccaggtggaggcatattctcccagtgcatgctcagtacgcggaggcgaggagctggtgttgaccgggagcaattttctccccgactcaaaggttgtatttattgagcgtggtcccgatggcaagctgcagtgggaggaggaggcgacagttaataggctgcagtctaacgaagtcacactgacccttactgtgccagaatattctaataaaagggtgtctaggcccgttcaggtttacttctatgtgagtaacggtcggagaaaaaggagccccacgcagtcttttcgctttcttccagtaatttgcaaagaagagccattaccggacagctctctgcgcggttttccctcagcatccgccacaccctttggaacagacatggattttagtccacctcggccaccgtacccttcctaccctcacgaggacccggcatgcgagacaccatatctgtctgagggatttggctacggcatgccccctctgtacccccagactggccctcccccttcctatcgccctggcctcaggatgtttcctgaaaccaggggaactacagtgtctgaaataattggacgcgacctgagcgggttcccagccccacccggtgaggaacctcctgcatag

SEQ ID NO: 76689 - DNA, 432 bp, Artificial Sequence
  derived and/or modified sequence
atgggagccgcttcctgtgaggacgaggagctggagttcaagttggtctttggggaagaaaaagaggctccacctctgggcgctggaggcttgggtgaagagctggacagtgaggatgctcccccatgttgtaggctagccctgggagaaccacctccatacggggcagcccctattgggattccaaggcctccaccccctcgtcccggaatgcactctcctcctccaaggcccgctcctagccctggtacctgggagagtcagccagcgaggtccgtgagacttgggggtcccggtggcggtgccggtggtgcgggaggcggtcgggttctcgagtgcccctccattaggattactagtattagccctactccagagccaccagctgccttggaggataaccctgatgcctggggcgatggttctccctag

SEQ ID NO: 76690 - protein, 832 aa, Artificial Sequence
  derived and/or modified sequence
MHSPPPRPAPSPGTWESQPARSVRLGGPGGGAGGAGGGRVLECPSIRITSISPTPEPPAALEDNPDAWGDGSPRDYPPPEGFGGYREAGGQGGGAFFSPSPGSSSLSSWSFFSDASDEAALYAACDEVESELNEAASRFGLGSPLPSPRASPRPWTPEDPWSLYGPSPGGRGPEDSWLLLSAPGPTPASPRPASPCGKRRYSSSGTPSSASPALSRRGSLGEEGSEPPPPPPLPLARDPGSPGPFDYVGAPPAESIPQKTRRTSSEQAVALPRSEEPASCNGKLPLGAEESVAPPGGSRKEVAGMDYLAVPSPLAWSKARIGGHSPIFRTSALPPLDWPLPSQYEQLELRIEVQPRAHHRAHYETEGSRGAVKAAPGGHPVVKLLGYSEKPLTLQMFIGTADERNLRPHAFYQVHRITGKMVATASYEAVVSGTKVLEMTLLPENNMAANIDCAGILKLRNSDIELRKGETDIGRKNTRVRLVFRVHVPQGGGKVVSVQAASVPIECSQRSAQELPQVEAYSPSACSVRGGEELVLTGSNFLPDSKVVFIERGPDGKLQWEEEATVNRLQSNEVTLTLTVPEYSNKRVSRPVQVYFYVSNGRRKRSPTQSFRFLPVICKEEPLPDSSLRGFPSASATPFGTDMDFSPPRPPYPSYPHEDPACETPYLSEGFGYGMPPLYPQTGPPPSYRPGLRMFPETRGTTGCAQPPAVSFLPRPFPSDPYGGRGSSFSLGLPFSPPAPFRPPPLPASPPLEGPFPSQSDVHPLPAEGYNKVGPGYGPGEGAPEQEKSRGGYSSGFRDSVPIQGITLEEVSEIIGRDLSGFPAPPGEEPPA

SEQ ID NO: 76691 - protein, 190 aa, Artificial Sequence
  derived and/or modified sequence
MDFSPPRPPYPSYPHEDPACETPYLSEGFGYGMPPLYPQTGPPPSYRPGLRMFPETRGTTGCAQPPAVSFLPRPFPSDPYGGRGSSFSLGLPFSPPAPFRPPPLPASPPLEGPFPSQSDVHPLPAEGYNKVGPGYGPGEGAPEQEKSRGGYSSGFRDSVPIQGITLEEVSEIIGRDLSGFPAPPGEEPPA

SEQ ID NO: 76692 - protein, 437 aa, Artificial Sequence
  derived and/or modified sequence
MFIGTADERNLRPHAFYQVHRITGKMVATASYEAVVSGTKVLEMTLLPENNMAANIDCAGILKLRNSDIELRKGETDIGRKNTRVRLVFRVHVPQGGGKVVSVQAASVPIECSQRSAQELPQVEAYSPSACSVRGGEELVLTGSNFLPDSKVVFIERGPDGKLQWEEEATVNRLQSNEVTLTLTVPEYSNKRVSRPVQVYFYVSNGRRKRSPTQSFRFLPVICKEEPLPDSSLRGFPSASATPFGTDMDFSPPRPPYPSYPHEDPACETPYLSEGFGYGMPPLYPQTGPPPSYRPGLRMFPETRGTTGCAQPPAVSFLPRPFPSDPYGGRGSSFSLGLPFSPPAPFRPPPLPASPPLEGPFPSQSDVHPLPAEGYNKVGPGYGPGEGAPEQEKSRGGYSSGFRDSVPIQGITLEEVSEIIGRDLSGFPAPPGEEPPA

SEQ ID NO: 76693 - DNA, 573 bp, Artificial Sequence
  derived and/or modified sequence
atggacttcagcccccccagacccccctaccccagctacccccacgaggaccccgcctgcgagaccccctacctgagcgagggcttcggctacggcatgccccccctgtacccccagaccggccccccccccagctacagacccggcctgagaatgttccccgagaccagaggcaccaccggctgcgcccagccccccgccgtgagcttcctgcccagacccttccccagcgacccctacggcggcagaggcagcagcttcagcctgggcctgcccttcagcccccccgcccccttcagacccccccccctgcccgccagcccccccctggagggccccttccccagccagagcgacgtgcaccccctgcccgccgagggctacaacaaggtgggccccggctacggccccggcgagggcgcccccgagcaggagaagagcagaggcggctacagcagcggcttcagagacagcgtgcccatccagggcatcaccctggaggaggtgagcgagatcatcggcagagacctgagcggcttccccgccccccccggcgaggagccccccgcctag

SEQ ID NO: 76694 - DNA, 1314 bp, Artificial Sequence
  derived and/or modified sequence
atgttcatcggcaccgccgacgagagaaacctgagaccccacgccttctaccaggtgcacagaatcaccggcaagatggtggccaccgccagctacgaggccgtggtgagcggcaccaaggtgctggagatgaccctgctgcccgagaacaacatggccgccaacatcgactgcgccggcatcctgaagctgagaaacagcgacatcgagctgagaaagggcgagaccgacatcggcagaaagaacaccagagtgagactggtgttcagagtgcacgtgccccagggcggcggcaaggtggtgagcgtgcaggccgccagcgtgcccatcgagtgcagccagagaagcgcccaggagctgccccaggtggaggcctacagccccagcgcctgcagcgtgagaggcggcgaggagctggtgctgaccggcagcaacttcctgcccgacagcaaggtggtgttcatcgagagaggccccgacggcaagctgcagtgggaggaggaggccaccgtgaacagactgcagagcaacgaggtgaccctgaccctgaccgtgcccgagtacagcaacaagagagtgagcagacccgtgcaggtgtacttctacgtgagcaacggcagaagaaagagaagccccacccagagcttcagattcctgcccgtgatctgcaaggaggagcccctgcccgacagcagcctgagaggcttccccagcgccagcgccacccccttcggcaccgacatggacttcagcccccccagacccccctaccccagctacccccacgaggaccccgcctgcgagaccccctacctgagcgagggcttcggctacggcatgccccccctgtacccccagaccggccccccccccagctacagacccggcctgagaatgttccccgagaccagaggcaccaccggctgcgcccagccccccgccgtgagcttcctgcccagacccttccccagcgacccctacggcggcagaggcagcagcttcagcctgggcctgcccttcagcccccccgcccccttcagacccccccccctgcccgccagcccccccctggagggccccttccccagccagagcgacgtgcaccccctgcccgccgagggctacaacaaggtgggccccggctacggccccggcgagggcgcccccgagcaggagaagagcagaggcggctacagcagcggcttcagagacagcgtgcccatccagggcatcaccctggaggaggtgagcgagatcatcggcagagacctgagcggcttccccgccccccccggcgaggagccccccgcctag

SEQ ID NO: 76695 - DNA, 573 bp, Artificial Sequence
  derived and/or modified sequence
atggacttttcaccccctcgacccccatatccatcatatccccacgaggatccggcctgtgagacaccgtatctgtccgagggatttggatacggtatgcctccactgtacccccagactggccctccgccctcatatcggcctggactgcggatgttcccggaaacgagaggaaccacaggttgcgcccaaccccctgctgttagtttccttccacggccattcccaagcgacccctatggtggacggggcagctccttcagcttgggcctcccattttctccacccgctcctttccgccccccacctctgcctgcaagcccaccactggagggtccgtttcctagccagtctgatgtgcatccactgccggctgagggctataacaaagtgggacctggttacggaccaggcgagggcgcaccggaacaggagaaatctcgagggggatattccagcggcttccgcgattctgttcctatccaggggattactcttgaggaggtgagcgaaataataggcagagacttgtccgggtttcccgctcctcccggcgaggagccgcctgcgtag

SEQ ID NO: 76696 - DNA, 1314 bp, Artificial Sequence
  derived and/or modified sequence
atgttcattggcaccgctgacgagcgaaacctacgcccccacgcattctatcaggtacacagaattactggcaagatggtggcaaccgcttcatacgaggccgtggtctcaggcacaaaagttttagagatgacactgttaccagaaaacaatatggccgctaatattgattgtgccggcatcctgaagctgcggaactcagacatcgagctaagaaaaggagagacagacattggaaggaagaatactcgtgttagacttgtgttccgagtccacgtaccccaggggggaggaaaagtagtgagcgtccaggctgcttcagtacctatagagtgcagtcagcgctccgcccaggagttgccgcaggtcgaagcatactctccttccgcttgctctgttcgcgggggggaagagctggttttgaccggctcaaatttcttacccgacagcaaggtggttttcatcgagcgggggccagacggaaagctccagtgggaggaagaagctaccgtcaaccgccttcagagcaacgaagttaccctgactcttaccgttcctgaatattccaacaagcgggtctctaggccagtgcaggtgtatttttacgtttccaatggaagaaggaagaggagccctacgcagtcttttcgattcctcccggtcatttgcaaggaggaacccctgccagattcatcactcagaggcttccccagcgctagtgccacgccgtttggaacagatatggatttttccccccctcggccgccatacccatcttatcctcacgaggatcctgcatgtgagactccatacctgtccgaaggcttcggctatggaatgccccctctctatccacagacgggtccacccccctcttatcgccctggcctgcggatgtttccagagaccagaggtacaactgggtgcgcacaacctcccgccgtcagtttcctccctcgacccttcccctcagatccttatggaggacgggggagcagtttctcactcggcctcccattttctccccctgcgccttttagaccaccaccccttccagcctcacctcccctggaggggccctttcctagccagtccgacgtccacccgctgcctgcagaaggctataataaggtcggacccgggtatggacccggcgaaggggcaccggaacaggagaaaagtcgcggggggtactcgtccggctttcgggactctgtgccaatccaaggtattactctggaggaagtctcagagatcatcggccgggatctgtccggtttccctgcgcctccaggggaggagccccccgcctag

SEQ ID NO: 76697 - DNA, 573 bp, Artificial Sequence
  derived and/or modified sequence
atggacttcagccccccccggcccccctaccccagctacccccatgaggaccctgcctgtgagaccccctacctgtctgagggcttcggctacggcatgccacccctgtacccccagacaggccccccacccagctaccggcccggcctgaggatgtttcctgagacccggggcaccaccggctgtgcccagcccccagctgtgtccttcctgccccggcccttccccagcgacccctacggcggccggggcagcagcttcagcctgggcctgcccttcagccccccagcccccttccggcccccacccctgcctgccagcccccccctggagggccccttccccagccagagtgatgtgcaccccctgcctgctgagggctacaacaaggtgggccctggctacggccctggagagggcgcccctgagcaggagaagagcagaggaggctacagcagcggcttccgggacagcgtgcccatccagggcatcaccctggaggaggtgtctgagatcatcggccgggacctgagcggcttccctgcccctcctggagaggagcccccagcctag

SEQ ID NO: 76698 - DNA, 1314 bp, Artificial Sequence
  derived and/or modified sequence
atgtttattggaacagcagatgaaagaaacctgcggccccacgccttctaccaggtgcaccgcatcaccgggaagatggtggccacagccagctatgaggccgtggtgtctggcaccaaggtgctggagatgaccctgctgcctgagaacaacatggccgccaacatcgactgtgccggcatcctgaagctgaggaacagcgacatcgagctgaggaaaggagaaacagacatcggcaggaagaacaccagggtgcggctggtgttccgggtgcacgtgccccagggcggcggcaaggtggtgtctgtgcaggccgcctctgtgcccattgaatgttcccagaggtctgcccaggagctgccccaggtggaggcctacagccccagcgcctgcagcgtgcggggcggggaggagctggtgctgaccggcagcaacttcctgcctgacagcaaggtggtgttcatcgagcggggcccagatggcaagctgcagtgggaggaggaggccaccgtgaaccggctgcagagcaatgaggtgaccctgaccctgactgtgcctgagtacagcaacaagagggtgtccaggcctgtgcaggtgtacttctacgtgtccaatggaagaaggaagaggagccccacccagagcttccgcttcctgcccgtcatctgcaaggaggagcccctgcctgacagcagcctgcggggcttccccagcgccagcgccacccccttcggcacagacatggacttcagcccccccaggcctccctaccccagctacccccatgaagatcctgcctgtgagaccccctacctgtctgagggcttcggctacggcatgccacccctgtacccccagacaggccccccacccagctacagacctggcctgaggatgtttcctgagacccggggcaccaccggctgtgcccagcccccagctgtgtccttcctgccccggcccttccccagcgacccctatggaggccggggcagcagcttcagcctgggcctgcccttcagccccccagcccccttccggcccccacccctgcctgccagcccccccctggagggccccttccccagccagagtgatgtgcaccccctgcctgctgagggctacaacaaggtgggccctggctacggccctggagagggcgcccctgagcaggagaagagccggggcggctacagcagcggcttccgggacagcgtgcccatccagggcatcaccctggaggaggtgtctgagatcatcggccgggacctgagcggcttccctgcccctcctggagaggagcccccagcctag

SEQ ID NO: 76699 - DNA, 573 bp, Artificial Sequence
  derived and/or modified sequence
atggacttcagccccccccggcccccctaccccagctacccccacgaagatccagcttgcgaaaccccctacctgtctgaaggcttcggatacggcatgccaccattgtacccacagacaggtccgcccccgagctataggccgggtctccggatgtttccggagacacgagggacaacagggtgtgcacagccaccggcagtgagtttcctgcccagacccttcccttcagacccatatggcggccggggttccagtttctccctcggtctccccttcagtcctcctgcacctttcagacctccacccttgcccgccagccctcccttagaggggccgtttccttcacagtctgacgtgcatcctctgcctgctgagggatataataaggtgggacctggctatggacctggcgaaggcgccccagaacaggagaagagtcggggcggctactcctcgggtttccgagattctgtccccatccaagggatcactcttgaagaggtttccgagattatcggtagggacctgtctgggttccccgccccccccggtgaggaacctccggcatag

SEQ ID NO: 76700 - DNA, 1314 bp, Artificial Sequence
  derived and/or modified sequence
atgttcatcggcaccgccgacgagcggaacctgcggccccacgccttctaccaggttcacaggatcacaggcaagatggtcgccactgccagttacgaagcagtcgtgtcggggaccaaagttttagagatgaccttgttacctgagaacaacatggcagcaaacattgactgtgccggcatccttaaacttcggaatagcgacattgagttgcggaagggcgaaactgacattgggcgaaagaacactcgagtgcgactcgtgttccgagtgcatgttcctcagggaggaggcaaggtcgtctccgtgcaggcggctagcgttcccatagaatgttcacagcggagcgcccaggaactcccccaagtggaagcatacagcccttcagcttgtagtgtgcgcggtggtgaggagctggttttgacaggcagtaattttctacccgatagcaaagtggtgtttatcgagcgtggaccagacgggaagctgcagtgggaggaggaagccaccgtgaatcgactgcagagcaacgaggttactctgacactgaccgtccccgagtactctaacaagcgggtgagtaggccagttcaggtgtacttctacgtatctaatggcaggaggaagcggtctccaacgcagagcttccgatttctgcctgtgatctgtaaggaggagccattacccgactcaagcctccgagggtttccgtctgcatcggccacaccattcgggactgatatggatttctctcccccaaggccaccctatccctcttaccctcacgaagacccagcgtgtgaaaccccttacctcagcgagggctttggctatggcatgcccccattgtacccccaaacggggcccccaccctcataccgtccgggtttgagaatgttccctgagacccggggcaccaccggttgtgcccaacctccagctgtgtccttcctgccccgccccttcccttcagacccctacgggggaagagggagcagtttctcactcggcctgccttttagcccccctgccccattccgtcccccacccctgcccgctagcccccccctggaggggccctttccatcccagagcgatgtgcatccattgcccgctgagggatacaataaggtgggtccgggttacgggccaggagagggcgcccctgaacaggaaaagagtagaggaggatattcctccggttttagggattcagtgcctatccaagggattacgttagaggaagtgagcgagatcatcgggcgcgacctgtctgggttccctgctccaccaggggaggagccccctgcctag

SEQ ID NO: 76701 - DNA, 1476 bp, Artificial Sequence
  derived and/or modified sequence
ctgtttaaccctctctctgctctgggagcggccccttacatggtgtatgtgactccatggatattactggtttatttgtgtgtctactgctgaggagggctccctcagagccctgtggcagttttcccaaagagggtggggacagaggaggccacccctccatgcccagcccagccagtcctcttccttgcactgctctgcagcccagcgctcagcccaggagctgccccaggtggaggcctacagccccagtgcctgctctgtgagaggaggcgaggaactggtactgactggctccaacttcctgccagactccaaggtggtgttcattgagaggggtcctgatgggaagctgcaatgggaggaggaggccacagtgaaccgactgcagagcaacgaggtgacgctgaccctgactgtccccgagtacagcaacaagagggtttcccggccagtccaggtctacttttatgtctccaatgggcggaggaaacgcagtcctacccagagtttcaggtttctgcctgtgatctgcaaagaggagcccctaccggactcatctctgcggggtttcccttcagcatcggcaaccccctttggcactgacatggacttctcaccacccaggcccccctacccctcctatccccatgaagaccctgcttgcgaaactccttacctatcagaaggcttcggctatggcatgccccctctgtacccccagacggggcccccaccatcctacagaccgggcctgcggatgttccctgagactaggggtaccacaggttgtgcccaaccacctgcagtttccttccttccccgccccttccctagtgacccgtatggagggcggggctcctctttctccctggggctgccattctctccgccagccccctttcggccgcctcctcttcctgcatccccaccgcttgaaggccccttcccttcccagagtgatgtgcatcccctacctgctgagggatacaataaggtagggccaggctatggccctggggagggggctccggagcaggagaaatccaggggtggctacagcagcggcttccgagacagtgtccctatccagggtatcacgctggaggaagtgagtgagatcattggccgagacctgagtggcttccctgcacctcctggagaagagcctcctgcctgaaccacgtgaactgtcatcacctggcaaccccagccccagcctcagccctgccccctttccctccttcctggagtggtggctacagaagcttggggccaaccctggctcctctttccccagcttctgtctgtctcactgtcttccctcccctcccccagctgaggtgtggccctcaggcctggtgctgccttggagggctgggggaaggagtgtgtggaggagggaggagggtgaagactgaggctaggtgccagaatggactggagtgaaggcgtgtctagagtgtgggctggctg

SEQ ID NO: 76702 - DNA, 2025 bp, Artificial Sequence
  derived and/or modified sequence
gggacaccagcctcatgtctactctggaaaatggtggcccgccagatatgggggagggtttaggctgaggacaaaagtcactgggagttaagttttctctgtattgagttgggccagtctctttggaggctcttctgcctttgcccagcccactttgggctttattccaagaaaaacactgtgaactccaggccatgttttctccacaacgggtgcccagttccccaagggattcccttgcaggatatcctttatctttcaccattcccatcccatggtagactgaaaatctagggatgaataaaggatgagacggtggggatttcaatgaggtggccgctctctccctctgccagctcctaggctacagtgagaagccactgaccctacagatgttcatcggcactgcagatgaaaggaacctgcggcctcatgccttctatcaggtgcaccgtatcacaggcaagatggtggccacggccagctatgaagccgtagtcagtggcaccaaggtgttggagatgactctgctgcctgagaacaacatggcggccaacattgactgcgcgggaatcctgaagcttcggaattcagacattgagcttcggaagggtgagacggacatcgggcgcaaaaacacacgtgtacggctggtgttccgggtacacgtgccccagggcggcgggaaggtcgtctcagtacaggcagcatcggtgcccatcgagtgctcccagcgctcagcccaggagctgccccaggtggaggcctacagccccagtgcctgctctgtgagaggaggcgaggaactggtactgactggctccaacttcctgccagactccaaggtggtgttcattgagaggggtcctgatgggaagctgcaatgggaggaggaggccacagtgaaccgactgcagagcaacgaggtgacgctgaccctgactgtccccgagtacagcaacaagagggtttcccggccagtccaggtctacttttatgtctccaatgggcggaggaaacgcagtcctacccagagtttcaggtttctgcctgtgatctgcaaagaggagcccctaccggactcatctctgcggggtttcccttcagcatcggcaaccccctttggcactgacatggacttctcaccacccaggcccccctacccctcctatccccatgaagaccctgcttgcgaaactccttacctatcagaaggcttcggctatggcatgccccctctgtacccccagacggggcccccaccatcctacagaccgggcctgcggatgttccctgagactaggggtaccacaggttgtgcccaaccacctgcagtttccttccttccccgccccttccctagtgacccgtatggagggcggggctcctctttctccctggggctgccattctctccgccagccccctttcggccgcctcctcttcctgcatccccaccgcttgaaggccccttcccttcccagagtgatgtgcatcccctacctgctgagggatacaataaggtagggccaggctatggccctggggagggggctccggagcaggagaaatccaggggtggctacagcagcggcttccgagacagtgtccctatccagggtatcacgctggaggaagtgagtgagatcattggccgagacctgagtggcttccctgcacctcctggagaagagcctcctgcctgaaccacgtgaactgtcatcacctggcaaccccagccccagcctcagccctgccccctttccctccttcctggagtggtggctacagaagcttggggccaaccctggctcctctttccccagcttctgtctgtctcactgtcttccctcccctcccccagctgaggtgtggccctcaggcctggtgctgccttggagggctgggggaaggagtgtgtggaggagggaggagggtgaagactgaggctaggtgccagaatggactggagtgaaggcgtgtctagagtgtgggctggctgttgtgctggaaagctggggacag

SEQ ID NO: 76703 - DNA, 573 bp, Artificial Sequence
  derived and/or modified sequence
atggatttcagtccgcctcgccctccataccctagttacccccacgaagaccccgcttgtgagaccccctacctgtcagaaggttttggatacggtatgcccccattatatccccagacgggcccacctccttcctaccggccagggctgaggatgtttcccgaaacccggggtacaacaggctgtgcgcagccccctgccgtgtcattcctccctaggcctttcccgagcgatccatatggaggcagggggagctccttcagcctggggctgccattttccccaccagccccttttcgaccccctccgctgcccgcatccccacccctggagggcccttttccctcacaatctgatgtgcatccattgccagctgagggatacaataaggttggacctggctatgggcctggcgagggcgctccagaacaggagaaatcccgcggaggttattcctctggattccgcgactcggtacctattcaggggattactcttgaggaggtgtccgagatcatcgggcgagatctctctggttttccggctcctcccggagaggaacccccagcttag

SEQ ID NO: 76704 - DNA, 1314 bp, Artificial Sequence
  derived and/or modified sequence
atgttcataggcactgcggatgaacggaacttgcgccctcatgcgttttatcaggtacaccgaattacaggcaagatggtcgccacagcgtcatatgaggcagtagtgtccggaacaaaggtgttggagatgactttattacccgagaataatatggcagccaatatagactgcgccggaatcttgaaattgcgcaatagtgacattgagctacgtaaaggagagactgatatcggtcggaaaaatacacgcgttcggctggtgtttcgagtccacgtgcctcagggtggcggaaaagtggtgtcagtacaggctgcgagtgtgcccatagaatgtagtcagcgcagcgcacaagagttaccacaggtcgaagcttactccccttccgcctgttccgtccgcggaggcgaagagctggtgctgacaggcagtaactttctccctgacagtaaggtggtgtttatagaaagagggccagacggcaaattgcagtgggaagaggaagccacagttaaccgtcttcagagcaatgaagtcactctcacactgaccgtgccagagtactccaacaagcgtgtgagcagaccggtccaggtttacttttacgtgagtaacggtcgtcgcaagcggagtccaacgcaaagttttaggttcttgccagtgatttgcaaggaggaacctttgccagattcaagcttgagaggatttccaagcgccagtgcaactccttttggtaccgacatggacttctcaccgcctcggcctccttacccaagctatccacacgaggatccggcttgcgaaacaccttacctctcagaagggtttggatatggtatgccacctctgtatccccaaactggacctccgccaagttacagaccgggacttcggatgttcccagagaccaggggaactacagggtgcgcacaaccaccagcagttagcttcttgcccagaccttttcccagcgacccttatgggggtcgagggagctccttttctctgggcctgcctttctcccccccagctccgttccggccacctcccctccctgcttcaccccctctggagggccctttcccatcacaatccgatgtgcatccccttcccgctgagggttataacaaggtcgggccaggttacgggcctggggagggggcaccggaacaggaaaagagcagaggcggttactcgtcaggcttcagagattctgttccaatccaaggaatcaccctcgaagaagtctccgaaataatcgggagggacttgtctggcttccctgctccacctggtgaagagcctccggcttag

SEQ ID NO: 76705 - protein, 826 aa, Artificial Sequence
  derived and/or modified sequence
MADGGADSAAQRLPEGPGRVAPGRDLGAPAGSMGAASCEDEELEFKLVFGEEKEAPPLGAGGLGEELDSEDAPPCCRLALGEPPPYGAAPIGIPRPPPPRPGMHSPPPRPAPSPGTWESQPARSVRLGGPGGGAGGAGGGRVLECPSIRITSISPTPEPPAALEDNPDAWGDGSPRDYPPPEGFGGYREAGGQGGGAFFSPSPGSSSLSSWSFFSDASDEAALYAACDEVESELNEAASRFGLGSPLPSPRASPRPWTPEDPWSLYGPSPGGRGPEDSWLLLSAPGPTPASPRPASPCGKRRYSSSGTPSSASPALSRRGSLGEEGSEPPPPPPLPLARDPGSPGPFDYVGAPPAESIPQKTRRTSSEQAVALPRSEEPASCNGKLPLGAEESVAPPGGSRKEVAGMDYLAVPSPLAWSKARIGGHSPIFRTSALPPLDWPLPSQYEQLELRIEVQPRAHHRAHYETEGSRGAVKAAPGGHPVVKLLGYSEKPLTLQMFIGTADERNLRPHAFYQVHRITGKMVATASYEAVVSGTKVLEMTLLPENNMAANIDCAGILKLRNSDIELRKGETDIGRKNTRVRLVFRVHVPQGGGKVVSVQAASVPIECSQRSAQELPQVEAYSPSACSVRGGEELVLTGSNFLPDSKVVFIERGPDGKLQWEEEATVNRLQSNEVTLTLTVPEYSNKRVSRPVQVYFYVSNGRRKRSPTQSFRFLPVICKEEPLPDSSLRGFPSASATPFGTDMDFSPPRPPYPSYPHEDPACETPYLSEGFGYGMPPLYPQTGPPPSYRPGLRMFPETRGTTVSEIIGRDLSGFPAPPGEEPPA

SEQ ID NO: 76706 - protein, 794 aa, Artificial Sequence
  derived and/or modified sequence
MGAASCEDEELEFKLVFGEEKEAPPLGAGGLGEELDSEDAPPCCRLALGEPPPYGAAPIGIPRPPPPRPGMHSPPPRPAPSPGTWESQPARSVRLGGPGGGAGGAGGGRVLECPSIRITSISPTPEPPAALEDNPDAWGDGSPRDYPPPEGFGGYREAGGQGGGAFFSPSPGSSSLSSWSFFSDASDEAALYAACDEVESELNEAASRFGLGSPLPSPRASPRPWTPEDPWSLYGPSPGGRGPEDSWLLLSAPGPTPASPRPASPCGKRRYSSSGTPSSASPALSRRGSLGEEGSEPPPPPPLPLARDPGSPGPFDYVGAPPAESIPQKTRRTSSEQAVALPRSEEPASCNGKLPLGAEESVAPPGGSRKEVAGMDYLAVPSPLAWSKARIGGHSPIFRTSALPPLDWPLPSQYEQLELRIEVQPRAHHRAHYETEGSRGAVKAAPGGHPVVKLLGYSEKPLTLQMFIGTADERNLRPHAFYQVHRITGKMVATASYEAVVSGTKVLEMTLLPENNMAANIDCAGILKLRNSDIELRKGETDIGRKNTRVRLVFRVHVPQGGGKVVSVQAASVPIECSQRSAQELPQVEAYSPSACSVRGGEELVLTGSNFLPDSKVVFIERGPDGKLQWEEEATVNRLQSNEVTLTLTVPEYSNKRVSRPVQVYFYVSNGRRKRSPTQSFRFLPVICKEEPLPDSSLRGFPSASATPFGTDMDFSPPRPPYPSYPHEDPACETPYLSEGFGYGMPPLYPQTGPPPSYRPGLRMFPETRGTTVSEIIGRDLSGFPAPPGEEPPA

SEQ ID NO: 76707 - protein, 329 aa, Artificial Sequence
  derived and/or modified sequence
MFIGTADERNLRPHAFYQVHRITGKMVATASYEAVVSGTKVLEMTLLPENNMAANIDCAGILKLRNSDIELRKGETDIGRKNTRVRLVFRVHVPQGGGKVVSVQAASVPIECSQRSAQELPQVEAYSPSACSVRGGEELVLTGSNFLPDSKVVFIERGPDGKLQWEEEATVNRLQSNEVTLTLTVPEYSNKRVSRPVQVYFYVSNGRRKRSPTQSFRFLPVICKEEPLPDSSLRGFPSASATPFGTDMDFSPPRPPYPSYPHEDPACETPYLSEGFGYGMPPLYPQTGPPPSYRPGLRMFPETRGTTVSEIIGRDLSGFPAPPGEEPPA

SEQ ID NO: 76708 - protein, 857 aa, Artificial Sequence
  derived and/or modified sequence
MITTLPSLLPASLASISHRVTNLPSNSLSHNPGLSKPDFPGNSSPGLPSSSSPGRDLGAPAGSMGAASCEDEELEFKLVFGEEKEAPPLGAGGLGEELDSEDAPPCCRLALGEPPPYGAAPIGIPRPPPPRPGMHSPPPRPAPSPGTWESQPARSVRLGGPGGGAGGAGGGRVLECPSIRITSISPTPEPPAALEDNPDAWGDGSPRDYPPPEGFGGYREAGGQGGGAFFSPSPGSSSLSSWSFFSDASDEAALYAACDEVESELNEAASRFGLGSPLPSPRASPRPWTPEDPWSLYGPSPGGRGPEDSWLLLSAPGPTPASPRPASPCGKRRYSSSGTPSSASPALSRRGSLGEEGSEPPPPPPLPLARDPGSPGPFDYVGAPPAESIPQKTRRTSSEQAVALPRSEEPASCNGKLPLGAEESVAPPGGSRKEVAGMDYLAVPSPLAWSKARIGGHSPIFRTSALPPLDWPLPSQYEQLELRIEVQPRAHHRAHYETEGSRGAVKAAPGGHPVVKLLGYSEKPLTLQMFIGTADERNLRPHAFYQVHRITGKMVATASYEAVVSGTKVLEMTLLPENNMAANIDCAGILKLRNSDIELRKGETDIGRKNTRVRLVFRVHVPQGGGKVVSVQAASVPIECSQRSAQELPQVEAYSPSACSVRGGEELVLTGSNFLPDSKVVFIERGPDGKLQWEEEATVNRLQSNEVTLTLTVPEYSNKRVSRPVQVYFYVSNGRRKRSPTQSFRFLPVICKEEPLPDSSLRGFPSASATPFGTDMDFSPPRPPYPSYPHEDPACETPYLSEGFGYGMPPLYPQTGPPPSYRPGLRMFPETRGTTVSEIIGRDLSGFPAPPGEEPPA

SEQ ID NO: 76709 - protein, 724 aa, Artificial Sequence
  derived and/or modified sequence
MHSPPPRPAPSPGTWESQPARSVRLGGPGGGAGGAGGGRVLECPSIRITSISPTPEPPAALEDNPDAWGDGSPRDYPPPEGFGGYREAGGQGGGAFFSPSPGSSSLSSWSFFSDASDEAALYAACDEVESELNEAASRFGLGSPLPSPRASPRPWTPEDPWSLYGPSPGGRGPEDSWLLLSAPGPTPASPRPASPCGKRRYSSSGTPSSASPALSRRGSLGEEGSEPPPPPPLPLARDPGSPGPFDYVGAPPAESIPQKTRRTSSEQAVALPRSEEPASCNGKLPLGAEESVAPPGGSRKEVAGMDYLAVPSPLAWSKARIGGHSPIFRTSALPPLDWPLPSQYEQLELRIEVQPRAHHRAHYETEGSRGAVKAAPGGHPVVKLLGYSEKPLTLQMFIGTADERNLRPHAFYQVHRITGKMVATASYEAVVSGTKVLEMTLLPENNMAANIDCAGILKLRNSDIELRKGETDIGRKNTRVRLVFRVHVPQGGGKVVSVQAASVPIECSQRSAQELPQVEAYSPSACSVRGGEELVLTGSNFLPDSKVVFIERGPDGKLQWEEEATVNRLQSNEVTLTLTVPEYSNKRVSRPVQVYFYVSNGRRKRSPTQSFRFLPVICKEEPLPDSSLRGFPSASATPFGTDMDFSPPRPPYPSYPHEDPACETPYLSEGFGYGMPPLYPQTGPPPSYRPGLRMFPETRGTTVSEIIGRDLSGFPAPPGEEPPA

SEQ ID NO: 76710 - protein, 143 aa, Artificial Sequence
  derived and/or modified sequence
MGAASCEDEELEFKLVFGEEKEAPPLGAGGLGEELDSEDAPPCCRLALGEPPPYGAAPIGIPRPPPPRPGMHSPPPRPAPSPGTWESQPARSVRLGGPGGGAGGAGGGRVLECPSIRITSISPTPEPPAALEDNPDAWGDGSP

SEQ ID NO: 76711 - protein, 807 aa, Artificial Sequence
  derived and/or modified sequence
MLSGRDLGAPAGSMGAASCEDEELEFKLVFGEEKEAPPLGAGGLGEELDSEDAPPCCRLALGEPPPYGAAPIGIPRPPPPRPGMHSPPPRPAPSPGTWESQPARSVRLGGPGGGAGGAGGGRVLECPSIRITSISPTPEPPAALEDNPDAWGDGSPRDYPPPEGFGGYREAGGQGGGAFFSPSPGSSSLSSWSFFSDASDEAALYAACDEVESELNEAASRFGLGSPLPSPRASPRPWTPEDPWSLYGPSPGGRGPEDSWLLLSAPGPTPASPRPASPCGKRRYSSSGTPSSASPALSRRGSLGEEGSEPPPPPPLPLARDPGSPGPFDYVGAPPAESIPQKTRRTSSEQAVALPRSEEPASCNGKLPLGAEESVAPPGGSRKEVAGMDYLAVPSPLAWSKARIGGHSPIFRTSALPPLDWPLPSQYEQLELRIEVQPRAHHRAHYETEGSRGAVKAAPGGHPVVKLLGYSEKPLTLQMFIGTADERNLRPHAFYQVHRITGKMVATASYEAVVSGTKVLEMTLLPENNMAANIDCAGILKLRNSDIELRKGETDIGRKNTRVRLVFRVHVPQGGGKVVSVQAASVPIECSQRSAQELPQVEAYSPSACSVRGGEELVLTGSNFLPDSKVVFIERGPDGKLQWEEEATVNRLQSNEVTLTLTVPEYSNKRVSRPVQVYFYVSNGRRKRSPTQSFRFLPVICKEEPLPDSSLRGFPSASATPFGTDMDFSPPRPPYPSYPHEDPACETPYLSEGFGYGMPPLYPQTGPPPSYRPGLRMFPETRGTTVSEIIGRDLSGFPAPPGEEPPA

SEQ ID NO: 76712 - protein, 82 aa, Artificial Sequence
  derived and/or modified sequence
MDFSPPRPPYPSYPHEDPACETPYLSEGFGYGMPPLYPQTGPPPSYRPGLRMFPETRGTTVSEIIGRDLSGFPAPPGEEPPA

SEQ ID NO: 76713 - DNA, 2481 bp, Artificial Sequence
  derived and/or modified sequence
atggccgacggcggcgccgacagcgccgcccagagactgcccgagggccccggcagagtggcccccggcagagacctgggcgcccccgccggcagcatgggcgccgccagctgcgaggacgaggagctggagttcaagctggtgttcggcgaggagaaggaggccccccccctgggcgccggcggcctgggcgaggagctggacagcgaggacgcccccccctgctgcagactggccctgggcgagccccccccctacggcgccgcccccatcggcatccccagaccccccccccccagacccggcatgcacagccccccccccagacccgcccccagccccggcacctgggagagccagcccgccagaagcgtgagactgggcggccccggcggcggcgccggcggcgccggcggcggcagagtgctggagtgccccagcatcagaatcaccagcatcagccccacccccgagccccccgccgccctggaggacaaccccgacgcctggggcgacggcagccccagagactaccccccccccgagggcttcggcggctacagagaggccggcggccagggcggcggcgccttcttcagccccagccccggcagcagcagcctgagcagctggagcttcttcagcgacgccagcgacgaggccgccctgtacgccgcctgcgacgaggtggagagcgagctgaacgaggccgccagcagattcggcctgggcagccccctgcccagccccagagccagccccagaccctggacccccgaggacccctggagcctgtacggccccagccccggcggcagaggccccgaggacagctggctgctgctgagcgcccccggccccacccccgccagccccagacccgccagcccctgcggcaagagaagatacagcagcagcggcacccccagcagcgccagccccgccctgagcagaagaggcagcctgggcgaggagggcagcgagccccccccccccccccccctgcccctggccagagaccccggcagccccggccccttcgactacgtgggcgccccccccgccgagagcatcccccagaagaccagaagaaccagcagcgagcaggccgtggccctgcccagaagcgaggagcccgccagctgcaacggcaagctgcccctgggcgccgaggagagcgtggccccccccggcggcagcagaaaggaggtggccggcatggactacctggccgtgcccagccccctggcctggagcaaggccagaatcggcggccacagccccatcttcagaaccagcgccctgccccccctggactggcccctgcccagccagtacgagcagctggagctgagaatcgaggtgcagcccagagcccaccacagagcccactacgagaccgagggcagcagaggcgccgtgaaggccgcccccggcggccaccccgtggtgaagctgctgggctacagcgagaagcccctgaccctgcagatgttcatcggcaccgccgacgagagaaacctgagaccccacgccttctaccaggtgcacagaatcaccggcaagatggtggccaccgccagctacgaggccgtggtgagcggcaccaaggtgctggagatgaccctgctgcccgagaacaacatggccgccaacatcgactgcgccggcatcctgaagctgagaaacagcgacatcgagctgagaaagggcgagaccgacatcggcagaaagaacaccagagtgagactggtgttcagagtgcacgtgccccagggcggcggcaaggtggtgagcgtgcaggccgccagcgtgcccatcgagtgcagccagagaagcgcccaggagctgccccaggtggaggcctacagccccagcgcctgcagcgtgagaggcggcgaggagctggtgctgaccggcagcaacttcctgcccgacagcaaggtggtgttcatcgagagaggccccgacggcaagctgcagtgggaggaggaggccaccgtgaacagactgcagagcaacgaggtgaccctgaccctgaccgtgcccgagtacagcaacaagagagtgagcagacccgtgcaggtgtacttctacgtgagcaacggcagaagaaagagaagccccacccagagcttcagattcctgcccgtgatctgcaaggaggagcccctgcccgacagcagcctgagaggcttccccagcgccagcgccacccccttcggcaccgacatggacttcagcccccccagacccccctaccccagctacccccacgaggaccccgcctgcgagaccccctacctgagcgagggcttcggctacggcatgccccccctgtacccccagaccggccccccccccagctacagacccggcctgagaatgttccccgagaccagaggcaccaccgtgagcgagatcatcggcagagacctgagcggcttccccgccccccccggcgaggagccccccgcctag

SEQ ID NO: 76714 - DNA, 2574 bp, Artificial Sequence
  derived and/or modified sequence
atgatcaccaccctgcccagcctgctgcccgccagcctggccagcatcagccacagagtgaccaacctgcccagcaacagcctgagccacaaccccggcctgagcaagcccgacttccccggcaacagcagccccggcctgcccagcagcagcagccccggcagagacctgggcgcccccgccggcagcatgggcgccgccagctgcgaggacgaggagctggagttcaagctggtgttcggcgaggagaaggaggccccccccctgggcgccggcggcctgggcgaggagctggacagcgaggacgcccccccctgctgcagactggccctgggcgagccccccccctacggcgccgcccccatcggcatccccagaccccccccccccagacccggcatgcacagccccccccccagacccgcccccagccccggcacctgggagagccagcccgccagaagcgtgagactgggcggccccggcggcggcgccggcggcgccggcggcggcagagtgctggagtgccccagcatcagaatcaccagcatcagccccacccccgagccccccgccgccctggaggacaaccccgacgcctggggcgacggcagccccagagactaccccccccccgagggcttcggcggctacagagaggccggcggccagggcggcggcgccttcttcagccccagccccggcagcagcagcctgagcagctggagcttcttcagcgacgccagcgacgaggccgccctgtacgccgcctgcgacgaggtggagagcgagctgaacgaggccgccagcagattcggcctgggcagccccctgcccagccccagagccagccccagaccctggacccccgaggacccctggagcctgtacggccccagccccggcggcagaggccccgaggacagctggctgctgctgagcgcccccggccccacccccgccagccccagacccgccagcccctgcggcaagagaagatacagcagcagcggcacccccagcagcgccagccccgccctgagcagaagaggcagcctgggcgaggagggcagcgagccccccccccccccccccctgcccctggccagagaccccggcagccccggccccttcgactacgtgggcgccccccccgccgagagcatcccccagaagaccagaagaaccagcagcgagcaggccgtggccctgcccagaagcgaggagcccgccagctgcaacggcaagctgcccctgggcgccgaggagagcgtggccccccccggcggcagcagaaaggaggtggccggcatggactacctggccgtgcccagccccctggcctggagcaaggccagaatcggcggccacagccccatcttcagaaccagcgccctgccccccctggactggcccctgcccagccagtacgagcagctggagctgagaatcgaggtgcagcccagagcccaccacagagcccactacgagaccgagggcagcagaggcgccgtgaaggccgcccccggcggccaccccgtggtgaagctgctgggctacagcgagaagcccctgaccctgcagatgttcatcggcaccgccgacgagagaaacctgagaccccacgccttctaccaggtgcacagaatcaccggcaagatggtggccaccgccagctacgaggccgtggtgagcggcaccaaggtgctggagatgaccctgctgcccgagaacaacatggccgccaacatcgactgcgccggcatcctgaagctgagaaacagcgacatcgagctgagaaagggcgagaccgacatcggcagaaagaacaccagagtgagactggtgttcagagtgcacgtgccccagggcggcggcaaggtggtgagcgtgcaggccgccagcgtgcccatcgagtgcagccagagaagcgcccaggagctgccccaggtggaggcctacagccccagcgcctgcagcgtgagaggcggcgaggagctggtgctgaccggcagcaacttcctgcccgacagcaaggtggtgttcatcgagagaggccccgacggcaagctgcagtgggaggaggaggccaccgtgaacagactgcagagcaacgaggtgaccctgaccctgaccgtgcccgagtacagcaacaagagagtgagcagacccgtgcaggtgtacttctacgtgagcaacggcagaagaaagagaagccccacccagagcttcagattcctgcccgtgatctgcaaggaggagcccctgcccgacagcagcctgagaggcttccccagcgccagcgccacccccttcggcaccgacatggacttcagcccccccagacccccctaccccagctacccccacgaggaccccgcctgcgagaccccctacctgagcgagggcttcggctacggcatgccccccctgtacccccagaccggccccccccccagctacagacccggcctgagaatgttccccgagaccagaggcaccaccgtgagcgagatcatcggcagagacctgagcggcttccccgccccccccggcgaggagccccccgcctag

SEQ ID NO: 76715 - DNA, 2424 bp, Artificial Sequence
  derived and/or modified sequence
atgctgagcggcagagacctgggcgcccccgccggcagcatgggcgccgccagctgcgaggacgaggagctggagttcaagctggtgttcggcgaggagaaggaggccccccccctgggcgccggcggcctgggcgaggagctggacagcgaggacgcccccccctgctgcagactggccctgggcgagccccccccctacggcgccgcccccatcggcatccccagaccccccccccccagacccggcatgcacagccccccccccagacccgcccccagccccggcacctgggagagccagcccgccagaagcgtgagactgggcggccccggcggcggcgccggcggcgccggcggcggcagagtgctggagtgccccagcatcagaatcaccagcatcagccccacccccgagccccccgccgccctggaggacaaccccgacgcctggggcgacggcagccccagagactaccccccccccgagggcttcggcggctacagagaggccggcggccagggcggcggcgccttcttcagccccagccccggcagcagcagcctgagcagctggagcttcttcagcgacgccagcgacgaggccgccctgtacgccgcctgcgacgaggtggagagcgagctgaacgaggccgccagcagattcggcctgggcagccccctgcccagccccagagccagccccagaccctggacccccgaggacccctggagcctgtacggccccagccccggcggcagaggccccgaggacagctggctgctgctgagcgcccccggccccacccccgccagccccagacccgccagcccctgcggcaagagaagatacagcagcagcggcacccccagcagcgccagccccgccctgagcagaagaggcagcctgggcgaggagggcagcgagccccccccccccccccccctgcccctggccagagaccccggcagccccggccccttcgactacgtgggcgccccccccgccgagagcatcccccagaagaccagaagaaccagcagcgagcaggccgtggccctgcccagaagcgaggagcccgccagctgcaacggcaagctgcccctgggcgccgaggagagcgtggccccccccggcggcagcagaaaggaggtggccggcatggactacctggccgtgcccagccccctggcctggagcaaggccagaatcggcggccacagccccatcttcagaaccagcgccctgccccccctggactggcccctgcccagccagtacgagcagctggagctgagaatcgaggtgcagcccagagcccaccacagagcccactacgagaccgagggcagcagaggcgccgtgaaggccgcccccggcggccaccccgtggtgaagctgctgggctacagcgagaagcccctgaccctgcagatgttcatcggcaccgccgacgagagaaacctgagaccccacgccttctaccaggtgcacagaatcaccggcaagatggtggccaccgccagctacgaggccgtggtgagcggcaccaaggtgctggagatgaccctgctgcccgagaacaacatggccgccaacatcgactgcgccggcatcctgaagctgagaaacagcgacatcgagctgagaaagggcgagaccgacatcggcagaaagaacaccagagtgagactggtgttcagagtgcacgtgccccagggcggcggcaaggtggtgagcgtgcaggccgccagcgtgcccatcgagtgcagccagagaagcgcccaggagctgccccaggtggaggcctacagccccagcgcctgcagcgtgagaggcggcgaggagctggtgctgaccggcagcaacttcctgcccgacagcaaggtggtgttcatcgagagaggccccgacggcaagctgcagtgggaggaggaggccaccgtgaacagactgcagagcaacgaggtgaccctgaccctgaccgtgcccgagtacagcaacaagagagtgagcagacccgtgcaggtgtacttctacgtgagcaacggcagaagaaagagaagccccacccagagcttcagattcctgcccgtgatctgcaaggaggagcccctgcccgacagcagcctgagaggcttccccagcgccagcgccacccccttcggcaccgacatggacttcagcccccccagacccccctaccccagctacccccacgaggaccccgcctgcgagaccccctacctgagcgagggcttcggctacggcatgccccccctgtacccccagaccggccccccccccagctacagacccggcctgagaatgttccccgagaccagaggcaccaccgtgagcgagatcatcggcagagacctgagcggcttccccgccccccccggcgaggagccccccgcctag

SEQ ID NO: 76716 - DNA, 2481 bp, Artificial Sequence
  derived and/or modified sequence
atggccgacggcggtgccgactcagctgcccagagactgcccgagggccctggccgggtcgcacccggtcgcgacctgggggcacctgcgggcagcatgggtgcagcttcttgtgaggacgaggagttggagttcaaacttgtctttggggaggaaaaagaagccccaccactgggggccggggggctcggggaggagcttgacagcgaggatgcgcccccttgctgtcgcctggccctgggagagcctcctccatacggcgctgccccaattggaataccccggccacctccaccacgacctggcatgcatagtcccccacccaggcccgcaccaagcccaggaacatgggagtcccagcccgcacgcagcgttcgcttggggggtcctggaggcggggccggaggggcgggggggggccgggtactcgagtgcccgagcatcaggatcacaagcatttctccaacacccgaaccaccagctgctttggaagataatcccgacgcatggggcgatggctccccccgtgactacccgcctcctgaggggtttggcgggtatagagaagccggaggccagggtggaggcgcatttttttcgccctcccccggaagcagttccttgtccagttggagttttttctctgatgcctcagacgaagcagcgctctatgccgcctgcgatgaagtcgagtccgaattgaatgaagcagcttctaggttcggactcggctccccactgccctccccgagggcaagccctagaccttggaccccagaagacccttggagcctttacggacccagtccaggcggacgcgggccagaggactcctggctgctgctttcggcgcccggacctacacctgcaagtccccggcccgctagtccatgtgggaagcgcagatatagcagctccgggaccccctctagcgcttctccagctctgtccagacggggatctcttggggaagaggggtccgaacctccacctccacccccactcccactagcacgcgaccccggctcaccaggccctttcgattatgtaggagccccgcccgcggaatccattcctcagaagacacggaggacaagtagcgaacaggccgtggctctgccgcgctccgaggaaccggcttcgtgcaacggaaagttgccgttgggagccgaggaatctgtagccccacctggcgggagtcgcaaagaggtagctggtatggactatttggccgtgccctcgccattggcctggtcaaaggccaggatcgggggccactctcctatatttcggacatccgcactacctccactggattggcccctgccatcccagtacgaacagcttgaactacgcatagaggtgcagcctagggcccaccatcgagctcattacgaaacggaaggctctcgcggagccgtaaaagcagccccaggggggcaccccgtcgtcaaactgctcggatactctgaaaagccccttactctacagatgttcatcggcactgcagatgaacgcaatctgagaccccatgctttctatcaggtccacaggatcacaggaaaaatggtagctactgcttcttacgaggctgtggtgagcgggaccaaagtactggagatgacactcctcccagagaacaacatggcagcaaatattgactgtgcaggaatcctgaagctgcgcaactccgatatcgaactaagaaaaggcgaaacggacattggccgcaagaacacacgagtacgcctcgtgttcagggtgcatgtcccacaaggcggagggaaggtcgtgtccgtgcaggccgcctctgttcctatcgagtgtagccagcggtcagcccaagaattacctcaagtggaggcatacagtccctctgcttgtagtgtgagaggaggggaagagcttgtgctgaccggttctaacttcttgcctgattcgaaggtcgtgtttatcgaaagaggaccagacggcaaactgcagtgggaggaagaagcaacagtgaatagactgcagtccaatgaggtgacccttacccttacagtgcctgagtattctaacaaacgggtgtctcggcctgtgcaggtgtatttctacgtaagcaacggaaggaggaaacggtcacctacccaatccttccgcttcttgccagttatctgcaaagaagaacctcttcccgactcctccctgagaggctttccatcagcatctgctacacccttcgggaccgatatggatttcagtccccctcgccctccctacccaagctatcctcacgaggaccccgcatgcgaaaccccttacctctctgaaggttttggctatggaatgccgcccctgtatcctcagacgggacctccgccttcctatcgcccgggtctgagaatgtttcctgagactaggggcacgactgtgtcagaaataattggtcgtgatctgtctggattcccagccccccccggggaagaaccccctgcttag

SEQ ID NO: 76717 - DNA, 2574 bp, Artificial Sequence
  derived and/or modified sequence
atgatcacaaccttaccttcactcctgccggcaagcttagcgtctatctcgcatagagtgacaaacttacctagcaactcgctctctcacaatcctggcctcagcaagcccgatttcccaggtaatagctctcctggtcttccttcaagcagtagccccggcagagatctgggagctcctgcagggtccatgggtgccgctagctgcgaagatgaagaactggaattcaagcttgtttttggtgaggagaaagaggccccgccattgggcgcaggcgggcttggcgaagaattagactccgaggacgcccccccttgctgcaggttggcacttggggaaccccccccctatggtgctgcccccatcgggatacctagacccccacctccaaggcctggaatgcatagccctccacccaggcctgccccaagccccggcacctgggaaagccaacccgccaggtctgtccggctcggaggccccggggggggggctggtggagccgggggaggaagagtgctggagtgcccgtctattcgcatcacgtcgatcagcccaacacctgaaccgcccgctgccctagaggataatcctgacgcttggggggacgggtctccccgggattacccccctccggagggttttggcggctacagggaagccggtggacagggagggggcgccttcttctcccctagccctggcagctccagcctgtccagctggagtttcttctccgacgcctccgatgaggccgctctatacgccgcctgcgacgaagtggagtcagaattaaacgaggccgctagccggtttgggttgggttcccctctgcccagccctcgcgcgagcccccgcccctggacaccggaggacccgtggtcactctatgggccttctcctggcggccggggtcccgaagatagttggctgctcctctctgcccctgggcccacaccagcctccccccgacctgcttcgccttgtggaaagcggaggtatagtagctcaggtacccccagctcagcctcccccgctctgagtcggagaggcagtctgggcgaagaagggagtgaaccgcctccacctccacctttgccccttgcccgtgatccaggatcccccggaccatttgattacgtcggggctccaccggctgaatcaattcctcaaaaaacccggcgcacgagtagcgaacaggccgtggcgctgcccagatcagaggaaccagcttcctgcaatggaaagctgccattaggagcagaagaaagcgtggccccccctggtggaagtcggaaggaggtggcaggtatggactatctcgccgtaccctcacctctggcttggtctaaagcccgtattggtggacactcacccatcttcaggacctcggccttgccacccctggactggccactcccctcccagtatgagcagctggaactcaggattgaagtgcagccacgggctcatcatcgggcgcattacgagactgaaggctcccgaggcgccgtcaaggcggctccgggaggccatcctgtcgtaaagctactgggttatagcgagaaacccctgacactgcaaatgttcataggaacagccgatgagcgaaacctgaggccgcacgccttctaccaagtccatagaatcaccggcaaaatggtggccaccgcgagctacgaggcagtcgtaagcgggaccaaagtcctggagatgacccttctccctgagaataacatggctgctaatatagactgcgctgggatccttaagttgcgtaattcggacattgaactgcggaaaggtgaaacagatataggacggaaaaatacccgcgtgagactggtgttccgcgttcacgtcccacaagggggtggaaaggtggtgagtgtccaagcagcctccgttcctattgaatgctctcagcggtccgcgcaggagttgccacaggtcgaagcatacagcccgtcagcttgctcggtgcggggcggtgaagagcttgtcttaacaggaagtaatttcctgcctgatagtaaggttgtcttcattgagagagggcccgatggcaagctgcagtgggaagaggaagctaccgtgaatcggttgcagagcaacgaagtcaccctgaccctcacggtacccgagtatagtaataaaagggtgagccgcccagtgcaggtatacttttatgtttccaatggccgcagaaaacgatcacctacccagtcttttcgttttctgcccgtcatttgtaaggaagagccactgcctgatagctcgctgcgcggttttccaagcgctagcgctacaccatttggcacagatatggatttcagcccacctcgccccccctatccctcctacccccatgaggaccccgcctgtgagacaccatatctgtcggagggctttgggtacggtatgccccccctttatccacaaacaggaccaccgccttcttaccggcctgggcttcggatgttccctgagactagagggaccacggtgtccgaaattataggcagggatctgagcgggttccctgcccccccaggtgaggaaccacccgcctag

SEQ ID NO: 76718 - DNA, 2424 bp, Artificial Sequence
  derived and/or modified sequence
atgctgtctggacgtgatctgggcgcccctgctggcagcatgggtgcagccagttgtgaggacgaggagctcgaatttaagttggtgttcggggaggaaaaggaggctccccctctcggggctggtggcctgggagaagagctggactccgaagatgcccctccgtgttgtagactagccctaggcgagccacccccctacggggcagctcctattggaatcccaagaccgcctcccccaagacccggcatgcacagccctcctccacgtccagcaccaagtcctggcacctgggagtctcaacccgcaagaagcgtcagactgggcggacccggtgggggagcaggaggcgcagggggaggaagagtcctggagtgtccatctattcgtattacatccatctcgcccacccctgagcctcctgctgctctggaggacaatcctgacgcctggggggacggatcccctagggactatccacccccagagggcttcggcggatatagggaagccggcggtcagggtggcggagcattctttagcccttccccaggttcatcaagcttatcaagctggagctttttctctgatgcctcagacgaggcagccctgtacgcagcgtgcgatgaggtagaatcagagctgaacgaggccgcatccaggttcggactgggatcaccactcccttccccaagggcttccccacgaccttggacaccagaggacccttggtcactgtacggcccaagtcccggcggcagaggacctgaggatagctggctgctgctaagcgctcctggcccaacacctgcatctccacggcccgcatcaccctgtggtaaaagacggtactctagttccgggaccccctcgtcagcttcacctgcgttaagtcggcgcggtagcttgggtgaagaggggtctgaaccccccccgcctcctccattgccactcgctagagacccaggctcccccgggccttttgattacgtgggcgcaccgcctgccgagtcaatacctcagaagaccaggcgaacttcttccgagcaggctgttgccttgcctagaagcgaagagcccgcaagctgtaacgggaaactgcctctgggggctgaagagagcgtcgcacctccaggcggctctaggaaggaagtggccggcatggattatctggccgttcctagtccattggcctggagcaaggctagaataggtggacacagtcccatcttcagaaccagtgcactgcctccattggactggccattaccaagccaatatgaacagctagagctgcgcatcgaagtccaaccgagggcacaccatcgggctcactatgagaccgaaggctcaagaggcgccgtgaaagccgccccaggaggccatcccgtggtgaaactgctgggctactctgaaaaaccgttaacactccagatgttcattggcactgccgacgaacgaaatctcagaccccatgcattttatcaagttcatcgtataaccggtaagatggtagccactgccagttacgaggccgtggtctccggtaccaaggtgcttgaaatgacactactgccagagaacaacatggctgctaacatcgactgtgccggaatccttaaactgcgcaacagtgatatcgagctgagaaaaggtgagacagacatcggccgtaaaaacaccagagtgagactcgtatttcgtgtccatgtgccacaggggggcgggaaagtagtgtcagtgcaggctgcgagcgtgcccatcgagtgctctcagagatccgcgcaggaacttccccaagtggaggcttactctccctccgcctgttccgtaaggggtggagaggagctggtgcttacggggagcaactttctgcccgatagcaaagtggtgtttattgaacggggacctgatggaaagctgcagtgggaggaagaagcaaccgtcaatcggctgcagtctaatgaggtgactttgaccttaacagtccccgagtactccaacaagagagtgagcaggccggtacaagtgtatttctacgtcagcaacgggcgcagaaagcgctctccaacccaatctttccggtttctcccagtaatctgtaaggaggaacccctacctgactcaagtctgcgggggtttccatccgcatccgctactccttttggaaccgatatggacttctcgccccctaggcccccatacccatcctacccccacgaagacccagcctgcgagacaccatacctttctgagggctttgggtacggaatgccaccactgtatccgcaaacgggaccccctccgtcctacaggcccggtctgcggatgtttccagagactcgtggcactactgtttctgagatcatcggtcgagatctgagtggattcccagctcctccaggggaagaacctccagcctag

SEQ ID NO: 76719 - DNA, 2481 bp, Artificial Sequence
  derived and/or modified sequence
atggctgatggaggagctgacagcgctgcccagaggctgcctgagggccctggccgggtggcccctggccgggacctgggcgccccagctggctccatgggcgccgccagctgtgaagatgaggagctggagttcaagctggtgtttggagaggagaaggaggccccacccctgggcgctgggggcctgggggaggagctggacagtgaagatgccccaccctgctgccgcctggccctgggggagcccccaccctacggggccgcccccatcggcatcccccggcccccaccacccaggcctggcatgcacagccccccacccaggcctgcccccagccctggcacctgggagagccagcctgcccggtctgtgcggctgggcggccctgggggcggggccggcggggccggcggcggccgggtgctggagtgccccagcatccgcatcaccagcatcagccccaccccagagcccccagctgccctggaggacaacccagatgcctggggagatggcagcccccgggactacccacctcctgagggctttggaggctaccgggaggccggcggccagggcggcggggccttcttcagccccagccctggcagcagcagcctgagctcctggagcttcttcagtgatgccagtgatgaagctgccctgtatgctgcctgtgatgaggtggagagcgagctgaatgaagctgccagcagatttggcctgggcagccccctgcccagcccccgggccagcccccggccctggaccccagaggacccctggagcctgtatggccccagccctgggggccggggccctgaggacagctggctgctgctgagcgcccctggccccaccccagccagccccaggcctgccagcccctgtgggaagaggcgctacagcagcagcggcacccccagcagcgccagccctgccctgagccggcggggcagcctgggggaggagggcagcgagcccccacctcctccacccctgcccctggcccgggaccccggcagccctggcccctttgattatgtgggcgcccctcctgctgagagcatcccccagaagaccaggaggaccagcagcgagcaggccgtggccctgcccaggtctgaggagcccgccagctgcaatggcaagctgcccctgggcgctgaggagagcgtggcccctcctgggggcagcaggaaggaggtggccggcatggactacctggccgtgcccagccccctggcctggagcaaggccagaattggaggccacagccccatcttccgcaccagcgccctgccccccctggactggcccctgcccagccagtatgagcagctggagctgagaattgaggtgcagccccgggcccaccaccgggcccactatgaaacagagggcagcagaggagctgtgaaggccgcccctgggggccaccctgtggtgaagctgctgggctacagcgagaagcccctgaccctgcagatgttcatcggcacagcagatgagaggaacctgcggccccacgccttctaccaggtgcaccgcatcaccgggaagatggtggccacagccagctatgaagctgtggtgtctggcaccaaggtgctggagatgaccctgctgcctgagaacaacatggccgccaacatcgactgtgccggcatcctgaagctgaggaacagcgacatcgagctgaggaagggggagacagacattggaaggaagaacaccagggtgcggctggtgttccgggtgcacgtgccccagggcggcggcaaggtggtgtctgtgcaggccgcctctgtgcccatcgagtgcagccagaggtctgcccaggagctgccccaggtggaggcctacagccccagcgcctgcagcgtgcggggcggggaggagctggtgctgaccggcagcaacttcctgcctgacagcaaggtggtgttcatcgagcggggcccagatggcaagctgcagtgggaggaggaggccaccgtgaaccggctgcagagcaatgaggtgaccctgaccctgactgtgcctgagtacagcaacaagagggtgtccaggcctgtgcaggtgtacttctacgtgtccaatggccgcaggaagaggagccccacccagagcttccgcttcctgcctgtgatctgcaaggaggagcccctgcctgacagcagcctgcggggcttccccagcgccagcgccaccccatttggaacagacatggacttcagccccccccggcccccctaccccagctacccccatgaggaccctgcctgtgagaccccctacctgtctgagggcttcggctacggcatgccacccctgtacccccagacaggccccccacccagctaccggcccggcctgaggatgtttcctgagacccggggcaccaccgtgtctgagatcatcggccgggacctgagcggcttccctgcccctcctggagaggagcccccagcctag

SEQ ID NO: 76720 - DNA, 2574 bp, Artificial Sequence
  derived and/or modified sequence
atgatcaccaccctgcccagcctgctgcctgccagcctggccagcatcagccaccgggtgaccaacctgcccagcaacagcctgagccacaaccctggcctgagcaagccagacttccctggcaacagcagccctggcctgcccagcagcagcagccctggccgggacctgggcgccccagctggctccatgggcgccgccagctgtgaagatgaggagctggagttcaagctggtgtttggagaggagaaggaggccccacccctgggcgccggcggcctgggggaggagctggacagtgaagatgccccaccctgctgccgcctggccctgggggagcccccaccctatggagctgcccccatcggcatccccaggcctcctccaccccggcccggcatgcacagccccccacccaggcctgcccccagccctggcacctgggagagccagcctgcccggtctgtgcggctgggcggccctgggggcggggccggcggggccggcggcggccgggtgctggagtgccccagcatccgcatcaccagcatcagccccaccccagagcccccagctgccctggaggacaacccagatgcctggggagatggcagcccccgggactacccacctcctgagggctttggaggctaccgggaggccggcggccagggcggcggggccttcttcagccccagccctggcagcagcagcctgagctcctggagcttcttcagtgatgccagtgatgaggccgccctgtatgctgcctgtgatgaggtggagagcgagctgaatgaggccgccagccgcttcggcctgggcagccccctgcccagcccccgggccagcccccggccctggaccccagaggacccctggagcctgtatggccccagccctgggggccggggcccagaagattcctggctgctgctgagcgcccctggccccaccccagccagccccaggcctgccagcccctgtgggaagaggcgctacagcagcagcggcacccccagcagcgccagccctgccctgagcagaagaggcagcctgggggaggagggcagcgagcccccacctcctccacccctgcccctggcccgggaccccggcagccctggcccctttgattatgtgggcgcccccccagctgagagcatcccccagaagaccaggaggaccagcagcgagcaggccgtggccctgcccaggtctgaggagcccgccagctgcaatggcaagctgcccctgggcgctgaggagagcgtggcccctcctgggggcagcaggaaggaggtggccggcatggactacctggccgtgcccagccccctggcctggagcaaggcccgcatcggcggccacagccccatcttccgcaccagcgccctgccccccctggactggcccctgcccagccagtatgagcagctggagctgcgcatcgaggtgcagccccgggcccaccaccgggcccactatgaaacagagggcagcagaggagctgtgaaggccgcccctgggggccaccctgtggtgaagctgctgggctacagcgagaagcccctgaccctgcagatgtttattggaacagcagatgaaagaaacctgcggccccacgccttctaccaggtgcaccgcatcaccgggaagatggtggccacagccagctatgaggccgtggtgtctggcaccaaggtgctggagatgaccctgctgcctgagaacaacatggccgccaacatcgactgtgccggcatcctgaagctgaggaacagcgacatcgagctgaggaaaggagaaacagacatcggcaggaagaacaccagggtgcggctggtgttccgggtgcacgtgccccagggcggcggcaaggtggtgtctgtgcaggccgcctctgtgcccattgaatgttcccagaggtctgcccaggagctgccccaggtggaggcctacagccccagcgcctgcagcgtgcggggcggggaggagctggtgctgaccggcagcaacttcctgcctgacagcaaggtggtgttcatcgagcggggcccagatggcaagctgcagtgggaggaggaggccaccgtgaaccggctgcagagcaatgaggtgaccctgaccctgactgtgcctgagtacagcaacaagagggtgtccaggcctgtgcaggtgtacttctacgtgtccaatggaagaaggaagaggagccccacccagagcttccgcttcctgcccgtcatctgcaaggaggagcccctgcctgacagcagcctgcggggcttccccagcgccagcgccacccccttcggcacagacatggacttcagcccccccaggcctccctaccccagctacccccatgaagatcctgcctgtgagaccccctacctgtctgagggcttcggctacggcatgccacccctgtacccccagacaggccccccacccagctacagacctggcctgaggatgtttcctgagacccggggcaccaccgtgtctgagatcatcggccgggacctgagcggcttccctgcccctcctggagaggagcccccagcctag

SEQ ID NO: 76721 - DNA, 2424 bp, Artificial Sequence
  derived and/or modified sequence
atgctgagcggccgggacctgggcgccccagctggctccatgggcgccgccagctgtgaagatgaggagctggagttcaagctggtgtttggagaggagaaggaggccccacccctgggcgccggcggcctgggggaggagctggacagtgaagatgccccaccctgctgccgcctggccctgggggagcccccaccctatggagctgcccccatcggcatccccaggcctcctccaccccggcccggcatgcacagccccccacccaggcctgcccccagccctggcacctgggagagccagcctgcccggtctgtgcggctgggcggccctgggggcggggccggcggggccggcggcggccgggtgctggagtgccccagcatccgcatcaccagcatcagccccaccccagagcccccagctgccctggaggacaacccagatgcctggggagatggcagcccccgggactacccacctcctgagggctttggaggctaccgggaggccggcggccagggcggcggggccttcttcagccccagccctggcagcagcagcctgagctcctggagcttcttcagtgatgccagtgatgaggccgccctgtatgctgcctgtgatgaggtggagagcgagctgaatgaggccgccagccgcttcggcctgggcagccccctgcccagcccccgggccagcccccggccctggaccccagaggacccctggagcctgtatggccccagccctgggggccggggcccagaagattcctggctgctgctgagcgcccctggccccaccccagccagccccaggcctgccagcccctgtgggaagaggcgctacagcagcagcggcacccccagcagcgccagccctgccctgagcagaagaggcagcctgggggaggagggcagcgagcccccacctcctccacccctgcccctggcccgggaccccggcagccctggcccctttgattatgtgggcgcccccccagctgagagcatcccccagaagaccaggaggaccagcagcgagcaggccgtggccctgcccaggtctgaggagcccgccagctgcaatggcaagctgcccctgggcgctgaggagagcgtggcccctcctgggggcagcaggaaggaggtggccggcatggactacctggccgtgcccagccccctggcctggagcaaggcccgcatcggcggccacagccccatcttccgcaccagcgccctgccccccctggactggcccctgcccagccagtatgagcagctggagctgcgcatcgaggtgcagccccgggcccaccaccgggcccactatgaaacagagggcagcagaggagctgtgaaggccgcccctgggggccaccctgtggtgaagctgctgggctacagcgagaagcccctgaccctgcagatgtttattggaacagcagatgaaagaaacctgcggccccacgccttctaccaggtgcaccgcatcaccgggaagatggtggccacagccagctatgaggccgtggtgtctggcaccaaggtgctggagatgaccctgctgcctgagaacaacatggccgccaacatcgactgtgccggcatcctgaagctgaggaacagcgacatcgagctgaggaaaggagaaacagacatcggcaggaagaacaccagggtgcggctggtgttccgggtgcacgtgccccagggcggcggcaaggtggtgtctgtgcaggccgcctctgtgcccattgaatgttcccagaggtctgcccaggagctgccccaggtggaggcctacagccccagcgcctgcagcgtgcggggcggggaggagctggtgctgaccggcagcaacttcctgcctgacagcaaggtggtgttcatcgagcggggcccagatggcaagctgcagtgggaggaggaggccaccgtgaaccggctgcagagcaatgaggtgaccctgaccctgactgtgcctgagtacagcaacaagagggtgtccaggcctgtgcaggtgtacttctacgtgtccaatggaagaaggaagaggagccccacccagagcttccgcttcctgcccgtcatctgcaaggaggagcccctgcctgacagcagcctgcggggcttccccagcgccagcgccacccccttcggcacagacatggacttcagcccccccaggcctccctaccccagctacccccatgaagatcctgcctgtgagaccccctacctgtctgagggcttcggctacggcatgccacccctgtacccccagacaggccccccacccagctacagacctggcctgaggatgtttcctgagacccggggcaccaccgtgtctgagatcatcggccgggacctgagcggcttccctgcccctcctggagaggagcccccagcctag

SEQ ID NO: 76722 - DNA, 2481 bp, Artificial Sequence
  derived and/or modified sequence
atggccgacggcggcgccgacagcgccgcccagcggctgcccgaggggccaggacgagtggcacctggcagggacctgggcgcccctgccggctccatgggggctgccagttgcgaagatgaggagcttgagtttaaacttgtcttcggcgaagaaaaagaggctcctcctttgggagcaggaggcctcggtgaagaactggactcggaagatgccccgccatgttgccgtttggcactcggggagcctcctccatatggagccgcaccaatcggcatcccacgtccccctccccctcggccgggcatgcactctccacctccccgccccgctccgtctcccggtacctgggagagtcaacccgccagaagcgtgcggctaggcgggccagggggcggagctgggggcgcgggaggcggcagggtgctggagtgtccttcaatacggattacctccatctcccccacaccggagccacctgcagcattagaggacaatcccgatgcttggggtgacggttccccaagggattaccctcctcccgaagggtttggcggatatagggaagccggtggccagggagggggtgcattcttttccccttcacctggctcatcttcactctcatcttggagtttcttttctgacgcatctgacgaggctgcactctatgccgcatgtgacgaagtagagtctgaactcaacgaggcagcgtcccggtttggcctgggcagcccgcttccctcgccgagggcaagcccccgtccttggactcccgaggatccttggagtctgtacggcccttctcctggggggcggggccccgaagatagctggttgctgctttcagcccctgggcccacacctgcgtctccaaggcccgcaagcccctgcggcaaacgtaggtatagcagttcgggtacgcctagctcagcctctcccgccctcagcaggcgcggatccttgggggaggagggatctgagcctccaccccctcccccgttaccccttgctcgagatccagggtccccgggtccttttgattacgtgggggccccccctgccgagagtatccctcagaaaacgcgaaggacgagttctgaacaggccgtggccctgcccaggagcgaggaaccagcgagttgcaacggtaaacttcccttgggcgcggaggagtcagtcgccccccccggtggatcccgcaaagaagttgctggcatggactatctggcggtgccctccccgttggcctggtccaaagccaggattggcggtcactctcctatttttcgtacaagcgccctgcctcccctagactggccattgcctagccagtacgagcagcttgagcttcgcatcgaggtccagcctagggctcaccaccgagcacactacgagaccgagggctctcggggagcagtcaaagcagcacccggaggccaccccgtggtgaagctgctgggatattcagagaagccgctgactctgcaaatgttcatcggcaccgctgacgaacgcaaccttaggccccacgccttttatcaggtgcacaggattactggtaaaatggtggcaacggctagctacgaagccgtggtctccggcacaaaggtcctggagatgacccttctgcccgagaataacatggctgctaatatcgactgcgcaggaatactaaaattacggaactcggacatcgagctccgtaaaggcgaaacagatatcggacggaaaaatacgcgggtacggctggtatttcgagtgcacgtgccacaaggcggggggaaggtggtgtctgtgcaggctgcgtctgttccaattgagtgttcacagcggtctgcccaagagctgccccaagtggaggcctacagtccttctgcctgctctgtcagagggggggaagagctggtgctcacagggtcaaactttctgcctgactccaaggtggtgttcatagagcggggtcctgatgggaagctccagtgggaggaagaagccacagtcaacagactgcagtccaatgaagtaacgctgactctgacggtgccagagtactctaataagagggtctctagaccagtgcaggtctatttttatgtctcaaatggacggcgtaagcgctcaccaacccagagcttccggtttttacccgtgatatgcaaggaggagcctctcccagatagtagtctgaggggattcccctcagcttcagcgactcccttcggcaccgacatggatttctccccaccccggccgccctacccttcatacccccatgaggatcctgcatgcgagacgccctacctgtccgaaggctttggatacggaatgcctccgctgtacccccagacaggccccccgcctagctaccgacctggcctgagaatgtttccggaaaccagaggcacaaccgtgtctgagataataggtagggacctgagcggttttccagcgcctcctggagaagagccgccagcctag

SEQ ID NO: 76723 - DNA, 2574 bp, Artificial Sequence
  derived and/or modified sequence
atgatcaccaccctgcccagcctgctgcccgccagcctggccagcatcagccacagagtgaccaacctgcccagcaattctctatctcataaccccggactcagtaagcccgactttcccggcaatagcagcccaggcctgcctagctccagctcacctggccgtgatttgggagctcctgccgggagtatgggagccgccagctgtgaagacgaggaattggagttcaagctcgtattcggcgaagaaaaagaggctccaccactaggcgccgggggtctgggagaggaacttgatagcgaggacgctccaccgtgctgtagacttgctctcggtgaaccccctccatatggagctgctcccatcggcatacctcggcccccgccccctcgcccggggatgcattcgccacctccccgcccagccccaagccccggtacctgggagtctcagcccgccagaagtgtccgtctggggggccccggtggtggtgcgggaggcgccggaggcggtagggtgttagagtgcccatccataagaataaccagcatttcccccacacctgagcctcccgcggctctggaagacaaccccgacgcatggggcgacgggtcacctcgagattatcctcccccagaggggttcgggggctacagggaagcgggcggacaggggggcggcgctttcttctcgccgagccccgggagctcctcgctgagcagctggagctttttttccgacgcgagcgatgaggcagctctttatgccgcgtgtgacgaagtcgagtctgaactgaatgaagctgcgtcacggtttggcctcggaagtcccctgccttctccacgggcaagtcccagaccctggactccagaggacccctggtctctgtatgggcccagcccagggggtcggggacctgaggacagttggctgctcctttccgcaccaggtcccactccagcatcacctcggcccgcttctccctgtggcaagcgtagatactcaagcagtggtacaccatcaagcgcgagtccggcactgagccgaaggggcagcctcggggaggagggctcagaacctccaccgccaccgcctctgcctctagccagggaccccggatcacctgggccattcgattatgttggcgcccccccagctgagtcaattccacagaagactagacgtacttccagcgagcaggctgtggctcttccccggagtgaggaaccagctagctgcaatggtaagctgcctctgggggcagaggagagcgtcgctcctccggggggcagtcggaaggaagtggccggcatggattatttggcagtacctagtcctcttgcctggtcaaaagctagaattggaggacacagcccgatatttcgaacttctgcactgcccccccttgattggcctctcccttctcaatacgaacaactcgaactgagaattgaggtccagccccgggctcaccaccgagcacattatgagaccgaaggttcaagaggtgcggtgaaggctgccccaggcggacacccagttgtgaaattgttaggatatagtgaaaaaccgctcacgctgcagatgttcataggtaccgctgatgaaaggaacctgcggcctcacgcattctatcaggtccatcgcattactgggaaaatggtcgcgaccgctagttacgaagcggtggtgagcgggacaaaggtgttagaaatgactttgctacccgaaaacaacatggcggctaatatcgactgcgctggcatactcaagcttaggaacagcgacatcgagttgcgtaagggtgaaacagatattggaagaaaaaatacccgcgtgcgactggtgtttagggtgcatgtaccccaggggggcggcaaggtggtctctgtgcaagccgcttcagtccctatcgaatgttcccaaagaagtgctcaggaacttccccaagtggaggcgtactcgccgagcgcctgtagcgtgcgggggggcgaggagctggtgctcacaggctcaaactttttgcccgactccaaggtcgtgtttattgagagggggcctgatggaaaactgcaatgggaggaagaggctaccgttaaccgacttcaaagcaacgaggtaaccctgacgttaacagtgcctgagtatagtaataaaagggtgagcaggcctgtacaggtgtatttctacgtctcaaacggacgacgcaaacgcagcccgacccaatcctttcggttcctgcctgttatatgtaaggaggagccattacctgacagctccctgaggggattcccgtcagcttccgccacccctttcggaacggatatggatttctcgcctccgagacctccctatccttcttatccgcacgaggacccagcttgtgagactccctacctttctgaaggctttgggtatggaatgccccccctgtatcctcagactggtcccccaccaagctaccgtcctggactgcgtatgttccccgagacgcgcggaactacagttagcgagatcatcggcagagatcttagtggctttccagcgcccccaggagaagagccaccagcatag

SEQ ID NO: 76724 - DNA, 2424 bp, Artificial Sequence
  derived and/or modified sequence
atgctgagcggccgggacctgggcgcccccgccggcagcatgggcgcagccagctgtgaggatgaagagctagagtttaagctcgtgttcggtgaagagaaggaggcaccgcctctgggggccgggggacttggagaagagctggatagcgaggacgcaccaccctgctgccgtttggctctcggcgaaccccctccctatggtgcagcccccattggcatcccccgccctcctcctcctcggcctggaatgcactccccaccgccccgacctgccccatctccgggcacctgggagagccagcccgcccgcagtgttaggctcggtggaccagggggaggcgctggaggcgcaggcggcggccgcgtgctggagtgccccagcatccgaataacctctatatctccaactccagaaccacccgccgccctggaggacaatcctgacgcctggggtgacgggagcccccgggactaccctccgccagagggctttgggggctatagggaagcgggtggtcagggagggggcgcctttttctctccttccccagggagctcatctctctcctcttggagctttttctccgacgcatcagacgaggcagccttgtacgcggcatgcgatgaggtggaatccgagctgaacgaggcagcttccaggtttgggctagggtcccccctaccctcgcctcgtgccagccctcgaccttggaccccagaggatccttggagcctgtacgggccctctcccggagggcgcggaccagaagatagctggctgttgttgtctgctccgggcccgaccccagcgtccccgaggcccgccagtccatgtggcaaaagaagatactcctcatccggcacaccatccagcgcctccccagctttgagtcggcggggtagcctgggagaggagggcagtgaaccaccccctccccctccactgccactggcacgcgacccaggctctcccggcccgttcgattacgtgggtgccccccccgcggagtccattccccagaagaccagacggacctcctccgagcaggcggtcgcacttcctcgctccgaggagcccgcctcttgtaacggaaagctccctttgggagcagaggaatcagtggctccgcccggagggtctaggaaggaggttgccggtatggattacttggccgtgccatcgccactggcttggtccaaggcgaggatcggtggccacagccctatatttagaacctctgccctgccaccactcgattggcctctgccctctcaatacgaacagttggaactacggatcgaagtccaacctagagcccatcacagagctcactacgagaccgagggctctcggggggctgtcaaggcggctcccggcggacatcctgtggtaaaactgctggggtatagtgagaaacccctgacactgcagatgtttattggcactgccgacgagcggaacctgcggcctcacgccttttatcaagtgcatagaatcaccggcaaaatggtggcaaccgcatcttacgaggctgttgtctccggtactaaggtgcttgagatgacactccttcctgagaataatatggctgcaaacatcgattgcgccggcattctcaagctgaggaattccgacatcgagctcaggaagggagaaactgacatcggcagaaagaatacccgcgtgcgtctggtcttccgtgtgcacgtgccacagggaggaggtaaagtggtcagcgtccaggcagcctctgttccaatcgagtgttcccagcggtcggcccaggaattgccccaagttgaagcttattctccatctgcgtgcagtgtcaggggtggcgaggaactggtactgacaggaagcaattttctccctgacagtaaagtggtgttcattgagagagggcctgacggtaagctgcagtgggaagaagaagccactgtcaatcgtctccagtcaaacgaggtgaccctcacattgaccgtgcctgaatactccaataaacgcgtgtccagacccgtacaggtgtatttttatgtgagtaacggcaggcgaaaaaggagcccaacgcagtctttcagatttttgccggtgatctgcaaagaggaaccgctcccagactccagtctgcgcgggtttccatctgccagtgccaccccattcggtacagatatggatttcagcccgccccggcccccttacccgtcctacccacacgaagacccagcctgcgaaactccttatctctccgaggggttcgggtacggcatgccccctctgtaccctcagacaggcccccctccatcatatcggcccggactgagaatgtttccagagacacgaggtacaaccgtttccgagatcatcggcagggacctatctggtttccctgcccctcccggagaagagccaccagcatag

SEQ ID NO: 76725 - DNA, 2566 bp, Artificial Sequence
  derived and/or modified sequence
agttctcaaagcctctttggctcggactgctcccagaggcatccaggctggctaagcgttcttcatctttgggggtcctggaggaatggctgatggaggcgctgattcggcagcgcaaagacttccagaaggcccgggcagagtagccccaggccgggacctgggggctcctgccggatccatgggggcggccagctgcgaggatgaggagctggaatttaagctggtgttcggggaggaaaaggaggcccccccgctgggcgcggggggattgggggaagaactggactcagaggatgccccgccatgctgccgtctggccttgggagagccccctccctatggcgctgcacctatcggtattccccgacctccaccccctcggcctggcatgcattcgccaccgccgcgaccagccccctcacctggcacctgggagagccagcccgccaggtcggtgaggctgggaggaccaggagggggtgctgggggtgctgggggtggccgtgttctcgagtgtcccagcatccgcatcacctccatctctcccacgccggagccgccagcagcgctggaggacaaccctgatgcctggggggacggctctcctagagattaccccccaccagaaggctttgggggctacagagaagcagggggccagggtgggggggccttcttcagcccaagccctggcagcagcagcctgtcctcgtggagcttcttctccgatgcctctgacgaggcagccctgtatgcagcctgcgacgaggtggagtctgagctaaatgaggcggcctcccgctttggcctgggctccccgctgccctcgccccgggcctcccctcggccatggacccccgaagatccctggagcctgtatggtccaagccccggaggccgagggccagaggatagctggctactcctcagtgctcctgggcccaccccagcctccccgcggcctgcctctccatgtggcaagcggcgctattccagctcgggaaccccatcttcagcctccccagctctgtcccgccgtggcagcctgggggaagaggggtctgagccacctccaccacccccattgcctctggcccgggacccgggctcccctggtccctttgactatgtgggggccccaccagctgagagcatccctcagaagacacggcggacttccagcgagcaggcagtggctctgcctcggtctgaggagcctgcctcatgcaatgggaagctgcccttgggagcagaggagtctgtggctcctccaggaggttcccggaaggaggtggctggcatggactacctggcagtgccctccccactcgcttggtccaaggcccggattgggggacacagccctatcttcaggacctctgccctacccccactggactggcctctgcccagccaatatgagcagctggagctgaggatcgaggtacagcctagagcccaccaccgggcccactatgagacagaaggcagccgtggagctgtcaaagctgcccctggcggtcaccccgtagtcaagctcctaggctacagtgagaagccactgaccctacagatgttcatcggcactgcagatgaaaggaacctgcggcctcatgccttctatcaggtgcaccgtatcacaggcaagatggtggccacggccagctatgaagccgtagtcagtggcaccaaggtgttggagatgactctgctgcctgagaacaacatggcggccaacattgactgcgcgggaatcctgaagcttcggaattcagacattgagcttcggaagggtgagacggacatcgggcgcaaaaacacacgtgtacggctggtgttccgggtacacgtgccccagggcggcgggaaggtcgtctcagtacaggcagcatcggtgcccatcgagtgctcccagcgctcagcccaggagctgccccaggtggaggcctacagccccagtgcctgctctgtgagaggaggcgaggaactggtactgactggctccaacttcctgccagactccaaggtggtgttcattgagaggggtcctgatgggaagctgcaatgggaggaggaggccacagtgaaccgactgcagagcaacgaggtgacgctgaccctgactgtccccgagtacagcaacaagagggtttcccggccagtccaggtctacttttatgtctccaatgggcggaggaaacgcagtcctacccagagtttcaggtttctgcctgtgatctgcaaagaggagcccctaccggactcatctctgcggggtttcccttcagcatcggcaaccccctttggcactgacatggacttctcaccacccaggcccccctacccctcctatccccatgaagaccctgcttgcgaaactccttacctatcagaaggcttcggctatggcatgccccctctgtacccccagacggggcccccaccatcctacagaccgggcctgcggatgttccctgagactaggggtaccacagtgagtgagatcattggccgagacctgagtggcttccctgcacctcctggagaagagcctcctgcctga

SEQ ID NO: 76726 - DNA, 3057 bp, Artificial Sequence
  derived and/or modified sequence
gaagagaggacagagggagggagggtgggggaggacgaggggcgcgtggttttcccatctcatccctggaggaggggctggagcatccccggcagccaatcagggacaggctgggggggggaccgctttgaagaagtttgggggaaaaaagtttggaaaagtttctataataacgagggggcttctggagggaggcggcagcgacggaggagggggcttctcagagaaagggagggagggagccacccgggtgaagatacagcagcctcctgaactcccccctcccacccaggccgggacctgggggctcctgccggatccatgggggcggccagctgcgaggatgaggagctggaatttaagctggtgttcggggaggaaaaggaggcccccccgctgggcgcggggggattgggggaagaactggactcagaggatgccccgccatgctgccgtctggccttgggagagccccctccctatggcgctgcacctatcggtattccccgacctccaccccctcggcctggcatgcattcgccaccgccgcgaccagccccctcacctggcacctgggagagccagcccgccaggtcggtgaggctgggaggaccaggagggggtgctgggggtgctgggggtggccgtgttctcgagtgtcccagcatccgcatcacctccatctctcccacgccggagccgccagcagcgctggaggacaaccctgatgcctggggggacggctctcctagagattaccccccaccagaaggctttgggggctacagagaagcagggggccagggtgggggggccttcttcagcccaagccctggcagcagcagcctgtcctcgtggagcttcttctccgatgcctctgacgaggcagccctgtatgcagcctgcgacgaggtggagtctgagctaaatgaggcggcctcccgctttggcctgggctccccgctgccctcgccccgggcctcccctcggccatggacccccgaagatccctggagcctgtatggtccaagccccggaggccgagggccagaggatagctggctactcctcagtgctcctgggcccaccccagcctccccgcggcctgcctctccatgtggcaagcggcgctattccagctcgggaaccccatcttcagcctccccagctctgtcccgccgtggcagcctgggggaagaggggtctgagccacctccaccacccccattgcctctggcccgggacccgggctcccctggtccctttgactatgtgggggccccaccagctgagagcatccctcagaagacacggcggacttccagcgagcaggcagtggctctgcctcggtctgaggagcctgcctcatgcaatgggaagctgcccttgggagcagaggagtctgtggctcctccaggaggttcccggaaggaggtggctggcatggactacctggcagtgccctccccactcgcttggtccaaggcccggattgggggacacagccctatcttcaggacctctgccctacccccactggactggcctctgcccagccaatatgagcagctggagctgaggatcgaggtacagcctagagcccaccaccgggcccactatgagacagaaggcagccgtggagctgtcaaagctgcccctggcggtcaccccgtagtcaagctcctaggctacagtgagaagccactgaccctacagatgttcatcggcactgcagatgaaaggaacctgcggcctcatgccttctatcaggtgcaccgtatcacaggcaagatggtggccacggccagctatgaagccgtagtcagtggcaccaaggtgttggagatgactctgctgcctgagaacaacatggcggccaacattgactgcgcgggaatcctgaagcttcggaattcagacattgagcttcggaagggtgagacggacatcgggcgcaaaaacacacgtgtacggctggtgttccgggtacacgtgccccagggcggcgggaaggtcgtctcagtacaggcagcatcggtgcccatcgagtgctcccagcgctcagcccaggagctgccccaggtggaggcctacagccccagtgcctgctctgtgagaggaggcgaggaactggtactgactggctccaacttcctgccagactccaaggtggtgttcattgagaggggtcctgatgggaagctgcaatgggaggaggaggccacagtgaaccgactgcagagcaacgaggtgacgctgaccctgactgtccccgagtacagcaacaagagggtttcccggccagtccaggtctacttttatgtctccaatgggcggaggaaacgcagtcctacccagagtttcaggtttctgcctgtgatctgcaaagaggagcccctaccggactcatctctgcggggtttcccttcagcatcggcaaccccctttggcactgacatggacttctcaccacccaggcccccctacccctcctatccccatgaagaccctgcttgcgaaactccttacctatcagaaggcttcggctatggcatgccccctctgtacccccagacggggcccccaccatcctacagaccgggcctgcggatgttccctgagactaggggtaccacagtgagtgagatcattggccgagacctgagtggcttccctgcacctcctggagaagagcctcctgcctgaaccacgtgaactgtcatcacctggcaaccccagccccagcctcagccctgccccctttccctccttcctggagtggtggctacagaagcttggggccaaccctggctcctctttccccagcttctgtctgtctcactgtcttccctcccctcccccagctgaggtgtggccctcaggcctggtgctgccttggagggctgggggaaggagtgtgtggaggagggaggagggtgaagactgaggctaggtgccagaatggactggagtgaaggcgtgtctagagtgtgggctggctgttgtgctggaaagctggggacaggttgatggtaataaactgctcaatgaccagtg

SEQ ID NO: 76727 - DNA, 2893 bp, Artificial Sequence
  derived and/or modified sequence
aaccgtttagttgctgggatggggcggcgttgggggtgcggccctgaaccggagggatttagagactggagacgcggcctctaagagaggttgaaactgtgtgtgtgtgggagaaaatgataaccaccctcccatctctcctacccgccagcctcgccagtatctcccaccgagtcacgaatctcccatctaactccctctcacacaacccaggcctctccaagcctgactttcccggaaactccagtccaggtcttccttcctcctccagcccaggccgggacctgggggctcctgccggatccatgggggcggccagctgcgaggatgaggagctggaatttaagctggtgttcggggaggaaaaggaggcccccccgctgggcgcggggggattgggggaagaactggactcagaggatgccccgccatgctgccgtctggccttgggagagccccctccctatggcgctgcacctatcggtattccccgacctccaccccctcggcctggcatgcattcgccaccgccgcgaccagccccctcacctggcacctgggagagccagcccgccaggtcggtgaggctgggaggaccaggagggggtgctgggggtgctgggggtggccgtgttctcgagtgtcccagcatccgcatcacctccatctctcccacgccggagccgccagcagcgctggaggacaaccctgatgcctggggggacggctctcctagagattaccccccaccagaaggctttgggggctacagagaagcagggggccagggtgggggggccttcttcagcccaagccctggcagcagcagcctgtcctcgtggagcttcttctccgatgcctctgacgaggcagccctgtatgcagcctgcgacgaggtggagtctgagctaaatgaggcggcctcccgctttggcctgggctccccgctgccctcgccccgggcctcccctcggccatggacccccgaagatccctggagcctgtatggtccaagccccggaggccgagggccagaggatagctggctactcctcagtgctcctgggcccaccccagcctccccgcggcctgcctctccatgtggcaagcggcgctattccagctcgggaaccccatcttcagcctccccagctctgtcccgccgtggcagcctgggggaagaggggtctgagccacctccaccacccccattgcctctggcccgggacccgggctcccctggtccctttgactatgtgggggccccaccagctgagagcatccctcagaagacacggcggacttccagcgagcaggcagtggctctgcctcggtctgaggagcctgcctcatgcaatgggaagctgcccttgggagcagaggagtctgtggctcctccaggaggttcccggaaggaggtggctggcatggactacctggcagtgccctccccactcgcttggtccaaggcccggattgggggacacagccctatcttcaggacctctgccctacccccactggactggcctctgcccagccaatatgagcagctggagctgaggatcgaggtacagcctagagcccaccaccgggcccactatgagacagaaggcagccgtggagctgtcaaagctgcccctggcggtcaccccgtagtcaagctcctaggctacagtgagaagccactgaccctacagatgttcatcggcactgcagatgaaaggaacctgcggcctcatgccttctatcaggtgcaccgtatcacaggcaagatggtggccacggccagctatgaagccgtagtcagtggcaccaaggtgttggagatgactctgctgcctgagaacaacatggcggccaacattgactgcgcgggaatcctgaagcttcggaattcagacattgagcttcggaagggtgagacggacatcgggcgcaaaaacacacgtgtacggctggtgttccgggtacacgtgccccagggcggcgggaaggtcgtctcagtacaggcagcatcggtgcccatcgagtgctcccagcgctcagcccaggagctgccccaggtggaggcctacagccccagtgcctgctctgtgagaggaggcgaggaactggtactgactggctccaacttcctgccagactccaaggtggtgttcattgagaggggtcctgatgggaagctgcaatgggaggaggaggccacagtgaaccgactgcagagcaacgaggtgacgctgaccctgactgtccccgagtacagcaacaagagggtttcccggccagtccaggtctacttttatgtctccaatgggcggaggaaacgcagtcctacccagagtttcaggtttctgcctgtgatctgcaaagaggagcccctaccggactcatctctgcggggtttcccttcagcatcggcaaccccctttggcactgacatggacttctcaccacccaggcccccctacccctcctatccccatgaagaccctgcttgcgaaactccttacctatcagaaggcttcggctatggcatgccccctctgtacccccagacggggcccccaccatcctacagaccgggcctgcggatgttccctgagactaggggtaccacagtgagtgagatcattggccgagacctgagtggcttccctgcacctcctggagaagagcctcctgcctgaaccacgtgaactgtcatcacctggcaaccccagccccagcctcagccctgccccctttccctccttcctggagtggtggctacagaagcttggggccaaccctggctcctctttccccagcttctgtctgtctcactgtcttccctcccctcccccagctgaggtgtggccctcaggcctggtgctgccttggagggctgggg

SEQ ID NO: 76728 - DNA, 559 bp, Artificial Sequence
  derived and/or modified sequence
tttcccatctcatccctggaggaggggctggagcatccccggcagccaatcagggacaggctgggggggggaccgctttgaagaagtttgggggaaaaaagccgggacctgggggctcctgccggatccatgggggcggccagctgcgaggatgaggagctggaatttaagctggtgttcggggaggaaaaggaggcccccccgctgggcgcggggggattgggggaagaactggactcagaggatgccccgccatgctgccgtctggccttgggagagccccctccctatggcgctgcacctatcggtattccccgacctccaccccctcggcctggcatgcattcgccaccgccgcgaccagccccctcacctggcacctgggagagccagcccgccaggtcggtgaggctgggaggaccaggagggggtgctgggggtgctgggggtggccgtgttctcgagtgtcccagcatccgcatcacctccatctctcccacgccggagccgccagcagcgctggaggacaaccctgatgcctggggggacggctctccta

SEQ ID NO: 76729 - DNA, 2506 bp, Artificial Sequence
  derived and/or modified sequence
gaagaggaggggaacccacagggtccggaggtttcaggcccctagtaaacctggcaaggatttttagaagagccggagtgggatgctatcgggccgggacctgggggctcctgccggatccatgggggcggccagctgcgaggatgaggagctggaatttaagctggtgttcggggaggaaaaggaggcccccccgctgggcgcggggggattgggggaagaactggactcagaggatgccccgccatgctgccgtctggccttgggagagccccctccctatggcgctgcacctatcggtattccccgacctccaccccctcggcctggcatgcattcgccaccgccgcgaccagccccctcacctggcacctgggagagccagcccgccaggtcggtgaggctgggaggaccaggagggggtgctgggggtgctgggggtggccgtgttctcgagtgtcccagcatccgcatcacctccatctctcccacgccggagccgccagcagcgctggaggacaaccctgatgcctggggggacggctctcctagagattaccccccaccagaaggctttgggggctacagagaagcagggggccagggtgggggggccttcttcagcccaagccctggcagcagcagcctgtcctcgtggagcttcttctccgatgcctctgacgaggcagccctgtatgcagcctgcgacgaggtggagtctgagctaaatgaggcggcctcccgctttggcctgggctccccgctgccctcgccccgggcctcccctcggccatggacccccgaagatccctggagcctgtatggtccaagccccggaggccgagggccagaggatagctggctactcctcagtgctcctgggcccaccccagcctccccgcggcctgcctctccatgtggcaagcggcgctattccagctcgggaaccccatcttcagcctccccagctctgtcccgccgtggcagcctgggggaagaggggtctgagccacctccaccacccccattgcctctggcccgggacccgggctcccctggtccctttgactatgtgggggccccaccagctgagagcatccctcagaagacacggcggacttccagcgagcaggcagtggctctgcctcggtctgaggagcctgcctcatgcaatgggaagctgcccttgggagcagaggagtctgtggctcctccaggaggttcccggaaggaggtggctggcatggactacctggcagtgccctccccactcgcttggtccaaggcccggattgggggacacagccctatcttcaggacctctgccctacccccactggactggcctctgcccagccaatatgagcagctggagctgaggatcgaggtacagcctagagcccaccaccgggcccactatgagacagaaggcagccgtggagctgtcaaagctgcccctggcggtcaccccgtagtcaagctcctaggctacagtgagaagccactgaccctacagatgttcatcggcactgcagatgaaaggaacctgcggcctcatgccttctatcaggtgcaccgtatcacaggcaagatggtggccacggccagctatgaagccgtagtcagtggcaccaaggtgttggagatgactctgctgcctgagaacaacatggcggccaacattgactgcgcgggaatcctgaagcttcggaattcagacattgagcttcggaagggtgagacggacatcgggcgcaaaaacacacgtgtacggctggtgttccgggtacacgtgccccagggcggcgggaaggtcgtctcagtacaggcagcatcggtgcccatcgagtgctcccagcgctcagcccaggagctgccccaggtggaggcctacagccccagtgcctgctctgtgagaggaggcgaggaactggtactgactggctccaacttcctgccagactccaaggtggtgttcattgagaggggtcctgatgggaagctgcaatgggaggaggaggccacagtgaaccgactgcagagcaacgaggtgacgctgaccctgactgtccccgagtacagcaacaagagggtttcccggccagtccaggtctacttttatgtctccaatgggcggaggaaacgcagtcctacccagagtttcaggtttctgcctgtgatctgcaaagaggagcccctaccggactcatctctgcggggtttcccttcagcatcggcaaccccctttggcactgacatggacttctcaccacccaggcccccctacccctcctatccccatgaagaccctgcttgcgaaactccttacctatcagaaggcttcggctatggcatgccccctctgtacccccagacggggcccccaccatcctacagaccgggcctgcggatgttccctgagactaggggtaccacagtgagtgagatcattggccgagacctgagtggcttccctgcacctcctggagaagagcctcctgcctga

SEQ ID NO: 76730 - DNA, 2481 bp, Artificial Sequence
  derived and/or modified sequence
atggcagacggcggtgccgacagcgcggctcaacgcctgcccgaaggtccaggccgagtcgcaccagggcgtgatcttggcgctcccgcaggcagcatgggagccgcatcctgtgaagacgaagaacttgagttcaaactggtgtttggagaggaaaaagaagcccctccattaggagcgggaggccttggtgaggagttggattcggaggacgctccaccatgctgtagactcgccttgggggagcccccaccctacggggcagccccaattggaattcctcgtcctcctccccctagacctggaatgcattctccccctcctcgtcccgctcccagcccagggacttgggagagccagccagctcggtcagttcgcctcggaggccctggcggtggggcaggtggtgccggtggcggtagagtgcttgagtgtcccagtataagaatcacaagtatcagtcccactccagaaccacctgcagcactcgaagataatcccgatgcatggggagacggcagcccaagggattaccccccacccgagggttttggcggttacagagaagcgggagggcaaggcggaggagccttcttttcaccaagccccggtagctcttctttgagcagctggagctttttctcggatgcatccgacgaggcagcactttacgcagcctgcgacgaagtagagagtgaactcaatgaggctgcttcacgctttggcttgggtagtcctctcccctccccccgagcttcccccaggccatggactcccgaggacccctggtctctgtatgggccaagtccgggtggacgaggtcctgaggatagctggctgctgctctctgcgcctggtcctacacccgcaagcccccgtccagcttccccctgtgggaaaagaaggtactccagctctggcaccccttcctcagctagccccgctctttctcggaggggctctttaggcgaagagggatctgagcccccaccacctcccccattgccactggcgcgtgacccagggtcccccggtcccttcgattacgtcggtgccccacctgccgagagcatccctcagaagacaaggaggacctcaagcgagcaggccgtagcacttcctcggtccgaggaacctgcttcctgcaacggaaagttaccccttggagcagaggaaagtgttgccccaccaggcggatccagaaaggaggtggcaggcatggattatctggcagtccctagtccactggcatggagcaaagcgagaatcggagggcactctcccatcttccggacgtctgctctgcctcctctagattggcctctcccttctcagtatgaacagcttgaactgcggatcgaggtccagcccagagcacaccacagggcccattacgaaaccgaaggttcaagaggggctgttaaagctgccccagggggtcatcccgtggttaaactcctcggttactcagagaagcctctcacccttcagatgtttattgggacagcagacgaaaggaacctgagaccacacgccttctatcaggttcacaggatcacaggcaagatggtggctactgcctcatacgaggcggtggtgtcaggaactaaagtgttggaaatgaccctgttgcctgaaaacaatatggctgccaatattgactgtgctggcatactcaaattgcgaaatagcgacattgagctgcgcaaaggggaaaccgacatcggacgtaaaaatacccgcgtgcgcttagtattcagggtgcatgtgccgcagggagggggtaaggtggtatcagtccaggctgctagcgtgcctatagagtgtagccagaggtctgcgcaggagctgccgcaagtggaggcatactccccctcagcctgctccgtcagaggtggggaggagctggtgctgactggatcaaatttccttcccgacagcaaggttgtgttcatcgagcgtgggcctgatggtaaactgcagtgggaggaggaagctacagtcaatagactgcaaagcaatgaagtaacactaaccctgacggtgcccgagtatagcaacaaacgtgtttctcgtccggtgcaagtttacttctatgtcagtaacggcaggaggaagaggtcacctacgcagtcatttcggttcctgccagtgatctgtaaagaggagccactgccagatagttctctcagggggtttcccagtgcttcagccacaccctttgggacagacatggacttttcaccacctcgcccaccttatccatcctacccccatgaggatcccgcttgcgagacaccttaccttagcgagggttttggatatggaatgcctccgctttatcctcaaaccgggccacctccgtcatatcgccctggattgagaatgttccctgagacacggggaaccacagtgagcgaaatcattggccgagatctgtcgggctttccagcccctcccggagaagagccgcctgcctag

SEQ ID NO: 76731 - DNA, 2574 bp, Artificial Sequence
  derived and/or modified sequence
atgatcacaactttgccctccttattaccagccagcctggctagtatttcacaccgcgtgactaacctccctagcaactccttgtctcacaatccaggactaagcaaaccagatttccctgggaattcctctcctggactgccctcaagctccagtcccggacgggaccttggcgcacctgccggttccatgggagccgcttcatgcgaagacgaagaactcgagttcaagttagtgtttggagaggagaaagaggctcccccactgggtgcgggaggcctcggggaggagctggactccgaagatgctcctccttgctgccgtctagcactgggcgaacctcccccttatggagcagccccaatcgggatccccagacctccgccacccaggcctgggatgcatagtccccctcccagaccggcacctagtcccggaacgtgggaaagtcagcctgccaggagtgtgcgcctgggcggaccgggtggaggggctggtggcgctggcggaggcagggtactggaatgcccatccattaggatcaccagcatttcaccgacacctgaaccccctgccgcactcgaggataatccagacgcctggggggacgggtccccacgggactacccccctccagagggcttcggtggctaccgggaggccggaggacaggggggtggagcttttttcagcccctcacctgggagttcttcattgagctcgtggtcttttttttctgatgcaagtgatgaagcggcactgtatgccgcttgcgatgaggtcgaatccgagctcaacgaggccgcatctagatttggcctcgggtccccattacctagtcctagagctagcccaaggccatggactccagaagatccatggagtctgtacggaccctctcccggtggtcgtgggccagaggactcctggctcctactgtccgcaccaggacctactcccgctagcccaaggcctgcttctccctgtggaaagcgccgttatagtagttctggaacaccatcctcagcctcacccgctctttctcgcaggggtagcctgggtgaggagggtagcgagcccccaccccctccccctttaccactagcaagagatcctggatccccagggccttttgattacgtgggcgcaccgcctgcagagagtatccctcagaagacccgccgaacctcttcagaacaggctgtggcactccccaggtctgaagaacctgcttcctgcaacggaaagctcccgctcggcgcagaggagagtgtggctcctccgggaggcagtagaaaagaagtggcaggcatggactatctggcagtcccttcaccactggcttggagcaaggccagaatcggcggtcattcccctatttttcgcacctctgctttgccaccattagactggccgctgccttcgcagtacgagcagctcgaactgcgtatagaggtccagccccgtgctcaccatcgcgcacattacgagactgagggctcacgcggagccgtcaaggctgctcccggtggtcatcctgttgtaaagctcctcgggtactctgaaaaacccctaacactgcaaatgtttattgggacggcagacgaaaggaacctcaggccgcatgccttctatcaggtgcaccggatcaccggcaagatggtggctactgcatcctatgaggccgttgtgagcggaaccaaagtccttgagatgaccctgcttcccgagaacaacatggccgcaaatatcgactgtgccggtattctgaagctcaggaacagtgacattgagctgagaaagggagaaactgacattggcaggaaaaatactcgggtgcgactagtatttcgtgtacacgtgccacaaggaggaggcaaagtggtgtctgtgcaggccgcaagtgtgccaatcgaatgttctcagagatccgcacaagaactcccccaagtggaggcctattccccctccgcttgctcagttagggggggtgaagagctggtactgacaggttcaaatttcctgcccgattccaaagttgtgtttatcgagcggggacccgatggtaagctgcagtgggaagaagaagcaactgtgaacaggctacaaagcaatgaagtgacccttacactcactgtgccggagtacagcaataaacgggtgagtaggcccgtacaggtgtatttttacgtcagtaatgggagacgtaaaaggagtcccacccaatcattccgctttctgcccgtgatatgcaaggaggaaccccttcctgattcttctttaagaggatttccatccgctagcgctacaccgttcggcactgacatggacttctcaccccctcggccaccctatccatcttaccctcacgaggaccctgcttgtgaaaccccctacttgagtgaggggttcgggtacggtatgccccctctgtatcctcaaaccggtcctcctccgtcctatcggcctggactacggatgttccctgaaactagaggcacgaccgtgagcgagatcatcgggagagatctttcaggctttcctgcgcctccaggagaagaaccacctgcctag

SEQ ID NO: 76732 - DNA, 2424 bp, Artificial Sequence
  derived and/or modified sequence
atgttgtctgggagggacctgggggctccagcaggatcaatgggggctgccagttgcgaagatgaagaactggagttcaaactcgtattcggagaagaaaaagaggctccacccctcggagcgggtggcctaggggaagaattggactccgaagatgcacctccctgttgcagactggccctgggggaacctcccccttacggggctgcgccaattgggatcccccgacccccaccccctcgcccaggtatgcattcgccacctcctagaccagcccctagtccgggaacttgggagagccaacctgcacgtagcgtcaggctcggcggacccggaggcggagctggaggagctgggggaggccgagtgctcgagtgccccagtatccggataacttccatctcacctacgcccgaacccccagccgcactcgaggacaatcctgacgcctggggtgacgggtccccacgggactacccgccacccgagggctttggcggttacagggaggccggaggacaaggcggaggcgctttcttctccccatcaccgggttcttcttccttgtcatcttggtcattctttagtgacgcttcagatgaggcagccctttacgcggcatgcgatgaagtagaaagtgagctgaatgaggccgctagccggttcgggcttggtagcccattaccatcgcctcgggcaagcccacgtccctggactcccgaggacccctggtctttgtacggcccaagtccaggcggaagaggaccagaggactcctggctactcctgagcgcacccggacctacacccgcaagccctcgacccgcatcaccctgcggtaaaagacggtacagtagctcaggcaccccctcaagcgcctctcccgcactttctcggaggggttcactgggcgaagagggaagcgagccaccaccgcctccgcctctccctctggcccgagatcctgggagcccaggcccatttgactatgtcggcgctcctcccgctgagtcgatcccccagaaaactaggaggacaagcagcgaacaagcagtagcccttcctcgcagcgaggaacccgcatcctgtaatggcaagttacccctgggcgctgaggaaagtgttgctccccctgggggaagccgcaaggaagtcgcgggaatggactatctggccgtccccagccccctggcttggtcaaaagctcggattggcggacattctcccattttcaggaccagcgctctgccacctctcgattggcccctccctagtcaatacgagcagctggagctcaggatcgaggtgcagccacgggcacatcacagagctcattacgagactgaaggttccagaggggctgtcaaggccgctcccggtggacacccggtcgttaagttgttgggctattcggagaagcctctcacgcttcagatgtttatcggcaccgccgacgagaggaacctgcggcctcatgcattttaccaggtgcaccgcatcacgggaaaaatggtcgctacagcgagttacgaggccgtcgtttccggcaccaaggtgttggaaatgactctgctccccgagaataacatggctgctaatatcgattgcgccggtatcctcaagctgagaaacagtgacattgagcttcgaaagggtgaaacagacatcggaagaaagaatacgcgggtgagactcgtctttcgtgttcacgtgccacaagggggagggaaagtggttagtgtccaggccgcaagcgttccaatcgagtgttcgcagagatcagcgcaagagctgccacaagtcgaagcctatagcccctctgcttgttcagtccgcggtggagaggagctggtgctcacaggctccaatttcctacctgattctaaggttgtattcatcgagaggggccctgacggcaagttacaatgggaggaggaggccacggtaaatcggctgcagtccaatgaggtgacattaaccctgaccgtgcccgagtatagcaataagcgggtttctcggccagttcaagtttacttttacgtgtctaatggcagaaggaagagatcccctacgcagtcttttcgttttcttcctgtgatttgtaaagaagagccactgccggattcatctctccgaggatttcccagcgcaagcgcaacgccctttgggacggacatggacttttctcccccacgcccaccctaccccagttatcctcacgaagatcctgcgtgcgaaacaccatatctgtctgaaggattcggctacggaatgcctccgctgtaccctcagaccggaccaccaccaagttaccgtcccggactgagaatgtttcccgaaacaagagggacaactgtgagcgaaattatcggcagggatctgtccggctttcccgctcccccaggtgaagaacccccagcctag

SEQ ID NO: 76733 - DNA, 396 bp, Artificial Sequence
  derived and/or modified sequence
atggacagcacccacccccagcactgcgcctgcaacagccagatcagacccagatgggactgcgtggcccactgcttcctgtgggcccccggcctgcccagcagagacgaccccggcgccgacaagggcgaggccagcggcggcgtgggcaccgtgagcctgaccctgagccagcccagagagagaagcctgcaggtgaagaaggtgttcgtgaagggcatgaagaaggagagagccctgggcgagggcgccgcctggtggcagagccagagactggtgagccccggcaagcacgacagagtgagcacccacagaaagagccagagcgtgttcaccggcgtgagcgccggcgacaagcagttcaccaccaccttcagcatcgtgttcaccatctag

SEQ ID NO: 76734 - DNA, 396 bp, Artificial Sequence
  derived and/or modified sequence
atggacagcactcacccccagcactgcgcctgtaactcacagatccgtccacggtgggattgtgtcgctcactgcttcctatgggcacctggtttgccatctagggatgatcctggcgctgacaagggagaggcctccggcggcgtcggaacggtgagtctgacactgagccaacctagggagcgatcactgcaagtgaaaaaggtgttcgtgaagggcatgaaaaaagaacgtgctcttggagagggagctgcatggtggcagtctcagcggctcgtgagccccgggaagcatgaccgggtgtccacccaccggaaatcccagtccgtctttaccggtgtgagcgcaggtgacaagcagtttaccactaccttctctatagtgtttaccatttag

SEQ ID NO: 76735 - DNA, 396 bp, Artificial Sequence
  derived and/or modified sequence
atggacagcacccacccccagcactgtgcctgcaacagccagatccggccccgctgggactgtgtggcccactgcttcctgtgggcccctggcctgcccagcagagatgaccccggggctgacaagggggaggccagcggcggcgtgggcaccgtgtccctgaccctgagccagccccgggagaggagcctgcaggtgaagaaggtgtttgtgaagggcatgaagaaggagcgggccctgggggagggcgccgcctggtggcagagccagaggctggtgtccccaggcaagcatgacagagtgtccacccacaggaagagccagagcgtcttcaccggggtgtctgctggggacaagcagttcaccaccaccttcagcatcgtgttcaccatctag

SEQ ID NO: 76736 - DNA, 396 bp, Artificial Sequence
  derived and/or modified sequence
atggacagcacccacccccagcactgcgcctgcaacagccagatcagacctagatgggactgtgttgcccattgtttcttatgggcccctgggctgccctcccgcgatgatcctggtgccgacaaaggtgaggctagcggtggcgtagggacggtatcactcaccctgtcacagcctagggaaaggtcactccaggttaagaaggtcttcgtgaaaggcatgaagaaggaacgggcccttggggaaggtgcagcatggtggcagagtcaacggcttgtgtctccaggaaagcacgaccgggtttctacccaccggaagagtcaatcggtatttactggcgtgagcgccggagataagcagtttactaccacgtttagtattgttttcacaatctag

SEQ ID NO: 76737 - DNA, 2122 bp, Artificial Sequence
  derived and/or modified sequence
agctgcgtttgctttggttagctagaaagcaggcccatcatgcatctgtaagaaagtgactggagtgtaggccctggcgtctaagccgagtaagatgccctgtcaatctgggtcctctgggaagcaagactgatgaaatgaggagcaccaaagctttacaccccagctatgtgcatttggggctggggctgcctgggaagagctcgtcctcagcccaaagcctgcaacagctgggatcagggcttacctctcacagacggggctcagcaactttctgcgggatgaggacacaagcccacttgacctggaacgtctgaaacctcctggccccgtggaagatgggaagaaacactcctcttcctctcagttttacaaccgagtggtcctcgggctgcttgtgagcaccggacgaccgaccgagcaggctgcagccaatcagctggcacagggctccgactgaaaatcatcttggctggtgccacagaatcggcctgaaaacaggatactgcctagagcaaggcacccaggggagccaagcaggaaaatgtaatgaattgactttaagtagctgcagctgtgattagagtatttttagccacaggactcaaccagctttcaaaacctgctaataagagccccaccgtagccagcgcaaaaatttagttttcagtttaacaccaggaatctgcttagctaggagctggcttagaaggcacatcaggagagaacatcttctactgaaagttgaagatttttcattttctagctgaattatgacaaagggagatgaccattaagtgcctgccagcatactgggacgtacacctaacactctgaaaactcaattcatgccagcacatctgtcttctgctgcatctagctcagcatcatgtatgtattttgggcaaaactaatcatttcacaccctagactttaaagagacccagaatctaatgatagctaacatacccaccccctctaacaggctttggcgtatttcctgtgagaagcagttactggaggccgaatggattccactcatccacagcactgtgcatgcaacagccagattaggccccggtgggactgcgtggcccactgcttcctatgggctccagggctgcccagcagggatgacccgggagccgacaagggggaggccagtgggggcgttgggacggtttccttgaccctgtctcaacccagagaaagaagcctgcaggtgaaaaaggtcttcgtgaaaggaatgaaaaaggagagggctttaggggaaggggctgcctggtggcaaagccagcgccttgtgtccccaggcaaacatgacagagtctcgacgcacaggaagagccagtccgtctttactggagtgagtgcgggagacaaacagtttacaacaacctttagcattgtcttcaccatttgataaaaagttcactattatatttattgtataatgaagaaaaacaacacattcagggaaaaattgagattaacttatttttcttaaaaggttcatctcaaggatggcaacaaagtccagcttgtgccgccaaacggttttacatgatcaaaccgtgtacagcttcttgtgtgaactgttgactacaaacatttaccaaatacataaatctcttttaaaaaagccattttaaatatagcaaagcagtgtcttcttgcacagcaaagtgaagaaagtttctacagagaaatagaagttttacatttgtaaaatctttttcacattctaatcatctagcttaagatccaatgccaggagttttcagcttccttatttactatgtatttcttgtgcgcatgatggttaatacagaaattatgttgatgcattactagttatccttctagttaaaggaaagggtaaaacatgtattgttcttgtagaacaaacccctgatttagtctataacaaaatggacataattgggctcaaaagatggagttttgattgggaccacctgtgtacacacaacagtgacttccactcgcggtggagtggccattagagtactgaggaaggacagctgttggaaactgtactttaaccagtgcaatttaagctttttttgcttttgttctttagtaataaaatacttctggaggg

SEQ ID NO: 76738 - protein, 179 aa, Artificial Sequence
  derived and/or modified sequence
MGSSGLLSLLVLFVLLANVQGPGLTDWLFPRRCPKIREECEFQERDVCTKDRQCQDNKKCCVFSCGKKCLDLKQDVCEMPKETGPCLAYFLHWWYDKKDNTCSMFVYGGCQGNNNNFQSKANCLNTCKNKQPCPKIKVECEVEEIDQCTKPRDCPENMKCCPFSRGKKCLDFRKASLST

SEQ ID NO: 76739 - DNA, 540 bp, Artificial Sequence
  derived and/or modified sequence
atgggcagcagcggcctgctgagcctgctggtgctgttcgtgctgctcgccaatgtgcagggacccggcctgacggactggctatttccaagacgctgtccgaaaattcgggaagagtgcgaattccaggagcgcgacgtctgcaccaaagatagacagtgccaggacaataagaaatgttgcgtgttcagctgcgggaagaagtgcttagacctcaagcaagatgtttgtgaaatgccaaaagagacggggccctgcctggcatactttctgcattggtggtatgacaagaaagataatacctgtagcatgtttgtttacgggggctgccagggcaataataataactttcaaagtaaggcaaactgtctgaatacctgcaagaataaacaaccgtgtcctaaaatcaaggtcgaatgtgaggtagaggagatagaccaatgcacgaagcctcgggattgccccgagaatatgaagtgttgcccgttttcacgtggcaagaaatgtctggatttcagaaaagcctctttaagcacctag

SEQ ID NO: 76740 - DNA, 540 bp, Artificial Sequence
  derived and/or modified sequence
atgggctcatccggattgctgtcgctgttggtgctgtttgtgcttttagctaacgtccagggacctggcctcacagactggctgtttccccgtcggtgccctaaaattcgcgaggagtgcgaattccaggaacgtgatgtgtgtacgaaagaccgccagtgtcaggacaataagaaatgctgcgtgttcagctgcggcaagaagtgtttggacctcaagcaagacgtctgcgagatgccaaaagaaacaggcccttgcttggcttactttttgcactggtggtatgacaagaaggacaacacgtgttccatgttcgtttacggcggatgtcagggcaacaataacaacttccaatccaaagctaattgcctgaacacttgcaagaacaaacaaccttgccccaaaataaaggttgagtgcgaggtggaagaaatagaccaatgcactaaaccacgtgattgcccagagaatatgaagtgctgtcctttttcccgtggtaagaaatgtctggactttagaaaggcctctctctcgacatag

SEQ ID NO: 76741 - DNA, 540 bp, Artificial Sequence
  derived and/or modified sequence
atgggcagctccggcttgctctccttactggttttattcgtgttgctggcaaatgtccagggcccaggactaaccgactggttattcccccgaagatgtccaaaaatccgggaagagtgcgagttccaggaaagggacgtgtgtacgaaggatcggcagtgccaggataacaaaaagtgttgcgtgttcagctgcggtaaaaagtgtttggatttgaaacaggatgtctgcgaaatgcccaaggagacaggaccatgtttggcctatttccttcattggtggtacgataagaaggataacacatgtagcatgttcgtctacggcggttgtcaggggaacaacaacaattttcagtccaaggccaattgtctgaacacatgcaagaataaacagccctgtccaaagattaaagtagagtgtgaagtggaggagatcgatcagtgcaccaagcccagagactgccccgaaaacatgaaatgttgtcctttctcacgcggtaagaaatgcctcgacttccggaaagcatctttgagcacctag

SEQ ID NO: 76742 - DNA, 540 bp, Artificial Sequence
  derived and/or modified sequence
atggggagttccggcctcctaagtctcctagtgttatttgtcttgctggctaatgtgcagggacccggcctgactgactggctgttcccgagaagatgtcccaaaataagagaagagtgcgagttccaagaacgagacgtgtgcaccaaggatagacaatgtcaggataacaaaaagtgttgtgtctttagttgcggcaaaaagtgccttgacttaaaacaagacgtgtgtgaaatgccaaaggaaactgggccctgtctggcgtattttcttcactggtggtacgataagaaagacaacacctgcagtatgtttgtttatggtgggtgtcagggtaataacaacaatttccagtccaaggcgaattgtctgaacacgtgtaagaacaagcagccctgtcctaagattaaagttgaatgcgaggtggaagagattgaccaatgcaccaagccacgcgattgtcccgaaaatatgaagtgttgtcccttctcccgcggcaagaagtgtttagatttccgcaaggcttccctttccacatag

SEQ ID NO: 76743 - DNA, 540 bp, Artificial Sequence
  derived and/or modified sequence
atggggtcgtccgggctgttgtccttactggtactctttgttctgttggctaatgtccagggccccgggctgaccgactggcttttcccccgccgttgtcctaagattcgtgaagagtgtgaatttcaagaacgcgacgtgtgtactaaggatcgtcagtgccaagacaataagaagtgttgcgttttctcctgtggaaagaaatgtttggacctgaagcaagacgtttgcgagatgcccaaggaaacaggaccctgtctagcctatttcctacactggtggtacgacaagaaagataacacctgttccatgtttgtgtatgggggctgtcaaggcaacaacaacaactttcagtcaaaagccaactgccttaatacatgcaagaacaaacaaccctgtcctaaaattaaggtagagtgtgaggttgaagagatcgaccagtgcacaaaacctagggattgtcccgaaaacatgaaatgttgcccattcagcaggggcaaaaaatgtcttgatttcaggaaagcatctctgagtacttag

SEQ ID NO: 76744 - DNA, 540 bp, Artificial Sequence
  derived and/or modified sequence
atggggtctagtggactgctttccttattggttctgttcgtgctcttggccaacgtgcagggtcccgggctgaccgattggttattccccaggaggtgcccgaaaataagagaggagtgcgaatttcaggaacgagacgtgtgtactaaagatcgccagtgtcaagacaataaaaaatgctgcgtattcagttgtgggaagaaatgtctggatctcaagcaagatgtatgtgaaatgcccaaagaaaccggcccatgtctcgcttacttccttcattggtggtatgacaagaaagataacacgtgttcaatgtttgtctacggggggtgtcaaggaaacaataataactttcaaagcaaggccaactgtcttaatacttgtaagaataaacagccctgcccaaagatcaaagtggagtgtgaggtcgaggagatagatcagtgcaccaagccaagagattgtccggaaaatatgaaatgttgcccattcagcaggggcaagaaatgtttagacttcagaaaagcaagcctcagtacttag

SEQ ID NO: 76745 - DNA, 540 bp, Artificial Sequence
  derived and/or modified sequence
atggggtcgtccgggctgttgtccttactggtactctttgttctgttggctaatgtccagggccccgggctgaccgactggcttttcccccgccgttgtcctaagattcgtgaagagtgtgaatttcaagaacgcgacgtgtgtactaaggatcgtcagtgccaagacaataagaagtgttgcgttttctcctgtggaaagaaatgtttggacctgaagcaagacgtttgcgagatgcccaaggaaacaggaccctgtctagcctatttcctacactggtggtacgacaagaaagataacacctgctccatgtttgtgtatggcgggtgtcaaggaaacaacaataactttcagtcaaaagccaattgcctaaacacatgtaaaaataaacaaccatgccccaagatcaaggtggagtgtgaagtggaggaaatcgatcaatgcaccaaacctagagactgccccgagaatatgaaatgttgccctttcagcagagggaagaaatgtctggattttcgaaaagcgtcactgtctacctag

SEQ ID NO: 76746 - DNA, 1156 bp, Artificial Sequence
  derived and/or modified sequence
tatatccaaggtgcagcagctgagcattccaaattcgggaaccaccagaaaggctggcctctcttcaacatgggatcttctggacttttgagcctcctggtgctattcgtcctcttagcgaatgtccagggacctggtctgactgattggttatttcccaggagatgtcccaaaatcagagaagaatgtgaattccaagaaagggatgtgtgtacaaaggacagacaatgccaggacaacaagaagtgttgtgtcttcagctgcggaaaaaaatgtttagatctcaaacaagatgtatgcgaaatgccaaaagaaactggcccctgcctggcttattttcttcattggtggtatgacaagaaagataatacttgctccatgtttgtctatggtggctgccagggaaacaataacaacttccaatccaaagccaactgcctgaacacctgcaagaataaacagccgtgtcccaaaatcaaagtggaatgcgaagtggaagaaatagaccagtgtaccaaacccagagattgcccagaaaacatgaagtgttgcccgttcagccgtggaaagaaatgtttagacttcagaaaggcctctctgtctacataaatccaggatgccttccctgaccaccttagaccgcctacactctttcttctctgcccatattattgagctctaaagaagatcatcaaggaccattcgttcattctattcattcaacaaatattgattggtgcccctgacacccatgatgggttccacttgctcattgtggccaggaaggtcagaaaagtttttctgggaaagagatccatgatttaagatctgaaagatgagtacttagaccaaaaatgggaagaaatagcctttcaggccagataataggatgtgcaaaggctctgtggcaggaggcaggatgttcaggtctagaaaggctagaaagcagagagtgagcaagagacaagaaacaggaaactggtagtgtatattcagggcaacttgaatctgtattcccaagtggccatcctcaagttttggggtcaaataaatgccctacttaatgatattttctgaatcttgttactttaggttgacatacctttcaagacaataactaggttttcagtgctttgataaaacctcaaatgtgtgg

SEQ ID NO: 76747 - DNA, 1131 bp, Artificial Sequence
  derived and/or modified sequence
attccaaattcgggaaccaccagaaaggctggcctctcttcaacatgggatcttctggacttttgagcctcctggtgctattcgtcctcttagcgaatgtccagggacctggtctgactgattggttatttcccaggagatgtcccaaaatcagagaagaatgtgaattccaagaaagggatgtgtgtacaaaggacagacaatgccaggacaacaagaagtgttgtgtcttcagctgcggaaaaaaatgtttagatctcaaacaagatgtatgcgaaatgccaaaagaaactggcccctgcctggcttattttcttcattggtggtatgacaagaaagataatacttgctccatgtttgtctatggtggctgccagggaaacaataacaacttccaatccaaagccaactgcctgaacacctgcaagaataaacagccgtgtcccaaaatcaaagtggaatgcgaagtggaagaaatagaccagtgtaccaaacccagagattgcccagaaaacatgaagtgttgcccgttcagccgtggaaagaaatgtttagacttcagaaaggcctctctgtctacataaatccaggatgccttccctgaccaccttagaccgcctacactctttcttctctgcccatattattgagctctaaagaagatcatcaaggaccattcgttcattctattcattcaacaaatattgattggtgcccctgacacccatgatgggttccacttgctcattgtggccaggaaggtcagaaaagtttttctgggaaagagatccatgatttaagatctgaaagatgagtacttagaccaaaaatgggaagaaatagcctttcaggccagataataggatgtgcaaaggctctgtggcaggaggcaggatgttcaggtctagaaaggctagaaagcagagagtgagcaagagacaagaaacaggaaactggtagtgtatattcagggcaacttgaatctgtattcccaagtggccatcctcaagttttggggtcaaataaatgccctacttaatgatattttctgaatcttgttactttaggttgacatacctttcaagacaataactaggttttcagtgctttgataaaacctcaaatgtgtgg

SEQ ID NO: 76748 - DNA, 540 bp, Artificial Sequence
  derived and/or modified sequence
atgggcagcagcggcctgctgagcctgctggtgctgttcgtgctgctggccaacgtgcagggccccggcctgaccgactggctgttccccagaagatgccccaagatcagagaggagtgcgagttccaggagagagacgtgtgcaccaaggacagacagtgccaggacaacaagaagtgctgcgtgttcagctgcggcaagaagtgcctggacctgaagcaggacgtgtgcgagatgcccaaggagaccggcccctgcctggcctacttcctgcactggtggtacgacaagaaggacaacacctgcagcatgttcgtgtacggcggctgccagggcaacaacaacaacttccagagcaaggccaactgcctgaacacctgcaagaacaagcagccctgccccaagatcaaggtggagtgcgaggtggaggagatcgaccagtgcaccaagcccagagactgccccgagaacatgaagtgctgccccttcagcagaggcaagaagtgcctggacttcagaaaggccagcctgagcacctag

SEQ ID NO: 76749 - DNA, 540 bp, Artificial Sequence
  derived and/or modified sequence
atgggaagtagcggactgctgtctttgctggtactgtttgtgcttttagccaatgtgcaggggccagggctcacggattggctgttcccgcgaaggtgccccaaaattcgggaagagtgtgagttccaagagagggatgtgtgcaccaaggatagacagtgtcaggataataagaaatgctgcgtgttcagttgtggaaaaaaatgcctggatctcaagcaagatgtctgcgagatgcccaaagagacaggcccatgcctcgcttatttcctccactggtggtatgacaagaaagacaacacttgtagtatgttcgtctatgggggatgtcaggggaacaacaataacttccagagcaaagctaactgtctcaatacatgcaagaacaaacagccttgtccaaagatcaaagtcgagtgtgaggtggaggaaatcgaccaatgtactaagcccagagattgcccagagaatatgaaatgctgcccttttagccggggaaaaaaatgtttggattttagaaaagcttcattgtcaacttag

SEQ ID NO: 76750 - DNA, 540 bp, Artificial Sequence
  derived and/or modified sequence
atgggatcatctggactgctcagtttgctcgttctgtttgttctgttggccaatgttcagggaccaggcttgactgattggcttttcccccggaggtgcccaaagataagggaggagtgtgaattccaggagagagacgtctgcaccaaggatagacagtgccaggataataagaaatgctgcgtattctcatgcggaaaaaagtgtctggacctaaaacaggatgtctgcgagatgccaaaagaaactggtccctgtttggcctacttcctacattggtggtatgataaaaaagataatacctgttccatgttcgtatatggaggatgccaaggtaacaataataattttcagtccaaagccaactgcctcaacacttgtaaaaacaagcaaccttgccccaaaattaaagtggagtgtgaggtggaagagattgatcaatgcacaaagcccagggactgcccagagaatatgaagtgttgccccttttcacgcggaaaaaagtgtctcgatttccgcaaagcatcattatctacctag

SEQ ID NO: 76751 - DNA, 540 bp, Artificial Sequence
  derived and/or modified sequence
atgggcagcagcggcctgctgagcctgctggtgctgtttgtgctgctggccaacgtgcagggccctggcctgacagactggctgttcccccggcgctgccccaagatccgggaggagtgtgagttccaggagagagatgtgtgcaccaaggaccggcagtgccaggacaacaagaagtgctgcgtgttcagctgtgggaagaagtgcctggacctgaagcaggatgtgtgtgagatgcccaaggagaccggcccctgcctggcctacttcctgcactggtggtatgacaagaaggacaacacctgcagcatgtttgtgtatggaggctgccagggcaacaacaacaacttccagagcaaggccaactgcctgaacacctgcaagaacaagcagccctgccccaagatcaaggtggagtgtgaggtggaggagattgaccagtgcaccaagccccgggactgcccagagaacatgaagtgctgccccttcagccggggcaagaagtgcctggacttcaggaaggccagcctgagcacctag

SEQ ID NO: 76752 - DNA, 540 bp, Artificial Sequence
  derived and/or modified sequence
atgggcagcagcggcctgctgagcctgctggtgctgttcgtgctgttggctaatgtgcagggacctgggctgaccgattggctatttcctcgcaggtgccctaaaatccgcgaggagtgcgagttccaggagagagatgtgtgcacaaaagataggcagtgccaggacaacaagaagtgctgcgtgtttagttgcggaaaaaagtgcctcgaccttaagcaagacgtgtgcgagatgccaaaggagactggtccttgtttggcgtatttcctgcattggtggtatgataaaaaggataacacgtgctctatgttcgtctatggcggctgccaggggaataacaacaacttccagtcgaaggctaattgccttaacacctgtaagaataaacagccttgtccaaaaataaaagtggaatgcgaagtcgaggagatcgaccagtgtactaagcccagagactgcccagaaaatatgaagtgctgcccattcagcagggggaagaaatgcctagatttcaggaaagccagcctgagcacatag

SEQ ID NO: 76753 - RNA, 540 nt, Artificial Sequence
  derived and/or modified sequence
auggggaguuccggccuccuaagucuccuaguguuauuugucuugcuggcuaaugugcagggacccggccugacugacuggcuguucccgagaagaugucccaaaauaagagaagagugcgaguuccaagaacgagacgugugcaccaaggauagacaaugucaggauaacaaaaaguguugugucuuuaguugcggcaaaaagugccuugacuuaaaacaagacgugugugaaaugccaaaggaaacugggcccugucuggcguauuuucuucacuggugguacgauaagaaagacaacaccugcaguauguuuguuuauggugggugucaggguaauaacaacaauuuccaguccaaggcgaauugucugaacacguguaagaacaagcagcccuguccuaagauuaaaguugaaugcgagguggaagagauugaccaaugcaccaagccacgcgauugucccgaaaauaugaaguguugucccuucucccgcggcaagaaguguuuagauuuccgcaaggcuucccuuuccacauag

SEQ ID NO: 76754 - RNA, 540 nt, Artificial Sequence
  derived and/or modified sequence
auggggucguccgggcuguuguccuuacugguacucuuuguucuguuggcuaauguccagggccccgggcugaccgacuggcuuuucccccgccguuguccuaagauucgugaagagugugaauuucaagaacgcgacguguguacuaaggaucgucagugccaagacaauaagaaguguugcguuuucuccuguggaaagaaauguuuggaccugaagcaagacguuugcgagaugcccaaggaaacaggacccugucuagccuauuuccuacacuggugguacgacaagaaagauaacaccuguuccauguuuguguaugggggcugucaaggcaacaacaacaacuuucagucaaaagccaacugccuuaauacaugcaagaacaaacaacccuguccuaaaauuaagguagagugugagguugaagagaucgaccagugcacaaaaccuagggauugucccgaaaacaugaaauguugcccauucagcaggggcaaaaaaugucuugauuucaggaaagcaucucugaguacuuag

SEQ ID NO: 76755 - RNA, 540 nt, Artificial Sequence
  derived and/or modified sequence
auggggucuaguggacugcuuuccuuauugguucuguucgugcucuuggccaacgugcagggucccgggcugaccgauugguuauuccccaggaggugcccgaaaauaagagaggagugcgaauuucaggaacgagacguguguacuaaagaucgccagugucaagacaauaaaaaaugcugcguauucaguugugggaagaaaugucuggaucucaagcaagauguaugugaaaugcccaaagaaaccggcccaugucucgcuuacuuccuucauuggugguaugacaagaaagauaacacguguucaauguuugucuacggggggugucaaggaaacaauaauaacuuucaaagcaaggccaacugucuuaauacuuguaagaauaaacagcccugcccaaagaucaaaguggagugugaggucgaggagauagaucagugcaccaagccaagagauuguccggaaaauaugaaauguugcccauucagcaggggcaagaaauguuuagacuucagaaaagcaagccucaguacuuag

SEQ ID NO: 76756 - RNA, 540 nt, Artificial Sequence
  derived and/or modified sequence
auggggucguccgggcuguuguccuuacugguacucuuuguucuguuggcuaauguccagggccccgggcugaccgacuggcuuuucccccgccguuguccuaagauucgugaagagugugaauuucaagaacgcgacguguguacuaaggaucgucagugccaagacaauaagaaguguugcguuuucuccuguggaaagaaauguuuggaccugaagcaagacguuugcgagaugcccaaggaaacaggacccugucuagccuauuuccuacacuggugguacgacaagaaagauaacaccugcuccauguuuguguauggcgggugucaaggaaacaacaauaacuuucagucaaaagccaauugccuaaacacauguaaaaauaaacaaccaugccccaagaucaagguggagugugaaguggaggaaaucgaucaaugcaccaaaccuagagacugccccgagaauaugaaauguugcccuuucagcagagggaagaaaugucuggauuuucgaaaagcgucacugucuaccuag

SEQ ID NO: 76757 - protein, 255 aa, Artificial Sequence
  derived and/or modified sequence
MTVNNEIGVKQPIAEIGRICSSRKVYFHTDAAQAVGKIPLDVNDMKIDLMSISGHKIYGPKGVGAIYIRRRPRVRVEALQSGGGQERGMRSGTVPTPLVVGLGAACEVAQQEMEYDHKRISKLSERLIQNIMKSLPDVVMNGDPKHHYPGCINLSFAYVEGESLLMALKDVALSSGSACTSASLEPSYVLRAIGTDEDLAHSSIRFGIGRFTTEEEVDYTVEKCIQHVKRLREMSPLWEMVQDGIDLKSIKWTQH

SEQ ID NO: 76758 - protein, 406 aa, Artificial Sequence
  derived and/or modified sequence
MLLRAAWRRAAVAVTAAPGPKPAAPTRGLRLRVGDRAPQSAVPADTAAAPEVGPVLRPLYMDVQATTPLDPRVLDAMLPYLINYYGNPHSRTHAYGWESEAAMERARQQVASLIGADPREIIFTSGATESNNIAIKELEAAIQPDTSLVSVMTVNNEIGVKQPIAEIGRICSSRKVYFHTDAAQAVGKIPLDVNDMKIDLMSISGHKIYGPKGVGAIYIRRRPRVRVEALQSGGGQERGMRSGTVPTPLVVGLGAACEVAQQEMEYDHKRISKLSERLIQNIMKSLPDVVMNGDPKHHYPGCINLSFAYVEGESLLMALKDVALSSGSACTSASLEPSYVLRAIGTDEDLAHSSIRFGIGRFTTEEEVDYTVEKCIQHVKRLREMSPLWEMVQDGIDLKSIKWTQH

SEQ ID NO: 76759 - DNA, 570 bp, Artificial Sequence
  derived and/or modified sequence
atgctcctacgtgccgcgtggaggagggctgccgtagccgtgactgctgctcccggacctaagcctgcagcaccaactcgcggtctccgactacgcgtcggcgacagagcccctcagtctgccgtgccggccgacaccgccgcagcgcccgaagtggggcccgtgctgcggcctttgtatatggatgtgcaggccacaacccctctggatccgagggtgctcgatgccatgttgccctaccttatcaattactatggaaatccccattcccgcactcacgcttacggctgggagtcagaggctgccatggagcgagctcgccagcaggttgcatctctcatcggagcagacccgcgagaaattattttcacctcaggggctaccgagtcaaacaatattgccataaaaacggaaagtcattctgtaatacaggccggggtgcagtggcatgatctggattccctgcaagccccaccccccgggtttaccccctttagttgcctcagcctactatccagctgggactaccgcaggccccccccccacccagctaactttctttacttctag

SEQ ID NO: 76760 - DNA, 768 bp, Artificial Sequence
  derived and/or modified sequence
atgacggtcaacaacgaaatcggggtcaaacaacctatcgccgaaataggaaggatctgctcatcccggaaggtgtacttccatacggacgcagcccaagccgtgggaaaaattcctctcgatgtgaatgacatgaagattgatctaatgtctatcagcggccacaagatatacgggcctaagggagtgggggccatttatatcaggcgacgaccccgagtcagggtggaggcgctgcaatctggcggagggcaggaacggggcatgaggtcaggaacggttcctacaccgctcgtggtgggcctcggagccgcctgcgaggtggcgcagcaggaaatggagtacgaccacaaaagaatatccaagttgagcgagagactcatacaaaacataatgaaatccctgcccgatgttgtcatgaacggcgaccccaagcaccattatccgggctgcattaatctgtccttcgcttacgtagagggcgaatccctactcatggctctcaaggatgttgcactcagtagcggtagcgcatgcacatccgcctcactggagcccagttacgtcctgagggcgatcggaacggatgaagacctcgctcattccagtatccgattcgggattggcagattcaccaccgaggaagaggtcgactatactgttgagaagtgtattcaacacgtcaagcgtctccgcgaaatgtccccattgtgggaaatggtccaggacggtatcgacctcaagtcaatcaagtggacacagcattag

SEQ ID NO: 76761 - DNA, 1221 bp, Artificial Sequence
  derived and/or modified sequence
atgctgttaagggccgcctggagaagggccgcagtggctgtcacagcggcccccgggccaaaacctgcggcccccacaagagggttgcgcctgagagtgggcgacagggccccacagtcagcggtgcctgccgacacagcagccgcccccgaagtgggccccgtcctccggccactgtatatggatgtgcaggccacaaccccgcttgacccgcgggtactagacgctatgctgccgtacctgatcaactattacggaaaccctcattcccggactcacgcatacgggtgggagagcgaggctgccatggaacgagccagacagcaggtggcgtctcttattggcgccgatccgcgcgagattatcttcacatctggggccacggagtcaaacaacatcgcaatcaaggaactggaagctgccattcagcctgacacttctctggtctcggtaatgactgtcaataatgagatcggtgtgaaacagcccatagctgaaatcggtcgaatctgctcctctcggaaggtatactttcacactgatgcggcccaggcagtgggaaagattcccctcgacgttaatgatatgaaaatcgatttaatgtccatttctgggcataagatctatggacccaagggtgtcggcgcaatctacattcgacgccgccctagggtgcgcgtagaggccctgcagagcggaggggggcaggagagagggatgcgctctggcaccgtccccaccccactggttgttggactcggcgcagcatgcgaagtagcccagcaggaaatggagtatgaccacaaacgtatcagtaaactgagtgagagactgattcagaatatcatgaaaagcttgccagatgttgtaatgaatggggatcctaagcatcactatcctggctgcatcaacctctcattcgcctatgtagagggagaatccctgctcatggctttaaaagatgtagcactctcctccggcagcgcctgcaccagcgctagcctcgaaccaagttacgtcctaagggccatcggcaccgatgaggatctggcccatagctcaatcagattcggcatcggccgcttcaccacggaggaagaggtcgattataccgttgagaagtgcattcaacacgtcaagcggttaagagaaatgtcgcccctgtgggagatggtgcaagacggaatcgatctcaagagcatcaaatggacacagcattag

SEQ ID NO: 76762 - DNA, 570 bp, Artificial Sequence
  derived and/or modified sequence
atgctgctgcgggccgcctggaggagagctgctgtggccgtgacagctgcccctggccccaagccagctgcccccacccggggcctgcggctgcgggtgggggaccgggccccccagagcgctgtgcctgctgacacagctgctgcccctgaggtgggccctgtgctgcggcccctgtacatggatgtgcaggccaccacccccctggacccccgggtgctggatgccatgctgccctacctgatcaactactacggcaacccccacagcaggacccacgcctacggctgggagagcgaggccgccatggagcgggcccggcagcaggtggccagcctcatcggggctgacccccgggagatcatcttcaccagcggggccacagagagcaacaacatcgccatcaagacagagagccacagcgtcatccaggccggcgtgcagtggcatgacctggacagcctgcaggcccctcctcctggcttcacccccttcagctgcctgagcctgctgagctcctgggactacagaagacctccaccccacccagccaacttcctgtacttctag

SEQ ID NO: 76763 - DNA, 768 bp, Artificial Sequence
  derived and/or modified sequence
atgacagtgaacaatgaaattggagtgaagcagcccatcgccgagatcggccgcatctgcagcagcaggaaggtgtacttccacacagatgctgcccaggccgtgggcaagatccccctggatgtgaatgacatgaagattgacctgatgagcatcagcggccacaagatctacggccccaagggcgtgggcgccatctacatcagaagaagaccccgggtgcgggtggaggccctgcagagcggcggcggccaggagcggggcatgaggtctggaacagtgcccacccccctggtggtgggcctgggcgccgcctgtgaggtggcccagcaggagatggagtatgaccacaagaggatcagcaagctgtctgagcggctcatccagaacatcatgaagagcctgcctgatgtggtgatgaatggagaccccaagcaccactacccaggctgcatcaacctgagctttgcctacgtggagggggagagcctgctgatggccctgaaggatgtggccctgagcagcggcagcgcctgcaccagcgccagcctggagcccagctatgtgctgcgggccatcggcacagatgaggacctggcccacagcagcatccgcttcggcatcggccgcttcaccacagaggaggaggtggactacacagtggagaagtgcatccagcacgtgaagaggctgcgggagatgagccccctgtgggagatggtgcaggacggcatcgacctgaagagcatcaagtggacccagcactag

SEQ ID NO: 76764 - DNA, 1221 bp, Artificial Sequence
  derived and/or modified sequence
atgctgctgcgggccgcctggaggagagctgctgtggccgtgacagctgcccctggccccaagccagctgcccccacccggggcctgcggctgcgggtgggggaccgggccccccagagcgctgtgcctgctgacacagctgctgcccctgaggtgggccctgtgctgcggcccctgtacatggatgtgcaggccaccacccccctggacccccgggtgctggatgccatgctgccctacctgatcaactactacggcaacccccacagcaggacccacgcctacggctgggagagcgaggccgccatggagcgggcccggcagcaggtggccagcctcatcggggctgacccccgggagatcatcttcaccagcggggccacagagagcaacaacatcgccatcaaggagctggaggccgccatccagcctgacaccagcctggtgtctgtgatgacagtgaacaatgaaattggagtgaagcagcccatcgccgagatcggccgcatctgcagcagcaggaaggtgtacttccacacagatgctgcccaggccgtgggcaagatccccctggatgtgaatgacatgaagattgacctgatgagcatcagcggccacaagatctacggccccaagggcgtgggcgccatctacatcagaagaagaccccgggtgcgggtggaggccctgcagagcggcggcggccaggagcggggcatgaggagcggcaccgtgcccacccccctggtggtgggcctgggcgccgcctgtgaggtggcccagcaggagatggagtatgaccacaagaggatcagcaagctgtctgagcggctcatccagaacatcatgaagagcctgcctgatgtggtgatgaatggagaccccaagcaccactacccaggctgcatcaacctgagctttgcctacgtggagggggagagcctgctgatggccctgaaggatgtggccctgagcagcggcagcgcctgcaccagcgccagcctggagcccagctatgtgctgcgggccatcggcacagatgaggacctggcccacagcagcatccgctttggaattggccgcttcaccacagaggaggaggtggactacacagtggagaagtgcatccagcacgtgaagaggctgcgggagatgagccccctgtgggagatggtgcaggacggcatcgacctgaagagcatcaagtggacccagcactag

SEQ ID NO: 76765 - DNA, 570 bp, Artificial Sequence
  derived and/or modified sequence
atgctgctgcgggccgcctggcggcgggccgccgtggccgtgaccgcggctccagggcccaaacctgccgcccccacacgaggtcttagactgcgggtgggcgatagagccccccaatcggccgtaccagctgacaccgcggccgcccccgaagttggacctgtgctcaggcctctttacatggacgtacaggcaacaacacctctggatccacgcgtgctggatgcgatgcttccctacctgattaactattatggcaatccccattctcggacccacgcctacgggtgggaatctgaggcagcaatggagcgcgccaggcagcaggtggccagcttgattggagccgatccacgggaaatcatctttacaagtggtgccacagaatcaaataacatcgccattaaaacagaaagccactcagtgattcaggccggcgttcagtggcacgatcttgattctctgcaggcccctccccccggtttcacacccttctcctgtttatcactactgagcagctgggattacagacggcccccacctcaccccgctaactttctgtatttctag

SEQ ID NO: 76766 - DNA, 768 bp, Artificial Sequence
  derived and/or modified sequence
atgaccgtgaacaacgagatcggcgtgaagcagcccatcgccgagatcggcagaatctgctcctctaggaaggtgtacttccatactgatgctgcccaagctgtgggcaagattcctctcgatgtgaacgatatgaagattgatctcatgagtataagcggccataaaatctatggacccaaaggtgttggcgccatttatataagaaggcgccctagagtcagggtggaggccttgcaaagcgggggcggccaggaaagaggtatgcgatcaggtacggtaccaacccctctggtagtgggattgggtgctgcgtgtgaggtagctcagcaggagatggagtatgaccacaagcgcatctctaagctgtcagagaggttgatccagaacattatgaagagtttgcccgacgtggttatgaatggcgaccccaaacatcactaccccggctgcattaatctgtccttcgcctacgtcgaaggagagagtctccttatggccctaaaagatgtggcattgtctagtggcagtgcctgcacttcagccagcctggagccctcatatgtgctgcgcgccattggtaccgatgaggacctagcccacagctctattcggttcggaatagggagatttacaacagaggaggaagtagattatactgtagagaaatgtatacaacacgtcaaaagactgcgtgagatgtccccactgtgggagatggtgcaggatggcattgatctgaaaagcataaagtggactcagcattag

SEQ ID NO: 76767 - DNA, 1221 bp, Artificial Sequence
  derived and/or modified sequence
atgctgctgcgggccgcctggcggcgggccgccgtggccgtgaccgccgctcccggtccgaagcccgcagcccctactcgaggactccggctcagggtcggagaccgcgcccctcagagcgcagtcccagccgacaccgctgccgcccctgaggtaggcccagtgctgaggccactgtacatggatgtgcaagccacgacacccttagacccccgagtactggacgcaatgctgccttacttaatcaattactacggtaacccacactcccggacccacgcgtacggctgggagtctgaagcagcaatggagcgggctcggcaacaggtggcttctctcatcggagcagatccgcgggagataatattcaccagcggtgcaaccgaatctaacaacatagcaatcaaagagctggaggcagcgatccaacctgacaccagtctcgtctcagtcatgacagtgaataacgagatcggggtgaaacagcccatcgccgagatcggacgaatttgcagcagccgtaaagtttatttccacacagacgcggcacaggccgttggcaagatccccttagacgtgaacgatatgaagatcgacttaatgtccatctccgggcacaagatatacggccccaagggcgtgggcgctatctacatccggcgccggcctagagtccgcgtcgaggctctccagtcaggaggtggccaggaacgggggatgagatcaggaaccgtccccacccccttggtggtcgggcttggagcggcttgtgaagtggcccaacaagagatggagtacgaccacaagaggatctccaaactgagcgaacgcttaatccaaaatattatgaaatctctccctgacgtggtgatgaacggggaccccaagcaccactatccaggatgtataaacttgtcctttgcttatgtggagggtgagtccctcctcatggccttgaaggacgtggctctgagttccgggtctgcatgcacctccgcaagcctcgaaccatcttacgttctgcgcgccatcgggactgatgaggatctggctcactcatcaattcgctttggcataggcagattcaccacggaggaggaggtcgattatacagtagaaaagtgtatccaacatgtgaaacgcctcagggagatgagccccctatgggagatggtccaggacggcattgacttgaagtccatcaagtggacacagcattag

SEQ ID NO: 76768 - DNA, 738 bp, Artificial Sequence
  derived and/or modified sequence
ctctgccagcgggaccatgctgctccgagccgcttggaggcgggcggcagtggcggtgacagcggctccagggccgaagcccgcggcgcccactcgggggctgcgcctgcgcgttggagaccgtgctcctcagtctgcggttcccgcagatacagccgctgccccggaggtggggccagtgctgcgacctctctatatggatgtgcaagctacaactcctctggacccccgggtgcttgatgccatgctcccttacctaatcaactactatgggaacccacactcccggacacatgcttatggctgggagagtgaggcagccatggaacgtgctcgtcagcaagtagcatctctgattggagctgatcctcgtgagatcatttttactagtggtgctactgaatccaacaacatagcaattaagactgagtctcactctgtcatccaggctggagtgcagtggcacgatcttgactcactgcaagctccgcctcctgggttcacgccattctcctgcctcagcctcctgagtagctgggactacaggcgccctccaccacacccggctaattttttgtatttttagtagagacagggtttcactgtgttagccagaatggtctcgatctcctgacctcgtgatccgccctcctcggcctcccaaagtgccccacaaccatttttacttactgatgtaaatactttttaggataaaatagagtataaatcaattataaa

SEQ ID NO: 76769 - DNA, 1436 bp, Artificial Sequence
  derived and/or modified sequence
acttccgggagcctggggcccaggactgcagcggcttcggaaggtgggctctgccagcgggaccatgctgctccgagccgcttggaggcgggcggcagtggcggtgacagcggctccagggccgaagcccgcggcgcccactcgggggctgcgcctgcgcgttggagaccgtgctcctcagtctgcggttcccgcagatacagccgctgccccggaggtggggccagtgctgcgacctctctatatggatgtgcaagctacaactcctctggacccccgggtgcttgatgccatgctcccttacctaatcaactactatgggaacccacactcccggacacatgcttatggctgggagagtgaggcagccatggaacgtgctcgtcagcaagtagcatctctgattggagctgatcctcgtgagatcatttttactagtggtgctactgaatccaacaacatagcaattaaggaactagaggctgctatccagccagatactagcctggtgtcagtcatgactgtgaacaatgagattggagtgaagcagcctattgcagaaatagggcggatttgcagttccagaaaggtatatttccatactgatgcagcccaggctgttggaaaaatcccacttgatgtcaatgacatgaaaattgatctcatgagcattagtggtcacaaaatctacggtcccaaaggggttggtgccatctacatccgtcgccggccccgtgtgcgtgtggaggccctgcagagtggaggggggcaggagcggggtatgcggtctgggacagtgcccacacccttagtggtggggctgggggctgcgtgtgaggtggcacagcaagagatggagtatgaccacaagcgaatctcaaagttgtcagagcggctgatacagaatataatgaagagccttccagatgtggtgatgaatggggaccctaagcaccattatcccggctgtatcaacctctcctttgcatatgtggaaggggaaagtctgctgatggcactgaaggacgttgccttatcctcagggagtgcctgcacctctgcatccctggagccctcttatgtgcttagagcaattggcactgatgaggatttagcgcactcttctatcaggtttggaattggccgcttcactacagaggaggaagtggactacacagtggagaaatgcattcagcatgtgaagcgtcttcgagaaatgagccctctctgggagatggttcaggatggcattgacctcaagagcatcaagtggacccaacactagaagaatagggccctgactttgtgctggtctggcccctcctgcctcaccaacccgtgcacaaccagacaccttgttacacctagtggatgctctagattggtatagaccagttgacttcagcatcagtccacctctatgacagaaacacaag

SEQ ID NO: 76770 - DNA, 570 bp, Artificial Sequence
  derived and/or modified sequence
atgttattaagagccgcatggcggcgtgctgctgtggcagtgactgcggctcctggcccaaagccagccgctccgacccggggtctgcgcttgagggttggcgatcgagccccacaatcagctgtgccagcagataccgccgcagcccctgaggtcggcccagtcctgaggccactctatatggacgtgcaggctacaactcccctggatcccagagtgcttgatgccatgctcccctacttgatcaactactacggaaacccccatagccggacgcatgcatatggatgggaatcagaggctgccatggagcgagcccgtcagcaagtcgcatccctgattggtgctgaccctcgtgaaataatttttaccagcggcgcaactgagagtaataacattgccattaagactgagtcccacagcgttatacaagccggtgtgcagtggcacgatcttgatagcctacaggcccctccacctgggtttacaccatttagctgtctgagtttactgagtagctgggattaccggaggccgccacctcatcctgccaactttctttacttttag

SEQ ID NO: 76771 - DNA, 768 bp, Artificial Sequence
  derived and/or modified sequence
atgacagtgaataacgagatcggggtcaaacagccaattgctgaaatcgggagaatttgctcctcccggaaggtttatttccacacggacgccgcacaggccgtcgggaaaattcctctggatgtaaacgacatgaagatagaccttatgtctatcagcggtcacaaaatctacggcccaaagggcgtcggcgctatctacattagaaggcgaccccgagtgcgcgtggaggccctgcagtctggagggggacaggagaggggaatgaggtccggaaccgtgccaactcctctcgtcgtgggactaggagctgcttgtgaggtagcacaacaggagatggagtatgatcacaagagaatttcgaagctgtcagagaggctgatccagaacataatgaaaagtctgcccgatgtagtgatgaatggggaccctaaacatcactaccccggttgtattaatcttagcttcgcatatgttgagggtgagtcactcctcatggccctcaaagatgtggcacttagcagtggatccgcatgcacctccgcctcactggagccatcatacgtgctgagggctatcgggaccgacgaggatcttgcacactcatctattcggttcgggattgggcgattcacaacagaggaagaggtggactatacggtggagaagtgcattcagcacgtaaagcgtttgagagagatgagtccactctgggagatggtccaggacggaatcgatctaaagagcattaaatggacgcagcactag

SEQ ID NO: 76772 - DNA, 1221 bp, Artificial Sequence
  derived and/or modified sequence
atgctacttcgcgctgcctggaggagggccgcagtggctgtgaccgcagcacccggtcccaaacccgctgcaccgactagaggacttcggctgagagtgggcgaccgggctccacagagtgccgtgcccgcagacactgcagctgctcctgaggtagggccagtgctgagaccactgtatatggacgtacaggccactacccccttagacccccgagtcctcgatgccatgcttccatacttgatcaattattatggaaacccacatagtcggactcacgcctacggctgggaaagcgaagcggctatggaaagagcccgacagcaagtcgcatccctcattggcgctgaccccagggagattatttttacaagcggggcaactgagagtaacaatattgcgatcaaagaacttgaagccgcaattcagccggatacttcattggtctctgtgatgacagtgaataacgaaatcggggtgaagcagcccattgctgagataggacgcatatgtagctcgcgtaaggtgtattttcatacagatgcggctcaggccgtgggcaagattccacttgacgtgaacgacatgaagattgatttaatgtctatttctggacataaaatctatgggccaaagggcgtgggcgcaatttatatcagacggagaccgagagtcagagttgaagcattgcaaagcggagggggtcaggaaaggggaatgcgaagtgggaccgttccaacccccctggttgttgggctgggcgctgcctgtgaggtcgcccagcaggagatggagtacgaccacaagaggatttcgaagctctcagaaagacttatacagaacattatgaaaagcctccccgatgtagtgatgaacggggatcctaaacaccattaccccggatgcatcaaccttagctttgcctacgtcgagggcgagtctttactgatggctctgaaagacgtggccctttcgagtggtagcgcctgtacatcggcttccctggagccttcctatgttctgagagccattggaaccgatgaagacctggcccattcttccattagattcggaattggtcgcttcacgacagaagaggaagtcgattatactgtggaaaaatgcattcaacacgtgaagaggcttcgcgagatgtcccctttatgggagatggtgcaggatggcatcgatttgaagtcgatcaagtggacgcagcattag

SEQ ID NO: 76773 - DNA, 570 bp, Artificial Sequence
  derived and/or modified sequence
atgctgctgagagccgcctggagaagagccgccgtggccgtgaccgccgcccccggccccaagcccgccgcccccaccagaggcctgagactgagagtgggcgacagagccccccagagcgccgtgcccgccgacaccgccgccgcccccgaggtgggccccgtgctgagacccctgtacatggacgtgcaggccaccacccccctggaccccagagtgctggacgccatgctgccctacctgatcaactactacggcaacccccacagcagaacccacgcctacggctgggagagcgaggccgccatggagagagccagacagcaggtggccagcctgatcggcgccgaccccagagagatcatcttcaccagcggcgccaccgagagcaacaacatcgccatcaagaccgagagccacagcgtgatccaggccggcgtgcagtggcacgacctggacagcctgcaggcccccccccccggcttcacccccttcagctgcctgagcctgctgagcagctgggactacagaagaccccccccccaccccgccaacttcctgtacttctag

SEQ ID NO: 76774 - DNA, 768 bp, Artificial Sequence
  derived and/or modified sequence
atgaccgtgaacaacgagatcggcgtgaagcagcccatcgccgagatcggcagaatctgcagcagcagaaaggtgtacttccacaccgacgccgcccaggccgtgggcaagatccccctggacgtgaacgacatgaagatcgacctgatgagcatcagcggccacaagatctacggccccaagggcgtgggcgccatctacatcagaagaagacccagagtgagagtggaggccctgcagagcggcggcggccaggagagaggcatgagaagcggcaccgtgcccacccccctggtggtgggcctgggcgccgcctgcgaggtggcccagcaggagatggagtacgaccacaagagaatcagcaagctgagcgagagactgatccagaacatcatgaagagcctgcccgacgtggtgatgaacggcgaccccaagcaccactaccccggctgcatcaacctgagcttcgcctacgtggagggcgagagcctgctgatggccctgaaggacgtggccctgagcagcggcagcgcctgcaccagcgccagcctggagcccagctacgtgctgagagccatcggcaccgacgaggacctggcccacagcagcatcagattcggcatcggcagattcaccaccgaggaggaggtggactacaccgtggagaagtgcatccagcacgtgaagagactgagagagatgagccccctgtgggagatggtgcaggacggcatcgacctgaagagcatcaagtggacccagcactag

SEQ ID NO: 76775 - DNA, 1221 bp, Artificial Sequence
  derived and/or modified sequence
atgctgctgagagccgcctggagaagagccgccgtggccgtgaccgccgcccccggccccaagcccgccgcccccaccagaggcctgagactgagagtgggcgacagagccccccagagcgccgtgcccgccgacaccgccgccgcccccgaggtgggccccgtgctgagacccctgtacatggacgtgcaggccaccacccccctggaccccagagtgctggacgccatgctgccctacctgatcaactactacggcaacccccacagcagaacccacgcctacggctgggagagcgaggccgccatggagagagccagacagcaggtggccagcctgatcggcgccgaccccagagagatcatcttcaccagcggcgccaccgagagcaacaacatcgccatcaaggagctggaggccgccatccagcccgacaccagcctggtgagcgtgatgaccgtgaacaacgagatcggcgtgaagcagcccatcgccgagatcggcagaatctgcagcagcagaaaggtgtacttccacaccgacgccgcccaggccgtgggcaagatccccctggacgtgaacgacatgaagatcgacctgatgagcatcagcggccacaagatctacggccccaagggcgtgggcgccatctacatcagaagaagacccagagtgagagtggaggccctgcagagcggcggcggccaggagagaggcatgagaagcggcaccgtgcccacccccctggtggtgggcctgggcgccgcctgcgaggtggcccagcaggagatggagtacgaccacaagagaatcagcaagctgagcgagagactgatccagaacatcatgaagagcctgcccgacgtggtgatgaacggcgaccccaagcaccactaccccggctgcatcaacctgagcttcgcctacgtggagggcgagagcctgctgatggccctgaaggacgtggccctgagcagcggcagcgcctgcaccagcgccagcctggagcccagctacgtgctgagagccatcggcaccgacgaggacctggcccacagcagcatcagattcggcatcggcagattcaccaccgaggaggaggtggactacaccgtggagaagtgcatccagcacgtgaagagactgagagagatgagccccctgtgggagatggtgcaggacggcatcgacctgaagagcatcaagtggacccagcactag

SEQ ID NO: 76776 - protein, 1011 aa, Artificial Sequence
  derived and/or modified sequence
MRVFLLCAYILLLMVSQLRAVSFPEDDEPLNTVDYHYSRQYPVFRGRPSGNESQHRLDFQLMLKIRDTLYIAGRDQVYTVNLNEMPKTEVIPNKKLTWRSRQQDRENCAMKGKHKDECHNFIKVFVPRNDEMVFVCGTNAFNPMCRYYRLSTLEYDGEEISGLARCPFDARQTNVALFADGKLYSATVADFLASDAVIYRSMGDGSALRTIKYDSKWIKEPHFLHAIEYGNYVYFFFREIAVEHNNLGKAVYSRVARICKNDMGGSQRVLEKHWTSFLKARLNCSVPGDSFFYFDVLQSITDIIQINGIPTVVGVFTTQLNSIPGSAVCAFSMDDIEKVFKGRFKEQKTPDSVWTAVPEDKVPKPRPGCCAKHGLAEAYKTSIDFPDETLSFIKSHPLMDSAVPPIADEPWFTKTRVRYRLTAISVDHSAGPYQNYTVIFVGSEAGMVLKVLAKTSPFSLNDSVLLEEIEAYNHAKCSAENEEDKKVISLQLDKDHHALYVAFSSCIIRIPLSRCERYGSCKKSCIASRDPYCGWLSQGSCGRVTPGMLLLTEDFFAFHNHSAEGYEQDTEFGNTAHLGDCHGVRWEVQSGESNQMVHMNVLITCVFAAFVLGAFIAGVAVYCYRDMFVRKNRKIHKDAESAQSCTDSSGSFAKLNGLFDSPVKEYQQNIDSPKLYSNLLTSRKELPPNGDTKSMVMDHRGQPPELAALPTPESTPVLHQKTLQAMKSHSEKAHGHGASRKETPQFFPSSPPPHSPLSHGHIPSAIVLPNATHDYNTSFSNSNAHKAEKKLQNIDHPLTKSSSKRDHRRSVDSRNTLNDLLKHLNDPNSNPKAIMGDIQMAHQNLMLDPMGSMSEVPPKVPNREASLYSPPSTLPRNSPTKRVDVPTTPGVPMTSLERQRGYHKNSSQRHSISAMPKNLNSPNGVLLSRQPSMNRGGYMPTPTGAKVDYIQGTPVSVHLQPSLSRQSSYTSNGTLPRTGLKRTPSLKPDVPPKPSFVPQTPSVRPLNKYTY

SEQ ID NO: 76777 - protein, 22 aa, Artificial Sequence
  derived and/or modified sequence
MRVFLLCAYILLLMVSQLRAVS

SEQ ID NO: 76778 - DNA, 3036 bp, Artificial Sequence
  derived and/or modified sequence
atgagagtgttcctgctgtgcgcctacatcctgctgctgatggtgagccagctgagagccgtgagcttccccgaggacgacgagcccctgaacaccgtggactaccactacagcagacagtaccccgtgttcagaggcagacccagcggcaacgagagccagcacagactggacttccagctgatgctgaagatcagagacaccctgtacatcgccggcagagaccaggtgtacaccgtgaacctgaacgagatgcccaagaccgaggtgatccccaacaagaagctgacctggagaagcagacagcaggacagagagaactgcgccatgaagggcaagcacaaggacgagtgccacaacttcatcaaggtgttcgtgcccagaaacgacgagatggtgttcgtgtgcggcaccaacgccttcaaccccatgtgcagatactacagactgagcaccctggagtacgacggcgaggagatcagcggcctggccagatgccccttcgacgccagacagaccaacgtggccctgttcgccgacggcaagctgtacagcgccaccgtggccgacttcctggccagcgacgccgtgatctacagaagcatgggcgacggcagcgccctgagaaccatcaagtacgacagcaagtggatcaaggagccccacttcctgcacgccatcgagtacggcaactacgtgtacttcttcttcagagagatcgccgtggagcacaacaacctgggcaaggccgtgtacagcagagtggccagaatctgcaagaacgacatgggcggcagccagagagtgctggagaagcactggaccagcttcctgaaggccagactgaactgcagcgtgcccggcgacagcttcttctacttcgacgtgctgcagagcatcaccgacatcatccagatcaacggcatccccaccgtggtgggcgtgttcaccacccagctgaacagcatccccggcagcgccgtgtgcgccttcagcatggacgacatcgagaaggtgttcaagggcagattcaaggagcagaagacccccgacagcgtgtggaccgccgtgcccgaggacaaggtgcccaagcccagacccggctgctgcgccaagcacggcctggccgaggcctacaagaccagcatcgacttccccgacgagaccctgagcttcatcaagagccaccccctgatggacagcgccgtgccccccatcgccgacgagccctggttcaccaagaccagagtgagatacagactgaccgccatcagcgtggaccacagcgccggcccctaccagaactacaccgtgatcttcgtgggcagcgaggccggcatggtgctgaaggtgctggccaagaccagccccttcagcctgaacgacagcgtgctgctggaggagatcgaggcctacaaccacgccaagtgcagcgccgagaacgaggaggacaagaaggtgatcagcctgcagctggacaaggaccaccacgccctgtacgtggccttcagcagctgcatcatcagaatccccctgagcagatgcgagagatacggcagctgcaagaagagctgcatcgccagcagagacccctactgcggctggctgagccagggcagctgcggcagagtgacccccggcatgctgctgctgaccgaggacttcttcgccttccacaaccacagcgccgagggctacgagcaggacaccgagttcggcaacaccgcccacctgggcgactgccacggcgtgagatgggaggtgcagagcggcgagagcaaccagatggtgcacatgaacgtgctgatcacctgcgtgttcgccgccttcgtgctgggcgccttcatcgccggcgtggccgtgtactgctacagagacatgttcgtgagaaagaacagaaagatccacaaggacgccgagagcgcccagagctgcaccgacagcagcggcagcttcgccaagctgaacggcctgttcgacagccccgtgaaggagtaccagcagaacatcgacagccccaagctgtacagcaacctgctgaccagcagaaaggagctgccccccaacggcgacaccaagagcatggtgatggaccacagaggccagccccccgagctggccgccctgcccacccccgagagcacccccgtgctgcaccagaagaccctgcaggccatgaagagccacagcgagaaggcccacggccacggcgccagcagaaaggagaccccccagttcttccccagcagcccccccccccacagccccctgagccacggccacatccccagcgccatcgtgctgcccaacgccacccacgactacaacaccagcttcagcaacagcaacgcccacaaggccgagaagaagctgcagaacatcgaccaccccctgaccaagagcagcagcaagagagaccacagaagaagcgtggacagcagaaacaccctgaacgacctgctgaagcacctgaacgaccccaacagcaaccccaaggccatcatgggcgacatccagatggcccaccagaacctgatgctggaccccatgggcagcatgagcgaggtgccccccaaggtgcccaacagagaggccagcctgtacagcccccccagcaccctgcccagaaacagccccaccaagagagtggacgtgcccaccacccccggcgtgcccatgaccagcctggagagacagagaggctaccacaagaacagcagccagagacacagcatcagcgccatgcccaagaacctgaacagccccaacggcgtgctgctgagcagacagcccagcatgaacagaggcggctacatgcccacccccaccggcgccaaggtggactacatccagggcacccccgtgagcgtgcacctgcagcccagcctgagcagacagagcagctacaccagcaacggcaccctgcccagaaccggcctgaagagaacccccagcctgaagcccgacgtgccccccaagcccagcttcgtgccccagacccccagcgtgagacccctgaacaagtacacctactag

SEQ ID NO: 76779 - DNA, 1431 bp, Artificial Sequence
  derived and/or modified sequence
atgagagtgttcctgctgtgcgcctacatcctgctgctgatggtgagccagctgagagccgtgagcttccccgaggacgacgagcccctgaacaccgtggactaccactacagcagacagtaccccgtgttcagaggcagacccagcggcaacgagagccagcacagactggacttccagctgatgctgaagatcagagacaccctgtacatcgccggcagagaccaggtgtacaccgtgaacctgaacgagatgcccaagaccgaggtgatccccaacaagaagctgacctggagaagcagacagcaggacagagagaactgcgccatgaagggcaagcacaaggacgagtgccacaacttcatcaaggtgttcgtgcccagaaacgacgagatggtgttcgtgtgcggcaccaacgccttcaaccccatgtgcagatactacagactgagcaccctggagtacgacggcgaggagatcagcggcctggccagatgccccttcgacgccagacagaccaacgtggccctgttcgccgacggcaagctgtacagcgccaccgtggccgacttcctggccagcgacgccgtgatctacagaagcatgggcgacggcagcgccctgagaaccatcaagtacgacagcaagtggatcaaggagccccacttcctgcacgccatcgagtacggcaactacgtgtacttcttcttcagagagatcgccgtggagcacaacaacctgggcaaggccgtgtacagcagagtggccagaatctgcaagaacgacatgggcggcagccagagagtgctggagaagcactggaccagcttcctgaaggccagactgaactgcagcgtgcccggcgacagcttcttctacttcgacgtgctgcagagcatcaccgacatcatccagatcaacggcatccccaccgtggtgggcgtgttcaccacccagctgaacagcatccccggcagcgccgtgtgcgccttcagcatggacgacatcgagaaggtgttcaagggcagattcaaggagcagaagacccccgacagcgtgtggaccgccgtgcccgaggacaaggtgcccaagcccagacccggctgctgcgccaagcacggcctggccgaggcctacaagaccagcatcgacttccccgacgagaccctgagcttcatcaagagccaccccctgatggacagcgccgtgccccccatcgccgacgagccctggttcaccaagaccagagtgagatacagactgaccgccatcagcgtggaccacagcgccggcccctaccagaactacaccgtgatcttcgtgggcagcgaggccggcatggtgctgaaggtgctggccaagaccagccccttcagcctgaacgacagcgtgctgctggaggagatcgaggcctacaaccacgccaagtag

SEQ ID NO: 76780 - DNA, 3036 bp, Artificial Sequence
  derived and/or modified sequence
atgagggtgttcctcctgtgtgcctatattctgctgttgatggtgtctcagctcagggcagtgagttttcctgaagacgacgagcccttaaatacagttgactatcattacagcagacagtatcccgtgtttcggggtcgtccatcgggaaatgagagtcagcaccgccttgatttccagctaatgctgaagatcagagatactctctacatagcaggccgggatcaggtgtatactgtcaacctaaatgagatgcctaaaaccgaagtgattccaaataagaaactgacctggcgaagtaggcagcaagacagggaaaattgcgccatgaaagggaagcataaggatgagtgccacaattttattaaggtgtttgtcccacgcaatgatgagatggtgtttgtgtgtgggactaacgcctttaacccaatgtgccgctattatcggctgagcaccctagaatacgacggcgaggagattagcgggcttgctcgctgtccattcgacgcacggcagacaaacgttgcattgtttgctgatggaaaactctatagcgccaccgtggctgactttcttgcttccgacgctgtgatttatcgcagcatgggcgatggctcagcgctgcgcactattaagtatgatagtaagtggattaaagagcctcattttctccacgccatcgagtacggcaattatgtttacttcttttttcgcgaaatcgctgttgagcataataatctgggaaaggccgtctatagtagggtggcgaggatttgtaaaaacgacatgggcggttcccagcgagtgttggagaagcattggacttctttccttaaagccaggcttaactgcagcgttcctggtgactcctttttctattttgacgtcctgcaaagtatcacagacatcatccaaattaatggtatcccaaccgttgtgggagttttcactacccagctgaatagtatccccgggtccgccgtttgcgctttctccatggacgacattgaaaaggtgtttaagggccgttttaaagaacaaaaaacgcctgattccgtctggacagccgtcccagaggacaaggtaccaaaacccagacctggctgctgcgcaaaacacggtcttgccgaggcctacaagacctccattgattttccggatgaaaccctcagctttattaaatcccatccactaatggactccgctgtgccccccattgctgatgagccttggttcactaaaactagggtgagatacaggttgactgctatcagcgtggaccattccgctgggccctaccagaactacactgtgatcttcgtcggatcggaagccggaatggtactcaaggtcctggccaagacttccccatttagccttaacgatagcgtgctactggaagaaattgaagcttataatcacgccaagtgttctgccgagaatgaggaagataagaaggtgattagtttgcagctagacaaggaccatcatgcactgtatgtggcttttagcagctgcattatccgcataccactttctagatgcgaaagatatggcagttgtaagaaaagttgcattgcgtcaagggatccctactgtggctggttatcacaggggtcctgtggacgcgtcactcccggaatgttgcttctcacggaggacttcttcgctttccacaaccatagcgccgagggttatgagcaggatacagaattcgggaacacagcccatctcggcgactgccatggtgtgcggtgggaggtgcaatctggcgagtctaaccagatggtgcacatgaacgtcctaattacctgtgtgtttgcagcgtttgtcctgggcgcgttcatagccggagtggctgtgtattgttatcgagacatgttcgtgagaaagaacagaaagatccataaggatgccgaatccgctcaatcttgcactgactccagtggctctttcgcaaaacttaacggactgttcgactcccctgtgaaagagtatcagcagaacattgactctccaaagctttattctaacctcctcacgtcgcgtaaagaactgccacctaacggagacacaaagtcaatggtgatggatcatcggggccagcctccagagctagctgccctgcccactcctgaatccacacccgtactgcatcagaagacactccaggcgatgaaatcacattcagaaaaggctcatggacatggtgcctcccggaaggagacaccacagttcttcccatcatcaccacctccgcacagccccctcagtcacgggcatattccatccgctatcgtattgccaaatgcaactcatgattataacacaagtttcagcaacagcaatgcacacaaggcggaaaagaagctccagaatattgatcatcctctcacgaagtcctcatccaagagagaccataggcgaagcgttgactcccggaatactctgaatgaccttttaaagcatctcaatgatcccaactctaatcctaaggcaatcatgggtgacatccaaatggctcaccagaacctaatgcttgacccaatgggctcaatgagcgaagtacccccaaaggtgcccaaccgggaggcctccttatacagccccccttcaacccttcctaggaacagcccaaccaagagggtggacgtgcccacaaccccaggcgtcccaatgacttcattagagagacagcgcgggtatcataagaactcatcacaacgccacagcatctcagccatgcctaagaacttgaactccccaaacggagttctgttaagtcgtcagccttctatgaaccgtgggggttacatgcctacacccacgggggctaaagtggattatattcagggcactcctgtaagtgtgcaccttcagcccagtttgtccaggcagagttcttatacgtcaaatggtactctgccacgcacaggactcaaacggacaccatcattgaaacctgatgttcctcccaaaccgtcgtttgtcccacagacgccttccgtgcggcctttgaataagtacacatattag

SEQ ID NO: 76781 - DNA, 1431 bp, Artificial Sequence
  derived and/or modified sequence
atgagggtgttcctcttatgcgcgtatattctgttgttgatggtgagtcaacttagggccgtaagcttcccagaagacgacgagcctttgaataccgtcgattaccattatagcagacaatacccggtttttcgcggaaggccgtccgggaatgagtcccaacaccgattagatttccagcttatgttgaaaattagagatacactctacattgcgggtcgtgaccaagtgtataccgtcaatttaaatgaaatgcccaagactgaagttattccaaataagaaactgacttggagatcacgccagcaggaccgggagaactgtgcaatgaagggaaagcacaaagatgagtgccacaactttataaaggtgttcgtcccccggaacgacgaaatggtattcgtatgcggtacaaacgcattcaaccccatgtgtcggtactataggctctctacattggaatatgatggagaagagattagtggcttggcacgctgtccctttgatgccagacagacgaacgttgcgttatttgccgatggcaagctgtactccgccacggtcgctgactttctcgcttctgacgccgtgatttatcgctcaatgggcgacgggtccgcgctccggacaattaagtacgactccaagtggatcaaagagcctcacttcctgcatgccatcgagtatggaaattatgtctacttctttttccgggaaatcgcagtcgaacacaataaccttgggaaggctgtctacagtagagttgctagaatttgcaagaacgacatgggcggcagccagagggtccttgaaaagcattggacaagctttcttaaggcccgtctgaactgctccgtacccggcgactcgttcttctatttcgacgtgttacagtctattacagacatcattcaaattaatggcattccaacagtagtcggtgtgtttacaacacagctgaacagtatccctggctctgccgtgtgtgccttcagcatggatgatatagagaaggtgttcaagggacgctttaaggagcagaaaactcccgatagcgtgtggaccgctgtcccagaagataaagttccaaagcctcggccggggtgttgtgcaaagcacggcctggccgaggcatataagaccagcatcgattttcctgacgaaacattatcttttatcaagtcgcatcctctcatggatagcgcagttccccctattgcagacgagccgtggttcacgaagactcgtgtaagatatagactcacagccatttcagttgaccacagcgccggaccataccagaattacaccgtgatatttgttggctcggaagctggaatggtgctcaaggtgctggcgaagacatcgcccttttccctgaacgacagcgtcctgttggaagagattgaggcctacaaccacgcaaaatag

SEQ ID NO: 76782 - DNA, 3036 bp, Artificial Sequence
  derived and/or modified sequence
atgcgggtattcctactgtgcgcttacatcctgctcctgatggtctcacagctgcgggcggtcagttttcctgaagatgacgagccactcaacaccgtcgactatcactacagtcgccaatatcccgtgttccggggcagaccttctggtaacgagtcacagcacagactggatttccaactgatgctcaagattcgtgacaccctctatatcgccggtagggaccaggtgtacacagtgaacctaaatgagatgccaaaaaccgaagtgatcccgaataaaaagctgacatggaggtcccggcagcaggatagagaaaactgcgcaatgaaaggcaaacataaggacgagtgtcacaattttattaaggtgttcgtgcctcgcaacgacgaaatggtctttgtgtgtggcacaaacgctttcaaccctatgtgcaggtactatcgcctcagcacactagagtatgacggagaggagatctccggcctggcgaggtgtccgtttgacgcccggcagacaaatgtggcactgttcgccgatggcaagctttacagcgctactgtggctgattttctggcatcagacgctgtgatctacaggtcaatgggggatggttctgcactgcggacaattaagtatgatagcaagtggattaaggagccccacttcctgcacgcaatcgagtatggtaactacgtgtactttttcttccgcgaaattgccgtggagcataacaatctgggcaaagccgtgtactcaagagtggctcggatatgcaagaatgatatggggggatcccagcgggtgcttgagaaacattggacatctttcctcaaagcgaggctcaactgctcagtacctggtgacagcttcttttacttcgacgtgcttcagtccattaccgatattatccagatcaatggaataccaaccgtggtaggtgtctttacaacacagctcaacagcattcccgggagcgcagtatgtgcttttagcatggatgatatagagaaggtgtttaaaggacgatttaaggagcagaagacccctgactctgtctggactgcagtccctgaggataaggtgcccaaaccccgccctggctgttgtgcaaagcatggcctggccgaggcttataaaacaagcattgactttcctgacgaaactctgtccttcataaagagccacccactcatggattccgctgtgccacccatagccgacgagccctggttcaccaaaactcgcgtgaggtatcggctcaccgccatcagcgttgaccattcggctggcccttatcagaattataccgtcatcttcgtgggttccgaggccggcatggtcctgaaggtcttagcaaagacgagtccattctccctgaatgactccgtgcttctcgaagaaattgaggcttacaatcacgcaaaatgctccgcggagaacgaggaagacaagaaagtaatatcacttcaactcgataaggatcatcatgccctttacgtggcctttagcagttgtataatccgaattccattgtctcggtgcgagcggtatggttcttgcaagaagtcgtgtatagcctctcgagatccttactgcggatggctctctcagggctcttgtggccgcgttactcccgggatgctcctgttgacagaagatttctttgcattccacaatcattctgcagaaggctacgagcaggataccgaattcggtaatacggcccacctaggagattgtcacggagtgagatgggaggtccagagtggcgaatctaaccagatggtccatatgaatgtgcttattacatgtgtgttcgcagctttcgttctgggagcctttatagctggagttgctgtgtactgctaccgagatatgttcgtgcggaagaaccggaagattcataaagatgccgaatcggcacaatcctgcacagattcatccgggtctttcgccaagcttaatgggttgtttgacagccccgttaaagaataccagcaaaacatcgactctcctaagctctattcaaatctcctgacgagtcgcaaggaactccctcccaatggggataccaaaagcatggtgatggatcaccggggacagcctcccgagcttgccgcactccccaccccggaatcaacaccagtgctccatcagaaaaccctccaggccatgaaatcgcactcagagaaagcacacggtcacggcgctagccggaaagagactccacagttcttcccaagcagccctcctccacatagtcccctctctcacgggcacattccctccgccattgttcttccaaacgcaacccatgattataatacctccttcagcaacagcaacgcccataaagcagagaaaaaattacaaaacatagaccaccccctcacgaagagcagctcaaaaagagatcacagacggagcgtggactcaagaaatacccttaatgacctccttaaacacctcaatgacccgaacagtaaccctaaggcaattatgggggacatccagatggcccaccagaatctgatgctggatcccatgggaagcatgagtgaggttcctccaaaggtgccgaacagggaagcgtctctatactcccctccgagtacactgcctaggaactccccaactaaaagggttgacgtacctactacaccaggcgttccaatgacgtcactggagcgacagcgggggtatcacaaaaattcgagccagcgccactccataagcgccatgcccaagaatctcaacagccccaatggagttctgctgtccagacaaccctcaatgaaccgcgggggctacatgccgaccccaactggcgctaaagtggactatatccaggggacaccggtttctgttcatttacagccatcactgtcacgccagagttcttacacctccaacggtaccctgccacgaactggcctgaagcgaactccttccctaaagccagacgtgccgcctaagccatcctttgtgcctcagactccatcggtgagacccctgaataaatatacctactag

SEQ ID NO: 76783 - DNA, 3036 bp, Artificial Sequence
  derived and/or modified sequence
atgcgcgttttcctcttgtgcgcatatatcttgctactgatggtctcccagctccgagccgtgtccttccctgaggacgacgagcctttaaacacggtggactaccattactcccggcaatacccggtctttaggggccgtccatccgggaacgagtcccagcatcgcttggacttccagcttatgctgaagataagggatactctttacatcgccgggagagatcaggtgtacacagtgaacctcaatgaaatgccaaagacggaagtgatccccaataagaaattaacgtggaggtcccggcagcaggaccgcgagaattgcgctatgaagggaaaacataaagacgagtgtcataatttcataaaagtgtttgtgccacggaatgacgagatggtgttcgtgtgtggtactaatgccttcaatcccatgtgtagatattacaggttgtccaccttggagtacgatggagaagagatttctggactcgctcgatgtccatttgacgcgcgccagaccaacgttgccctgttcgcagatggcaagctgtatagcgccactgtagcagacttcctcgcctctgatgccgtcatctatcgcagtatgggggacgggagcgcactcaggactattaaatatgatagtaagtggattaaagagccacacttcttgcacgcaatcgagtacggaaattacgtatattttttttttcgagaaatcgccgtggaacacaacaatctcgggaaggcggtgtatagtcgtgtcgctagaatttgcaagaatgatatgggaggcagtcagcgggttctggagaagcactggacgagcttcctgaaggccagattaaattgctcagtgcccggggactcattcttttattttgacgtcctgcagtcaatcacagatattatacagatcaacggtatccccactgtggtaggagtgtttaccacccaactcaacagcatccccggatccgccgtttgcgctttctcaatggatgatattgaaaaagtatttaaaggcaggttcaaagaacagaaaacgcccgacagcgtgtggaccgccgtccccgaggacaaggtgcctaagccccgtccgggatgctgcgcaaagcatggtctagccgaagcttacaagacttcaatagactttccagacgagacactgtcatttataaaatcccacccgttgatggatagcgcagtgcctcctatagccgacgagccctggtttactaagacacgcgtgcggtatcggctcactgcaatctcagtagaccacagtgccgggccatatcagaactacaccgtcatattcgtgggaagcgaagccgggatggtgctcaaagttctggcaaagacctcaccattctcacttaatgattcagtgctgctcgaagaaatcgaggcatataatcatgcaaagtgttccgctgagaacgaagaagataagaaggtgatttccctgcagctggacaaggaccaccatgctctgtatgtggctttttcttcttgcatcatcaggattcctctttcccgttgcgagaggtacggaagctgtaagaagagctgtatcgcgtccagggatccctattgtggctggctgtctcagggatcctgtggccgtgtaacccctgggatgctgctgttgaccgaagactttttcgcgtttcacaaccattctgccgaggggtatgagcaggacactgaatttggaaatacagcccacttgggggattgccacggcgtgcgctgggaggtgcagtcgggtgaatctaaccagatggtgcatatgaatgtgctcatcacttgtgtcttcgccgcattcgtacttggcgcattcatcgctggcgtcgccgtctactgttatcgcgacatgtttgtccgcaaaaaccgaaagatacacaaggacgctgaatcagcccagtcatgtaccgactctagcggcagttttgccaaactgaatggattgtttgactctccagtgaaagagtaccagcaaaatatcgatagcccaaagttatactctaatctgttgactagtcggaaagagttaccccccaacggggatacaaagtcgatggtcatggaccatcgcggacagcccccagagttggctgcccttcctactcctgagagcactcccgtgttgcatcagaaaaccctccaggcgatgaaaagccacagcgagaaagcgcacggccatggtgcctcgcgcaaagagaccccgcagttcttcccctcatcccctcccccccactcccctcttagccatggtcacattccctccgccattgtgctgcctaacgccacccatgattataatacatctttctccaatagcaacgcccataaggctgagaagaagctccagaacatagaccatcctctgactaaatcaagctccaaacgtgaccaccgtcggagtgtggactcacgtaataccctcaatgatctgctcaaacacctcaatgaccccaatagcaatcccaaagcgatcatgggggacatccaaatggctcaccaaaatctgatgctggatcccatggggtctatgtccgaagtccctcccaaagtgcccaacagagaagccagcttatacagtcctccctcaacacttccccgcaattccccaacaaagagggtggatgtccctacaactccaggcgtgccaatgacatcgcttgagagacagcggggatatcacaaaaatagtagtcaaaggcattccattagtgcgatgccaaagaacttgaactctccaaatggagtcttattatcacggcaaccttccatgaatcggggaggctacatgcccacaccaactggggccaaggtggactatatccaaggcaccccagtgagcgtgcacttgcagccttctctgtcacgtcagagttcttacacttctaacggaactctgcctagaacgggactgaaaagaactccgtctctgaaacctgatgtcccccctaaaccctctttcgtgccccagacaccctcggtgcggcctctgaacaagtatacatactag

SEQ ID NO: 76784 - DNA, 3036 bp, Artificial Sequence
  derived and/or modified sequence
atgagggtcttcctgctgtgtgcctacatcctgctgctgatggtgtcccagctgcgggctgtgtccttcccagaagatgatgagcccctgaacacagtggactaccactacagccggcagtaccctgtgttccggggccggcccagcggaaatgaaagccagcaccggctggacttccagctgatgctgaagatccgggacaccctgtacatcgccggccgggaccaggtgtacacagtgaacctgaatgagatgcccaagacagaggtgatccccaacaagaagctgacctggaggagccggcagcaggaccgggagaactgtgccatgaagggcaagcacaaggatgagtgccacaacttcatcaaggtgtttgtgcccagaaatgatgagatggtgtttgtgtgtggcaccaatgccttcaaccccatgtgccgctactaccgcctgagcaccctggagtatgatggagaggagatcagcggcctggcccgctgcccctttgatgcccggcagaccaacgtggccctgtttgctgatggcaagctgtacagcgccaccgtggccgacttcctggccagtgatgctgtgatctaccgctccatgggagatggcagcgccctgcggaccatcaagtatgacagcaagtggatcaaggagccccacttcctgcacgccattgaatatggcaactacgtgtacttcttcttccgggagattgctgtggagcacaacaacctgggcaaggctgtgtacagccgggtggcccgcatctgcaagaatgacatgggcggcagccagagggtgctggagaagcactggaccagcttcctgaaggcccggctgaactgcagcgtgcctggggacagcttcttctactttgatgtgctgcagagcatcacagacatcatccagatcaatggcatccccaccgtggtgggcgtcttcaccacccagctgaacagcatccctggcagcgctgtgtgtgccttctccatggatgacatcgagaaggtgttcaagggccgcttcaaggagcagaagaccccagacagcgtgtggacagctgtgcctgaggacaaggtgcccaagcccaggcctggctgctgtgccaagcacggcctggccgaggcctacaagaccagcattgacttcccagatgagaccctgtccttcatcaagagccaccccctgatggattctgctgtgccccccatcgcagatgagccctggttcaccaagaccagggtgcgctaccgcctgacagccatctctgtggaccacagcgctggcccctaccagaactacaccgtcatctttgtgggcagcgaggccggcatggtgctgaaggtgctggccaagaccagccccttcagcctgaatgattctgtgctgctggaggagattgaggcctacaaccacgccaagtgcagcgcagaaaatgaggaggacaagaaggtgatcagcctgcagctggacaaggaccaccacgccctgtatgtggccttcagcagctgcatcatccgcatccccctgagccgctgtgaaagatatggcagctgcaagaagagctgcatcgccagccgggacccctactgcggctggctgagccagggcagctgtggccgggtgaccccaggcatgctgctgctgacagaggacttctttgccttccacaaccacagcgctgagggctatgagcaggacacagaatttggaaacacagcccacctgggggactgccacggcgtgcgctgggaggtgcagagcggggagagcaaccagatggtgcacatgaatgtgctgatcacctgtgtgtttgctgcctttgtgctgggcgccttcatcgccggcgtggccgtgtactgctacagagacatgtttgtgaggaagaacaggaagatccacaaggatgctgagagcgcccagagctgcacagacagcagcggcagctttgccaagctgaatggcctgtttgacagccctgtgaaggagtaccagcagaacatcgacagccccaagctgtacagcaacctgctgaccagcaggaaggagctgcccccaaatggagacaccaagtccatggtgatggaccaccggggccagcccccagagctggccgccctgcccaccccagagagcacccctgtgctgcaccagaagaccctgcaggccatgaagagccacagcgagaaggcccacggccacggggccagcaggaaggagaccccccagttcttccccagcagccccccaccccacagccccctgagccacggccacatccccagcgccatcgtgctgcccaatgccacccatgactacaacaccagcttcagcaacagcaatgcccacaaggccgagaagaagctgcagaacatcgaccaccccctgaccaagagcagcagcaagagggaccaccggcgctctgtggacagcaggaacaccctgaatgacctgctgaagcacctgaatgaccccaacagcaaccccaaggccatcatgggagacatccagatggcccaccagaacctgatgctggaccccatgggctccatgtctgaggtgccccccaaggtgcccaaccgggaggccagcctgtacagcccccccagcaccctgcccaggaacagccccaccaagagggtggatgtgcccaccaccccaggagtgcccatgaccagcctggagcggcagaggggctaccacaagaacagcagccagaggcacagcatcagcgccatgcccaagaacctgaacagccccaatggagtgctgctgagccggcagcccagcatgaacagaggaggctacatgcccacccccactggagccaaggtggactacatccagggcacccctgtgtctgtgcacctgcagcccagcctgagccggcagagcagctacaccagcaatggcaccctgcccaggacaggcctgaagaggacccccagcctgaagccagatgtgccccccaagcccagctttgtgccccagacccccagcgtgcggcccctgaacaagtacacctactag

SEQ ID NO: 76785 - DNA, 1431 bp, Artificial Sequence
  derived and/or modified sequence
atgagggtcttcctgctgtgtgcctacatcctgctgctgatggtgtcccagctgcgggctgtgtccttcccagaagatgatgagcccctgaacacagtggactaccactacagccggcagtaccctgtgttccggggccggcccagcggaaatgaaagccagcaccggctggacttccagctgatgctgaagatccgggacaccctgtacatcgccggccgggaccaggtgtacacagtgaacctgaatgagatgcccaagacagaggtgatccccaacaagaagctgacctggaggagccggcagcaggaccgggagaactgtgccatgaagggcaagcacaaggatgagtgccacaacttcatcaaggtgtttgtgcccagaaatgatgagatggtgtttgtgtgtggcaccaatgccttcaaccccatgtgccgctactaccgcctgagcaccctggagtatgatggagaggagatcagcggcctggcccgctgcccctttgatgcccggcagaccaacgtggccctgtttgctgatggcaagctgtacagcgccaccgtggccgacttcctggccagtgatgctgtgatctaccgctccatgggagatggcagcgccctgcggaccatcaagtatgacagcaagtggatcaaggagccccacttcctgcacgccattgaatatggcaactacgtgtacttcttcttccgggagattgctgtggagcacaacaacctgggcaaggctgtgtacagccgggtggcccgcatctgcaagaatgacatgggcggcagccagagggtgctggagaagcactggaccagcttcctgaaggcccggctgaactgcagcgtgcctggggacagcttcttctactttgatgtgctgcagagcatcacagacatcatccagatcaatggcatccccaccgtggtgggcgtcttcaccacccagctgaacagcatccctggcagcgctgtgtgtgccttctccatggatgacatcgagaaggtgttcaagggccgcttcaaggagcagaagaccccagacagcgtgtggacagctgtgcctgaggacaaggtgcccaagcccaggcctggctgctgtgccaagcacggcctggccgaggcctacaagaccagcattgacttcccagatgagaccctgtccttcatcaagagccaccccctgatggattctgctgtgccccccatcgcagatgagccctggttcaccaagaccagggtgcgctaccgcctgacagccatctctgtggaccacagcgctggcccctaccagaactacaccgtcatctttgtgggcagcgaggccggcatggtgctgaaggtgctggccaagaccagccccttcagcctgaatgattctgtgctgctggaggagattgaggcctacaaccacgccaagtag

SEQ ID NO: 76786 - DNA, 3036 bp, Artificial Sequence
  derived and/or modified sequence
atgcgggtgttcctgctgtgcgcctacatcctgctgctgatggtgtcacagctgagagcggtgtcctttccagaagacgatgaacctctgaacacagtggactaccattatagtaggcaatatcccgtatttagaggccggccgtccggcaatgagtctcagcaccggctagacttccagctgatgcttaaaatccgcgacaccttatatatcgccggcagggaccaagtctacacagtcaatcttaacgagatgcctaagacagaggtcatacccaacaaaaaactgacatggcgatcccgccagcaggaccgggagaactgtgccatgaagggaaagcataaagatgaatgtcataatttcatcaaagtgttcgtcccccggaacgacgagatggtgtttgtgtgcggcaccaatgccttcaatccaatgtgtaggtactaccgattgagcacattagaatatgatggagaggaaataagcggtctggcccgatgcccattcgatgctagacaaacaaacgtcgcgctgttcgccgacgggaaattgtattctgctaccgtggccgactttctggcctcagacgccgtgatttaccggtctatgggagatggctctgctttaaggacaatcaagtatgattcaaaatggattaaagagccccacttcctccatgcgatagagtatggtaactacgtctacttctttttccgtgaaatcgctgtcgaacataacaatctcggcaaggctgtctattcacgcgtggcccgcatttgcaaaaacgatatgggtggcagtcaacgggtgctggaaaaacactggacatcattcctcaaggcacggttaaactgtagtgtccctggagactctttcttctatttcgatgttttgcagagcatcaccgacatcattcagatcaacggcatccccaccgtggttggggtgttcaccacccagctcaattctattcccggatctgctgtgtgcgccttttccatggacgatatagagaaggtgttcaagggccgtttcaaagagcaaaagactcctgacagcgtctggacggctgtgcctgaggacaaagtgccaaagccgcgtccgggatgttgtgccaagcatggattagccgaagcctataaaacctctatcgattttcccgacgagaccttgagctttataaagtcccaccctctgatggactccgctgtccctccaattgcagatgagccctggtttacaaagacaagagtccggtacagactgactgctatctctgtggatcactccgccggaccgtatcaaaactacactgtgatctttgtgggatccgaggccggcatggtgctgaaagtgttggccaaaaccagcccttttagtctcaacgatagtgtgctgctcgaggagatcgaagcgtataaccacgccaagtgtagtgccgaaaatgaggaggacaaaaaagtaatctcacttcaactggacaaggaccaccacgccctgtacgtagccttcagctcttgtattatccggataccactgtctaggtgtgagaggtacggaagttgtaagaagtcttgcattgcctcaagggacccttactgtgggtggttgagccagggctcctgtgggagagtgacacctgggatgctcctgctcaccgaagacttctttgccttccacaatcacagcgccgaggggtatgaacaggacactgagttcgggaatacggcccacctgggagattgccacggagtcaggtgggaagttcagtctggcgagagcaatcagatggttcacatgaatgtgttaatcacttgtgtttttgctgctttcgttcttggcgcttttatagcaggcgtggcggtgtactgttatagggatatgtttgtgcgaaaaaaccggaagattcacaaggatgctgagagtgcacagtcctgcacggacagctctggaagcttcgcaaaactgaacggcctattcgactcccccgtgaaggagtaccagcaaaacattgactccccaaagttgtacagtaatctgttaacaagtcgcaaggagcttccgccaaatggtgatactaaatctatggtgatggaccatcgcggacaaccaccagagcttgcagctctgcctacacctgaatcaaccccagtgctgcatcagaagaccctacaggcgatgaagtctcatagcgagaaggcccacgggcacggcgcttctaggaaggagacccctcagttttttccctcctctccaccaccacattctcccttgtcacacgggcatatcccctcagctatcgtgcttccgaatgccacacacgattataacacgtccttttccaatagcaatgcgcacaaagccgaaaaaaagcttcaaaatatcgaccaccccttgacaaaatcttcatccaagcgcgaccaccgccgatctgtggactccaggaacactctgaatgatctgcttaagcacttaaacgatccaaattctaatccaaaggccatcatgggtgacatccaaatggcgcatcagaatctgatgcttgacccaatgggatcgatgagcgaagttcctccgaaggtgcccaaccgggaagcttccctctattcccccccgtctaccctgcccaggaacagtcccacaaagagggtggatgtccctaccaccccaggtgtccccatgactagccttgaaaggcaacgaggatatcacaaaaactcttcccaacgtcactccatctccgccatgcctaagaacctgaattcgccgaatggcgtcctcttgagtcgccagccatctatgaatagaggagggtatatgccaacccctacaggtgcaaaggtagattatatacagggcacccctgtgagtgtgcacctgcagccctctctctccaggcagtcttcgtatacttcaaacggcaccttacctagaaccggactgaaacggacccctagcctcaagcccgatgtccctccaaagccctcattcgtcccccagactccctccgtgcgccctctgaacaaatacacatattag

SEQ ID NO: 76787 - DNA, 1431 bp, Artificial Sequence
  derived and/or modified sequence
atgcgggtgttcctgctgtgcgcctacatcctgctgctgatggtgagccaactacgcgcagtgagtttccctgaggacgatgagcctttaaatacagtagactaccattactctaggcagtacccagtcttcaggggccgtccaagtggcaacgagtctcagcacagattggattttcagctcatgttaaaaatcagggacacgctctatatcgccggacgcgatcaggtttatactgtgaatctcaatgagatgccaaagaccgaagtgatccccaacaaaaaattaacctggagaagccggcagcaggaccgtgaaaattgcgctatgaaaggaaaacacaaagacgagtgccacaactttatcaaagtgtttgtgcctagaaatgacgagatggttttcgtgtgtggaacaaatgcgttcaatcctatgtgccggtactataggctgtctaccctcgagtacgacggcgaagagatttcaggactagcgagatgccctttcgacgcgcggcaaaccaatgtggcgctgttcgccgacgggaagctgtactctgccaccgtggcagactttctagcctccgacgccgtgatttacagaagtatgggcgacggaagcgcgctgcgaacaatcaagtatgatagtaagtggatcaaggagccccacttcctgcacgctatcgagtacggtaattacgtatatttcttctttcgtgagattgccgtcgagcataataacttgggcaaagccgtttatagtcgagtcgcacgcatttgtaagaatgatatgggtggctcccagcgggtactcgagaagcactggacttctttcctgaaagcccgactgaactgctccgtgccaggcgatagcttcttttactttgacgtgctccaatcaataaccgacataatccaaatcaacggcataccaacagtcgtgggcgtctttactacccaattaaactccatccccggatcagctgtgtgcgcattcagtatggatgatattgagaaggtgtttaaggggagattcaaggagcagaagaccccagactccgtttggacggccgtgcctgaggacaaagtcccaaagcccagacctggctgctgcgccaaacacgggctggccgaggcttacaagacgagtatagatttcccagacgagactctgagctttatcaagtcccaccctctgatggactccgctgtgcctccaatcgccgatgaaccttggttcacgaaaactagggtgaggtatcgcctgaccgctatcagcgtggaccattcagccggtccatatcagaattacaccgtgatctttgtagggagcgaagctggcatggtcctgaaagtgctcgccaaaaccagcccctttagcctaaatgactcggtgctgctggaggaaatcgaagcctataatcacgcaaagtag

SEQ ID NO: 76788 - DNA, 3036 bp, Artificial Sequence
  derived and/or modified sequence
atgcgggtgttcctgctgtgcgcctacatcctgctgctgatggtgtctcaactgcgtgcggtgtcctttcccgaagatgacgaaccactcaataccgtggactatcactattcccgacagtatcctgtcttccgtggacgaccctccggcaacgaatcgcagcaccggctcgactttcagcttatgctgaagattcgcgataccctttatatcgcaggacgggaccaggtctatactgtaaaccttaatgagatgcccaaaacagaggtaattcccaacaagaaactgacatggagatcgcggcagcaagaccgtgaaaattgtgctatgaagggaaaacacaaggacgaatgccacaattttatcaaggtttttgtgcccagaaacgatgagatggtgttcgtgtgtggcacaaatgcatttaaccctatgtgccgatattaccggctaagtactcttgagtacgacggggaggaaatttctggcctcgcccgatgcccgttcgatgcgcgacagaccaatgtggcgctcttcgctgacggcaaattgtactctgcaactgtcgccgactttcttgcctccgatgccgtgatttaccgcagtatgggcgatggctcagccctgaggacaatcaaatatgattcaaaatggatcaaagagccgcattttttgcacgcaattgaatacggtaactatgtgtactttttcttccgggagatcgccgttgaacacaataatctgggaaaggcagtatatagcagagtggctcgcatatgtaagaacgatatgggaggcagccaaagagtactcgaaaaacactggacctcttttctgaaagctaggctcaactgtagtgtgcccggcgactcttttttttatttcgatgtgctgcagtccataactgatatcatccaaatcaatggcatacccactgtggtgggtgtgttcacgactcagttaaatagtattccaggaagtgcagtctgtgccttctcgatggacgacattgagaaggtgtttaaaggaagattcaaggaacagaagactccagactccgtttggacagcagtgccagaggataaagtgcctaaaccacggcccggatgctgcgccaaacatggacttgctgaggcttacaagacctctattgattttccggacgaaaccctgagttttatcaaaagtcaccctcttatggactcagctgtgccaccaatcgccgatgagccctggttcaccaaaacccgcgtgaggtatcgcctgactgcaattagcgtggaccactccgccggcccatatcagaattatactgttatctttgtgggctcggaggcaggcatggtcttgaaagtgttggcaaaaaccagccccttctctctgaacgattcagtgttgctggaagaaattgaagcatacaaccacgctaagtgcagcgccgaaaatgaagaggataagaaggtgatcagcttgcaattggacaaagaccatcacgcattgtatgtggcgttttcaagttgcatcattcgaatccctctctcgcgctgcgaaagatacggtagctgcaaaaaatcgtgcatcgctagccgcgatccgtattgtgggtggctatctcaaggaagttgtggaagagtgaccccagggatgctcctgctgacagaagatttcttcgcttttcataaccattcagccgaggggtacgagcaggataccgagttcggcaacactgcacacctcggcgattgtcatggtgtccgctgggaagtgcagagtggcgagtccaatcaaatggtacacatgaatgttctcattacgtgtgtgtttgcggcatttgtgctgggcgccttcatcgccggggtggcagtatactgctaccgcgacatgtttgttagaaaaaacagaaaaatccataaggacgctgagtccgcacaaagctgcacggactcctcagggagcttcgccaagttaaacggccttttcgattcgcctgttaaggagtaccagcagaacattgatagcccaaaactgtatagcaacctgttaaccagccggaaggagctcccccctaatggcgacaccaaatctatggtgatggatcaccggggacagcctccggagctggctgctctgccaacacccgagagcacaccagtactgcatcaaaaaactctacaggccatgaagagccactcagaaaaggctcacggccatggtgcttcacgcaaagagaccccacagttttttccttccagtccgcccccccacagcccactgtcccacggccacataccatctgcaattgtgctgcccaacgctacgcacgattacaacacttctttctccaacagcaatgcacacaaggcagagaagaagctccagaatattgatcaccctctgacaaagagcagttccaaacgcgatcaccgccggtccgtagattcccgcaatactctgaatgatctcttgaaacatttaaacgaccctaattccaatcccaaagctataatgggtgacatccagatggcccaccaaaacttaatgttagatcctatgggcagcatgagtgaagtccccccaaaagttcctaaccgtgaagcatctctgtactccccaccctcaacactccccagaaacagtcctacaaagcgcgtggacgttccaaccacccctggtgttccaatgacgagcttggaacgccagagaggatatcacaagaatagcagccagagacatagtatatctgctatgccaaaaaatttgaattctcccaatggcgtgctcctaagccgccagccatccatgaaccgcggtggctatatgcccacaccaaccggagcaaaggtggactacatccagggaaccccagtgtcagtacatctccagcccagcctttctcgccaaagcagttacacttccaacggcaccctgccacgaaccggattgaagcgtactcccagcctgaaacccgacgttccaccaaaaccctccttcgttccccagaccccctccgtacgccctctgaataagtacacttattag

SEQ ID NO: 76789 - DNA, 3036 bp, Artificial Sequence
  derived and/or modified sequence
atgcgggtgttcctgctgtgcgcctacatcctgctgctgatggtgtctcagcttagagcagtcagttttcctgaggacgatgaacctttgaataccgtggactaccattattcaagacagtatcctgtgtttcggggacggccatccggcaacgagagtcagcatcgtctcgattttcagctcatgcttaagatacgggacacactctatatcgccggccgggatcaggtatatacagtgaacttgaatgagatgccaaagaccgaggtgatcccaaacaagaaactcacttggcggtcaaggcagcaagatagagaaaactgcgctatgaaagggaaacacaaagatgagtgtcacaatttcattaaagtattcgtcccccggaatgacgaaatggtgttcgtgtgtggcacgaatgccttcaaccccatgtgccggtactaccggcttagcacgttagaatatgatggggaagagatctctggcctcgcacgttgtcctttcgatgctcggcagacgaatgtggccctcttcgccgacggaaagctgtacagcgccactgtggccgactttctggcttccgatgctgttatttatcgcagtatgggtgacggctctgcgcttcgcactattaaatacgacagcaaatggattaaagagcctcattttcttcacgccatcgagtacggaaactacgtctatttcttctttagggaaattgcagttgaacataacaacttagggaaggccgtgtattcccgtgtggcaagaatatgtaagaatgacatgggtgggagccagagagtactggaaaagcattggacgtcctttctgaaggcccggctcaactgttctgtgcctggggatagctttttctattttgacgtgctacaatcgatcactgacattatccaaataaatggcatccccacagtcgtgggagtgttcactacccagctgaactccatccctggaagcgctgtttgcgcgttcagtatggatgacatagaaaaagtctttaagggtcgatttaaagagcagaagactcctgattctgtgtggaccgcggtcccggaggacaaagtgccaaagccacgccctgggtgctgtgcgaaacacgggctggccgaggcctacaagacatccattgactttccagatgagacactgtcttttattaagtcacatcctcttatggactctgctgtcccgccaatcgccgatgagccgtggtttaccaagaccagagtgcgctacagacttaccgccatttctgtggaccactcggccgggccatatcagaattacacagtgatctttgtgggaagtgaggccggaatggtgctcaaggtcctcgccaagacatctccattctcactgaatgactccgttctgttagaggagattgaggcttacaaccacgccaagtgcagtgcagagaacgaggaagataaaaaagtcatctctttacaactcgacaaggaccatcatgctctgtatgtggctttctcgtcctgcataataaggatacctctgtcaaggtgcgagagatatggatcctgcaagaagtcgtgtatagcctcccgagatccctactgcggctggctctcccagggatcttgtggacgcgtgacacccggcatgcttctgctaactgaggacttctttgcttttcataatcactcagccgaagggtatgaacaagacacagaattcggaaacaccgcacatttgggagattgccatggggtaagatgggaggtccagagtggcgagagcaaccagatggttcacatgaacgtgctgattacctgtgtgttcgcggcttttgtgctcggtgctttcatcgctggggtcgctgtttattgctatagagacatgttcgtcagaaagaataggaaaatccataaggatgctgaaagcgcccaatcatgcaccgatagctctggatcttttgccaagctgaacggtctctttgactctccagtgaaagaatatcagcaaaatattgactctcccaagctctatagtaatctcctgacttctcggaaagagcttccacccaacggtgatactaagagcatggtcatggatcatcggggccaaccacccgaactggccgcactgcctacacccgagtccacccccgtgctgcatcaaaaaactcttcaggccatgaagagccatagcgaaaaggcccatggtcacggcgcctctcggaaggagactccacaattctttccatcgtctcctccgccccactcaccccttagtcacggacatatccctagtgccattgtactccctaatgctacccacgactataatactagcttttcaaatagtaatgcccacaaggctgagaaaaaattgcagaacattgatcacccactgactaagtcaagcagtaagcgggaccatagacgtagcgtcgactcccggaatacgcttaacgacctactgaaacatctaaacgatcccaattccaaccctaaagccatcatgggtgacattcagatggcacatcaaaatttgatgttggatcccatgggaagtatgtctgaggtgcccccaaaggtgcccaatcgtgaggcctctctgtatagtccgccgtccaccctgccgcggaactcccccactaagcgcgtggatgtgccaacaacacccggagtgcctatgacatcattagaacgccagcgcggatatcacaagaacagctcacaacggcattctatcagcgccatgccaaagaacctcaattctccaaacggcgttctcctgagtagacaaccgagcatgaataggggcggatatatgcctacccccacgggtgcgaaggtcgattacatccaggggactccggtgtcagtacatctacagccaagcttgagcagacagtcctcttacacttctaatggtacgctcccacgaacgggattgaagcggacaccctcactgaagccagacgttccgcctaagcctagctttgtacctcagaccccttcggtgcgcccgctgaacaaatatacttattag

SEQ ID NO: 76790 - DNA, 3036 bp, Artificial Sequence
  derived and/or modified sequence
atgcgggtgttcctactgtgtgcctacatactgttgctaatggtctcacagctccgagctgtctctttcccagaggacgacgagccactgaacacagtggactatcattactcccggcaatacccggtgttcagaggaagacctagtggtaacgagtcccaacacagacttgatttccaattgatgctaaaaatcagagacactctgtatatcgctggtagagaccaagtatacacggtaaacctaaacgaaatgcccaaaactgaggtgattcctaataaaaagctcacttggagatctaggcagcaggatagggaaaattgcgctatgaaggggaaacataaagacgagtgtcacaattttatcaaggtgtttgtgccaaggaacgacgaaatggtatttgtctgcggaacaaatgcctttaaccccatgtgtaggtactatcgcctatccacattggaatacgatggcgaagagatctcaggattggctcgatgcccatttgatgccaggcagacaaacgtggcccttttcgccgacggaaaattgtactctgctaccgtggcagatttcctggcatccgatgccgtaatctatcggtcaatgggcgatgggagcgccctacgtacaattaaatatgactcaaagtggattaaggagcctcacttcttacacgcaattgaatacggcaactacgtttatttctttttccgggaaattgccgtcgagcacaacaatctgggcaaggccgtgtatagccgcgttgctcggatttgcaagaatgacatgggcggttcacagagggtgctggagaaacactggacatcttttctgaaggccagactcaactgtagcgtgccgggagactcctttttttacttcgacgtcctccagtcaataacagatatcattcagatcaatggcatcccgaccgtcgtgggcgtgtttacaactcagctaaattccattcctggcagcgcagtgtgcgccttttccatggatgatatcgagaaggtcttcaaaggaagattcaaggaacagaaaactcctgattcagtctggacagccgtgcctgaggacaaggtcccaaagcccaggcccggttgctgcgcgaaacacgggcttgctgaagcctacaagacatcgatagattttccagatgagaccctgtccttcattaagtcacaccccttgatggattctgccgtcccacccatcgccgacgagccatggttcactaagacccgcgttcgctatcgacttaccgccatttcggtagatcatagcgccggtccctaccaaaattacacagtaattttcgtgggatcagaggccggaatggtgttgaaggtgctggctaaaactagcccattctctctgaacgatagtgttctgctggaggagatcgaggcctacaaccatgccaagtgtagcgccgaaaacgaagaggacaagaaggtgattagtctgcaactcgataaggatcaccatgctctctatgtggcatttagctcttgtatcattcgaattcccttgagccgctgcgaaaggtacgggagttgcaaaaaatcttgtatcgcatcgagggatccttactgcggctggctgtctcaggggtcctgtgggcgtgttaccccagggatgctgctcctcaccgaagatttctttgccttccacaaccatagcgctgaagggtatgaacaggacacggagtttgggaacacagcccatctaggcgattgccacggggttagatgggaggtgcagtcgggagagtcgaatcaaatggttcatatgaatgtcctgatcacttgcgtgttcgcagcctttgtgctgggcgcatttattgctggtgtggccgtgtactgctaccgagatatgttcgtgagaaaaaataggaaaatccataaggatgccgagtctgcccagtcttgcaccgattctagcggcagctttgccaagctgaatgggctgttcgacagtcccgttaaggagtatcagcagaatatcgactcccccaaactatattctaacctcctgacctctagaaaggagctccccccaaatggcgacacaaaaagtatggttatggatcatcggggacaacctccagaattagccgcactgccaactcctgagagcactccagtgctccatcagaaaacactccaggctatgaaatcacatagtgaaaaagcccatggccacggggcatccagaaaggagaccccacaattcttcccaagttcacccccaccccactcacctctgagccacggtcacatcccctctgctatcgtgctccctaatgcaactcacgattataacacatctttttctaactccaatgcccacaaggctgaaaaaaaactgcagaatatcgatcacccactgactaaatcatcctccaagcgcgaccatcgtagaagcgtggacagccgaaatactttaaacgatctgctgaagcacttgaacgatccaaacagtaatccaaaggcaatcatgggagatattcaaatggcacaccaaaacctcatgctcgaccctatgggctctatgtctgaagtaccacctaaggtaccaaatagagaagcctctctgtacagccctccttccacgctgccccgaaattcacccacaaaacgcgtcgatgtgcctactactcccggagttcctatgacttcacttgaaagacagcgcggataccataaaaatagcagtcagcgccattcaataagcgccatgcccaagaatctcaactcccccaacggggttctcctgagtcgacagcccagcatgaacagaggcggatatatgcccactccaacgggcgcaaaggtggactatatccagggaacacctgtatctgtgcatttacagccatccttgtcgaggcagagcagctacaccagtaatgggactctgcctagaacgggtctaaagcggacaccttctctcaagccagacgttccgccaaagccatcttttgtgcctcagaccccctcggttcggcctttgaataagtacacgtattag

SEQ ID NO: 76791 - DNA, 1431 bp, Artificial Sequence
  derived and/or modified sequence
atgcgcgtcttcctcttgtgtgcctacatactccttttgatggtgagccagttgcgcgcagtttctttccccgaggatgacgagccgctgaacactgtagactatcattattcaagacagtatcccgtgttccgtgggcgaccaagcggcaacgagtcccaacaccgactcgattttcagctgatgctcaaaataagagacacactgtatatcgcaggaagagatcaagtgtacaccgtcaatctaaatgagatgcctaaaactgaagtgatccccaacaaaaagctcacctggcgctcacggcaacaggaccgcgaaaattgtgctatgaaaggcaagcataaggacgagtgccataatttcatcaaggtatttgtaccccgaaacgatgagatggttttcgtttgcggcactaatgccttcaatcctatgtgccgctattatcgcctgtcaacgttggagtatgacggcgaagaaatctccgggctggcaagatgcccgtttgacgctagacagacaaacgtggccctgttcgccgacggcaagctgtacagcgctaccgtcgcggattttctggcgtccgatgccgtcatttaccgaagcatgggagacggctctgcgctgcgaaccattaagtatgatagtaaatggataaaggagccacattttttacatgccattgagtacggaaactatgtgtactttttcttccgcgagattgccgtggagcacaacaatttgggcaaggccgtctacagcagggtagccagaatttgcaaaaatgacatgggagggagccaaagggttcttgagaagcattggacaagcttcctgaaggcccgtctgaactgttccgttccaggcgatagttttttctactttgatgtattgcagtccataaccgacattatccaaattaatgggatacctaccgttgtgggagtcttcaccactcagttgaatagtatccctggttccgcagtgtgtgctttctctatggatgatattgagaaagtcttcaaaggcaggttcaaggaacaaaaaactcctgacagcgtgtggacggccgtgcccgaagacaaggttcccaagcctaggccgggttgctgcgctaaacatggtttagccgaagcttacaaaacctctattgacttccccgacgagaccctctcatttatcaagtcacacccgctgatggattctgccgtaccccctatcgcggacgagccctggttcacaaaaactagggtcaggtatcggctcactgcgatttcagtggatcatagtgcagggccatatcaaaactatacagtaatttttgttggctcagaagcaggcatggtccttaaagtcctggccaagacctctccctttagtttgaatgactccgtcctcctggaagaaatagaggcgtacaatcacgctaagtag

SEQ ID NO: 76792 - DNA, 3036 bp, Artificial Sequence
  derived and/or modified sequence
atgagggtcttcctcttgtgtgcctacatcctacttctcatggtgtctcaactccgggcagtctcttttccagaagacgatgaacccctgaataccgtcgactaccactactctcgccaataccctgtgttccggggaaggcctagcggcaacgagtcgcaacacaggctggatttccaattgatgcttaaaattcgcgataccctttatatcgctggcagggaccaggtgtataccgtcaatctgaacgaaatgcctaaaacagaggtaattcctaacaaaaagctcacatggagaagcaggcagcaggacagggagaattgtgccatgaagggaaaacacaaagacgaatgtcataacttcatcaaagtatttgttcccaggaatgatgagatggtctttgtttgtggcacaaacgcctttaaccctatgtgtcggtattacagattatccaccctggaatatgatggggaagaaatcagtggtttggcccgatgcccctttgatgcaaggcagacaaatgtggcactattcgccgatggtaagctctatagcgctacagtcgcggatttcctggcgtccgacgccgtaatatatcgtagcatgggtgatgggagtgccctgcgcacaatcaagtacgatagcaagtggattaaagagccccattttcttcatgctattgagtacgggaattatgtatacttcttttttcgagagatcgcagtggagcacaacaacttgggtaaggcggtgtattcacgagttgctaggatctgtaaaaacgacatgggcggttctcagcgcgttttggaaaagcactggacatcattcctcaaagcaagattgaattgttcggtccccggtgacagttttttttacttcgacgttcttcaatccattacagatatcatccagatcaatggcatccctacagtcgttggagtgtttaccactcagttgaacagcatccccggaagtgccgtgtgtgcgttctccatggatgacatcgagaaagtgtttaagggtagattcaaagaacagaaaacccctgattctgtatggaccgctgttccggaggataaggtgcccaagcccaggccgggttgttgcgccaagcatggcttggcagaagcatacaagacatccattgacttccccgacgagaccctctcatttattaagtctcatccgctcatggatagtgcagtgcctccgattgctgacgagccttggtttaccaagaccagagtccgctatcgtctgactgcaattagcgtggaccacagcgccggaccgtaccagaattacaccgtcatattcgttggttcagaggccggaatggtattaaaagtacttgcgaaaacatccccgttctctcttaacgatagcgttctgctcgaggaaatcgaagcctataaccacgccaagtgttcggcagagaatgaagaggacaaaaaagtgatctcgttgcaactcgacaaagaccatcatgctctgtacgttgcctttagctcctgcatcattcgtatcccactgagtcggtgcgagagatacgggagttgcaaaaagtcgtgtatcgctagtagagatccatattgcggatggctgtctcaggggagctgtgggagggttacccctgggatgctcctcctcacagaagacttttttgccttccacaaccactcggcagagggttacgaacaggacaccgagttcggaaacaccgcacatctcggtgattgccacggcgtaagatgggaagtccagtcaggcgagagcaaccaaatggtccatatgaacgttcttataacttgtgtattcgccgcattcgtattgggggctttcatcgctggagtcgctgtgtactgctacagggatatgtttgttcgtaaaaacagaaagattcacaaagatgctgaatctgcccagtcatgcaccgattctagcggaagcttcgctaaactcaacggcttattcgactcacctgtaaaggagtaccaacaaaatatagatagcccaaagctctactcgaacttgttaacatcacgcaaggagttgcctcccaatggtgataccaagtccatggtcatggatcaccgtggccagccaccagaattagcagccctgcccactcccgagtcaacaccagtgttgcaccagaaaacattgcaggccatgaagagccactcggagaaggcacatggtcacggcgcatcacgcaaggagacaccacaatttttcccttcatcgccaccccctcactcaccattaagccacgggcacatcccttctgccattgtgctacccaatgcaacgcatgactataacacgtctttctcaaattctaacgcccacaaagccgagaagaagctgcagaatattgaccacccactgaccaaatccagctcaaagcgggaccataggcgctccgttgacagccgaaacacactgaacgatctcctgaagcacctgaatgacccaaacagcaaccctaaggctatcatgggagacattcaaatggcacatcagaatctaatgttagaccctatggggagtatgagtgaagtccctcccaaagttcctaacagagaggcctccttgtacagcccgcctagcactctcccgaggaactctccaactaaacgagtcgatgtgcccaccacaccaggcgtgccaatgaccagcttggaacgccagcgcggttatcacaaaaatagcagtcagcggcattctatatccgccatgcctaaaaacctcaattcacccaacggtgtactcttgtcaaggcagcccagtatgaacagagggggttatatgcctactcccaccggggcaaaggtagactatatacagggcacccctgtatccgtccacttgcagccatccttgagccggcagtcctcatatacaagcaacggtactctgccacggactggactgaagaggacacccagcctaaagcccgacgtgccgccaaagccctcgtttgtgccccagactccgtcagtgaggcccctcaataagtatacttactag

SEQ ID NO: 76793 - DNA, 3036 bp, Artificial Sequence
  derived and/or modified sequence
atgagagtgtttctgctttgtgcctacattctgctgttaatggtctctcaactgcgcgctgtctccttcccggaagacgatgagccgcttaatacagtggactatcactatagtcggcagtaccctgttttccggggaagaccttctggcaacgaaagtcaacaccgtcttgacttccaactgatgttgaaaatccgcgacacattatatatcgctggccgagatcaagtgtataccgtcaatctgaatgaaatgccaaaaactgaggtaatccctaataaaaagctgacatggcgatcaagacagcaggatcgagaaaattgcgcaatgaaaggtaaacacaaggatgagtgccacaacttcatcaaagtgttcgttccccgaaatgatgaaatggtatttgtctgtgggacgaacgcctttaacccaatgtgcaggtactaccgcttatctactctagagtacgatggtgaagagatttctggccttgctcgatgtccgtttgatgccagacaaactaatgtagcattgttcgcagatggcaagctgtattctgctaccgtggccgacttcttggctagtgatgctgtgatctacagatccatgggagacggcagcgcactgcggaccatcaagtatgattcgaagtggattaaggagccacattttctgcatgccattgaatacggtaactatgtctatttctttttcagagaaatcgccgtggagcacaacaatttgggcaaggctgtgtattcccgagtcgccaggatttgcaagaatgatatgggcggtagccagcgggtactggagaaacattggacctcttttctgaaggcgagactgaactgttccgttcccggagacagctttttctacttcgacgtgctgcagtcaattactgatattatccagatcaacggcatccctaccgtagtgggggtgttcactacccagcttaactcaattcctgggtctgccgtgtgtgccttttccatggacgacatcgagaaggtcttcaagggtcggtttaaggagcagaagactccagactccgtgtggacagcggtgcccgaggataaggtgccaaagcctcgccctggctgctgcgctaagcatggcctggcagaagcgtacaaaactagtatagacttcccagatgaaactctgtccttcataaagtctcatccccttatggattcggcagtgcctcccatagctgacgagccctggtttacaaagacccgcgtacgatacagattaacagccatctccgtggatcatagtgcgggtccgtaccagaactacacggtcattttcgttggaagcgaggctggtatggtgctgaaggtgcttgcgaaaaccagcccatttagcctaaacgattctgtactcctcgaagagattgaagcatataatcacgccaaatgcagcgccgaaaatgaagaggacaaaaaggttatcagtctgcagctcgacaaggatcatcacgccctctacgtggcgttctcctcgtgtattataaggattccattgtcgaggtgtgagcgctacggctcttgcaaaaagagttgcatcgcctcccgggatccctactgcggatggttatcccaaggttcctgcggtcgtgtgacccccggaatgctattgcttacagaggacttttttgcgttccataatcacagcgcagaggggtatgagcaggatactgagttcgggaatacagcacacctgggggattgccacggtgtccggtgggaagttcagtccggggaatcgaatcaaatggtgcacatgaacgtactgattacatgcgtcttcgccgctttcgttttgggcgctttcatcgcaggcgtggcggtatactgctatagagacatgtttgtgcgcaagaacagaaagatccacaaagacgcggaatctgcccagtcatgtacagactcatccggctccttcgccaagctgaacggactgtttgactcgcccgtgaaggagtaccaacaaaacatcgattcccccaagctctatagtaatctgctcacgagtcgcaaagaacttcctccaaacggggataccaagtcaatggtgatggaccaccgtgggcaacctcctgagctggctgctctaccaacccctgaaagcacacctgtgctccatcagaagaccttacaggccatgaagtctcactccgaaaaggcacatgggcacggagcctcccggaaagagacgccacagtttttccccagttccccaccacctcactcacctttaagccacggacacattccatctgcaattgttctgcctaatgccacacatgactataacacctcgttctcaaattccaatgcacacaaggcagagaagaaacttcagaacattgatcaccccctgactaagagttcaagtaaacgagaccaccggaggtcagtcgactcccggaacaccctcaacgacctgctgaagcacctcaacgacccaaatagcaaccctaaggctatcatgggtgatattcagatggcacaccagaacttgatgctggatcccatggggagcatgtccgaagtccctccaaaagtccccaatagagaagcgtccctttattcacccccatcaaccctgcctagaaattccccaaccaaacgagtggacgtgcctacgacccctggcgtgcccatgacatccctggagagacagagggggtaccataaaaattcttcacaacggcattctatctccgcaatgccaaagaatctcaacagccctaacggagtcttgctgagcagacagccttctatgaaccgcggtggctatatgcctactcctactggcgcaaaggttgattacattcaggggacccccgtttcagtgcatctgcagccttctttaagcaggcagtcttcttacaccagcaacggaactctcccacgcaccggattgaagcgcacacccagcctcaagcctgacgttccacctaaacccagcttcgtcccccagacaccctctgtgaggcccctgaacaaatacacctactag

SEQ ID NO: 76794 - DNA, 5913 bp, Artificial Sequence
  derived and/or modified sequence
gcggccgcttcccaccgtccctctccccttactggcagagcgcgctgcgggcggactcccgggcccggagcagcccaccggccaccccaccgcccacccggctcccggtgtctcctcccggccgctctacccagcaactttccgtgctttgttccccgactggaaatgctttacggaagcgtcttggacagggtctccgccaggcgacaagagctcggtgctgagatgtgttacgttctcatctccccatcaattatggatggaaacaaataaggaagagtcaattttgctgagccccttctccggcaacgagaggcgttctgcagccgggagggagccgccgctcgcgccggcagccgctggcaggggcatggtgaggaggaaggtagctcagtggcatttctgagcaggggccaccctgacttcaccttggcccaccatgagggtcttcctgctttgtgcctacatactgctgctgatggtttcccagttgagggcagtcagctttcctgaagatgatgaaccccttaatactgtcgactatcactattcaaggcaatatccggtttttagaggacgcccttcaggcaatgaatcgcagcacaggctggactttcagctgatgttgaaaattcgagacacactttatattgctggcagggatcaagtttatacagtaaacttaaatgaaatgcccaaaacagaagtaatacccaacaagaaactgacatggcgatcaagacaacaggatcgagaaaactgtgctatgaaaggcaagcataaagatgaatgccacaactttatcaaagtatttgttccaagaaacgatgagatggtttttgtttgtggtaccaatgcattcaatcccatgtgtagatactacaggttgagtaccttagaatatgatggggaagaaattagtggcctggcaagatgcccatttgatgccagacaaaccaatgttgccctctttgctgatgggaagctgtattctgccacagtggctgacttcttggccagcgatgccgttatttatcgaagcatgggtgatggatctgcccttcgcacaataaaatatgattccaaatggataaaagagccacactttcttcatgccatagaatatggaaactatgtctatttcttctttcgagaaatcgctgtcgaacataataatttaggcaaggctgtgtattcccgcgtggcccgcatatgtaaaaacgacatgggtggttcccagcgggtcctggagaaacactggacttcatttctaaaggctcggctgaactgttctgtccctggagattcgtttttctactttgatgttctgcagtctattacagacataatacaaatcaatggcatccccactgtggtcggggtgtttaccacgcagctcaatagcatccctggttctgctgtctgtgcatttagcatggatgacattgaaaaagtattcaaaggacggtttaaggaacagaaaactccagattctgtttggacagcagttcccgaagacaaagtgccaaagccaaggcctggctgttgtgcaaaacacggccttgccgaagcttataaaacctccatcgatttcccggatgaaactctgtcattcatcaaatctcatcccctgatggactctgccgttccacccattgccgatgagccctggttcacaaagactcgggtcaggtacagactgacggccatctcagtggaccattcagccggaccctaccagaactacacagtcatctttgttggctctgaagctggcatggtacttaaagttctggcaaagaccagtcctttctctttgaacgacagcgtattactggaagagattgaagcctacaaccatgcaaagtgcagtgctgagaatgaggaagacaaaaaggtcatctcattacagttggataaagatcaccacgctttatatgtggcgttctctagctgcattatccgcatccccctcagtcgctgtgagcgttatggatcatgtaaaaagtcttgtattgcatctcgtgacccgtattgtggctggttaagccagggatcctgtggtagagtgaccccagggatgctgctgttaaccgaagacttctttgctttccataaccacagtgctgaaggatatgaacaagacacagaattcggcaacacagctcatctaggggactgccatggtgtacgatgggaagtccagtctggagagtccaaccagatggtccacatgaatgtcctcatcacctgtgtctttgctgcttttgttttgggggcattcattgcaggtgtggcagtatactgctatcgagacatgtttgttcggaaaaacagaaagatccataaagatgcagagtccgcccagtcatgcacagactccagtggaagttttgccaaactgaatggtctctttgacagccctgtcaaggaataccaacagaatattgattctcctaaactgtatagtaacctgctaaccagtcggaaagagctaccacccaatggagatactaaatccatggtaatggaccatcgagggcaacctccagagttggctgctcttcctactcctgagtctacacccgtgcttcaccagaagaccctgcaggccatgaagagccactcagaaaaggcccatggccatggagcttcaaggaaagaaacccctcagttttttccgtctagtccgccacctcattccccattaagtcatgggcatatccccagtgccattgttcttccaaatgctacccatgactacaacacgtctttctcaaactccaatgctcacaaagctgaaaagaagcttcaaaacattgatcaccctctcacaaagtcatccagtaagagagatcaccggcgttctgttgattccagaaataccctcaatgatctcctgaagcatctgaatgacccaaatagtaaccccaaagccatcatgggagacatccagatggcacaccagaacttaatgctggatcccatgggatcgatgtctgaggtcccacctaaagtccctaaccgggaggcatcgctatactcccctccttcaactctccccagaaatagcccaaccaagcgagtggatgtccccaccactcctggagtcccaatgacttctctggaaagacaaagaggttatcacaaaaattcctcccagaggcactctatatctgctatgcctaaaaacttaaactcaccaaatggtgttttgttatccagacagcctagtatgaaccgtggaggatatatgcccacccccactggggcgaaggtggactatattcagggaacaccagtgagtgttcatctgcagccttccctctccagacagagcagctacaccagtaatggcactcttcctaggacgggactaaagaggacgccgtccttaaaacctgacgtgccaccaaagccttcctttgttcctcaaaccccatctgtcagaccactgaacaaatacacatactaggcctcaagtgtgctattcccatgtggctttatcctgtccgtgttgttgagaggatgatgttgtaagggtaccttaaaacaagagactcgcttgtattttaagagaaccaagtggccaaagaaactctttctaactttggcaacatcagaacttgccacatgtagctactgcagcaaggcttctgtgtacttgcctgaaaacaaaggaaggtgctggtcattccatttcttttgtttgaagctaaagagatgtgtagctcacaggggctaccttaccagtataaagagctgataacagtactcagaagaatctgtgaacaaatacttgaaaatgggttcaatgtagactgccattatgtgtggtcttcccattaaatgtgaacattttaatatgtatgcattcaccttgcctcttgcacaaatgtcaaaaaaaagatggtaatatctcaaagaaatgaacttgtagattaccaagcagtttgctaaaaattcaatctttgacccaagctgtagcatttttttttcatgtgtggcatctttttcatgccaccaacaaacttgttgtgtgtgtgcgtgtgtgtgtgtgtgtgtgtgtgtgtgtgtgtgttctgtacccactaggatttgtttaggtgcccattgcatctttttgtgctatggagttgtttacattaagcatgaccgaacgagagacaatactatttcccacaggagtccattgggttcagctttgaaagaggaatagaatcgaggctcctttgaccatcaaaatgatgaactttacttatgtggtacccaatgccagaatgtaagagttgcaagtgattttgtgctgctattcattaaaacttgtattccagtcttgccagcttaaggagatcaagatattaagaggtatccttgatttattttccagtattcagtagtaaaattttcctgtccactgtgaatcaaagcctgagtcactctatttaaccttggacacactaataaggttttattttgattgtgttcgtttccccccccccaatagtaaaatttctcctcctttaactcctcctaccccccaaggtaagaaacaaaaaacaaacaaacaaacaaaaatagaagacaaaagaaagacatatgaaaggaattgtaattggcttaacagaaacagtctgtaaaaacctaacagtggtgcaatcatgttgtctgtgttgtgttatgtgagaattttctcctaagtcatgcaggtaatgacaatatactgtaaataccacatgtgagtttacctgaatctgtgcattttgtgccttattcatgagaatgatagaagtactaaaatctgtcaagtgttttcagtatagcacattatttactgagtgccagttgtaaatgtttttcaaccagcacctaaaaagactcttttcaaaaaatcacagaaacaacctaggacaattatttgttacataatccgacctcatagcagcattacattctttgccgtgataaacattccactcctgctttcctaaggatgaaacagtgataatgtgaactcaaatgaggtttcctgggtaatgtgacacctgcagaaactatagagcgtcatttatacgtagtttggcagaaaccacttacggctgatgatgcgcaaccctgctgactgtttcagttaatatgctgcacaccacacacttgtttagtgaaccaaatctagaaagtaccaaggcagaggtatgctcctgctgtaatcaggcaaatgagttcaactggatttcttttgacaatactgttggtacctattacttgggggaggacatgttgcagaagaccagatcatttttatacagaatgtgaaatactgatacagttattcttttttttaaagaacattgttttataaagaacgtgatttccagtgatctctggaagcgctaaagctaaaatttctgttcttgaaacacttcagctttgcaactaaaatattacagattaataataaattaaaccaaccaatgataaacactactcagtccaccaacaacaaacgtgtttgaattcaccttaccaatattaatcccagcgtgtgtaaaacagaacagtaactctatgtgaccccagataacattttgtaacattgtgcttccttgtagtttgtaatgtgagttcaatcagtatttatgttgaaatttctaacattaaatctagtctctatcctgttaatttaatttttaaatgctttatccatttgtgcaaaggtaaacgcagattgtatcttttttaatggtacggcataaaaagtaaccctcaagtgaagtgtctctatactgttttatagagtactttaacatgaatagataccttgtaaacttgtattgtggatgtgtaaataatatgtactttgggtttttaacaccgcatgtaaagtcaaaataaaatatacaaatcattata

SEQ ID NO: 76795 - DNA, 2318 bp, Artificial Sequence
  derived and/or modified sequence
atccccatccccggcccaggcccggagggcggccgcttcccaccgtccctctccccttactggcagagcgcgctgcgggcggactcccgggcccggagcagcccaccggccaccccaccgcccacccggctcccggtgtctcctcccggccgctctacccagcaactttccgtgctttgttccccgactggaaatgctttacggaagcgtcttggacagggtctccgccaggcgacaagagctcggtgctgagatgtgttacgttctcatctccccatcaattatggatggaaacaaataaggaagagtcaattttgctgagccccttctccggcaacgagaggcgttctgcagccgggagggagccgccgctcgcgccggcagccgctggcaggggcatggtgaggaggaaggtagctcagtggcatttctgagcaggggccaccctgacttcaccttggcccaccatgagggtcttcctgctttgtgcctacatactgctgctgatggtttcccagttgagggcagtcagctttcctgaagatgatgaaccccttaatactgtcgactatcactattcaaggcaatatccggtttttagaggacgcccttcaggcaatgaatcgcagcacaggctggactttcagctgatgttgaaaattcgagacacactttatattgctggcagggatcaagtttatacagtaaacttaaatgaaatgcccaaaacagaagtaatacccaacaagaaactgacatggcgatcaagacaacaggatcgagaaaactgtgctatgaaaggcaagcataaagatgaatgccacaactttatcaaagtatttgttccaagaaacgatgagatggtttttgtttgtggtaccaatgcattcaatcccatgtgtagatactacaggttgagtaccttagaatatgatggggaagaaattagtggcctggcaagatgcccatttgatgccagacaaaccaatgttgccctctttgctgatgggaagctgtattctgccacagtggctgacttcttggccagcgatgccgttatttatcgaagcatgggtgatggatctgcccttcgcacaataaaatatgattccaaatggataaaagagccacactttcttcatgccatagaatatggaaactatgtctatttcttctttcgagaaatcgctgtcgaacataataatttaggcaaggctgtgtattcccgcgtggcccgcatatgtaaaaacgacatgggtggttcccagcgggtcctggagaaacactggacttcatttctaaaggctcggctgaactgttctgtccctggagattcgtttttctactttgatgttctgcagtctattacagacataatacaaatcaatggcatccccactgtggtcggggtgtttaccacgcagctcaatagcatccctggttctgctgtctgtgcatttagcatggatgacattgaaaaagtattcaaaggacggtttaaggaacagaaaactccagattctgtttggacagcagttcccgaagacaaagtgccaaagccaaggcctggctgttgtgcaaaacacggccttgccgaagcttataaaacctccatcgatttcccggatgaaactctgtcattcatcaaatctcatcccctgatggactctgccgttccacccattgccgatgagccctggttcacaaagactcgggtcaggtacagactgacggccatctcagtggaccattcagccggaccctaccagaactacacagtcatctttgttggctctgaagctggcatggtacttaaagttctggcaaagaccagtcctttctctttgaacgacagcgtattactggaagagattgaagcctacaaccatgcaaagtaggtatatgttacgagaacgcccttcagcactgctcaaaaattttcggcatgtatttcatctagtcatgtccttttggtcctctaaattagcagtggtttggcataatagtgttttgtgttttttttctcattgaaataaatcttgggtttgtttttttcccgagcctgctagggcgaggggggtgaatggttgatgagtttaaaaataatgcagcccttgtttttcacctgtagaatatgagaacattttaacagcacctctcttatcttgcagatatattccaagatgctacatgcagcagacagctgtgagcttgcatacacacacacacaaatatacatgcacatacatacacagaatgcagtactagttaagtatttccttcctatctttaataagtaagagaatatttagaccatt

SEQ ID NO: 76796 - DNA, 5712 bp, Artificial Sequence
  derived and/or modified sequence
caggatctccaacctgagcatatgccagttgacatgggaacactgaggccagcaatttaaggatttcacatttgcttgcagtgaatgcgtaatcctggatctcttgttcgcaaatcgacagcctgaagccctctggaagcccaagactgctggaggtttttgaccagacaagccaacctttttcaaggtagctcagtggcatttctgagcaggggccaccctgacttcaccttggcccaccatgagggtcttcctgctttgtgcctacatactgctgctgatggtttcccagttgagggcagtcagctttcctgaagatgatgaaccccttaatactgtcgactatcactattcaaggcaatatccggtttttagaggacgcccttcaggcaatgaatcgcagcacaggctggactttcagctgatgttgaaaattcgagacacactttatattgctggcagggatcaagtttatacagtaaacttaaatgaaatgcccaaaacagaagtaatacccaacaagaaactgacatggcgatcaagacaacaggatcgagaaaactgtgctatgaaaggcaagcataaagatgaatgccacaactttatcaaagtatttgttccaagaaacgatgagatggtttttgtttgtggtaccaatgcattcaatcccatgtgtagatactacaggttgagtaccttagaatatgatggggaagaaattagtggcctggcaagatgcccatttgatgccagacaaaccaatgttgccctctttgctgatgggaagctgtattctgccacagtggctgacttcttggccagcgatgccgttatttatcgaagcatgggtgatggatctgcccttcgcacaataaaatatgattccaaatggataaaagagccacactttcttcatgccatagaatatggaaactatgtctatttcttctttcgagaaatcgctgtcgaacataataatttaggcaaggctgtgtattcccgcgtggcccgcatatgtaaaaacgacatgggtggttcccagcgggtcctggagaaacactggacttcatttctaaaggctcggctgaactgttctgtccctggagattcgtttttctactttgatgttctgcagtctattacagacataatacaaatcaatggcatccccactgtggtcggggtgtttaccacgcagctcaatagcatccctggttctgctgtctgtgcatttagcatggatgacattgaaaaagtattcaaaggacggtttaaggaacagaaaactccagattctgtttggacagcagttcccgaagacaaagtgccaaagccaaggcctggctgttgtgcaaaacacggccttgccgaagcttataaaacctccatcgatttcccggatgaaactctgtcattcatcaaatctcatcccctgatggactctgccgttccacccattgccgatgagccctggttcacaaagactcgggtcaggtacagactgacggccatctcagtggaccattcagccggaccctaccagaactacacagtcatctttgttggctctgaagctggcatggtacttaaagttctggcaaagaccagtcctttctctttgaacgacagcgtattactggaagagattgaagcctacaaccatgcaaagtgcagtgctgagaatgaggaagacaaaaaggtcatctcattacagttggataaagatcaccacgctttatatgtggcgttctctagctgcattatccgcatccccctcagtcgctgtgagcgttatggatcatgtaaaaagtcttgtattgcatctcgtgacccgtattgtggctggttaagccagggatcctgtggtagagtgaccccagggatgctgctgttaaccgaagacttctttgctttccataaccacagtgctgaaggatatgaacaagacacagaattcggcaacacagctcatctaggggactgccatggtgtacgatgggaagtccagtctggagagtccaaccagatggtccacatgaatgtcctcatcacctgtgtctttgctgcttttgttttgggggcattcattgcaggtgtggcagtatactgctatcgagacatgtttgttcggaaaaacagaaagatccataaagatgcagagtccgcccagtcatgcacagactccagtggaagttttgccaaactgaatggtctctttgacagccctgtcaaggaataccaacagaatattgattctcctaaactgtatagtaacctgctaaccagtcggaaagagctaccacccaatggagatactaaatccatggtaatggaccatcgagggcaacctccagagttggctgctcttcctactcctgagtctacacccgtgcttcaccagaagaccctgcaggccatgaagagccactcagaaaaggcccatggccatggagcttcaaggaaagaaacccctcagttttttccgtctagtccgccacctcattccccattaagtcatgggcatatccccagtgccattgttcttccaaatgctacccatgactacaacacgtctttctcaaactccaatgctcacaaagctgaaaagaagcttcaaaacattgatcaccctctcacaaagtcatccagtaagagagatcaccggcgttctgttgattccagaaataccctcaatgatctcctgaagcatctgaatgacccaaatagtaaccccaaagccatcatgggagacatccagatggcacaccagaacttaatgctggatcccatgggatcgatgtctgaggtcccacctaaagtccctaaccgggaggcatcgctatactcccctccttcaactctccccagaaatagcccaaccaagcgagtggatgtccccaccactcctggagtcccaatgacttctctggaaagacaaagaggttatcacaaaaattcctcccagaggcactctatatctgctatgcctaaaaacttaaactcaccaaatggtgttttgttatccagacagcctagtatgaaccgtggaggatatatgcccacccccactggggcgaaggtggactatattcagggaacaccagtgagtgttcatctgcagccttccctctccagacagagcagctacaccagtaatggcactcttcctaggacgggactaaagaggacgccgtccttaaaacctgacgtgccaccaaagccttcctttgttcctcaaaccccatctgtcagaccactgaacaaatacacatactaggcctcaagtgtgctattcccatgtggctttatcctgtccgtgttgttgagaggatgatgttgtaagggtaccttaaaacaagagactcgcttgtattttaagagaaccaagtggccaaagaaactctttctaactttggcaacatcagaacttgccacatgtagctactgcagcaaggcttctgtgtacttgcctgaaaacaaaggaaggtgctggtcattccatttcttttgtttgaagctaaagagatgtgtagctcacaggggctaccttaccagtataaagagctgataacagtactcagaagaatctgtgaacaaatacttgaaaatgggttcaatgtagactgccattatgtgtggtcttcccattaaatgtgaacattttaatatgtatgcattcaccttgcctcttgcacaaatgtcaaaaaaaagatggtaatatctcaaagaaatgaacttgtagattaccaagcagtttgctaaaaattcaatctttgacccaagctgtagcatttttttttcatgtgtggcatctttttcatgccaccaacaaacttgttgtgtgtgtgcgtgtgtgtgtgtgtgtgtgtgtgtgtgtgtgtgttctgtacccactaggatttgtttaggtgcccattgcatctttttgtgctatggagttgtttacattaagcatgaccgaacgagagacaatactatttcccacaggagtccattgggttcagctttgaaagaggaatagaatcgaggctcctttgaccatcaaaatgatgaactttacttatgtggtacccaatgccagaatgtaagagttgcaagtgattttgtgctgctattcattaaaacttgtattccagtcttgccagcttaaggagatcaagatattaagaggtatccttgatttattttccagtattcagtagtaaaattttcctgtccactgtgaatcaaagcctgagtcactctatttaaccttggacacactaataaggttttattttgattgtgttcgtttccccccccccaatagtaaaatttctcctcctttaactcctcctaccccccaaggtaagaaacaaaaaacaaacaaacaaacaaaaatagaagacaaaagaaagacatatgaaaggaattgtaattggcttaacagaaacagtctgtaaaaacctaacagtggtgcaatcatgttgtctgtgttgtgttatgtgagaattttctcctaagtcatgcaggtaatgacaatatactgtaaataccacatgtgagtttacctgaatctgtgcattttgtgccttattcatgagaatgatagaagtactaaaatctgtcaagtgttttcagtatagcacattatttactgagtgccagttgtaaatgtttttcaaccagcacctaaaaagactcttttcaaaaaatcacagaaacaacctaggacaattatttgttacataatccgacctcatagcagcattacattctttgccgtgataaacattccactcctgctttcctaaggatgaaacagtgataatgtgaactcaaatgaggtttcctgggtaatgtgacacctgcagaaactatagagcgtcatttatacgtagtttggcagaaaccacttacggctgatgatgcgcaaccctgctgactgtttcagttaatatgctgcacaccacacacttgtttagtgaaccaaatctagaaagtaccaaggcagaggtatgctcctgctgtaatcaggcaaatgagttcaactggatttcttttgacaatactgttggtacctattacttgggggaggacatgttgcagaagaccagatcatttttatacagaatgtgaaatactgatacagttattcttttttttaaagaacattgttttataaagaacgtgatttccagtgatctctggaagcgctaaagctaaaatttctgttcttgaaacacttcagctttgcaactaaaatattacagattaataataaattaaaccaaccaatgataaacactactcagtccaccaacaacaaacgtgtttgaattcaccttaccaatattaatcccagcgtgtgtaaaacagaacagtaactctatgtgaccccagataacattttgtaacattgtgcttccttgtagtttgtaatgtgagttcaatcagtatttatgttgaaatttctaacattaaatctagtctctatcctgttaatttaatttttaaatgctttatccatttgtgcaaaggtaaacgcagattgtatcttttttaatggtacggcataaaaagtaaccctcaagtgaagtgtctctatactgttttatagagtactttaacatgaatagataccttgtaaacttgtattgtggatgtgtaaataatatgtactttgggtttttaacaccgcatgtaaagtcaaaataaaatatacaaatcatt

SEQ ID NO: 76797 - DNA, 6028 bp, Artificial Sequence
  derived and/or modified sequence
gtaaccggtggaagtgtcaaagaggaaggagtggagggctgctgaggtgacagggtgtggtctgtgagggagcggacgaacccggagaagagagcagagagacccaccaggactaggaggcagcggggagcgtgcctgcgtcgctcggagcggtgacagcaaggagcgcagcgcggaggccgggcggcaaggggagtttccagtcctcgataagtggagtccctgctctgcgctgcgccagcgccttccgcctgggcccgcggtgctagacacctgccgagtccgaagcgggagtcaggctgagccttcggcccccaagatctccaacctgagcatatgccagttgacatgggaacactgaggccagcaatttaaggatttcacatttgcttgcagtgaatgcgtaatcctggatctcttgttcgcaaatcgacagcctgaagccctctggaagcccaagactgctggaggtttttgaccagacaagccaacctttttcaaggtagctcagtggcatttctgagcaggggccaccctgacttcaccttggcccaccatgagggtcttcctgctttgtgcctacatactgctgctgatggtttcccagttgagggcagtcagctttcctgaagatgatgaaccccttaatactgtcgactatcactattcaaggcaatatccggtttttagaggacgcccttcaggcaatgaatcgcagcacaggctggactttcagctgatgttgaaaattcgagacacactttatattgctggcagggatcaagtttatacagtaaacttaaatgaaatgcccaaaacagaagtaatacccaacaagaaactgacatggcgatcaagacaacaggatcgagaaaactgtgctatgaaaggcaagcataaagatgaatgccacaactttatcaaagtatttgttccaagaaacgatgagatggtttttgtttgtggtaccaatgcattcaatcccatgtgtagatactacaggttgagtaccttagaatatgatggggaagaaattagtggcctggcaagatgcccatttgatgccagacaaaccaatgttgccctctttgctgatgggaagctgtattctgccacagtggctgacttcttggccagcgatgccgttatttatcgaagcatgggtgatggatctgcccttcgcacaataaaatatgattccaaatggataaaagagccacactttcttcatgccatagaatatggaaactatgtctatttcttctttcgagaaatcgctgtcgaacataataatttaggcaaggctgtgtattcccgcgtggcccgcatatgtaaaaacgacatgggtggttcccagcgggtcctggagaaacactggacttcatttctaaaggctcggctgaactgttctgtccctggagattcgtttttctactttgatgttctgcagtctattacagacataatacaaatcaatggcatccccactgtggtcggggtgtttaccacgcagctcaatagcatccctggttctgctgtctgtgcatttagcatggatgacattgaaaaagtattcaaaggacggtttaaggaacagaaaactccagattctgtttggacagcagttcccgaagacaaagtgccaaagccaaggcctggctgttgtgcaaaacacggccttgccgaagcttataaaacctccatcgatttcccggatgaaactctgtcattcatcaaatctcatcccctgatggactctgccgttccacccattgccgatgagccctggttcacaaagactcgggtcaggtacagactgacggccatctcagtggaccattcagccggaccctaccagaactacacagtcatctttgttggctctgaagctggcatggtacttaaagttctggcaaagaccagtcctttctctttgaacgacagcgtattactggaagagattgaagcctacaaccatgcaaagtgcagtgctgagaatgaggaagacaaaaaggtcatctcattacagttggataaagatcaccacgctttatatgtggcgttctctagctgcattatccgcatccccctcagtcgctgtgagcgttatggatcatgtaaaaagtcttgtattgcatctcgtgacccgtattgtggctggttaagccagggatcctgtggtagagtgaccccagggatgctgctgttaaccgaagacttctttgctttccataaccacagtgctgaaggatatgaacaagacacagaattcggcaacacagctcatctaggggactgccatggtgtacgatgggaagtccagtctggagagtccaaccagatggtccacatgaatgtcctcatcacctgtgtctttgctgcttttgttttgggggcattcattgcaggtgtggcagtatactgctatcgagacatgtttgttcggaaaaacagaaagatccataaagatgcagagtccgcccagtcatgcacagactccagtggaagttttgccaaactgaatggtctctttgacagccctgtcaaggaataccaacagaatattgattctcctaaactgtatagtaacctgctaaccagtcggaaagagctaccacccaatggagatactaaatccatggtaatggaccatcgagggcaacctccagagttggctgctcttcctactcctgagtctacacccgtgcttcaccagaagaccctgcaggccatgaagagccactcagaaaaggcccatggccatggagcttcaaggaaagaaacccctcagttttttccgtctagtccgccacctcattccccattaagtcatgggcatatccccagtgccattgttcttccaaatgctacccatgactacaacacgtctttctcaaactccaatgctcacaaagctgaaaagaagcttcaaaacattgatcaccctctcacaaagtcatccagtaagagagatcaccggcgttctgttgattccagaaataccctcaatgatctcctgaagcatctgaatgacccaaatagtaaccccaaagccatcatgggagacatccagatggcacaccagaacttaatgctggatcccatgggatcgatgtctgaggtcccacctaaagtccctaaccgggaggcatcgctatactcccctccttcaactctccccagaaatagcccaaccaagcgagtggatgtccccaccactcctggagtcccaatgacttctctggaaagacaaagaggttatcacaaaaattcctcccagaggcactctatatctgctatgcctaaaaacttaaactcaccaaatggtgttttgttatccagacagcctagtatgaaccgtggaggatatatgcccacccccactggggcgaaggtggactatattcagggaacaccagtgagtgttcatctgcagccttccctctccagacagagcagctacaccagtaatggcactcttcctaggacgggactaaagaggacgccgtccttaaaacctgacgtgccaccaaagccttcctttgttcctcaaaccccatctgtcagaccactgaacaaatacacatactaggcctcaagtgtgctattcccatgtggctttatcctgtccgtgttgttgagaggatgatgttgtaagggtaccttaaaacaagagactcgcttgtattttaagagaaccaagtggccaaagaaactctttctaactttggcaacatcagaacttgccacatgtagctactgcagcaaggcttctgtgtacttgcctgaaaacaaaggaaggtgctggtcattccatttcttttgtttgaagctaaagagatgtgtagctcacaggggctaccttaccagtataaagagctgataacagtactcagaagaatctgtgaacaaatacttgaaaatgggttcaatgtagactgccattatgtgtggtcttcccattaaatgtgaacattttaatatgtatgcattcaccttgcctcttgcacaaatgtcaaaaaaaagatggtaatatctcaaagaaatgaacttgtagattaccaagcagtttgctaaaaattcaatctttgacccaagctgtagcatttttttttcatgtgtggcatctttttcatgccaccaacaaacttgttgtgtgtgtgcgtgtgtgtgtgtgtgtgtgtgtgtgtgtgtgtgttctgtacccactaggatttgtttaggtgcccattgcatctttttgtgctatggagttgtttacattaagcatgaccgaacgagagacaatactatttcccacaggagtccattgggttcagctttgaaagaggaatagaatcgaggctcctttgaccatcaaaatgatgaactttacttatgtggtacccaatgccagaatgtaagagttgcaagtgattttgtgctgctattcattaaaacttgtattccagtcttgccagcttaaggagatcaagatattaagaggtatccttgatttattttccagtattcagtagtaaaattttcctgtccactgtgaatcaaagcctgagtcactctatttaaccttggacacactaataaggttttattttgattgtgttcgtttccccccccccaatagtaaaatttctcctcctttaactcctcctaccccccaaggtaagaaacaaaaaacaaacaaacaaacaaaaatagaagacaaaagaaagacatatgaaaggaattgtaattggcttaacagaaacagtctgtaaaaacctaacagtggtgcaatcatgttgtctgtgttgtgttatgtgagaattttctcctaagtcatgcaggtaatgacaatatactgtaaataccacatgtgagtttacctgaatctgtgcattttgtgccttattcatgagaatgatagaagtactaaaatctgtcaagtgttttcagtatagcacattatttactgagtgccagttgtaaatgtttttcaaccagcacctaaaaagactcttttcaaaaaatcacagaaacaacctaggacaattatttgttacataatccgacctcatagcagcattacattctttgccgtgataaacattccactcctgctttcctaaggatgaaacagtgataatgtgaactcaaatgaggtttcctgggtaatgtgacacctgcagaaactatagagcgtcatttatacgtagtttggcagaaaccacttacggctgatgatgcgcaaccctgctgactgtttcagttaatatgctgcacaccacacacttgtttagtgaaccaaatctagaaagtaccaaggcagaggtatgctcctgctgtaatcaggcaaatgagttcaactggatttcttttgacaatactgttggtacctattacttgggggaggacatgttgcagaagaccagatcatttttatacagaatgtgaaatactgatacagttattcttttttttaaagaacattgttttataaagaacgtgatttccagtgatctctggaagcgctaaagctaaaatttctgttcttgaaacacttcagctttgcaactaaaatattacagattaataataaattaaaccaaccaatgataaacactactcagtccaccaacaacaaacgtgtttgaattcaccttaccaatattaatcccagcgtgtgtaaaacagaacagtaactctatgtgaccccagataacattttgtaacattgtgcttccttgtagtttgtaatgtgagttcaatcagtatttatgttgaaatttctaacattaaatctagtctctatcctgttaatttaatttttaaatgctttatccatttgtgcaaaggtaaacgcagattgtatcttttttaatggtacggcataaaaagtaaccctcaagtgaagtgtctctatactgttttatagagtactttaacatgaatagataccttgtaaacttgtattgtggatgtgtaaataatatgtactttgggtttttaacaccgcatgtaaagtcaaaataaaatatacaaatcatta

SEQ ID NO: 76798 - protein, 84 aa, Artificial Sequence
  derived and/or modified sequence
MELGELLYNKSEYIETASGNKVSRQSVLCGSQNIVLNGKNFVISVFLSPYIRCHSACRDRKRSDESVRLSVNNREWWGLVNWRM

SEQ ID NO: 76799 - DNA, 255 bp, Artificial Sequence
  derived and/or modified sequence
atggaactcggagagctcctgtacaataaatctgagtatatagagactgcttccggtaacaaggtttcacgtcagtctgtgctgtgtgggtcacagaacattgtcctgaacggaaaaaatttcgtaattagcgtctttctctccccctacatacgatgccattcagcctgccgggaccggaaaaggtcagatgagtcagttcgcctgtccgttaacaatcgtgagtggtgggggctcgttaattggaggatgtag

SEQ ID NO: 76800 - DNA, 255 bp, Artificial Sequence
  derived and/or modified sequence
atggagctgggggagctgctgtacaacaagtctgagtacatcgagacagccagcggcaacaaggtgtcccggcagagcgtgctgtgtggcagccagaacatcgtgctgaatggcaagaactttgtgatcagcgtcttcctgagcccctacatccgctgccacagcgcctgccgggacaggaagagaagtgatgagagcgtgcggctgtctgtgaacaaccgggagtggtggggcctggtgaactggaggatgtag

SEQ ID NO: 76801 - DNA, 255 bp, Artificial Sequence
  derived and/or modified sequence
atggagctgggcgagctgctgtacaacaagagcgagtacatcgagaccgccagcggcaacaaggtttcgaggcagtcagttctgtgcggctcacagaatatagtgctgaatggcaagaacttcgtcataagcgtcttcctgagcccctacattcgatgccattctgcctgccgggacaggaagagaagtgatgaatcggttagactgagtgtgaataaccgggagtggtggggcctcgttaactggagaatgtag

SEQ ID NO: 76802 - DNA, 255 bp, Artificial Sequence
  derived and/or modified sequence
atggagctgggcgaacttctctacaataagtccgagtacatagaaacggctagtggtaacaaagtttctcgacagagcgtgttgtgtggtagccagaatattgttttgaatggaaaaaacttcgttatttctgtgttcctgtcaccctacattcggtgtcactctgcctgtagggacagaaagcgctctgacgagagcgtgcgcctgagcgtcaataaccgggagtggtgggggctcgttaattggcgtatgtag

SEQ ID NO: 76803 - DNA, 255 bp, Artificial Sequence
  derived and/or modified sequence
atggagctgggcgagctgctgtacaacaagagcgagtacatcgagaccgccagcggcaacaaggtgagcagacagagcgtgctgtgcggcagccagaacatcgtgctgaacggcaagaacttcgtgatcagcgtgttcctgagcccctacatcagatgccacagcgcctgcagagacagaaagagaagcgacgagagcgtgagactgagcgtgaacaacagagagtggtggggcctggtgaactggagaatgtag

SEQ ID NO: 76804 - DNA, 523 bp, Artificial Sequence
  derived and/or modified sequence
aggaggcggcggccatggagttgggcgagctgctctacaacaagtctgagtacatcgagacggcatctgggaacaaagtcagtcgccagtcagtgttgtgtggaagccagaacatcgttctcaatggcaagaactttgtcatttctgttttcctgagcccatatatcagatgtcacagtgcctgcagggatagaaagagatcagatgagtcagtaagactgagtgtgaacaatagagagtggtggggcctggtgaattggagaatgtgaccaatctaagcccaagctggttgttactgtgtgggaatacaggcccacgtggcaacaatcagctttccagagcgtctgattctttttcaaaagcaactggaaatctcactttttaaaatgcaagatgttccactactcaaatagtaatgtttaattttaaatgatttgttaaaatgccacgtgtccttcctgtaggagatagctaaaaaaaattaaaagaaataaataataaaaatgctgcatgagccaaacaa

SEQ ID NO: 76805 - protein, 331 aa, Artificial Sequence
  derived and/or modified sequence
MENPSPAAALGKALCALLLATLGAAGQPLGGESICSARALAKYSITFTGKWSQTAFPKQYPLFRPPAQWSSLLGAAHSSDYSMWRKNQYVSNGLRDFAERGEAWALMKEIEAAGEALQSVHAVFSAPAVPSGTGQTSAELEVQRRHSLVSFVVRIVPSPDWFVGVDSLDLCDGDRWREQAALDLYPYDAGTDSGFTFSSPNFATIPQDTVTEITSSSPSHPANSFYYPRLKALPPIARVTLVRLRQSPRAFIPPAPVLPSRDNEIVDSASVPETPLDCEVSLWSSWGLCGGHCGRLGTKSRTRYVRVQPANNGSPCPELEEEAECVPDNCV

SEQ ID NO: 76806 - protein, 61 aa, Artificial Sequence
  derived and/or modified sequence
MENPSPAAALGKALCALLLATLGAAGQPLGGESICSARALAKYSITFTGKWSQTAFPKQYP

SEQ ID NO: 76807 - protein, 108 aa, Artificial Sequence
  derived and/or modified sequence
MENPSPAAALGKALCALLLATLGAAGQPLGGESICSARALAKYSITFTGKWSQTAFPKQYPLFRPPAQWSSLLGAAHSSDYSMWRKNQYVSNGLRDFAERGEAWALMK

SEQ ID NO: 76808 - protein, 17 aa, Artificial Sequence
  derived and/or modified sequence
MENPSPAAALGKALCAL

SEQ ID NO: 76809 - protein, 16 aa, Artificial Sequence
  derived and/or modified sequence
MENPSPAAALGKALCA

SEQ ID NO: 76810 - protein, 24 aa, Artificial Sequence
  derived and/or modified sequence
MENPSPAAALGKALCALLLATLGA

SEQ ID NO: 76811 - protein, 64 aa, Artificial Sequence
  derived and/or modified sequence
MENPSPAAALGKALCALLLATLGAAGQPLGGESICSARALAKYSITFTGKWSQTAFPKQYPLFR

SEQ ID NO: 76812 - DNA, 996 bp, Artificial Sequence
  derived and/or modified sequence
atggagaaccccagccccgccgccgccctgggcaaggccctgtgcgccctgctgctggccaccctgggcgccgccggccagcccctgggcggcgagagcatctgcagcgccagagccctggccaagtacagcatcaccttcaccggcaagtggagccagaccgccttccccaagcagtaccccctgttcagaccccccgcccagtggagcagcctgctgggcgccgcccacagcagcgactacagcatgtggagaaagaaccagtacgtgagcaacggcctgagagacttcgccgagagaggcgaggcctgggccctgatgaaggagatcgaggccgccggcgaggccctgcagagcgtgcacgccgtgttcagcgcccccgccgtgcccagcggcaccggccagaccagcgccgagctggaggtgcagagaagacacagcctggtgagcttcgtggtgagaatcgtgcccagccccgactggttcgtgggcgtggacagcctggacctgtgcgacggcgacagatggagagagcaggccgccctggacctgtacccctacgacgccggcaccgacagcggcttcaccttcagcagccccaacttcgccaccatcccccaggacaccgtgaccgagatcaccagcagcagccccagccaccccgccaacagcttctactaccccagactgaaggccctgccccccatcgccagagtgaccctggtgagactgagacagagccccagagccttcatcccccccgcccccgtgctgcccagcagagacaacgagatcgtggacagcgccagcgtgcccgagacccccctggactgcgaggtgagcctgtggagcagctggggcctgtgcggcggccactgcggcagactgggcaccaagagcagaaccagatacgtgagagtgcagcccgccaacaacggcagcccctgccccgagctggaggaggaggccgagtgcgtgcccgacaactgcgtgtag

SEQ ID NO: 76813 - DNA, 186 bp, Artificial Sequence
  derived and/or modified sequence
atggagaaccccagccccgccgccgccctgggcaaggccctgtgcgccctgctgctggccaccctgggcgccgccggccagcccctgggcggcgagagcatctgcagcgccagagccctggccaagtacagcatcaccttcaccggcaagtggagccagaccgccttccccaagcagtacccctag

SEQ ID NO: 76814 - DNA, 327 bp, Artificial Sequence
  derived and/or modified sequence
atggagaaccccagccccgccgccgccctgggcaaggccctgtgcgccctgctgctggccaccctgggcgccgccggccagcccctgggcggcgagagcatctgcagcgccagagccctggccaagtacagcatcaccttcaccggcaagtggagccagaccgccttccccaagcagtaccccctgttcagaccccccgcccagtggagcagcctgctgggcgccgcccacagcagcgactacagcatgtggagaaagaaccagtacgtgagcaacggcctgagagacttcgccgagagaggcgaggcctgggccctgatgaagtag

SEQ ID NO: 76815 - DNA, 51 bp, Artificial Sequence
  derived and/or modified sequence
atggagaaccccagccccgccgccgccctgggcaaggccctgtgcgcctag

SEQ ID NO: 76816 - DNA, 195 bp, Artificial Sequence
  derived and/or modified sequence
atggagaaccccagccccgccgccgccctgggcaaggccctgtgcgccctgctgctggccaccctgggcgccgccggccagcccctgggcggcgagagcatctgcagcgccagagccctggccaagtacagcatcaccttcaccggcaagtggagccagaccgccttccccaagcagtaccccctgttcagatag

SEQ ID NO: 76817 - DNA, 996 bp, Artificial Sequence
  derived and/or modified sequence
atggagaacccgtcgcccgccgctgccctcggtaaggccttatgcgccttactcctggccacccttggcgccgctgggcagcccctgggaggggagagcatctgtagtgctagagctctggcaaagtactctatcaccttcacggggaagtggtcgcaaaccgccttccccaaacagtaccccctcttccggccgcccgcacagtggtcatcgctgctgggtgccgctcacagttctgattattccatgtggcgtaaaaaccagtatgtgagtaatggcttgagagacttcgcagaaaggggagaggcatgggccttgatgaaggaaatcgaggccgcaggggaggctctgcagtctgtgcatgcggtcttttcagcacccgccgtgcccagcgggaccggtcagacatcagccgagttagaggttcagaggcgtcattctcttgtctccttcgtcgtgcggatcgtccctagccccgattggttcgtcggcgtggactcgttggacttgtgtgatggagatagatggcgggagcaagcggcccttgatctgtacccttatgacgctggaactgattccggtttcactttctctagtccaaattttgccactatcccccaggacacggttacagagattacaagctcttctccttcccaccctgcgaacagcttttactatccgcgcctgaaagcgctgccaccaattgctcgtgtgacactggtgcggctccgacagagcccacgggcgttcatccctcccgctccagtgctccctagtcgagacaacgaaattgtcgactcagcaagtgttcccgaaacaccactcgactgcgaggttagcctctggtccagctggggcttatgcggtggacactgtggacgcctcggaactaaaagtcgcactaggtacgtgcgcgtgcagcctgcgaacaatgggagtccatgcccagagttagaggaggaagccgaatgcgtacctgacaactgcgtctag

SEQ ID NO: 76818 - DNA, 996 bp, Artificial Sequence
  derived and/or modified sequence
atggagaacccatccccagcggctgctctaggaaaggccctctgcgccttgcttcttgccactttaggtgctgccggtcaaccccttggaggcgagagtatttgctcagctcgagccttggctaaatattccatcacatttacggggaaatggagccagacggccttcccgaagcagtatcccttgttccgtccccccgcccagtggagcagcctccttggggccgcccatagctcagattatagcatgtggagaaagaatcagtatgtgagcaacgggttgagagacttcgctgagcgaggcgaggcatgggctctgatgaaagagatcgaagccgccggcgaagcacttcagtcggtacacgcggtcttttcagcccctgccgttccttctgggaccggccaaacgagtgccgaactcgaggtgcagaggcgccactctttggtttcgttcgtcgtgcgcatcgtgcccagcccagattggttcgttggggtcgattcgttggacctttgtgatggtgacaggtggagagagcaggcggccctcgacctctacccgtacgacgccgggacagatagtggcttcacattctcttctcctaactttgccaccattccccaagacaccgtaactgagattacctcttctagcccttcacacccagctaatagcttttactatcctagactgaaggctttgcctcctatcgccagggtgacactagtgcgccttcgccagtcaccaagagccttcattcctccggcccccgttctgcctagccgggacaatgagatcgtcgacagtgccagcgttcccgagacgcctcttgactgtgaggtgagcctttggagctcttggggcctgtgtggtggacactgcggtcgcctggggaccaaaagtcgtaccagatatgtgcgggtgcaacccgcaaataacggctcgccttgccctgagctggaggaagaagctgagtgtgtacctgataactgtgtctag

SEQ ID NO: 76819 - DNA, 186 bp, Artificial Sequence
  derived and/or modified sequence
atggaaaaccccagtcccgctgctgctctcggcaaggccctctgcgccctcttgctggctactctgggagctgccggacaaccactgggtggagagagtatctgctccgcccgggcattggccaagtactctatcacctttaccgggaaatggtcacaaacagccttcccaaaacagtatccatag

SEQ ID NO: 76820 - DNA, 327 bp, Artificial Sequence
  derived and/or modified sequence
atggagaacccctccccggctgccgcactggggaaagcgttgtgcgccctcctgctggcaacccttggcgctgcgggccagccccttggtggggagagcatctgctccgcgagggctcttgccaagtatagtattacttttaccggcaaatggtcccagactgccttccctaaacagtatcccctgtttaggccacccgcacagtggagctctctgctcggagcggctcacagttctgactacagcatgtggaggaagaatcaatatgtgagtaatggcttgagggacttcgccgagcggggagaggcatgggcactgatgaagtag

SEQ ID NO: 76821 - DNA, 51 bp, Artificial Sequence
  derived and/or modified sequence
atggaaaacccatcacctgctgctgcgctgggaaaggctctctgtgcatag

SEQ ID NO: 76822 - DNA, 195 bp, Artificial Sequence
  derived and/or modified sequence
atggaaaatccgtcacctgcagccgccctgggaaaagccctctgcgccctgctgctcgcgacacttggagccgccgggcagcccctgggcggggagagtatatgtagtgcaagagctctggccaagtactctataacatttacaggaaaatggtcccagactgcttttcccaagcaatatccgcttttccgctag

SEQ ID NO: 76823 - DNA, 996 bp, Artificial Sequence
  derived and/or modified sequence
atggagaaccccagccctgctgctgccctgggcaaggccctgtgtgccctgctgctggccaccctgggcgctgctggccagcccctgggcggggagagcatctgcagcgcccgggccctggccaagtacagcatcaccttcaccgggaagtggagccagacagccttccccaagcagtaccccctcttccggcccccagcccagtggagcagcctgctgggcgccgcccacagcagtgactacagcatgtggaggaagaaccagtatgtgtccaatggcctgcgggactttgctgagcggggggaggcctgggccctgatgaaggagattgaggccgccggggaggccctgcagagcgtgcatgctgtgttttctgccccagctgtgcccagcggcaccggccagaccagcgctgagctggaggtgcagaggaggcacagcctggtgtcctttgtggtgagaattgtgcccagcccagactggtttgtgggcgtggacagcctggacctgtgtgatggagaccgctggagggagcaggccgccctggacctgtacccctatgatgctggaacagattctggcttcaccttcagcagccccaactttgccaccatcccccaggacacagtgacagagatcaccagcagcagccccagccacccagccaacagcttctactacccccggctgaaggccctgccccccatcgcccgggtgaccctggtgcggctgcggcagagcccccgggccttcatccccccagcccctgtgctgcccagccgggacaatgaaattgtggacagcgcctctgtgcctgagacccccctggactgtgaggtgtccctgtggagctcctggggcctgtgtggcggccactgcggccgcctgggcaccaagagcaggacccgctacgtgcgggtgcagcctgccaacaacggcagcccctgcccagagctggaggaggaggccgagtgtgtgcctgacaactgtgtgtag

SEQ ID NO: 76824 - DNA, 186 bp, Artificial Sequence
  derived and/or modified sequence
atggagaaccccagccctgctgctgccctgggcaaggccctgtgtgccctgctgctggccaccctgggcgctgctggccagcccctgggcggggagagcatctgcagcgcccgggccctggccaagtacagcatcaccttcaccgggaagtggagccagacagccttccccaagcagtacccctag

SEQ ID NO: 76825 - DNA, 327 bp, Artificial Sequence
  derived and/or modified sequence
atggagaaccccagccctgctgctgccctgggcaaggccctgtgtgccctgctgctggccaccctgggcgctgctggccagcccctgggcggggagagcatctgcagcgcccgggccctggccaagtacagcatcaccttcaccgggaagtggagccagacagccttccccaagcagtaccccctcttccggcccccagcccagtggagcagcctgctgggcgccgcccacagcagtgactacagcatgtggaggaagaaccagtatgtgtccaatggcctgcgggactttgctgagcggggggaggcctgggccctgatgaagtag

SEQ ID NO: 76826 - DNA, 51 bp, Artificial Sequence
  derived and/or modified sequence
atggagaaccccagccctgctgctgccctgggcaaggccctgtgtgcctag

SEQ ID NO: 76827 - DNA, 195 bp, Artificial Sequence
  derived and/or modified sequence
atggagaaccccagccctgctgctgccctgggcaaggccctgtgtgccctgctgctggccaccctgggcgctgctggccagcccctgggcggggagagcatctgcagcgcccgggccctggccaagtacagcatcaccttcaccgggaagtggagccagacagccttccccaagcagtaccccctcttcagatag

SEQ ID NO: 76828 - DNA, 996 bp, Artificial Sequence
  derived and/or modified sequence
atggagaaccccagccccgccgccgccctgggcaaggccctgtgcgccctgttgctcgccactctgggggctgctgggcagccactcgggggtgaatccatatgtagtgcacgcgccctggctaaatatagtattacatttactggcaaatggtctcagacggccttccccaaacagtaccctctgttcagaccacccgcccagtggagttctctcctcggtgctgcccacagttccgattatagcatgtggaggaagaaccagtacgtcagcaacggcctgcgcgactttgctgagcgcggagaggcttgggccctgatgaaggagatcgaagcagccggggaggccttacaaagcgtacacgcagttttctcagcccctgccgttccatctggaaccggacagacttccgcagaattggaggtccagcgtcgccacagcctggtttctttcgttgtcagaatcgtaccctcgcccgattggttcgttggtgttgattccctcgacctgtgcgatggagaccggtggagagagcaggccgctctggacttatatccatatgatgcaggaaccgattccggcttcacgttctcatcccccaactttgccaccattccccaggacaccgtcacggaaatcacttcttcttccccttcgcaccctgcaaactcattctactatcctcgactcaaagcccttccccccattgcccgagttactctggttaggttgagacagtcccctcgggccttcataccacctgcacctgtcctcccgtcccgcgacaacgagatcgtcgattccgcttccgtgcccgagactcccttggactgcgaggtgtctttgtggtcttcctggggcctgtgcggggggcattgcggtcggcttggcaccaagtcacgtactagatacgtgcgggtccagcccgcaaacaacgggtctccatgcccagaacttgaggaagaggccgagtgcgtaccagataactgtgtttag

SEQ ID NO: 76829 - DNA, 996 bp, Artificial Sequence
  derived and/or modified sequence
atggagaaccccagccccgccgccgccctgggcaaggccctgtgcgctctgctactcgccacattgggagctgccggacagcccctcggtggggaatcaatttgcagtgctcgtgccttagcaaagtacagtataacgttcacaggaaagtggtcccagacggcatttccaaagcagtaccccctgttcaggccacccgcccagtggtcatccctgctaggcgccgcccactcctctgattactcgatgtggagaaagaaccagtacgtttccaatgggctgcgagattttgccgagcggggtgaagcctgggcccttatgaaagagattgaagctgccggggaagccttgcagagcgtgcatgccgtgttttcagcccccgccgttccttccggcaccggccagacatctgcagaattggaggtgcagcggaggcatagtttggtgagtttcgtcgtccgcattgtgccctcccctgactggttcgtcggcgtcgacagcctagacctttgcgatggggaccgatggagggagcaggccgctctggacctgtacccctatgatgcaggaacagattctgggtttacttttagtagtccaaattttgccaccattccccaggacacggtcactgaaattacctcctccagcccctcccatcctgctaactctttttattaccctcgcttgaaggccctgccacctatcgcaagagtaacattggtgcgcctacgacaatcacccagggcattcataccacccgctcccgtgctgccaagtagagacaacgagatagtagactctgctagtgtgccagagaccccactggactgtgaggtaagcctgtggagctcatgggggctatgcggaggtcactgtggaaggttgggcacaaagtcaaggacgagatatgtccgtgtccagccggccaacaacgggagcccttgccccgagctggaagaggaagccgagtgtgtgcccgataactgtgtgtag

SEQ ID NO: 76830 - DNA, 186 bp, Artificial Sequence
  derived and/or modified sequence
atggagaaccccagccccgccgccgccctgggcaaggccctgtgcgctctccttctggcaaccctgggagccgctggtcagcccctaggcggagagtccatttgcagcgcgagggctctggccaagtacagtattacctttacaggtaaatggagccaaaccgcatttcccaaacaatatccctag

SEQ ID NO: 76831 - DNA, 327 bp, Artificial Sequence
  derived and/or modified sequence
atggagaaccccagccccgccgccgccctgggcaaggccctgtgcgctttactgctggccaccttgggcgccgcaggccagccgctggggggcgaatcaatttgcagcgcccgcgcactcgccaaatatagcataacctttacagggaagtggagccagaccgccttccccaagcagtaccccttatttagaccacctgctcagtggtcttcactgctcggggcagcacactcctctgattattcgatgtggaggaaaaaccagtacgtttcaaacggcctcagggatttcgccgaacgcggggaggcctgggcattgatgaaatag

SEQ ID NO: 76832 - DNA, 195 bp, Artificial Sequence
  derived and/or modified sequence
atggagaaccccagccccgccgccgccctgggcaaggccctgtgcgcgttacttctggcaacattgggggcagccggtcagcctcttggcggcgaaagcatatgtagcgcgagggcactggctaaatactcaatcacctttacagggaagtggtcccaaaccgccttcccaaaacagtatcctttattccgctag

SEQ ID NO: 76833 - DNA, 996 bp, Artificial Sequence
  derived and/or modified sequence
atggagaatccatcaccagctgctgctctgggaaaagccctgtgtgccttactcctggccacactgggggctgccggacagcctcttggcggagagtccatttgctctgcccgagccttagccaagtattcaatcacatttaccggaaaatggtcgcaaactgctttcccaaagcagtatcctctcttccgacctccagcacaatggagttccctgctgggcgcagcgcactccagcgactatagcatgtggcggaagaaccagtacgtttccaatggactgagagactttgccgaaaggggagaggcctgggccctgatgaaggaaattgaagctgcaggcgaggcgctgcagtccgtgcacgccgtcttttcagcccctgccgtgccttcgggaacaggacagacgagcgcagaactggaggttcaacggcgtcacagccttgtcagcttcgtggtgagaatcgttccctcgccagattggtttgttggtgtcgactccctggatttgtgtgatggagataggtggagggaacaggccgcattggacctgtacccctatgatgctggcacagattcaggctttaccttctcctcgccaaacttcgccacgattccccaagacacagtgacagagatcacaagctcttctccttctcatccagcaaattctttctattatcctcgcttaaaagcactaccacctatcgcaagagtcacactcgtgagacttaggcaaagtccccgagctttcattcccccagctcccgtcctgccatcccgagataatgagatcgtggatagcgcaagcgtccctgaaactcctttagattgcgaggtctccttgtggtcttcgtgggggctttgcggaggacactgtggccgtctgggcaccaagtcccggacccgctacgtccgagtccaaccggctaacaacggatctccatgtcccgaactagaagaggaggctgaatgtgtgcctgataactgtgtctag

SEQ ID NO: 76834 - DNA, 996 bp, Artificial Sequence
  derived and/or modified sequence
atggaaaatccatctcccgcagctgccctggggaaggcactgtgcgctcttctgcttgccacgctgggcgcagcaggccagcctctcggtggggagtcaatatgctcagctcgagctctggccaaatacagcatcaccttcaccgggaagtggagtcagaccgcctttcctaaacagtatcctctctttcgccctccagcccaatggtcatcactgttaggcgcagcccacagcagcgattactccatgtggagaaaaaatcagtacgtgtccaatggtctgcgggactttgctgagagaggtgaggcgtgggctctaatgaaagaaatagaggccgcaggagaggccctgcagagtgtgcatgctgtattctccgcacccgctgtgccatctggtaccggccagacgtccgccgaacttgaggtccagcgcaggcacagcttggtgagctttgtcgtcagaattgtgccaagtccagattggttcgtgggcgtcgattctctggacttatgcgatggggacaggtggcgggaacaagccgctctggatctgtatccctatgatgccggaacagatagcgggtttaccttctccagccctaatttcgccactatcccccaagacaccgtgactgaaatcacttcgtctagtccaagtcatccagcgaacagcttctattatcccagactgaaagccctacccccaattgcaagggttacattagtccgtctgcggcaatcacccagggccttcatccctcctgcgcctgtgctgccatctcgcgacaatgaaatcgtggacagcgcctccgttcccgagacccccttagactgtgaagtctcactctggagttcttggggactttgcgggggtcactgtggtcgtctaggcaccaaaagccggacccggtacgtccgggtgcagcctgccaacaacggatctccatgccccgagctcgaagaagaggccgagtgcgtcccagataactgcgtctag

SEQ ID NO: 76835 - DNA, 186 bp, Artificial Sequence
  derived and/or modified sequence
atggaaaaccccagtccagcagccgctctggggaaggctctctgtgccctgctgctggcaactcttggtgccgcaggccagcctctcggaggagagtcaatctgctccgcgagagccctggccaagtactcaatcacctttaccggcaaatggtcacagactgcatttcctaagcagtatccctag

SEQ ID NO: 76836 - DNA, 327 bp, Artificial Sequence
  derived and/or modified sequence
atggagaacccgagtccagccgcagcactgggcaaagccctctgtgcccttctgttggcaactctaggagcagcgggtcaaccattgggcggagagagcatttgttccgcacgggcactggcaaagtactcaatcacattcacaggaaagtggtctcagacagcatttcccaaacagtatcccttgtttcggcctccggcacagtggagcagcctcttgggggcagctcactcttctgactactcaatgtggagaaagaatcaatacgtgagcaatggcttgagggactttgctgagcgcggtgaggcctgggctctgatgaaatag

SEQ ID NO: 76837 - DNA, 51 bp, Artificial Sequence
  derived and/or modified sequence
atggagaatcccagccctgccgcagctctgggaaaggccttgtgcgcgtag

SEQ ID NO: 76838 - DNA, 195 bp, Artificial Sequence
  derived and/or modified sequence
atggagaacccgagtccagctgcggctctcggcaaagccctttgcgccctgctacttgctacactcggggcagccggtcagcctctgggaggagagtctatttgttcagccagagctctcgcaaagtatagcatcacgttcaccggcaaatggtcgcagactgcattccccaaacagtatccgctgttccggtag

SEQ ID NO: 76839 - DNA, 1869 bp, Artificial Sequence
  derived and/or modified sequence
gacagggaggggaggggagggataggacagacagacaaagaaaggggtgcggcagcactgccaggggaagagggtgatccgacccggggaaggtcgctgggcagggcgagttgggaaagcggcagcccccgccgcccccgcagccccttctcctcctttctcccacgtcctatctgcctctcgctggaggccaggccgtgcagcatcgaagacaggaggaactggagcctcattggccggcccggggcgccggcctcgggcttaaataggagctccgggctctggctgggacccgaccgctgccggccgcgctcccgctgctcctgccgggtgatggaaaaccccagcccggccgccgccctgggcaaggccctctgcgctctcctcctggccactctcggcgccgccggccagcctcttgggggagagtccatctgttccgccagagccctggccaaatacagcatcaccttcacgggcaagtggagccagacggccttccccaagcagtaccccctgttccgcccccctgcgcagtggtcttcgctgctgggggccgcgcatagctccgactacagcatgtggaggaagaaccagtacgtcagtaacgggctgcgcgactttgcggagcgcggcgaggcctgggcgctgatgaaggagatcgaggcggcgggggaggcgctgcagagcgtgcacgcggtgttttcggcgcccgccgtccccagcggcaccgggcagacgtcggcggagctggaggtgcagcgcaggcactcgctggtctcgtttgtggtgcgcatcgtgcccagccccgactggttcgtgggcgtggacagcctggacctgtgcgacggggaccgttggcgggaacaggcggcgctggacctgtacccctacgacgccgggacggacagcggcttcaccttctcctcccccaacttcgccaccatcccgcaggacacggtgaccgagataacgtcctcctctcccagccacccggccaactccttctactacccgcggctgaaggccctgcctcccatcgccagggtgacactggtgcggctgcgacagagccccagggccttcatccctcccgccccagtcctgcccagcagggacaatgagattgtagacagcgcctcagttccagaaacgccgctggactgcgaggtctccctgtggtcgtcctggggactgtgcggaggccactgtgggaggctcgggaccaagagcaggactcgctacgtccgggtccagcccgccaacaacgggagcccctgccccgagctcgaagaagaggctgagtgcgtccctgataactgcgtctaagaccagagccccgcagcccctggggccccccggagccatggggtgtcgggggctcctgtgcaggctcatgctgcaggcggccgagggcacagggggtttcgcgctgctcctgaccgcggtgaggccgcgccgaccatctctgcactgaagggccctctggtggccggcacgggcattgggaaacagcctcctcctttcccaaccttgcttcttaggggcccccgtgtcccgtctgctctcagcctcctcctcctgcaggataaagtcatccccaaggctccagctactctaaattatgtctccttataagttattgctgctccaggagattgtccttcatcgtccaggggcctggctcccacgtggttgcagatacctcagacctggtgctctaggctgtgctgagcccactctcccgagggcgcatccaagcgggggccacttgagaagtgaataaatggggcggtttcggaagcgtcagtgtttccatgttatggatctctctgcgtttgaataaagactatctctgttgctcacaaa

SEQ ID NO: 76840 - DNA, 1783 bp, Artificial Sequence
  derived and/or modified sequence
aggagcttccccagccacttccagcatgtagactgaagtcaggccacgcacagggctctccaggtcacaccctgcgcaagaaggtgtagcacgctggctctaatttcgagaaggccgtgcagcatcgaagacaggaggaactggagcctcattggccggcccggggcgccggcctcgggcttaaataggagctccgggctctggctgggacccgaccgctgccggccgcgctcccgctgctcctgccgggtgatggaaaaccccagcccggccgccgccctgggcaaggccctctgcgctctcctcctggccactctcggcgccgccggccagcctcttgggggagagtccatctgttccgccagagccctggccaaatacagcatcaccttcacgggcaagtggagccagacggccttccccaagcagtaccccctgttccgcccccctgcgcagtggtcttcgctgctgggggccgcgcatagctccgactacagcatgtggaggaagaaccagtacgtcagtaacgggctgcgcgactttgcggagcgcggcgaggcctgggcgctgatgaaggagatcgaggcggcgggggaggcgctgcagagcgtgcacgcggtgttttcggcgcccgccgtccccagcggcaccgggcagacgtcggcggagctggaggtgcagcgcaggcactcgctggtctcgtttgtggtgcgcatcgtgcccagccccgactggttcgtgggcgtggacagcctggacctgtgcgacggggaccgttggcgggaacaggcggcgctggacctgtacccctacgacgccgggacggacagcggcttcaccttctcctcccccaacttcgccaccatcccgcaggacacggtgaccgagataacgtcctcctctcccagccacccggccaactccttctactacccgcggctgaaggccctgcctcccatcgccagggtgacactggtgcggctgcgacagagccccagggccttcatccctcccgccccagtcctgcccagcagggacaatgagattgtagacagcgcctcagttccagaaacgccgctggactgcgaggtctccctgtggtcgtcctggggactgtgcggaggccactgtgggaggctcgggaccaagagcaggactcgctacgtccgggtccagcccgccaacaacgggagcccctgccccgagctcgaagaagaggctgagtgcgtccctgataactgcgtctaagaccagagccccgcagcccctggggccccccggagccatggggtgtcgggggctcctgtgcaggctcatgctgcaggcggccgagggcacagggggtttcgcgctgctcctgaccgcggtgaggccgcgccgaccatctctgcactgaagggccctctggtggccggcacgggcattgggaaacagcctcctcctttcccaaccttgcttcttaggggcccccgtgtcccgtctgctctcagcctcctcctcctgcaggataaagtcatccccaaggctccagctactctaaattatgtctccttataagttattgctgctccaggagattgtccttcatcgtccaggggcctggctcccacgtggttgcagatacctcagacctggtgctctaggctgtgctgagcccactctcccgagggcgcatccaagcgggggccacttgagaagtgaataaatggggcggtttcggaagcgtcagtgtttccatgttatggatctctctgcgtttgaataaagactatctctgttgctc

SEQ ID NO: 76841 - DNA, 571 bp, Artificial Sequence
  derived and/or modified sequence
gagccctgagccgccggctgcggggttggagccgccggctgcggggttggagccgccggctgcggggttggagacgccggctgcggggttggagccgccggctgcggggttggagccgccggctgcggggttggaaccgccggctgtgagtttcctcactgcttggaggaagatgagaattctcagaggtccttatgctgccctttttgctgcagtcttgacatcttaacgtggatagaaaaaggccaggccgtgcagcatcgaagacaggaggaactggagcctcattggccggcccggggcgccggcctcgggcttaaataggagctccgggctctggctgggacccgaccgctgccggccgcgctcccgctgctcctgccgggtgatggaaaaccccagcccggccgccgccctgggcaaggccctctgcgctctcctcctggccactctcggcgccgccggccagcctcttgggggagagtccatctgttccgccagagccctggccaaatacagcatcaccttcacgggcaagtggagccagacggccttccccaagcagtacccc

SEQ ID NO: 76842 - DNA, 597 bp, Artificial Sequence
  derived and/or modified sequence
gatgcctgcgccgggagccaggagcttccccagccacttccagcatgtagactgaagtcaggccacgcacagggctctccaggtcacaccctgcgcaagaaggtgtagcacgctggctctaatttcgagaaggccgtgcagcatcgaagacaggaggaactggagcctcattggccggcccggggcgccggcctcgggcttaaataggagctccgggctctggctgggacccgaccgctgccggccgcgctcccgctgctcctgccgggtgatggaaaaccccagcccggccgccgccctgggcaaggccctctgcgctctcctcctggccactctcggcgccgccggccagcctcttgggggagagtccatctgttccgccagagccctggccaaatacagcatcaccttcacgggcaagtggagccagacggccttccccaagcagtaccccctgttccgcccccctgcgcagtggtcttcgctgctgggggccgcgcatagctccgactacagcatgtggaggaagaaccagtacgtcagtaacgggctgcgcgactttgcggagcgcggcgaggcctgggcgctgatgaagga

SEQ ID NO: 76843 - DNA, 549 bp, Artificial Sequence
  derived and/or modified sequence
agagaaacccaagagcagctgcatgagccctcccaggcctacccccgcagccggcactccctgcagcaaagaaaaccatctggccactgggccctgagcccggcgcccggaggaggacctctgccccgctgagcagctctgctccccaggctggccctgggcctctcgcggcctgacccgctccccttggcatcaagcaccaggagggacggggtggcccggccagggcgtgggtgttccccggcccctctgagcaccagcacctgtttcctcactgcttggaggaagatgagaattctcagaggtccttatgctgccctttttgctgcagtcttgacatcttaacgtggatagaaaaaggccgtgcagcatcgaagacaggaggaactggagcctcattggccggcccggggcgccggcctcgggcttaaataggagctccgggctctggctgggacccgaccgctgccggccgcgctcccgctgctcctgccgggtgatggaaaaccccagcccggccgccgccctgggcaaggccctctgcgctct

SEQ ID NO: 76844 - DNA, 556 bp, Artificial Sequence
  derived and/or modified sequence
gtgtgtttgtgaactggcgatgtgatcgagggcacgggtgctgggcttccccctcatgggtaaaaccagagctactgtatgccagccgtggaggcatggacggcccctgagctcggacagcagacggacagaccgttgacgcgttggcaccgtggccagagtccgttcaagaaaggtcggcagagagggctgagaacgcggcaggcacatcctccaagggccctgctggaacccctggagcaggaggaagcggtgattctccaggccttggtttcctcactgcttggaggaagatgagaattctcagaggtccttatgctgccctttttgctgcagtcttgacatcttaacgtggatagaaaaaggccaggccgtgcagcatcgaagacaggaggaactggagcctcattggccggcccggggcgccggcctcgggcttaaataggagctccgggctctggctgggacccgaccgctgccggccgcgctcccgctgctcctgccgggtgatggaaaaccccagcccggccgccgccctgggcaaggccctctgcgc

SEQ ID NO: 76845 - DNA, 571 bp, Artificial Sequence
  derived and/or modified sequence
ctgagccgccggctgcggggttggagccgccggctgcggggttggagccgccggctgcggggttggagacgccggctgcggggttggagccgccggctgcggggttggagccgccggctgcggggttggaaccgccggctgtgagtttcctcactgcttggaggaagatgagaattctcagaggtccttatgctgccctttttgctgcagtcttgacatcttaacgtggatagaaaaaggccgtgcagcatcgaagacaggaggaactggagcctcattggccggcccggggcgccggcctcgggcttaaataggagctccgggctctggctgggacccgaccgctgccggccgcgctcccgctgctcctgccgggtgatggaaaaccccagcccggccgccgccctgggcaaggccctctgcgctctcctcctggccactctcggcgccgccggccagcctcttgggggagagtccatctgttccgccagagccctggccaaatacagcatcaccttcacgggcaagtggagccagacggccttccccaagcagtaccccctgttccgcc

SEQ ID NO: 76846 - protein, 704 aa, Artificial Sequence
  derived and/or modified sequence
MQIRLLRAELVVPLWQFIRQWPPGSDGWGQMEEKGQRMSSQPAGNQTSPGATEDYSYGSWYIDEPQGGEELQPEGEVPSCHTSIPPGLYHACLASLSILVLLLLAMLVRRRQLWPDCVRGRPGLPSPVDFLAGDRPRAVPAAVFMVLLSSLCLLLPDEDALPFLTLASAPSQDGKTEAPRGAWKILGLFYYAALYYPLAACATAGHTAAHLLGSTLSWAHLGVQVWQRAECPQVPKIYKYYSLLASLPLLLGLGFLSLWYPVQLVRSFSRRTGAGSKGLQSSYSEEYLRNLLCRKKLGSSYHTSKHGFLSWARVCLRHCIYTPQPGFHLPLKLVLSATLTGTAIYQVALLLLVGVVPTIQKVRAGVTTDVSYLLAGFGIVLSEDKQEVVELVKHHLWALEVCYISALVLSCLLTFLVLMRSLVTHRTNLRALHRGAALDLSPLHRSPHPSRQAIFCWMSFSAYQTAFICLGLLVQQIIFFLGTTALAFLVLMPVLHGRNLLLFRSLESSWPFWLTLALAVILQNMAAHWVFLETHDGHPQLTNRRVLYAATFLLFPLNVLVGAMVATWRVLLSALYNAIHLGQMDLSLLPPRAATLDPGYYTYRNFLKIEVSQSHPAMTAFCSLLLQAQSLLPRTMAAPQDSLRPGEEDEGMQLLQTKDSMAKGARPGASRGRARWGLAYTLLHNPTLQVFRKTALLGANGAQP

SEQ ID NO: 76847 - DNA, 2115 bp, Artificial Sequence
  derived and/or modified sequence
atgcagatcagactgctgagagccgagctggtggtgcccctgtggcagttcatcagacagtggccccccggcagcgacggctggggccagatggaggagaagggccagagaatgagcagccagcccgccggcaaccagaccagccccggcgccaccgaggactacagctacggcagctggtacatcgacgagccccagggcggcgaggagctgcagcccgagggcgaggtgcccagctgccacaccagcatcccccccggcctgtaccacgcctgcctggccagcctgagcatcctggtgctgctgctgctggccatgctggtgagaagaagacagctgtggcccgactgcgtgagaggcagacccggcctgcccagccccgtggacttcctggccggcgacagacccagagccgtgcccgccgccgtgttcatggtgctgctgagcagcctgtgcctgctgctgcccgacgaggacgccctgcccttcctgaccctggccagcgcccccagccaggacggcaagaccgaggcccccagaggcgcctggaagatcctgggcctgttctactacgccgccctgtactaccccctggccgcctgcgccaccgccggccacaccgccgcccacctgctgggcagcaccctgagctgggcccacctgggcgtgcaggtgtggcagagagccgagtgcccccaggtgcccaagatctacaagtactacagcctgctggccagcctgcccctgctgctgggcctgggcttcctgagcctgtggtaccccgtgcagctggtgagaagcttcagcagaagaaccggcgccggcagcaagggcctgcagagcagctacagcgaggagtacctgagaaacctgctgtgcagaaagaagctgggcagcagctaccacaccagcaagcacggcttcctgagctgggccagagtgtgcctgagacactgcatctacaccccccagcccggcttccacctgcccctgaagctggtgctgagcgccaccctgaccggcaccgccatctaccaggtggccctgctgctgctggtgggcgtggtgcccaccatccagaaggtgagagccggcgtgaccaccgacgtgagctacctgctggccggcttcggcatcgtgctgagcgaggacaagcaggaggtggtggagctggtgaagcaccacctgtgggccctggaggtgtgctacatcagcgccctggtgctgagctgcctgctgaccttcctggtgctgatgagaagcctggtgacccacagaaccaacctgagagccctgcacagaggcgccgccctggacctgagccccctgcacagaagcccccaccccagcagacaggccatcttctgctggatgagcttcagcgcctaccagaccgccttcatctgcctgggcctgctggtgcagcagatcatcttcttcctgggcaccaccgccctggccttcctggtgctgatgcccgtgctgcacggcagaaacctgctgctgttcagaagcctggagagcagctggcccttctggctgaccctggccctggccgtgatcctgcagaacatggccgcccactgggtgttcctggagacccacgacggccacccccagctgaccaacagaagagtgctgtacgccgccaccttcctgctgttccccctgaacgtgctggtgggcgccatggtggccacctggagagtgctgctgagcgccctgtacaacgccatccacctgggccagatggacctgagcctgctgccccccagagccgccaccctggaccccggctactacacctacagaaacttcctgaagatcgaggtgagccagagccaccccgccatgaccgccttctgcagcctgctgctgcaggcccagagcctgctgcccagaaccatggccgccccccaggacagcctgagacccggcgaggaggacgagggcatgcagctgctgcagaccaaggacagcatggccaagggcgccagacccggcgccagcagaggcagagccagatggggcctggcctacaccctgctgcacaaccccaccctgcaggtgttcagaaagaccgccctgctgggcgccaacggcgcccagccctag

SEQ ID NO: 76848 - DNA, 2115 bp, Artificial Sequence
  derived and/or modified sequence
atgcagatccggctcctgagagcagagctggttgtaccactgtggcagttcattaggcagtggccaccagggtcagatggctgggggcaaatggaggagaagggacagaggatgtcatcacagccggccggaaaccagacaagtcctggagcaactgaggattacagctatggctcgtggtacatcgatgagcctcagggtggtgaagaactgcagcctgaaggagaggtcccttcctgccacacgagtatcccacctgggttgtaccatgcttgtttggctagcctttccatcctggttctgctacttctggcaatgctagtgcgccgccggcaactgtggcccgactgcgtcagaggcaggcccggactgccttcacccgtggatttcctggctggagatcgcccaagagccgtgcccgcggccgtgttcatggtgctgctgtccagtctgtgtctgctgctcccggacgaggacgccctgccattcctgaccctggcctccgccccaagtcaggatggcaagaccgaagctcccaggggagcttggaaaatcctcggacttttctactatgccgctctgtactacccgctggcggcctgcgccaccgcaggacacacagcagcgcatctcctaggctccacattgagctgggcacatctcggagtacaagtctggcagagggccgagtgtccacaggtgcctaagatttacaagtattatagcctcctggccagcctgcctctgctattaggcctagggtttctcagcctgtggtatcccgtccagctagttcgcagcttctccagaaggaccggcgcaggaagcaagggactccagtcatcttacagcgaagaatatcttagaaatctgctgtgtcgtaagaagcttggcagcagctaccacacctccaagcatgggttcttatcttgggcacgggtgtgccttaggcactgcatctacactcctcagccaggtttccatcttccactgaagttggtactgtcggccacgttgaccggaacagctatctaccaagtggccctccttcttcttgtgggtgtcgtacccacaatccagaaggtaagagccggcgtgacgactgacgtatcatatctgcttgccggcttcgggattgtcttaagcgaggacaagcaggaggtagttgagttagtgaagcaccatctttgggcgcttgaggtgtgttacatttcagccctggtgctcagctgtctactgacattccttgtcttaatgcgctcgctggtgacacatcggacgaatctcagggccttgcacagaggcgcagctctggacctctctccattacacagatctccccacccatcacgccaagcaatcttctgttggatgtccttctccgcatatcagacggctttcatttgcctcggcctcctggtgcagcagataattttttttctcgggaccacagccctcgctttccttgtactgatgcccgtcctgcacggacgaaacttgctgctgttccgctcactggagtcctcatggcctttctggctcacactcgcacttgccgttattctacagaatatggccgcgcactgggtttttcttgagacgcacgacgggcacccccaacttaccaacaggagagtgctgtacgccgccactttccttttattcccgctgaatgtattggttggggctatggtggccacctggcgggtgctgctgtccgccctgtacaacgccattcacctggggcagatggaccttagcttgctgccgcctagggcagcgacactggatccaggttactatacctacaggaatttcctgaagatcgaagtcagccaatcacaccccgccatgaccgccttctgttctttgctcctgcaggctcaatcattgctccccaggacaatggccgcacctcaagattcactcagacctggggaggaagatgagggaatgcagctgcttcaaactaaagactctatggccaaaggggctcgtccaggcgctagcagggggcgcgctaggtggggcctggcctatactctcctgcataatcctacactgcaagtattcagaaaaactgccctcctcggagcaaatggcgcccagccgtag

SEQ ID NO: 76849 - DNA, 2115 bp, Artificial Sequence
  derived and/or modified sequence
atgcagatccggctgctgcgggcagagctggtggtgcccctgtggcagttcatccggcagtggcccccaggcagtgatggctggggccagatggaggagaagggccagaggatgagcagccagcctgctggcaaccagaccagccctggggccacagaggactacagctatggctcctggtacattgatgagccccagggcggggaggagctgcagcctgagggggaggtgcccagctgccacaccagcatccccccaggcctgtaccacgcctgcctggccagcctgagcatcctggtgctgctgctgctggccatgctggtgagaagacggcagctgtggccagactgtgtgcggggccggcccggcctgcccagccctgtggacttcctggccggggaccggcccagggctgtgcctgctgctgtgttcatggtgctgctgagcagcctgtgcctgctgctgcctgatgaagatgccctgcccttcctgaccctggccagcgcccccagccaggacggcaagacagaggcccccaggggggcctggaagatcctgggcctcttctactatgctgccctgtactaccccctggccgcctgtgccacagctggccacacagctgcccacctgctgggcagcaccctgtcctgggcccacctgggcgtgcaggtgtggcagagagctgagtgcccccaggtgcccaagatctacaagtactacagcctgctggccagcctgcccctgctgctgggcctgggcttcctgagcctgtggtaccctgtgcagctggtgcgctccttcagcagaagaactggagctggcagcaagggcctgcagagcagctacagcgaggagtacctgaggaacctgctgtgcaggaagaagctgggcagcagctaccacaccagcaagcacggcttcctgtcctgggcccgggtgtgcctgcggcactgcatctacaccccccagcccggcttccacctgcccctgaagctggtgctgagcgccaccctgaccggcacagccatctaccaggtggccctgctgctgctggtgggcgtggtgcccaccatccagaaggtgcgggccggcgtgaccacagatgtgtcctacctgctggccggctttggaattgtgctgtctgaggacaagcaggaggtggtggagctggtgaagcaccacctgtgggccctggaggtgtgctacatcagcgccctggtgctgagctgcctgctgaccttcctggtgctgatgaggagcctggtgacccacaggaccaacctgcgggccctgcacagaggagctgccctggacctgagccccctgcacaggagcccccaccccagccggcaggccatcttctgctggatgtccttcagcgcctaccagacagccttcatctgcctgggcctgctggtgcagcagatcatcttcttcctgggcaccacagccctggccttcctggtgctgatgcctgtgctgcacggcaggaacctgctgctcttccgcagcctggagagctcctggcccttctggctgaccctggccctggccgtcatcctgcagaacatggccgcccactgggtgttcctggagacccatgatggccacccccagctgaccaacagaagagtgctgtatgctgccaccttcctgctcttccccctgaatgtgctggtgggcgccatggtggccacctggagggtgctgctgagcgccctgtacaatgccatccacctgggccagatggacctgagcctgctgccccccagggctgccaccctggaccccggctactacacctacagaaacttcctgaagattgaggtgtcccagagccacccagccatgacagccttctgcagcctgctgctgcaggcccagagcctgctgcccaggaccatggccgccccccaggacagcctgcggcctggagaggaggatgagggcatgcagctgctgcagaccaaggacagcatggccaagggggcccggcctggggccagccggggccgggcccgctggggcctggcctacaccctgctgcacaaccccaccctgcaggtgttcaggaagacagccctgctgggcgccaacggggcccagccctag

SEQ ID NO: 76850 - DNA, 2115 bp, Artificial Sequence
  derived and/or modified sequence
atgcagatccggctgctgcgggccgagctggtggtgcccctgtggcagtttatccgacagtggccacccggcagcgatgggtggggccaaatggaagagaaggggcagaggatgagcagtcaacctgctggaaatcaaacatctcctggagcgaccgaagattatagctatggcagctggtacatagacgaaccccaaggcggcgaggagctgcagcccgaaggcgaagttccctcctgccacacatccatcccacccggactataccatgcttgtctggccagtctgtccattctggtactcttgctgcttgccatgttagtgcgcaggcgtcagctctggcccgattgtgtccgcggaagacctggcctgccatccccagtggatttcctagctggagataggccacgtgccgtcccagctgcagtctttatggtgctcctatctagcctgtgtctgcttcttccagatgaagacgctctgcctttcctgacacttgcctccgcgccatcacaggatggtaagacagaagcgccgagaggcgcgtggaaaattctaggcctgttttattacgctgctctgtactaccccctcgctgcatgtgccaccgccggccacaccgccgcccatctcttaggatctacactgtcctgggctcacctgggcgtgcaagtgtggcaacgcgcggaatgtcctcaggtacccaaaatatacaaatactacagtcttctcgcgtcccttcccctgctcctgggcctgggattccttagcctctggtaccctgtgcagcttgtgagatctttctcccgtaggacaggcgctggatctaaggggcttcagtcgtcatactccgaagaatacctgcggaatttgttatgccgcaagaagctgggtagttcttatcatactagtaaacacggttttctaagttgggcacgggtgtgcctcagacactgtatatataccccgcagcctggattccatctcccactgaagctagtgctatctgcgacattgacaggaaccgcaatctatcaggtggcactgctactgctcgtcggcgttgtacccaccatacagaaggtgagagctggcgttacaactgacgttagttatctgctagctggtttcggaatcgtgctgtctgaagataagcaagaagtggttgagctagtaaagcaccatctgtgggcacttgaagtctgctacatctctgctctggtgctgagttgccttcttacttttctggtgctgatgagaagcctcgtcactcaccgtactaacctgagggctctccatcgaggcgccgctctggatttatcccctctccataggtccccgcatcccagtcgccaagccatcttttgttggatgagcttttccgcatatcagaccgcttttatctgtctcggtctgctggtgcagcagataatcttctttctggggacgaccgcccttgcattcctcgtgctcatgccagtgctgcatggaaggaatctgttgttgtttcgtagtctggaaagcagctggcctttctggctgaccttggcgctggcagtgatcctccagaacatggccgctcactgggtattccttgagactcacgacggacatccacaacttacaaaccggagggtcctttatgccgcaacattcctcctgttcccactcaatgtgctggtgggggccatggttgcaacttggagggtgctactgagtgcactatataatgctattcacttggggcagatggatttgagcctgctgcctccaagagcagcgactctcgaccccggatactatacctataggaactttctcaaaatcgaggtttcacagtcccatcctgccatgaccgctttctgttcgctactgttgcaagcccagtccttgttgcctcggactatggccgcccctcaagattcactgagacccggcgaagaagatgagggaatgcaacttttgcaaaccaaagacagtatggcaaaaggggcaagacctggggcaagccgtgggcgtgcaagatggggccttgcctacaccttgctgcacaatccgaccctgcaggtgtttagaaagaccgcactgcttggcgctaatggcgcacagccatag

SEQ ID NO: 76851 - DNA, 2115 bp, Artificial Sequence
  derived and/or modified sequence
atgcagatcaggttactgcgcgctgagctggtggtgcctctttggcagttcatccgccagtggccacctgggtctgacgggtgggggcagatggaggaaaagggacagaggatgagttcccagcccgcagggaaccagactagcccaggggctactgaggattacagttacgggtcttggtacatcgatgagccacaggggggtgaagaactccagcccgagggagaggtcccgagctgccacacctccatacctccaggactgtaccatgcatgtttagccagcctctcgattcttgtgcttctgctcttagctatgctggtgaggcggagacagctatggcccgactgcgtacggggacggccaggtttacccagccctgtggacttcctggccggagataggcccagagccgtgcccgcagccgtcttcatggtgcttctgtcttccctgtgtctcctgctacctgatgaggatgccctgccattccttaccttggccagtgcccctagtcaagatggcaaaacggaggcccctcggggtgcttggaagattttaggccttttttattatgccgcattgtactacccactcgccgcatgcgcgaccgcaggacacacagctgcccacctattaggctctaccctgtcttgggcccaccttggcgtacaggtgtggcagagagcagaatgcccgcaggtgcccaagatctataaatactatagcctcctagcctcgctgcctcttctcctgggactgggattcctgtctctctggtatcctgtgcagctcgtcagaagcttttctcggaggaccggagcgggatccaagggtctgcagagcagttattccgaggagtacctgagaaaccttctctgccgaaagaagctgggaagtagttaccacacaagtaaacatggtttcctgtcatgggccagagtttgcctgcggcactgtatatatacccctcaacccggatttcatctccctctgaagctggttctgtccgcaaccctcacgggcacagccatctaccaggtggccttgctattgctcgtgggggtcgtgcccacaattcagaaggttcgcgcaggcgtaaccacagatgtttcctacctccttgccggttttggcatcgtcttatcagaagacaagcaggaggtagtggagttggtcaaacaccacctgtgggcattagaggtctgttacatttccgccctcgtcttaagttgcctcctgacctttctagtcctcatgcgctcactggtgacacacagaactaacttgagggccctccaccggggtgctgccctggatcttagtcctctgcatagatcccctcacccgtctcggcaggccattttctgttggatgagcttcagcgcataccagactgccttcatttgccttgggttactggtgcagcagataattttttttttgggcaccacggctctcgccttcctagtgttgatgccagtgctgcatggcaggaacttgctcctgttcagatccctggagagcagctggcctttctggctgacattggccttggcagtgatcttacagaacatggccgctcactgggtgtttctggagacccacgatggccacccacagctgaccaatcggcgtgtgctgtacgcagctactttcttgttgttccccctcaatgtgcttgtgggagctatggtggccacatggcgcgttctgttgtcggcgttgtataacgccatccacctggggcagatggacctctcactgttgccccctagggccgctactttagaccccggatattatacgtaccgcaatttcctgaagattgaggtgtcccagagtcatcccgctatgaccgctttctgttcgctactgctccaggcacagagtctgctccccaggactatggccgctccgcaggactcactcaggcctggagaagaggatgagggcatgcagctcctccagacaaaggattctatggctaagggagcaagacccggagcttctaggggcagggcacgatgggggcttgcctacactctgttgcacaatccaacgcttcaggtgttccggaaaaccgccctcctgggagccaatggggcacagccatag

SEQ ID NO: 76852 - DNA, 2864 bp, Artificial Sequence
  derived and/or modified sequence
agatcaaacaccttttaaagcaggtgctggggacacttctcagggccaactgccgagaccacacaaccagccacccctctaggatcccagcccagctggtgctgggctcagaggagaaggccccgtgttgggagcaccctgcttgcctggagggacaagtttccgggagagatcaataaaggaaaggaaagagacaaggaagggagaggtcaggagagcgcttgattggaggagaagggccagagaatgtcgtcccagccagcagggaaccagacctcccccggggccacagaggactactcctatggcagctggtacatcgatgagccccaggggggcgaggagctccagccagagggggaagtgccctcctgccacaccagcataccacccggcctgtaccacgcctgcctggcctcgctgtcaatccttgtgctgctgctcctggccatgctggtgaggcgccgccagctctggcctgactgtgtgcgtggcaggcccggcctgcccagccctgtggatttcttggctggggacaggccccgggcagtgcctgctgctgttttcatggtcctcctgagctccctgtgtttgctgctccccgacgaggacgcattgcccttcctgactctcgcctcagcacccagccaagatgggaaaactgaggctccaagaggggcctggaagatactgggactgttctattatgctgccctctactaccctctggctgcctgtgccacggctggccacacagctgcacacctgctcggcagcacgctgtcctgggcccaccttggggtccaggtctggcagagggcagagtgtccccaggtgcccaagatctacaagtactactccctgctggcctccctgcctctcctgctgggcctcggattcctgagcctttggtaccctgtgcagctggtgagaagcttcagccgtaggacaggagcaggctccaaggggctgcagagcagctactctgaggaatatctgaggaacctcctttgcaggaagaagctgggaagcagctaccacacctccaagcatggcttcctgtcctgggcccgcgtctgcttgagacactgcatctacactccacagccaggattccatctcccgctgaagctggtgctttcagctacactgacagggacggccatttaccaggtggccctgctgctgctggtgggcgtggtacccactatccagaaggtgagggcaggggtcaccacggatgtctcctacctgctggccggctttggaatcgtgctctccgaggacaagcaggaggtggtggagctggtgaagcaccatctgtgggctctggaagtgtgctacatctcagccttggtcttgtcctgcttactcaccttcctggtcctgatgcgctcactggtgacacacaggaccaaccttcgagctctgcaccgaggagctgccctggacttgagtcccttgcatcggagtccccatccctcccgccaagccatattctgttggatgagcttcagtgcctaccagacagcctttatctgccttgggctcctggtgcagcagatcatcttcttcctgggaaccacggccctggccttcctggtgctcatgcctgtgctccatggcaggaacctcctgctcttccgttccctggagtcctcgtggcccttctggctgactttggccctggctgtgatcctgcagaacatggcagcccattgggtcttcctggagactcatgatggacacccacagctgaccaaccggcgagtgctctatgcagccacctttcttctcttccccctcaatgtgctggtgggtgccatggtggccacctggcgagtgctcctctctgccctctacaacgccatccaccttggccagatggacctcagcctgctgccaccgagagccgccactctcgaccccggctactacacgtaccgaaacttcttgaagattgaagtcagccagtcgcatccagccatgacagccttctgctccctgctcctgcaagcgcagagcctcctacccaggaccatggcagccccccaggacagcctcagaccaggggaggaagacgaagggatgcagctgctacagacaaaggactccatggccaagggagctaggcccggggccagccgcggcagggctcgctggggtctggcctacacgctgctgcacaacccaaccctgcaggtcttccgcaagacggccctgttgggtgccaatggtgcccagccctgagggcagggaaggtcaacccacctgcccatctgtgctgaggcatgttcctgcctaccatcctcctccctccccggctctcctcccagcatcacaccagccatgcagccagcaggtcctccggatcactgtggttgggtggaggtctgtctgcactgggagcctcaggagggctctgctccacccacttggctatgggagagccagcaggggttctggagaaagaaactggtgggttagggccttggtccaggagccagttgagccagggcagccacatccaggcgtctccctaccctggctctgccatcagccttgaagggcctcgatgaagccttctctggaaccactccagcccagctccacctcagccttggccttcacgctgtggaagcagccaaggcacttcctcaccccctcagcgccacggacctctctggggagtggccggaaagctcccgggcctctggcctgcagggcagcccaagtcatgactcagaccaggtcccacactgagctgcccacactcgagagccagatatttttgtagtttttatgcctttggctattatgaaagaggttagtgtgttccctgcaataaacttgttcctgagaaa

SEQ ID NO: 76853 - DNA, 2800 bp, Artificial Sequence
  derived and/or modified sequence
gtatttccatcaccgaggcccaaaggggccagaaaggggcaggctgaggctgggggaggggctcaagggagcccagctgggagggcccaggcaggcagtgcggagctggccgtgggctgcctaccctttcatctctgcaactccttcctccctgggcctcccttctggagaagggccagagaatgtcgtcccagccagcagggaaccagacctcccccggggccacagaggactactcctatggcagctggtacatcgatgagccccaggggggcgaggagctccagccagagggggaagtgccctcctgccacaccagcataccacccggcctgtaccacgcctgcctggcctcgctgtcaatccttgtgctgctgctcctggccatgctggtgaggcgccgccagctctggcctgactgtgtgcgtggcaggcccggcctgcccagccctgtggatttcttggctggggacaggccccgggcagtgcctgctgctgttttcatggtcctcctgagctccctgtgtttgctgctccccgacgaggacgcattgcccttcctgactctcgcctcagcacccagccaagatgggaaaactgaggctccaagaggggcctggaagatactgggactgttctattatgctgccctctactaccctctggctgcctgtgccacggctggccacacagctgcacacctgctcggcagcacgctgtcctgggcccaccttggggtccaggtctggcagagggcagagtgtccccaggtgcccaagatctacaagtactactccctgctggcctccctgcctctcctgctgggcctcggattcctgagcctttggtaccctgtgcagctggtgagaagcttcagccgtaggacaggagcaggctccaaggggctgcagagcagctactctgaggaatatctgaggaacctcctttgcaggaagaagctgggaagcagctaccacacctccaagcatggcttcctgtcctgggcccgcgtctgcttgagacactgcatctacactccacagccaggattccatctcccgctgaagctggtgctttcagctacactgacagggacggccatttaccaggtggccctgctgctgctggtgggcgtggtacccactatccagaaggtgagggcaggggtcaccacggatgtctcctacctgctggccggctttggaatcgtgctctccgaggacaagcaggaggtggtggagctggtgaagcaccatctgtgggctctggaagtgtgctacatctcagccttggtcttgtcctgcttactcaccttcctggtcctgatgcgctcactggtgacacacaggaccaaccttcgagctctgcaccgaggagctgccctggacttgagtcccttgcatcggagtccccatccctcccgccaagccatattctgttggatgagcttcagtgcctaccagacagcctttatctgccttgggctcctggtgcagcagatcatcttcttcctgggaaccacggccctggccttcctggtgctcatgcctgtgctccatggcaggaacctcctgctcttccgttccctggagtcctcgtggcccttctggctgactttggccctggctgtgatcctgcagaacatggcagcccattgggtcttcctggagactcatgatggacacccacagctgaccaaccggcgagtgctctatgcagccacctttcttctcttccccctcaatgtgctggtgggtgccatggtggccacctggcgagtgctcctctctgccctctacaacgccatccaccttggccagatggacctcagcctgctgccaccgagagccgccactctcgaccccggctactacacgtaccgaaacttcttgaagattgaagtcagccagtcgcatccagccatgacagccttctgctccctgctcctgcaagcgcagagcctcctacccaggaccatggcagccccccaggacagcctcagaccaggggaggaagacgaagggatgcagctgctacagacaaaggactccatggccaagggagctaggcccggggccagccgcggcagggctcgctggggtctggcctacacgctgctgcacaacccaaccctgcaggtcttccgcaagacggccctgttgggtgccaatggtgcccagccctgagggcagggaaggtcaacccacctgcccatctgtgctgaggcatgttcctgcctaccatcctcctccctccccggctctcctcccagcatcacaccagccatgcagccagcaggtcctccggatcactgtggttgggtggaggtctgtctgcactgggagcctcaggagggctctgctccacccacttggctatgggagagccagcaggggttctggagaaagaaactggtgggttagggccttggtccaggagccagttgagccagggcagccacatccaggcgtctccctaccctggctctgccatcagccttgaagggcctcgatgaagccttctctggaaccactccagcccagctccacctcagccttggccttcacgctgtggaagcagccaaggcacttcctcaccccctcagcgccacggacctctctggggagtggccggaaagctcccgggcctctggcctgcagggcagcccaagtcatgactcagaccaggtcccacactgagctgcccacactcgagagccagatatttttgtagtttttatgcctttggctattatgaaagaggttagtgtgttccctgcaataaacttgttcctgagaaa

SEQ ID NO: 76854 - DNA, 2832 bp, Artificial Sequence
  derived and/or modified sequence
agatcaaacaccttttaaagcaggtgctggggacacttctcagggccaactgccgagaccacacaaccagccacccctctaggatcccagcccagctggtgctgggctcagaggagaaggccccgtgttgggagcaccctgcttgcctggagggacaagtttccgggagagatcaataaaggaaaggaaagagacaaggaagggagaggtcaggagagcgcttgattggaggagaagggccagagaatgtcgtcccagccagcagggaaccagacctcccccggggccacagaggactactcctatggcagctggtacatcgatgagccccaggggggcgaggagctccagccagagggggaagtgccctcctgccacaccagcataccacccggcctgtaccacgcctgcctggcctcgctgtcaatccttgtgctgctgctcctggccatgctggtgaggcgccgccagctctggcctgactgtgtgcgtggcaggcccggcctgcccaggccccgggcagtgcctgctgctgttttcatggtcctcctgagctccctgtgtttgctgctccccgacgaggacgcattgcccttcctgactctcgcctcagcacccagccaagatgggaaaactgaggctccaagaggggcctggaagatactgggactgttctattatgctgccctctactaccctctggctgcctgtgccacggctggccacacagctgcacacctgctcggcagcacgctgtcctgggcccaccttggggtccaggtctggcagagggcagagtgtccccaggtgcccaagatctacaagtactactccctgctggcctccctgcctctcctgctgggcctcggattcctgagcctttggtaccctgtgcagctggtgagaagcttcagccgtaggacaggagcaggctccaaggggctgcagagcagctactctgaggaatatctgaggaacctcctttgcaggaagaagctgggaagcagctaccacacctccaagcatggcttcctgtcctgggcccgcgtctgcttgagacactgcatctacactccacagccaggattccatctcccgctgaagctggtgctttcagctacactgacagggacggccatttaccaggtggccctgctgctgctggtgggcgtggtacccactatccagaaggtgagggcaggggtcaccacggatgtctcctacctgctggccggctttggaatcgtgctctccgaggacaagcaggaggtggtggagctggtgaagcaccatctgtgggctctggaagtgtgctacatctcagccttggtcttgtcctgcttactcaccttcctggtcctgatgcgctcactggtgacacacaggaccaaccttcgagctctgcaccgaggagctgccctggacttgagtcccttgcatcggagtccccatccctcccgccaagccatattctgttggatgagcttcagtgcctaccagacagcctttatctgccttgggctcctggtgcagcagatcatcttcttcctgggaaccacggccctggccttcctggtgctcatgcctgtgctccatggcaggaacctcctgctcttccgttccctggagtcctcgtggcccttctggctgactttggccctggctgtgatcctgcagaacatggcagcccattgggtcttcctggagactcatgatggacacccacagctgaccaaccggcgagtgctctatgcagccacctttcttctcttccccctcaatgtgctggtgggtgccatggtggccacctggcgagtgctcctctctgccctctacaacgccatccaccttggccagatggacctcagcctgctgccaccgagagccgccactctcgaccccggctactacacgtaccgaaacttcttgaagattgaagtcagccagtcgcatccagccatgacagccttctgctccctgctcctgcaagcgcagagcctcctacccaggaccatggcagccccccaggacagcctcagaccaggggaggaagacgaagggatgcagctgctacagacaaaggactccatggccaagggagctaggcccggggccagccgcggcagggctcgctggggtctggcctacacgctgctgcacaacccaaccctgcaggtcttccgcaagacggccctgttgggtgccaatggtgcccagccctgagggcagggaaggtcaacccacctgcccatctgtgctgaggcatgttcctgcctaccatcctcctccctccccggctctcctcccagcatcacaccagccatgcagccagcaggtcctccggatcactgtggttgggtggaggtctgtctgcactgggagcctcaggagggctctgctccacccacttggctatgggagagccagcaggggttctggagaaagaaactggtgggttagggccttggtccaggagccagttgagccagggcagccacatccaggcgtctccctaccctggctctgccatcagccttgaagggcctcgatgaagccttctctggaaccactccagcccagctccacctcagccttggccttcacgctgtggaagcagccaaggcacttcctcaccccctcagcgccacggacctctctggggagtggccggaaagctcccgggcctctggcctgcagggcagcccaagtcatgactcagaccaggtcccacactgagctgcccacactcgagagccagatatttttgtagtttttatgcctttggctattatgaaagaggttagtgtgttccctgcaataaacttgttcctg

SEQ ID NO: 76855 - DNA, 2631 bp, Artificial Sequence
  derived and/or modified sequence
gtgctcaggtgaggggggatgcagccgactgtccagcagcgttggaggttgcaggcatgtacttggggtgaagagcaggactccagaaccccagcctgtctgtgagaagtgagaaatagaagagaaagctccgagggggcctttttcacttcccctgggaatagatcatacctggaattccagccctgaagccctgtgatgactccccttagctgtggtcagggccctcagcccagctgggcagcagcaggatgcagatccggttattaagagccgagctggtggttcccctctggcaattcatcaggcagtggccccctgggagtgatggatggggacaaatggaggagaagggccagagaatgtcgtcccagccagcagggaaccagacctcccccggggccacagaggactactcctatggcagctggtacatcgatgagccccaggggggcgaggagctccagccagagggggaagtgccctcctgccacaccagcataccacccggcctgtaccacgcctgcctggcctcgctgtcaatccttgtgctgctgctcctggccatgctggtgaggcgccgccagctctggcctgactgtgtgcgtggcaggcccggcctgcccagccctgtggatttcttggctggggacaggccccgggcagtgcctgctgctgttttcatggtcctcctgagctccctgtgtttgctgctccccgacgaggacgcattgcccttcctgactctcgcctcagcacccagccaagatgggaaaactgaggctccaagaggggcctggaagatactgggactgttctattatgctgccctctactaccctctggctgcctgtgccacggctggccacacagctgcacacctgctcggcagcacgctgtcctgggcccaccttggggtccaggtctggcagagggcagagtgtccccaggtgcccaagatctacaagtactactccctgctggcctccctgcctctcctgctgggcctcggattcctgagcctttggtaccctgtgcagctggtgagaagcttcagccgtaggacaggagcaggctccaaggggctgcagagcagctactctgaggaatatctgaggaacctcctttgcaggaagaagctgggaagcagctaccacacctccaagcatggcttcctgtcctgggcccgcgtctgcttgagacactgcatctacactccacagccaggattccatctcccgctgaagctggtgctttcagctacactgacagggacggccatttaccaggtggccctgctgctgctggtgggcgtggtacccactatccagaaggtgagggcaggggtcaccacggatgtctcctacctgctggccggctttggaatcgtgctctccgaggacaagcaggaggtggtggagctggtgaagcaccatctgtgggctctggaagtgtgctacatctcagccttggtcttgtcctgcttactcaccttcctggtcctgatgcgctcactggtgacacacaggaccaaccttcgagctctgcaccgaggagctgccctggacttgagtcccttgcatcggagtccccatccctcccgccaagccatattctgttggatgagcttcagtgcctaccagacagcctttatctgccttgggctcctggtgcagcagatcatcttcttcctgggaaccacggccctggccttcctggtgctcatgcctgtgctccatggcaggaacctcctgctcttccgttccctggagtcctcgtggcccttctggctgactttggccctggctgtgatcctgcagaacatggcagcccattgggtcttcctggagactcatgatggacacccacagctgaccaaccggcgagtgctctatgcagccacctttcttctcttccccctcaatgtgctggtgggtgccatggtggccacctggcgagtgctcctctctgccctctacaacgccatccaccttggccagatggacctcagcctgctgccaccgagagccgccactctcgaccccggctactacacgtaccgaaacttcttgaagattgaagtcagccagtcgcatccagccatgacagccttctgctccctgctcctgcaagcgcagagcctcctacccaggaccatggcagccccccaggacagcctcagaccaggggaggaagacgaagggatgcagctgctacagacaaaggactccatggccaagggagctaggcccggggccagccgcggcagggctcgctggggtctggcctacacgctgctgcacaacccaaccctgcaggtcttccgcaagacggccctgttgggtgccaatggtgcccagccctgagggcagggaaggtcaacccacctgcccatctgtgctgaggcatgttcctgcctaccatcctcctccctccccggctctcctcccagcatcacaccagccatgcagccagcaggtcctccggatcactgtggttgggtggaggtctgtctgcactgggagcctcaggagggctctgctccacccacttggctatgggagagccagcaggggttctggagaaagaaactggtgggttagggccttggtccaggagccagttgagcca

SEQ ID NO: 76856 - protein, 220 aa, Artificial Sequence
  derived and/or modified sequence
MWHGNHVQPGATHRPNQGLEMLQGLGIGILTISIVVGLMILQMCIAASFFLQPKLGTADKQKPLALNNRKAFHNFNYFLFFYNVLLGLGACLSRLLISCLLGMWLIARIDRTIMQSGYEGADMGFSAWIGMLYMDHYHINPVLVSFCHILITNHREKKLQQSTKYWCLNQSAGPHVSARSRTRWFLLQTLIDNPRLTMHRKLKLGHSSQESQILMACSES

SEQ ID NO: 76857 - protein, 667 aa, Artificial Sequence
  derived and/or modified sequence
MSSQPAGNQTSPGATEDYSYGSWYIDEPQGGEELQPEGEVPSCHTSIPPGLYHACLASLSILVLLLLAMLVRRRQLWPDCVRGRPGLPSPVDFLAGDRPRAVPAAVFMVLLSSLCLLLPDEDALPFLTLASAPSQDGKTEAPRGAWKILGLFYYAALYYPLAACATAGHTAAHLLGSTLSWAHLGVQVWQRAECPQVPKIYKYYSLLASLPLLLGLGFLSLWYPVQLVRSFSRRTGAGSKGLQSSYSEEYLRNLLCRKKLGSSYHTSKHGFLSWARVCLRHCIYTPQPGFHLPLKLVLSATLTGTAIYQVALLLLVGVVPTIQKVRAGVTTDVSYLLAGFGIVLSEDKQEVVELVKHHLWALEVCYISALVLSCLLTFLVLMRSLVTHRTNLRALHRGAALDLSPLHRSPHPSRQAIFCWMSFSAYQTAFICLGLLVQQIIFFLGTTALAFLVLMPVLHGRNLLLFRSLESSWPFWLTLALAVILQNMAAHWVFLETHDGHPQLTNRRVLYAATFLLFPLNVLVGAMVATWRVLLSALYNAIHLGQMDLSLLPPRAATLDPGYYTYRNFLKIEVSQSHPAMTAFCSLLLQAQSLLPRTMAAPQDSLRPGEEDEGMQLLQTKDSMAKGARPGASRGRARWGLAYTLLHNPTLQVFRKTALLGANGAQP

SEQ ID NO: 76858 - protein, 706 aa, Artificial Sequence
  derived and/or modified sequence
MGGKGGGDTRGPVLFPCQLAQALSPRRAFPRELKEKGQRMSSQPAGNQTSPGATEDYSYGSWYIDEPQGGEELQPEGEVPSCHTSIPPGLYHACLASLSILVLLLLAMLVRRRQLWPDCVRGRPGLPSPVDFLAGDRPRAVPAAVFMVLLSSLCLLLPDEDALPFLTLASAPSQDGKTEAPRGAWKILGLFYYAALYYPLAACATAGHTAAHLLGSTLSWAHLGVQVWQRAECPQVPKIYKYYSLLASLPLLLGLGFLSLWYPVQLVRSFSRRTGAGSKGLQSSYSEEYLRNLLCRKKLGSSYHTSKHGFLSWARVCLRHCIYTPQPGFHLPLKLVLSATLTGTAIYQVALLLLVGVVPTIQKVRAGVTTDVSYLLAGFGIVLSEDKQEVVELVKHHLWALEVCYISALVLSCLLTFLVLMRSLVTHRTNLRALHRGAALDLSPLHRSPHPSRQAIFCWMSFSAYQTAFICLGLLVQQIIFFLGTTALAFLVLMPVLHGRNLLLFRSLESSWPFWLTLALAVILQNMAAHWVFLETHDGHPQLTNRRVLYAATFLLFPLNVLVGAMVATWRVLLSALYNAIHLGQMDLSLLPPRAATLDPGYYTYRNFLKIEVSQSHPAMTAFCSLLLQAQSLLPRTMAAPQDSLRPGEEDEGMQLLQTKDSMAKGARPGASRGRARWGLAYTLLHNPTLQVFRKTALLGANGAQP

SEQ ID NO: 76859 - DNA, 2121 bp, Artificial Sequence
  derived and/or modified sequence
atgggcggcaagggcggcggcgacaccagaggccccgtgctgttcccctgccagctggcccaggccctgagccccagaagagccttccccagagagctgaaggagaagggccagagaatgagcagccagcccgccggcaaccagaccagccccggcgccaccgaggactacagctacggcagctggtacatcgacgagccccagggcggcgaggagctgcagcccgagggcgaggtgcccagctgccacaccagcatcccccccggcctgtaccacgcctgcctggccagcctgagcatcctggtgctgctgctgctggccatgctggtgagaagaagacagctgtggcccgactgcgtgagaggcagacccggcctgcccagccccgtggacttcctggccggcgacagacccagagccgtgcccgccgccgtgttcatggtgctgctgagcagcctgtgcctgctgctgcccgacgaggacgccctgcccttcctgaccctggccagcgcccccagccaggacggcaagaccgaggcccccagaggcgcctggaagatcctgggcctgttctactacgccgccctgtactaccccctggccgcctgcgccaccgccggccacaccgccgcccacctgctgggcagcaccctgagctgggcccacctgggcgtgcaggtgtggcagagagccgagtgcccccaggtgcccaagatctacaagtactacagcctgctggccagcctgcccctgctgctgggcctgggcttcctgagcctgtggtaccccgtgcagctggtgagaagcttcagcagaagaaccggcgccggcagcaagggcctgcagagcagctacagcgaggagtacctgagaaacctgctgtgcagaaagaagctgggcagcagctaccacaccagcaagcacggcttcctgagctgggccagagtgtgcctgagacactgcatctacaccccccagcccggcttccacctgcccctgaagctggtgctgagcgccaccctgaccggcaccgccatctaccaggtggccctgctgctgctggtgggcgtggtgcccaccatccagaaggtgagagccggcgtgaccaccgacgtgagctacctgctggccggcttcggcatcgtgctgagcgaggacaagcaggaggtggtggagctggtgaagcaccacctgtgggccctggaggtgtgctacatcagcgccctggtgctgagctgcctgctgaccttcctggtgctgatgagaagcctggtgacccacagaaccaacctgagagccctgcacagaggcgccgccctggacctgagccccctgcacagaagcccccaccccagcagacaggccatcttctgctggatgagcttcagcgcctaccagaccgccttcatctgcctgggcctgctggtgcagcagatcatcttcttcctgggcaccaccgccctggccttcctggtgctgatgcccgtgctgcacggcagaaacctgctgctgttcagaagcctggagagcagctggcccttctggctgaccctggccctggccgtgatcctgcagaacatggccgcccactgggtgttcctggagacccacgacggccacccccagctgaccaacagaagagtgctgtacgccgccaccttcctgctgttccccctgaacgtgctggtgggcgccatggtggccacctggagagtgctgctgagcgccctgtacaacgccatccacctgggccagatggacctgagcctgctgccccccagagccgccaccctggaccccggctactacacctacagaaacttcctgaagatcgaggtgagccagagccaccccgccatgaccgccttctgcagcctgctgctgcaggcccagagcctgctgcccagaaccatggccgccccccaggacagcctgagacccggcgaggaggacgagggcatgcagctgctgcagaccaaggacagcatggccaagggcgccagacccggcgccagcagaggcagagccagatggggcctggcctacaccctgctgcacaaccccaccctgcaggtgttcagaaagaccgccctgctgggcgccaacggcgcccagccctag

SEQ ID NO: 76860 - DNA, 2121 bp, Artificial Sequence
  derived and/or modified sequence
atgggcggcaagggagggggggatacccggggtcccgtcctttttccctgtcagctggcacaggctctcagtccccgcagagcctttccccgcgagctcaaagagaaaggacagagaatgagtagccaacccgctggtaatcaaacttctcctggggccaccgaagactactcttatggttcgtggtatatcgatgagcctcaaggaggcgaggagctgcagcccgagggggaagtgccaagctgtcacaccagcattccgccagggctgtatcacgcctgcttagccagtttatcaatcctggtgttgctgctactggccatgctagttaggcgtagacagttgtggccggattgtgtccgaggtagacctggcttgccctctcctgtggatttcctcgctggagataggcctcgggctgtgcccgctgcagtcttcatggttctgcttagctctctctgtctgttgctacccgacgaggacgctctgcccttcctgactcttgctagcgcaccatcccaggatggaaagaccgaggccccgaggggcgcatggaagatcctggggttattttattacgcagccctctattacccgctggctgcttgcgccaccgcgggtcatacagccgcacaccttctcggatccactcttagttgggcacacctgggggtgcaggtttggcagagggccgagtgcccacaggttccaaaaatatataagtactactcccttctggcttcccttcctcttttactcggcttaggcttcctctctttatggtatcccgtccagctggtcaggtctttcagtaggcgcactggcgcaggatcaaaaggactgcagtcctcatatagtgaggagtatctacgcaatctgttatgccgcaaaaagctcgggagtagttaccacacctcaaagcacgggtttctctcctgggcacgggtctgcctgcgccattgtatctacaccccccagcctgggtttcatctgcccctgaaactcgtccttagcgcgacactgacaggaaccgccatttaccaggtcgccctgctgctgctggtcggagttgtccccacaatccagaaagtacgcgctggtgttactaccgatgtctcttatctgctagccggatttggcatcgtcttaagtgaagacaaacaggaggttgttgagttggtaaaacaccacttatgggcgctcgaggtgtgctatatatctgccctggtcctctcatgtctgctgacctttctcgtgctgatgcgcagcttagtgacgcataggaccaatttgagggctctccacagaggagctgcgctggatttgtcgcctttacaccgatccccccatccctcacgacaggcaatcttttgttggatgagcttctccgcatatcaaactgccttcatttgcttgggactcttggtccagcagattatcttttttctcggaaccaccgctctggctttcctggttctcatgcccgtgctgcatgggaggaatctactgctgttcaggtctctcgaatcgagctggccattttggttgaccctggccctggccgtgatcctccagaatatggcggcccactgggtatttctcgagacccacgacggacatccccagctgacaaaccggcgggttctatatgccgccacattcctcctgtttcccctgaatgtgcttgttggagccatggtcgccacatggagagtgctgctttctgccctctacaacgcgattcacttgggacagatggatctaagcttgctccccccacgggcagccactcttgaccctgggtactatacctatcgtaactttttgaagatcgaggtgtcgcagagccaccctgcaatgaccgctttctgcagtctgctcctgcaggcccagtctttactcccgaggaccatggccgcacctcaggacagcctgagacctggcgaggaggacgagggtatgcagctactccagacgaaagactcaatggccaagggagctaggcctggggccagccgcggacgggcgcgttggggactcgcgtacacgctacttcacaatccaaccctgcaggtgttccgcaaaacagctttacttggcgcaaacggtgctcaaccatag

SEQ ID NO: 76861 - DNA, 2121 bp, Artificial Sequence
  derived and/or modified sequence
atgggggggaaggggggtggggacacgcggggcccagttctcttcccttgccagctggcccaggccctcagcccaagaagggcgtttccccgcgagctgaaagaaaaaggccagagaatgtcttcccagcccgcaggaaatcagaccagcccaggggccacagaggactactcctatggcagttggtacatcgatgagccacagggtggcgaggagctgcagcccgaaggtgaagtgcccagttgtcacacgagcattccccccgggctgtaccacgcgtgtctcgcaagcttgtcaatcctggtgctgttactgctcgcaatgctggtgaggcgcaggcagttgtggcccgattgtgtacgtgggaggcccggtttgccttctcctgtggacttcctggcaggggatcggccccgagccgttcctgcagccgtctttatggtgctgctgtcctctttgtgccttctattgcctgacgaggacgctctcccgtttttgaccctggcctcagccccatctcaggacggaaaaacagaggccccaagaggcgcctggaagatattggggcttttttactacgctgccctttactatccactggcagcctgtgctaccgctggtcatacggcagcacatctgcttgggtcaacactgagctgggcccacctaggagtccaggtttggcagcgcgccgaatgtccgcaggtacccaagatttataaatattactctttgctggccagtctcccgctgcttcttggactggggtttctttccttgtggtatccagtccagctggttcgctcctttagcaggaggaccggggcaggttctaaagggctgcagagttcttatagtgaagagtacctgcggaatcttctctgtcgcaagaagcttggttcttcttatcacacgtccaaacatgggtttctgtcctgggcgagggtttgcttgaggcattgcatctatactccgcagccgggatttcacttgcctttgaagttagtcctgtcagccaccttgacaggaaccgcaatctatcaagtggccctgcttctgctggtgggagtagtcccaacaatacagaaggtcagagctggtgtgacgaccgacgtgagctacctcctcgctggcttcgggatcgtcctctcagaagacaaacaggaagttgttgaactggtgaaacaccatctatgggctctggaggtgtgctacattagtgccctcgtcctctcatgtttgctgacattcctggtgctgatgcgcagccttgtgacccatagaactaatttgagggcattgcaccgcggcgcagcactggatctgagtcctcttcacaggtcacctcaccccagtaggcaagccattttctgctggatgtcattttctgcctatcagactgctttcatctgcctgggtctgctggtccagcagattatattctttctgggtactaccgctctcgcctttctcgtacttatgcctgtgcttcatgggcgaaatctcctgctctttcggtcgctcgagtcaagctggcccttctggctgaccttagccctggcagttatcctacagaatatggctgctcactgggttttcctggagacccacgatgggcaccctcagttaacgaatagacgggtgctctacgcagccacgtttctcctgtttccactgaatgtgcttgtgggtgcaatggtagccacttggcgggttctcttatccgccctgtacaatgcgatccacctgggacagatggacctgagcctgctcccgccgagggcagccacgttagatccggggtactatacctacaggaatttcttaaagatcgaggtgtcacagtcccacccagcaatgaccgcattttgctcgcttttactgcaggcccagtctctgttgccaagaaccatggccgccccgcaagactcactgagaccaggagaggaggatgaaggaatgcagctcctccaaaccaaggattccatggccaaaggggcacggccaggggccagcagggggcgggctcggtggggtctggcctatacgctgctccacaaccccactcttcaagtatttcggaaaacggccttattgggggcgaatggagctcaaccctag

SEQ ID NO: 76862 - DNA, 2121 bp, Artificial Sequence
  derived and/or modified sequence
atgggcggcaagggcggcggggacacccggggccctgtgctcttcccctgccagctggcccaggccctgagcccccggcgggccttcccccgggagctgaaggagaagggccagaggatgagcagccagcctgctggcaaccagaccagccctggggccacagaggactacagctatggctcctggtacattgatgagccccagggcggggaggagctgcagcctgagggggaggtgcccagctgccacaccagcatccccccaggcctgtaccacgcctgcctggccagcctgagcatcctggtgctgctgctgctggccatgctggtgagaagacggcagctgtggccagactgtgtgcggggccggcccggcctgcccagccctgtggacttcctggccggggaccggcccagggctgtgcctgctgctgtgttcatggtgctgctgagcagcctgtgcctgctgctgcctgatgaagatgccctgcccttcctgaccctggccagcgcccccagccaggacggcaagacagaggcccccaggggggcctggaagatcctgggcctcttctactatgctgccctgtactaccccctggccgcctgtgccacagctggccacacagctgcccacctgctgggcagcaccctgtcctgggcccacctgggcgtgcaggtgtggcagagagctgagtgcccccaggtgcccaagatctacaagtactacagcctgctggccagcctgcccctgctgctgggcctgggcttcctgagcctgtggtaccctgtgcagctggtgcgctccttcagcagaagaactggagctggcagcaagggcctgcagagcagctacagcgaggagtacctgaggaacctgctgtgcaggaagaagctgggcagcagctaccacaccagcaagcacggcttcctgtcctgggcccgggtgtgcctgcggcactgcatctacaccccccagcccggcttccacctgcccctgaagctggtgctgagcgccaccctgaccggcacagccatctaccaggtggccctgctgctgctggtgggcgtggtgcccaccatccagaaggtgcgggccggcgtgaccacagatgtgtcctacctgctggccggctttggaattgtgctgtctgaggacaagcaggaggtggtggagctggtgaagcaccacctgtgggccctggaggtgtgctacatcagcgccctggtgctgagctgcctgctgaccttcctggtgctgatgaggagcctggtgacccacaggaccaacctgcgggccctgcacagaggagctgccctggacctgagccccctgcacaggagcccccaccccagccggcaggccatcttctgctggatgtccttcagcgcctaccagacagccttcatctgcctgggcctgctggtgcagcagatcatcttcttcctgggcaccacagccctggccttcctggtgctgatgcctgtgctgcacggcaggaacctgctgctcttccgcagcctggagagctcctggcccttctggctgaccctggccctggccgtcatcctgcagaacatggccgcccactgggtgttcctggagacccatgatggccacccccagctgaccaacagaagagtgctgtatgctgccaccttcctgctcttccccctgaatgtgctggtgggcgccatggtggccacctggagggtgctgctgagcgccctgtacaatgccatccacctgggccagatggacctgagcctgctgccccccagggctgccaccctggaccccggctactacacctacagaaacttcctgaagattgaggtgtcccagagccacccagccatgacagccttctgcagcctgctgctgcaggcccagagcctgctgcccaggaccatggccgccccccaggacagcctgcggcctggagaggaggatgagggcatgcagctgctgcagaccaaggacagcatggccaagggggcccggcctggggccagccggggccgggcccgctggggcctggcctacaccctgctgcacaaccccaccctgcaggtgttcaggaagacagccctgctgggcgccaacggggcccagccctag

SEQ ID NO: 76863 - DNA, 2121 bp, Artificial Sequence
  derived and/or modified sequence
atgggcggcaagggcggcggcgacacccggggccccgtgctgttcccctgccagttggcccaggccctctcaccgcgccgtgcgttccctcgggagctgaaagagaaagggcagagaatgtcctcacagccagcaggtaaccaaactagcccgggagctaccgaggattactcctatggatcatggtacattgacgagcctcaggggggggaagagctccagcccgaaggggaggtccctagctgccacacatccatacctccaggcctctatcatgcttgcctcgcttctctttctatcctagtcctccttttgttggcaatgctggtccggcgcagacagctctggccagattgcgtccggggacgacctggactgccatcaccggtagacttcttagctggggatcgccccagagctgtgccagctgccgtgttcatggtgctgctctcatccctctgcctgctgctgcctgatgaagatgcactcccatttctcacgctggcctcggctccaagccaagatgggaaaaccgaagctccccggggcgcatggaagattctgggactgttctactatgccgctctgtattacccactggccgcatgcgccaccgcaggccatactgctgcacacctgttgggctctactttgtcttgggcccacctgggagtccaggtgtggcagcgagcagagtgtccacaagttcccaagatttacaaatactattctctgctagcaagtttgcctctgctgctgggattgggctttttgagcctgtggtatccggttcaattggtcaggtcatttagccgcagaacgggtgcggggagtaagggcctgcagagcagctactccgaagagtatctgcgtaaccttctgtgcagaaagaagctggggtcttcataccatacctctaagcacggtttcttgtcctgggccagggtctgcctacgtcactgcatctataccccacaacccgggttccacctgcctctcaaactcgtgttaagcgcaaccctcactggaacagccatatatcaggttgccttgttactactggtcggcgtggttcccacaattcaaaaagtgcgtgcaggagtcacaaccgatgtgtcctacctcctggcaggcttcggaatcgtgttaagcgaagacaaacaggaggtggtcgaattagtcaagcaccacttatgggctctcgaagtctgctacatcagtgctctggtgctgtcctgcctgcttaccttcttagtactgatgaggtcgttggtaacccacaggacaaaccttcgagctcttcaccgcggggccgcactggatttgtcacctctccatcgaagtccccaccctagccgccaggccatattctgttggatgtcgttctccgcttatcagactgcctttatctgcctcggactcttggtacagcagatcatctttttcttggggacaaccgctctggcctttctggttctcatgcctgtgctgcacggccgtaacctgttgctcttccggtcactagaatccagctggcctttttggctgaccttggccttagcagtgatcctacagaacatggccgcacattgggtgttcctcgagacccacgatggtcaccctcagttgacgaaccgaagggttctctacgcagctacctttctgctattccccctcaatgttctagtgggtgccatggtcgccacttggcgcgtcctcctgtccgctctatataatgcaatccacctgggacagatggatctgtccttgttgcctccacgggccgcaactcttgatcctgggtattatacctatcgcaactttctaaagattgaggtctcacagagccatcctgctatgacagccttctgctctcttctcctccaggcccagtccctgcttccaagaacaatggccgcaccccaggactccctccgacccggcgaagaagatgagggaatgcagcttctgcagactaaagattcaatggccaagggcgcccgccccggagcaagccggggacgggctaggtggggtttggcgtataccctgttacataacccaaccctccaggtcttcaggaagactgccctgctcggggctaatggggcacagccctag

SEQ ID NO: 76864 - DNA, 2121 bp, Artificial Sequence
  derived and/or modified sequence
atgggcggcaagggcggcggcgacacccggggccccgtgctgttcccctgccagctagcccaagcgctgtcacccaggcgagcctttcctcgcgaacttaaagagaagggccagcgcatgagctcccagcctgccggaaatcagacctcacccggcgcaacagaggactactcatacggttcgtggtacatcgatgaaccccaggggggtgaggagctccagccagagggcgaagttccatcctgccatacatccatcccaccagggctgtaccatgcctgcctggcctctttgtccattctcgttcttctcctgctcgcaatgcttgttaggagaaggcagctctggcccgattgtgtacgggggcgacccgggcttccttcacctgtggattttttggctggggaccgacctcgcgcggtacctgccgccgtgtttatggttttgctaagtagcttgtgtctgttactgccagacgaagatgctctacccttcctaactctggccagcgcaccctcccaggacggcaaaacggaagcacccagaggcgcctggaaaattctgggcctgttctactacgccgccctctattacccactggccgcctgtgccactgccggccataccgcagcgcacctgttgggatctacactatcgtgggcacacctgggggtgcaggtttggcagcgagccgaatgccctcaggtaccaaagatctacaaatattatagcctgcttgcaagcctgccgctgctgcttggcctgggctttctgagcctgtggtatccggtgcagctggtgcggtctttctcgcgccggactggcgctggatctaaggggctccaatcatcctactccgaggaatacctacggaatctgttatgccgtaaaaagcttggttcaagttatcacacatcaaaacacggatttcttagctgggcccgggtctgtcttcggcactgcatttacacgccgcaacctggatttcacttaccactaaaactcgtcctgagtgccaccctcactggcacagctatctaccaagtcgcactgctgcttctcgtgggagtggtaccaaccatccagaaggtgcgtgctggggtgacaaccgatgtgagctacctgctggctggattcggcattgttttgtcagaggataagcaggaagtggtggagctcgttaaacatcacctgtgggccttggaagtctgctatattagcgccctagttttaagctgtctcttgacctttttggtgctgatgcggtcgctggtgacgcatcgcaccaaccttcgggccctgcacagaggggcagctctcgacctgagccctcttcatcgttccccccacccttcccgccaagcaattttttgttggatgtcttttagcgcttatcagacggcgttcatttgcctgggcttgctcgtgcaacaaatcattttctttctgggcaccaccgctcttgctttcctggtactgatgcccgtgctgcacggacgcaacctgctgctttttcgatccctcgagtcgagctggcccttctggctcaccctcgccctggctgtcatactccagaatatggctgcccattgggtatttttagaaacccatgacggacaccctcagctgaccaataggagagtactgtacgccgctacttttttattatttcctctcaacgtgcttgtgggtgcaatggtggccacctggcgtgtacttctgtcagccctgtacaacgcgattcaccttggtcagatggacctgagcctgttgcctccacgagcagctacactcgatcccgggtattacacatacaggaactttctgaaaatagaagtttctcagagccaccctgccatgactgctttctgtagtctcctcctgcaggctcagtctctattgccacgtaccatggcagcccctcaggacagtttgcgccctggtgaggaggacgagggaatgcagctgctgcagactaaggacagcatggctaaaggcgctcgaccaggcgcatcaagagggcgggcacgctgggggctggcttacacattgctccataatcccaccttacaggtcttccggaagaccgcccttcttggagccaatggcgcacaaccatag

SEQ ID NO: 76865 - DNA, 2121 bp, Artificial Sequence
  derived and/or modified sequence
atggggggtaagggtggtggagatacacggggaccagttctgtttccctgtcagctagcccaagcactgtcccctagacgcgcttttcctagagaactcaaagagaaaggtcagcggatgagctcccaacccgcaggaaatcagacctccccaggggctacagaggattactcctatggcagctggtatattgacgaaccccagggcggagaggagcttcagccagaaggagaggtgcccagttgtcacacgagcattccccctggcctctaccacgcctgtctggccagcctgtctatcctggtactccttttactcgccatgttggtgcgacgcagacaactctggcctgactgtgtgcggggtcgccctggcttgccttctcctgtcgatttcctggcaggagatagaccgcgtgctgtccccgcagctgtgttcatggtgctgctgagtagcctatgcttactcttgcctgacgaggatgccctgccctttctgactctcgcatccgctccatcccaagacggtaaaaccgaggcgccacggggagcctggaaaatcctgggcctgttttattacgcggctctgtactatcccctagcggcttgcgcaactgccggacacaccgccgcacatctcctgggctccaccctgtcctgggctcacctgggagtgcaggtgtggcagcgggcagagtgtccacaggtacccaaaatctacaaatactattctctcctagcctctctgccactgctgctcggcctaggttttctgagcctgtggtatccagttcagctcgtgcgctccttctctcgcaggaccggcgctgggtcaaaaggacttcagtcatcatatagtgaagagtatctccgaaatcttttgtgtcgtaagaagctgggatcttcctatcacacatctaaacatggcttcctcagttgggcccgtgtgtgcctcaggcattgcatttacacacctcagcctgggttccacctcccccttaaactggtactgagcgctacgctgactggaaccgccatctatcaagtggcgctactcctgctggtcggcgtggtccctactattcagaaggtgcgtgccggagttactaccgatgtttcctatctgctagctggtttcggaattgtgctttctgaagacaaacaggaagtggttgaactagtgaaacaccatctctgggccttggaagtctgctacataagcgcccttgtcctgtcctgtcttttgacctttctggtcttgatgcggagccttgttacccacagaaccaatctgagagctctacatcgcggagcagctctggacctgtccccgctacaccggtccccgcacccctcacgacaagccatcttttgctggatgagctttagtgcctatcaaacagcatttatttgcttgggtctgcttgtgcaacagatcatctttttcctggggacaaccgcactggcgtttctcgtcttgatgccagtgctgcacggcaggaacctcctcttgtttagaagcttagaatccagctggccattctggctaacacttgctctggctgtgatccttcagaatatggccgctcattgggtattcctggaaacccacgatggtcacccccaactaactaaccgtcgggtgttgtacgcagcgacgtttttgctgtttcctcttaatgtgttggtgggcgctatggtagcaacatggcgggtgctgttgagcgcactttataacgccatacatttaggccagatggacctctcgctgctgccacctcgtgcagcaaccctcgaccccggttactacacgtatagaaactttctgaagatcgaggtgagtcagagtcaccccgctatgaccgccttttgttccctgctgctgcaagcgcagtcgctgttgcccaggactatggctgcccctcaggactcccttagacctggcgaagaggatgagggtatgcagctcctgcaaactaaagacagcatggccaaaggtgccagacccggtgccagccgcggacgagcaaggtgggggttggcgtacactttgctgcacaatcctaccctgcaggtctttcgaaagacagccctgttgggagcgaatggcgcacagccctag

SEQ ID NO: 76866 - DNA, 2121 bp, Artificial Sequence
  derived and/or modified sequence
atgggcggaaaaggcggtggggatactcggggtccggtgctgtttccttgtcagctggcccaggccctgtcgccacgcagagccttccccagagaactgaaagagaaaggacaacggatgtcctcccagcccgcaggaaaccagacctctcccggagctaccgaagactatagctatgggtcatggtatatcgacgagccacagggtggagaggagctccagccagagggtgaagtcccgtcgtgtcacaccagcattccacccggactgtaccatgcatgtctggccagcctttctatcctggttctgctgcttctcgcaatgcttgtgcgaaggcgccagctctggccagattgcgttcggggaaggcccggactgccgtcccccgtagatttcctcgcaggcgatagacctagggcagtcccagccgctgttttcatggtcctcctaagttctctgtgcctgctactccctgacgaggacgccctgccatttctgaccctggcgagtgcaccatcacaggatggaaagactgaagctcccaggggcgcatggaagatcttgggattgttctactacgccgctctatactatcccttggccgcatgcgccacagccggacacacagccgctcatctccttggatcgactctttcctgggcgcacttgggggtgcaagtctggcagcgagcagaatgcccccaggtgccaaagatctacaagtactactccctgctcgccagccttcctcttcttctggggctgggctttctgagcctgtggtatccggtgcagcttgtgcgttcattcagtcgacgcacgggtgctggcagcaaaggccttcaaagctcctatagcgaggagtacctcagaaacctgctgtgccgcaagaaacttggctcatcttatcatacaagcaaacacggattcctttcttgggcacgggtatgcctcaggcattgcatctatacgccacagccagggttccatctgccactgaagctcgttctgagcgctactctgaccggaactgcaatttaccaagtagcactgctgttgctggtaggcgtggtaccaaccatccagaaggtcagagcaggagtgactaccgatgtgagctatctgctggctggattcggtatcgtgctctccgaggacaagcaggaggtggttgagctggtgaagcaccatctctgggcactggaagtctgctatatttccgctttggtgttaagctgtctcctgaccttcctggtgttaatgagaagccttgtcacacaccgtaccaacctcagagccctgcaccgcggagctgcgctggacttgtctcccctgcaccggtcacctcacccttcccgacaggccatcttctgctggatgtcattttccgcgtatcagaccgccttcatctgtctgggattattggtgcaacagatcatctttttcctcggcactactgcactggcctttttggtactcatgccggtcctccacggcaggaacctgcttctgttcagaagcctcgaaagctcatggcctttctggctgacactggcactcgccgtgatccttcaaaatatggcagcacactgggtgttcttagaaacacatgacggacatcctcagcttacaaaccggagagtgctttatgccgcaaccttcctcttgttcccactaaatgtgctggttggtgctatggtggctacctggcgtgtattactctctgccctgtacaatgcaatccatctggggcagatggatttaagtctcttgcctcctagagccgctaccctcgacccaggctattacacatacaggaattttttgaagatcgaagtgtctcaatcgcatccggcaatgaccgctttttgctcattactgctccaggcccaaagccttctgccaagaacgatggccgctccacaggatagtctgaggccgggtgaggaggacgagggcatgcagctcttgcagaccaaggactcaatggctaaaggcgctagaccgggtgcatcacgaggccgagcacggtggggactggcatacactctacttcacaatcctacactgcaagtgttccggaagaccgcactgctgggtgccaacggagctcagccttag

SEQ ID NO: 76867 - DNA, 2565 bp, Artificial Sequence
  derived and/or modified sequence
aaaggggccagaaaggggcaggctgaggctgggggaggggctcaagggagcccagctgggagggcccaggcaggcagtgcggagctggccgtgggctgcctaccctttcatctctgcaactccttcctccctgggcctcccttctggtgtgtctgtgggtctgtctaggtgggcttgggaaaggggaaggaaggggcgtctctttaggcagctcagactggacaagccttctttgaaaatggtcctttgaacacacgcctgctggtggttggtcagacagatgcgccagcgggagccccggggccccaaggggacagctatctctgcaggaccagtgcgatgggcgggaagggaggaggggacacgagaggccctgtcctcttcccgtgccagcttgctcaggccctcagtcccagacgggcttttcccagagagctaaaagagaagggccagagaatgtcgtcccagccagcagggaaccagacctcccccggggccacagaggactactcctatggcagctggtacatcgatgagccccaggggggcgaggagctccagccagagggggaagtgccctcctgccacaccagcataccacccggcctgtaccacgcctgcctggcctcgctgtcaatccttgtgctgctgctcctggccatgctggtgaggcgccgccagctctggcctgactgtgtgcgtggcaggcccggcctgcccagccctgtggatttcttggctggggacaggccccgggcagtgcctgctgctgttttcatggtcctcctgagctccctgtgtttgctgctccccgacgaggacgcattgcccttcctgactctcgcctcagcacccagccaagatgggaaaactgaggctccaagaggggcctggaagatactgggactgttctattatgctgccctctactaccctctggctgcctgtgccacggctggccacacagctgcacacctgctcggcagcacgctgtcctgggcccaccttggggtccaggtctggcagagggcagagtgtccccaggtgcccaagatctacaagtactactccctgctggcctccctgcctctcctgctgggcctcggattcctgagcctttggtaccctgtgcagctggtgagaagcttcagccgtaggacaggagcaggctccaaggggctgcagagcagctactctgaggaatatctgaggaacctcctttgcaggaagaagctgggaagcagctaccacacctccaagcatggcttcctgtcctgggcccgcgtctgcttgagacactgcatctacactccacagccaggattccatctcccgctgaagctggtgctttcagctacactgacagggacggccatttaccaggtggccctgctgctgctggtgggcgtggtacccactatccagaaggtgagggcaggggtcaccacggatgtctcctacctgctggccggctttggaatcgtgctctccgaggacaagcaggaggtggtggagctggtgaagcaccatctgtgggctctggaagtgtgctacatctcagccttggtcttgtcctgcttactcaccttcctggtcctgatgcgctcactggtgacacacaggaccaaccttcgagctctgcaccgaggagctgccctggacttgagtcccttgcatcggagtccccatccctcccgccaagccatattctgttggatgagcttcagtgcctaccagacagcctttatctgccttgggctcctggtgcagcagatcatcttcttcctgggaaccacggccctggccttcctggtgctcatgcctgtgctccatggcaggaacctcctgctcttccgttccctggagtcctcgtggcccttctggctgactttggccctggctgtgatcctgcagaacatggcagcccattgggtcttcctggagactcatgatggacacccacagctgaccaaccggcgagtgctctatgcagccacctttcttctcttccccctcaatgtgctggtgggtgccatggtggccacctggcgagtgctcctctctgccctctacaacgccatccaccttggccagatggacctcagcctgctgccaccgagagccgccactctcgaccccggctactacacgtaccgaaacttcttgaagattgaagtcagccagtcgcatccagccatgacagccttctgctccctgctcctgcaagcgcagagcctcctacccaggaccatggcagccccccaggacagcctcagaccaggggaggaagacgaagggatgcagctgctacagacaaaggactccatggccaagggagctaggcccggggccagccgcggcagggctcgctggggtctggcctacacgctgctgcacaacccaaccctgcaggtcttccgcaagacggccctgttgggtgccaatggtgcccagccctgagggcagggaaggtcaacccacctgcccatctgtgctgaggcatgttcctgcctaccatcctcctccctccccggctctcctcccagcatcacaccagccatgcag

SEQ ID NO: 76868 - DNA, 2730 bp, Artificial Sequence
  derived and/or modified sequence
atgggcgggaagggaggaggggacacgagaggccctgtcctcttcccgtgccagcttgctcaggccctcagtcccagacgggcttttcccagagagctaaaagagaagggccagagaatgtcgtcccagccagcagggaaccagacctcccccggggccacagaggactactcctatggcagctggtacatcgatgagccccaggggggcgaggagctccagccagagggggaagtgccctcctgccacaccagcataccacccggcctgtaccacgcctgcctggcctcgctgtcaatccttgtgctgctgctcctggccatgctggtgaggcgccgccagctctggcctgactgtgtgcgtggcaggcccggcctgcccagccctgtggatttcttggctggggacaggccccgggcagtgcctgctgctgttttcatggtcctcctgagctccctgtgtttgctgctccccgacgaggacgcattgcccttcctgactctcgcctcagcacccagccaagatgggaaaactgaggctccaagaggggcctggaagatactgggactgttctattatgctgccctctactaccctctggctgcctgtgccacggctggccacacagctgcacacctgctcggcagcacgctgtcctgggcccaccttggggtccaggtctggcagagggcagagtgtccccaggtgcccaagatctacaagtactactccctgctggcctccctgcctctcctgctgggcctcggattcctgagcctttggtaccctgtgcagctggtgagaagcttcagccgtaggacaggagcaggctccaaggggctgcagagcagctactctgaggaatatctgaggaacctcctttgcaggaagaagctgggaagcagctaccacacctccaagcatggcttcctgtcctgggcccgcgtctgcttgagacactgcatctacactccacagccaggattccatctcccgctgaagctggtgctttcagctacactgacagggacggccatttaccaggtggccctgctgctgctggtgggcgtggtacccactatccagaaggtgagggcaggggtcaccacggatgtctcctacctgctggccggctttggaatcgtgctctccgaggacaagcaggaggtggtggagctggtgaagcaccatctgtgggctctggaagtgtgctacatctcagccttggtcttgtcctgcttactcaccttcctggtcctgatgcgctcactggtgacacacaggaccaaccttcgagctctgcaccgaggagctgccctggacttgagtcccttgcatcggagtccccatccctcccgccaagccatattctgttggatgagcttcagtgcctaccagacagcctttatctgccttgggctcctggtgcagcagatcatcttcttcctgggaaccacggccctggccttcctggtgctcatgcctgtgctccatggcaggaacctcctgctcttccgttccctggagtcctcgtggcccttctggctgactttggccctggctgtgatcctgcagaacatggcagcccattgggtcttcctggagactcatgatggacacccacagctgaccaaccggcgagtgctctatgcagccacctttcttctcttccccctcaatgtgctggtgggtgccatggtggccacctggcgagtgctcctctctgccctctacaacgccatccaccttggccagatggacctcagcctgctgccaccgagagccgccactctcgaccccggctactacacgtaccgaaacttcttgaagattgaagtcagccagtcgcatccagccatgacagccttctgctccctgctcctgcaagcgcagagcctcctacccaggaccatggcagccccccaggacagcctcagaccaggggaggaagacgaagggatgcagctgctacagacaaaggactccatggccaagggagctaggcccggggccagccgcggcagggctcgctggggtctggcctacacgctgctgcacaacccaaccctgcaggtcttccgcaagacggccctgttgggtgccaatggtgcccagccctgagggcagggaaggtcaacccacctgcccatctgtgctgaggcatgttcctgcctaccatcctcctccctccccggctctcctcccagcatcacaccagccatgcagccagcaggtcctccggatcactgtggttgggtggaggtctgtctgcactgggagcctcaggagggctctgctccacccacttggctatgggagagccagcaggggttctggagaaagaaactggtgggttagggccttggtccaggagccagttgagccagggcagccacatccaggcgtctccctaccctggctctgccatcagccttgaagggcctcgatgaagccttctctggaaccactccagcccagctccacctcagccttggccttcacgctgtggaagcagccaaggcacttcctcaccccctcagcgccacggacctctctggggagtggccggaaagctcccgggcctctggcctgcagggcagcccaagtcatgactcagaccaggtcccacactgagctgcccacactcgagagccagatatttttgtagtttttatgcctttggctattatgaaagaggttagtgtgttccctgcaataaacttgttcctg

SEQ ID NO: 76869 - protein, 206 aa, Artificial Sequence
  derived and/or modified sequence
MSQTSLKQKKNEPGMRSSKESLEAEKRKESDKTGVRLSNQMRRAVNPNHSLRCCPFQGHSSCRRCLCAAEGTALGPCHTIRIYIHMCLLWEQGQQITMMRVSRDHTTDSGGEPQTTWGSQESSLRKTDSRGYLVRSQWSRISRSPSTKAPSIDEPRSRNTSAKLPSSSTSSRTPSTSPSLHDSSPPPLSGQPSLQPPASPQLPRSL

SEQ ID NO: 76870 - DNA, 621 bp, Artificial Sequence
  derived and/or modified sequence
atgagccagaccagcctgaagcagaagaagaacgagcccggcatgagaagcagcaaggagagcctggaggccgagaagagaaaggagagcgacaagaccggcgtgagactgagcaaccagatgagaagagccgtgaaccccaaccacagcctgagatgctgccccttccagggccacagcagctgcagaagatgcctgtgcgccgccgagggcaccgccctgggcccctgccacaccatcagaatctacatccacatgtgcctgctgtgggagcagggccagcagatcaccatgatgagagtgagcagagaccacaccaccgacagcggcggcgagccccagaccacctggggcagccaggagagcagcctgagaaagaccgacagcagaggctacctggtgagaagccagtggagcagaatcagcagaagccccagcaccaaggcccccagcatcgacgagcccagaagcagaaacaccagcgccaagctgcccagcagcagcaccagcagcagaacccccagcaccagccccagcctgcacgacagcagccccccccccctgagcggccagcccagcctgcagccccccgccagcccccagctgcccagaagcctgtag

SEQ ID NO: 76871 - DNA, 621 bp, Artificial Sequence
  derived and/or modified sequence
atgagccaaactagccttaagcagaagaagaatgagccggggatgcgctccagtaaggaatcactggaagccgaaaagcggaaagagtctgataagacaggggtgaggttatccaatcagatgcggagggctgtgaatccaaatcacagtcttcgatgctgcccttttcaagggcatagctcatgtagacgatgcctgtgtgccgccgaagggacagccctggggccatgccatactatcagaatctatatccatatgtgtttactgtgggaacaggggcagcagattacgatgatgagggtgtcgagagaccacacaaccgatagtggtggggaaccccagaccacatggggctctcaggagagctccctgcggaagacagacagcagaggataccttgttagaagccagtggagtaggatctccaggtcacctagcactaaagccccatctatcgacgaaccccgatcccgaaacacctctgccaagttaccttcgtccagtacaagttcaagaacccccagcacaagcccttccttgcatgattccagccctcccccactgtcagggcaaccaagtttgcagccgcccgcctcccctcaactgcctagaagcctgtag

SEQ ID NO: 76872 - DNA, 621 bp, Artificial Sequence
  derived and/or modified sequence
atgagccagaccagcctgaagcagaagaagaatgaacctggcatgaggagcagcaaggagagcctggaggccgagaagaggaaggagagtgacaagacaggagtgcggctgagcaaccagatgagaagagctgtgaaccccaaccacagcctgcgctgctgccccttccagggccacagcagctgccgccgctgcctgtgtgccgctgagggcacagccctgggcccctgccacaccatccgcatctacatccacatgtgcctgctgtgggagcagggccagcagatcaccatgatgagggtgtcccgggaccacaccacagattctggaggagagccccagaccacctggggcagccaggagagcagcctgaggaagacagacagccggggctacctggtgcgcagccagtggagccgcatcagccgcagccccagcaccaaggcccccagcattgatgagcccaggagcaggaacaccagcgccaagctgcccagcagcagcaccagcagcaggacccccagcaccagccccagcctgcatgacagcagccccccacccctgagcggccagcccagcctgcagcccccagccagcccccagctgcccaggagcctgtag

SEQ ID NO: 76873 - DNA, 621 bp, Artificial Sequence
  derived and/or modified sequence
atgagccagaccagcctgaagcagaagaagaacgagcccggcatgcggtcctccaaagagtctctagaggccgaaaaaagaaaggagtcggacaagacgggagtccgattatctaatcagatgaggcgcgcagtaaatccgaaccatagtctaagatgctgtccatttcagggacattcctcttgcaggcggtgcttgtgtgctgccgagggcactgcattggggccatgccataccattcgcatctatattcacatgtgtctactgtgggagcagggacagcagatcactatgatgcgggttagccgcgatcacaccactgatagtggcggcgaaccacaaactacttggggaagccaagaatcaagccttaggaagactgactccaggggatatctcgttaggtctcagtggtccagaatctcacgaagtccatctaccaaggctcctagcattgatgagccgcgaagcagaaacacttcagctaaattgcccagcagttctactagttcgcggactccctcaacctctccaagccttcacgatagcagcccacctcccctgagcggccagcctagcttgcagccgccggcttcccctcagctacccaggagcctgtag

SEQ ID NO: 76874 - DNA, 685 bp, Artificial Sequence
  derived and/or modified sequence
gtgacaggaaatggagctggggagacaaaaatgtggataacaacaaaagaatttcaacaggtaaaaaaatgagtcaaacatctctcaaacagaaaaagaatgagcctggaatgaggtcctcaaaagagagtctagaagcagaaaaaagaaaggaatctgacaaaacaggagttcgtctgagcaatcagatgaggcgtgcagtcaatccgaatcactcgctgagatgttgccccttccagggtcactcgtcgtgtagacgctgcctttgtgcagctgagggaacagcccttggcccctgccacacaatacgtatttatattcacatgtgcctgttgtgggagcagggccagcagatcaccatgatgagggtgagcagagatcacactaccgattctggaggggaaccacagacaacctggggatcacaagaatcatcactgcggaagacagactctcgagggtaccttgtgcgcagtcaatggtctagaatatcccggagcccatccaccaaggctccatccatagatgagcctagaagcaggaacaccagtgctaagctccccagcagctccacgagctcccggactccatccacctccccaagcctgcatgactcctcaccgccgccgctgtccgggcagccctcgctccagccacccgcgtcgccccagctgccccggtcgct

SEQ ID NO: 76875 - DNA, 621 bp, Artificial Sequence
  derived and/or modified sequence
atgagtcagacttccctgaagcagaaaaagaatgaaccgggaatgcgaagctcgaaagaatcactggaggccgaaaagagaaaagagagtgataaaactggtgtaagattgtccaatcagatgaggcgcgctgtcaatcccaatcactctttaagatgctgccccttccaaggccattcctcttgtcgtagatgtttgtgtgccgcagaaggaacggctctcgggccatgtcatacaatccggatctacatccatatgtgtctgttgtgggaacaaggtcagcagattacgatgatgagagtatctcgcgaccataccacggacagcggcggagagcctcagactacatgggggtctcaggagtcctctctgcggaagacagacagtcgaggatacctggtccgcagccagtggtcccgaattagcaggtctccctctacaaaagctcctagtatagatgagcccaggtccagaaataccagcgcgaaacttccgagctccagtacatcgtccagaaccccaagtacctccccctctcttcacgatagcagtccgccaccacttagcggacagccctccctccagccccctgcatctccccagctcccaagatccttatag

SEQ ID NO: 76876 - protein, 981 aa, Artificial Sequence
  derived and/or modified sequence
MSEQERIQECLRKEIRSLLISTKDGLSPQELEKEYLLMVGNHLPLRILGYRSTMELVLDMPDVVRVCPGAGGTVILKAIPDESTKGIASLVAKQRSSHKLRNSMHKGRPSIYSGPRSHRRVPYRGRVAPILPAVVKSELKDLLALSPVLLSDFEKAFAKRFGRSFQYMQYGFLSMFEVLNAASDVISVEQTRAGSLLMLKKSVTEEKPRGCPAGKIFTQPFRMKQGSYSTGFPVAKPCFSQPTSNMEPPKQIMSMEKTSKLNVVETSRLNHTEKLNQLENTFKSVIAQIGPGGTISSELKHKIKFVVSKFPEGLFISKLLGEYEVIFKEQLSPKKLGFLNVTELVGALSDILHVEFRKGHQDLLVFDADKKPLPPVQSDKKIEAKACVSSPPRNSLSTAAVKETVWNCPSKKQKEPQQKICKKPNLVVKPLQLQVETNKSELNLAMANHDIPPDAVPNKKLCRLPPLDTSSLIGVFVEYIISPSQFYIRIYSRDSSELLEDMMIEMRRCYSNQLVSDRYVMPECFIQPGHLCCVRISEDKWWYRVIIHRVLEKQEVEVFYPDFGNIGIVQKSSLRFLKCCYTKLPAQAIPCSLAWVRPVEEHWTSKAILQFQKLCGLKPLVGVVDEYVDGILNIFLCDTSSNEDVYFHHVLRTEGHAIVCRENISSKGFSELNPLALYTTSSGGPEDIVLTELGYPSQQHYFNEDRKISPQSKESELRILDEIPTGMPCLESVTIGDDIWDENWLPLQAKMGKGGDAASHLFTASLGGKNQYSSCKEMPQKDWCFSTPKDTWDDSWQPSGLVNGTKVEVHKPEVLGAQEKNTGTNRTQKQLDINGSSDSSTLPKLEEFCTSLTQSEQSADGSQSEPNNSQTQPKQIQLSTAAPCSTTAVDDSAEKPSGSVESSPEILKNEDFSSSRAITLYKDKRQESVDQLSLILSYECQISQKLYIPRSTATAALGAAARLATSRSLLHWYPSVKRMEA

SEQ ID NO: 76877 - DNA, 2946 bp, Artificial Sequence
  derived and/or modified sequence
atgagcgagcaggaacgaatccaggagtgcctgagaaaagaaattcggagccttctgatctcaactaaggacgggttatctcctcaagagctggagaaagaatacttactgatggtgggtaaccatctgccactcaggatactgggataccgatctacaatggaactagttctggatatgccagatgtcgtcagggtgtgcccaggcgcagggggaactgtgatacttaaagccattcctgatgagtcaaccaagggcattgcctcactggtcgccaagcagagaagcagtcataaactgagaaattccatgcacaaagggaggccctctatctatagtgggccgagatcccacaggagggtgccatatcgaggacgcgtcgctcctatcctgccggcggtagtgaaatccgagctgaaggacctcttagccctgtcaccagtcttgctatctgatttcgagaaagcgttcgcaaaacgcttcgggcggtcattccaatacatgcagtatgggtttctaagcatgttcgaggtgctgaatgcggcgagtgacgtcatttccgttgagcagacacgcgccggtagtttgctgatgttgaagaagagtgtgaccgaggagaaacctagaggctgccctgctgggaagatctttacccaaccgtttcgcatgaagcaaggctcttacagtaccggttttccagttgcgaaaccctgcttctctcagcctacatcaaacatggaaccccccaaacagattatgtccatggagaagacttctaagcttaatgttgtggagacgtctcggctgaatcatacggagaagttaaaccagctcgagaatacttttaaatccgtgatagcccagatcggtcctggaggaacgatttcctccgagctgaaacataaaatcaagtttgtggtctcgaaattccctgaagggttattcataagtaaacttcttggagagtatgaggtgatcttcaaagagcaactctcaccaaagaagttgggcttcttaaacgtcacggaattagtgggcgctttatctgacattctgcacgtagagttccgcaaggggcaccaggatctgctggtcttcgatgctgataaaaagccactgcccccagttcagagcgacaagaagatcgaggctaaggcttgcgtgtccagccctccccgcaatagcctctctacggccgcggtgaaagagaccgtgtggaattgtccctctaagaagcagaaggaaccacagcagaaaatttgtaaaaaacccaaccttgttgtgaagccactacagctgcaagtggagaccaataaatccgaattgaatctggcgatggcaaaccatgatattccaccagacgccgtccccaataagaaactgtgtcgtcttccgcccctggacacctcttctctcattggtgtgtttgtggaatacattatctctcccagccagttctatatccgaatttactcccgggactcctcggaattgctggaggacatgatgattgagatgcgcagatgctactccaaccaactagtgagtgacagatacgtaatgccagaatgttttatacagcctggccacctatgttgcgtgcgtatctccgaggacaaatggtggtacagggtgataattcaccgggttctggagaaacaagaggtggaagtcttctaccccgacttcggcaacatcggtatagtgcaaaaaagctccctgcgatttctgaagtgttgctacactaagttacccgctcaagccatcccatgtagtctggcttgggtccgacccgttgaggagcactggacctcaaaagccatcctccaatttcaaaagctttgcgggctgaaacccttggtcggagtggtcgatgaatacgtcgacggcatactgaatatcttcctgtgtgatacttctagcaatgaggacgtctacttccaccacgtactgaggaccgaggggcatgcaattgtctgcagagaaaacatttcttccaagggcttctctgagctgaatcctttggccctgtacactaccagtagcggcggaccggaagatatcgtgctgaccgaactgggctacccatctcagcagcattactttaatgaagatcggaaaattagtccgcaatccaaggagagtgagctgaggatcttggatgagattcccaccgggatgccctgcctggaatcagtgaccattggggacgacatatgggacgaaaactggctgcccctgcaggcgaagatggggaagggcggtgacgcggccagccacctgttcaccgccagcctggggggaaaaaaccagtacagttcctgtaaggaaatgccccagaaagactggtgtttctctacccctaaggatacctgggacgattcctggcagcccagtggcttggtaaatggaacaaaagtcgaagttcataagcctgaggtgctcggagcccaggaaaagaatacagggacgaataggactcagaagcagctggatatcaatggttcttccgatagttccaccttgccaaagctggaagagttctgtacttcactgacccagtccgagcagtctgccgacggtagtcaatccgagcccaataactctcagacacagcccaaacagattcagttgagtacagccgctccttgctctaccacagcggtcgatgacagcgctgaaaagcctagcggaagtgttgaaagcagtcctgaaatcctgaaaaatgaggacttctcatcatcccgagccatcaccttgtacaaggacaagcggcaggaatccgtggatcagctctctcttatactgagctatgagtgtcaaatcagtcagaaactctacattccacgttcaaccgccacagcggctctgggggccgctgcaagactcgcgacctctcggtcattgctccactggtatcccagcgtcaagcgcatggaggcatag

SEQ ID NO: 76878 - DNA, 2946 bp, Artificial Sequence
  derived and/or modified sequence
atgtccgaacaggagcgaattcaggagtgcctgagaaaggagatcagatcgctgcttatctcaacaaaagatggcttgagtccacaggagctggaaaaagagtacctgcttatggtaggtaaccatctgcccctccggatcctgggctatagatcaactatggaactggtcctcgacatgcccgatgttgtgagggtctgcccaggcgccggcgggacagtaatactgaaggcgattcccgacgagagtacgaagggtatcgcgagtctggtcgctaaacagcgttcctctcacaagttaaggaattcaatgcacaaaggcaggccctccatctatagcggaccacggtcacaccggcgggttccataccgggggagggtcgccccaatcctgcccgccgtggtgaagagtgaattgaaggatctactagctttatctccggtcttactgagcgactttgagaaagcatttgctaagcggttcggtagatcattccagtacatgcagtacggctttcttagcatgtttgaggtgcttaatgccgccagtgatgttatatccgtggagcaaacacgggccggaagtcttctgatgctaaaaaagtccgttacagaggagaagccccggggttgtccagcgggcaaaatttttacgcagccgttcaggatgaaacaggggagttacagcacaggtttcccagtggccaagccatgcttctctcagccaacctcaaacatggaacccccgaagcagataatgtccatggaaaaaacctcaaaattaaacgtggtagagacctcaaggctcaatcacaccgagaagctgaaccaattagagaatacgttcaaatctgtcatagcgcagatcggtccgggaggcactatttcctccgaactgaaacataagatcaaattcgttgtgagcaagtttcctgaaggattattcatctccaagcttctcggggaatatgaagtgatttttaaggagcagctgagccctaagaagctcggatttctgaatgtcacagagctggtgggcgctctttcagatattctccatgttgaattcaggaaaggccaccaggacttgctggtttttgacgccgacaagaagcctctgcctccagtgcagtctgacaagaaaattgaggccaaggcatgcgtatcatctccaccgcgcaattctctgtcaactgcagctgtcaaagagaccgtgtggaattgccccagtaagaagcagaaggaacctcagcagaagatctgtaaaaaacctaaccttgtcgtgaagccattacagctgcaggtggaaacaaataaatcagagctaaatttagccatggctaaccatgacatcccacctgacgcggtacccaataagaaactttgcagactccctcctctcgacactagcagcctgattggggtcttcgtggagtacatcatctctccttcacaattctacattcgcatttattcccgggattcatccgagttgctggaggacatgatgatcgaaatgcggcgttgctactctaaccaactggtcagcgatagatatgttatgcccgagtgctttattcaacctgggcacttgtgctgcgtgcgaattagcgaagataagtggtggtatagagtgataatccatcgtgtcttggagaagcaggaagtagaagtcttctatcccgactttgggaatatcggtatagtccaaaaatcttccttgcgattcttgaaatgctgttatacaaagctgcctgctcaagccataccatgtagtcttgcgtgggtgcggccggttgaggaacactggaccagtaaggccatccttcagtttcagaaactatgtgggctgaaaccattggtaggagttgttgacgagtacgtagacggcattctcaacatctttttgtgcgacacttctagtaacgaagatgtgtatttccaccacgtgttgaggacagaggggcatgcaatcgtttgcagagaaaacattagtagcaaagggtttagcgaactgaaccctttagcgctctacaccacctcttctggagggcccgaggatattgtgctcaccgagctgggttacccttcccagcagcactattttaatgaggaccgcaaaatatctccacagtccaaagagtcagaattgcgtatacttgatgagatccctacgggaatgccctgtctagaatcagtgacaattggcgacgatatttgggatgaaaactggcttcccctgcaggcgaagatgggcaaggggggcgatgctgcaagtcatctctttaccgcgtctctgggaggcaagaaccaatattccagttgcaaggagatgcctcaaaaggactggtgtttctcgactccgaaggatacatgggatgactcatggcagccctcaggtcttgtgaatggcaccaaagtggaagtgcacaaacccgaggttctaggcgcgcaggaaaagaatacaggaactaatcgcacgcagaagcagctcgatatcaatggttcctccgacagttcaacacttccgaagcttgaagagttttgcactagtcttactcagtccgagcaatccgccgatgggagtcagtccgaaccaaacaacagccagactcagcccaagcagatccagctgagcacagctgctccctgcagcactaccgctgttgacgatagtgctgaaaaaccgagcggctctgtggagtcttcgccggagatcctcaagaatgaggatttttcctctagccgcgcaatcaccttgtacaaagacaaaaggcaggaatctgttgaccagctttccctgatactgagctacgagtgtcagatctcccaaaagctgtatatccccagaagcaccgccactgcagccctgggggccgctgctcgcctcgcaacctctcgttccctgctgcattggtatccgagtgtgaagaggatggaggcctag

SEQ ID NO: 76879 - DNA, 3632 bp, Artificial Sequence
  derived and/or modified sequence
acctcgcgtcttcccaccgcgtcggaggacgtaggcgcctgggatcctggaaggcttcggatgggaagtttgcgttggagtccaacacccgacaggaaccccagttaacgcctccgcatggccaggggcagagttcttgacacctgtagcttaatcaacgcaggtggagattcagggcttgaatcgcccggccacgcgcaagccgcagggcaccctcatactactacttctgccttattacccttaaaactggagtctcagttatttgtatcccactattggtttttttttaaatcttttttcgtgggtttgcccccttttcctcagctgcgtttctgtcttcagtcctgtagggcacaatgtctgaacaagagcgtatacaggaatgtctgcggaaggaaataaggtcacttctcatttccaccaaagatggtttgagcccacaggagttggagaaggagtaccttttgatggttggcaaccatctaccactccgaatccttgggtatcggtccactatggagctggtattggacatgcctgatgttgttcgtgtctgccccggtgcaggtggtactgtaatactgaaagccattccagatgaatctaccaaaggaatagcaagcttagttgcaaaacagaggagcagccataagcttcgaaactcaatgcataagggaagacctagtatttattctggaccgagatctcatcggcgagtaccttaccgaggaagggttgcccctattcttccagctgttgtgaagagtgagttgaaggacctgttggcgttatctcctgttcttctttctgattttgaaaaggcatttgccaaaagatttggacgatcattccaatacatgcaatatggatttctctctatgtttgaagtgcttaatgcggcttcagatgtcatttctgtagagcagaccagagcaggttctttgttgatgctaaagaagagtgtaacagaggaaaagccgagaggatgtccagcaggtaaaatttttacccagccatttagaatgaaacaagggtcatactccacaggctttccggtagcaaagccatgcttttcacaacccacttcaaacatggaaccaccgaagcaaataatgagcatggaaaagacttccaagttaaatgtagtggagacttcaagactgaatcacactgaaaaattaaaccagctggagaacacattcaaatcagttattgcacagattggacctggaggaactatcagttcagaactaaaacataagataaaatttgttgtatctaagttcccagagggtttgtttatttctaaactgcttggagagtatgaggtaatttttaaagagcaactatcaccaaaaaaattaggcttcttaaatgtgacagaacttgttggagctcttagtgacattctccatgttgagttcaggaaaggacaccaagacttactagtgtttgatgcggataagaagcctctaccacctgttcagtcagataagaaaatagaagccaaagcttgtgtctccagtccacctagaaattcattgtctactgctgctgtcaaagagactgtatggaattgcccttcaaaaaaacaaaaagagccacaacagaagatttgcaagaagcctaatctggtggtaaagcctttacagctgcaagtagaaacaaacaaatcagagctcaacttggcaatggcaaatcatgacatcccgccagacgctgtgccgaacaagaaattatgcagactcccaccattagacaccagttccctcataggggtctttgtggagtatatcatctctcctagtcaattctacatccggatctatagcagggattcgtcagagttactcgaagacatgatgattgaaatgcggcgctgttattctaatcagctggtttctgatcgatatgtcatgccagaatgttttattcagccgggacatctctgttgtgtaaggatttctgaggataagtggtggtatcgggtcattatccatcgagtccttgagaaacaggaagttgaagtgttctacccagactttggaaatattggaattgttcagaagtcctccctgaggttcctcaagtgctgctacacaaagcttccagctcaggctatcccttgttctttggcttgggtgagaccagtagaggaacactggacatcgaaagctattttgcagttccagaagttgtgcggtttgaagccattagtgggggtagtggatgaatatgtagatggaatccttaacatttttttgtgtgacacatcctcaaacgaagatgtctatttccatcatgtcttgagaacagagggccatgctattgtatgccgagaaaatatctcttctaagggtttcagtgagctcaaccctttagctttatacacgacatccagtggagggccagaggacattgtcttgacagaactgggttatccttcccagcagcactattttaatgaagaccgaaagataagtccacagtcaaaagagagtgagttacgtatcttggatgagatccccactggaatgccatgcctggagtcagtgaccataggtgatgatatttgggatgagaactggttacctctacaggctaagatgggaaaaggaggtgatgctgcctcccatctatttactgcaagccttggtggaaagaatcagtattcatcatgtaaagaaatgccacagaaggactggtgtttttctacccctaaagatacatgggatgattcttggcagccttcaggccttgtaaatggaacgaaagtagaagttcataagccagaagtactgggtgctcaggaaaaaaatactggcacaaacaggactcaaaagcaactagacataaatggttcttcagattcttccacactgcccaaattggaagaattctgtacctctcttacccagtcagagcagtcagcagacgggagccagtctgaacccaacaacagtcagactcagccaaagcaaattcagctttccacagcagcaccctgttcaacaactgcagtggatgattccgcagaaaagccctctggttctgtggaaagctcaccagagatcctaaagaatgaagatttttctagcagccgtgctattacattgtacaaagacaagcgtcaagaatctgtagaccagctgtctttgattttgtcttatgagtgccagatttctcagaagctctacattcctcgaagtacagccactgctgccttaggtgctgccgcacggttagctacatccaggagcctcctacactggtaccccagtgtgaaaaggatggaagcatgagggagggagggaggagggagaaaaacagaatccagccgcttaggctttgatgaactcccaggccaaaatgaggagttattgaagcaaaatagtatcttgatcattgatacttttgtctttctgtgactatatgttagctttattatgctaacagtctactttgatgtgtaagtaagtattgatatttactgttaatcttgatttttcttgattttattctgtgtcattttgttcacctttgtttttaatgtagtttaaaggaatttgtttttttgtgtttgtttttcttgtacattatcatgactgataaatgaaaattgaaaaact

SEQ ID NO: 76880 - DNA, 2946 bp, Artificial Sequence
  derived and/or modified sequence
atgtctgagcaggagcgcatccaggagtgcctgaggaaggagatccgcagcctgctgatcagcaccaaggatggcctgagcccccaggagctggagaaggagtacctgctgatggtgggcaaccacctgcccctgcgcatcctgggctaccgcagcaccatggagctggtgctggacatgccagatgtggtgcgggtgtgccctggggccggcggcaccgtcatcctgaaggccatcccagatgagagcaccaagggcatcgccagcctggtggccaagcagaggagcagccacaagctgagaaattccatgcacaagggccggcccagcatctacagcggccccaggagccacagaagagtgccctaccggggccgggtggcccccatcctgcctgctgtggtgaagtctgagctgaaggacctgctggccctgagccctgtgctgctgagtgactttgagaaggcctttgccaagagatttggccgctccttccagtacatgcagtatggcttcctgtccatgtttgaggtgctgaatgctgccagtgatgtgatctctgtggagcagaccagggctggcagcctgctgatgctgaagaagtctgtgacagaggagaagccccggggctgcccagctgggaagatcttcacccagcccttcaggatgaagcagggcagctacagcacaggcttccctgtggccaagccctgcttcagccagcccaccagcaacatggagccccccaagcagatcatgtccatggagaagaccagcaagctgaatgtggtggagaccagccggctgaaccacacagagaagctgaaccagctggagaacaccttcaagagcgtcatcgcccagatcggccctgggggcaccatcagcagcgagctgaagcacaagatcaagtttgtggtgtccaagtttcctgagggcctcttcatcagcaagctgctgggggagtatgaagtcatcttcaaggagcagctgagccccaagaagctgggcttcctgaatgtgacagagctggtgggcgccctgagtgacatcctgcacgtggagttcaggaagggccaccaggacctgctggtgtttgatgctgacaagaagcccctgccccctgtgcagagcgacaagaagattgaggccaaggcctgtgtgagcagccccccaagaaacagcctgagcacagctgctgtgaaggagaccgtgtggaactgccccagcaagaagcagaaggagccccagcagaagatctgcaagaagcccaacctggtggtgaagcccctgcagctgcaggtggagaccaacaagtctgagctgaacctggccatggccaaccacgacatccccccagatgctgtgcccaacaagaagctgtgccgcctgccccccctggacaccagcagcctgattggagtgtttgtggagtacatcatcagccccagccagttctacatccgcatctacagccgggacagcagcgagctgctggaggacatgatgattgagatgaggcgctgctacagcaaccagctggtgtctgacagatatgtgatgcctgagtgcttcatccagcccggccacctgtgctgcgtgcgcatcagcgaggacaagtggtggtacagagtcatcatccaccgggtgctggagaagcaggaggtggaggtgttctacccagactttggaaacatcggcatcgtgcagaagagcagcctgcgcttcctgaagtgctgctacaccaagctgcctgcccaggccatcccctgcagcctggcctgggtgcggcctgtggaggagcactggaccagcaaggccatcctgcagttccagaagctgtgtggcctgaagcccctggtgggcgtggtggatgaatatgtggatggcatcctgaacatcttcctgtgtgacaccagcagcaatgaagatgtgtacttccaccacgtgctgaggacagagggccacgccatcgtgtgccgggagaacatcagcagcaagggcttcagcgagctgaaccccctggccctgtacaccaccagcagcggcggccctgaggacatcgtgctgacagagctgggctaccccagccagcagcactacttcaatgaagacaggaagatcagcccccagagcaaggagagcgagctgcgcatcctggatgagatccccaccggcatgccctgcctggagagcgtgaccatcggagatgacatctgggatgagaactggctgcccctgcaggccaagatgggcaaaggaggagatgctgccagccacctgttcaccgccagcctgggcggcaagaaccagtacagcagctgcaaggagatgccccagaaggactggtgcttcagcacccccaaggacacctgggatgacagctggcagcccagcggcctggtgaatggcaccaaggtggaggtgcacaagccagaggtgctgggcgcccaggagaagaacacaggcaccaacagaacccagaagcagctggacatcaatggcagcagtgacagcagcaccctgcccaagctggaggagttctgcaccagcctgacccagagcgagcagagcgcagatggcagccagagcgagcccaacaacagccagacccagcccaagcagatccagctgagcacagctgccccctgcagcaccacagctgtggatgacagcgctgagaagcccagcggctctgtggagagcagccctgagatcctgaagaatgaagacttcagcagcagccgggccatcaccctgtacaaggacaagaggcaggagagcgtggaccagctgagcctcatcctgtcctatgagtgccagatcagccagaagctgtacatccccaggagcacagccacagctgccctgggcgccgccgcccggctggccaccagccgcagcctgctgcactggtaccccagcgtgaagaggatggaggcctag

SEQ ID NO: 76881 - DNA, 2946 bp, Artificial Sequence
  derived and/or modified sequence
atgagcgagcaggagcggatccaggagtgcctgcggaaggagatccggtcactgctcatcagcaccaaagacggtctgagcccccaggagctggaaaaggagtatctgctcatggtgggcaatcatttgcctttacgtatacttggctatcgtagcacaatggaactggttctcgacatgcccgacgtagtgcgagtttgccccggagctggggggacagtgatcttgaaggcaatacccgatgagagcacaaagggaattgcctctctggtggccaagcagcgatcatctcataagctgaggaactcgatgcacaaaggtagaccttcgatttactcaggacccaggtcccatagacgggtcccttacaggggacgagtggctccaattctgcccgccgtggtcaaaagcgagctcaaagatctactggctctatcccccgtgttactgtcggatttcgaaaaggcctttgccaaacgctttggccgctcattccagtacatgcagtacggctttttgtccatgttcgaggtgctgaacgcggcaagcgatgtaatttcagtcgagcaaacccgcgccgggagcctactgatgcttaaaaaaagcgtgacggaggaaaagcctcgaggctgccccgcaggcaagatctttacccagccattccgcatgaagcaggggagctattctaccggcttccccgtggcaaagccatgtttctcccaacccacaagcaatatggaaccaccaaagcaaataatgtccatggagaagaccagcaaactcaacgtcgttgagaccagtagattgaatcataccgagaaactgaaccagttagagaacacattcaagagtgtaatcgcgcaaatagggcccggcggaaccatatcaagtgagttaaaacataagatcaaattcgtggtgtccaaattccctgagggccttttcatttctaagcttcttggggagtacgaagtcatatttaaggaacagctatcacccaagaagctgggctttttaaatgtgaccgagcttgtgggagcattgtctgatattctgcacgtggagttccgtaaaggtcatcaggatctgcttgtgttcgatgccgacaagaagcctctgcctcccgttcaatcagacaaaaagatagaagcgaaggcctgcgtctcaagtcctcctcggaactccctttcaaccgccgcggtcaaggagaccgtgtggaattgcccctctaaaaagcagaaggaaccacaacagaagatctgcaagaagcccaacttggtcgtcaagcccttgcagctgcaggttgaaaccaataaaagcgagctgaatctggcaatggccaatcatgatatccctcccgacgcggtaccaaacaagaagctgtgcagactgccaccactcgataccagcagccttatcggggtgttcgtggagtatattatttctccctctcagttttatataaggatttactcccgtgactcaagtgagcttctcgaagatatgatgattgagatgagaaggtgctactcgaatcagctagtgtccgatcggtacgtaatgccagaatgttttattcagccagggcacctgtgctgcgtgcgcatttctgaagacaaatggtggtaccgcgtgataatccaccgtgtcctggaaaagcaggaggtagaggttttttatccagactttggaaacattggtattgtccagaagtcctccctgcgattcctgaagtgctgttacaccaagctgcccgcccaggcaattccatgctcattagcatgggtgagacccgtcgaagagcactggacgagtaaagccatactgcagtttcagaagttgtgtggcttaaaacccctggtgggagttgtagatgagtatgttgacgggattcttaatattttcctttgcgacacctcctccaatgaagatgtctatttccaccacgtactgcgcacagaaggccacgctatcgtttgtcgcgagaatatttcttctaaaggattctccgagctcaatcccctggctctgtacaccacaagttccggaggccctgaagacattgtactgaccgaactcggctacccatcacagcagcattactttaacgaggaccgtaaaatttcaccacaatcaaaggaatccgagctcaggattttggacgagattccgacaggtatgccgtgcctggagtcagtgaccattggcgacgatatatgggatgagaattggctcccattacaggcaaaaatgggcaaaggtggggatgccgcatcccatctattcaccgcatcgctggggggtaaaaatcagtactccagctgtaaggagatgcctcagaaagattggtgtttcagtaccccaaaggatacatgggacgattcctggcagccaagtggcctcgtgaatgggactaaggtcgaggtgcacaagccggaagttcttggagcacaggagaaaaatacaggtactaacagaacacagaaacagcttgatatcaatggttcctccgattcatccactcttcccaaactcgaagaattttgtaccagcctcacccagagcgaacagtcagctgatgggagccagagtgagccaaacaactcccagacacagcccaaacagattcagttatcaacagctgccccctgttctacaaccgctgtggacgacagtgcagaaaagccctctggctctgttgagtcctctcccgagatccttaagaacgaggacttttcttcctcacgagcaataaccctgtataaggacaagcggcaggagagtgtggaccaactcagtttgatcctgtcctacgaatgtcagatatcacaaaagctgtatattcctcgcagtacagccactgccgcgctcggcgcggccgcgcggcttgccacttcaagaagtctcctgcactggtatcctagcgttaagagaatggaggcttag

SEQ ID NO: 76882 - DNA, 2946 bp, Artificial Sequence
  derived and/or modified sequence
atgagcgagcaggagcggatccaggagtgcctgcggaaggagatccggtccctgctgatctccaccaaagatgggctcagtccacaggaactagagaaggaatacctgcttatggtcgggaaccacctgcctctacggatactgggatatcgatccaccatggagctggtcttggacatgcccgatgtggtacgggtgtgtccaggggctggggggactgtgatccttaaagcaatcccggacgaatccactaagggtattgccagcctggtggcaaagcagcggagttcccacaagttgaggaacagtatgcacaaagggcggcctagcatctattccgggccccgcagccataggagggtcccttatcgcggacgagtagctccaatcctgccagcagttgttaagtctgagctcaaggacctcttggccctttctccagtgttactgtcagactttgagaaggcattcgcaaagagattcgggaggagcttccagtatatgcagtacggttttctctcaatgttcgaagtcttgaacgccgccagcgatgtgatttcagttgaacaaacacgcgcaggaagcctgctcatgctgaaaaaaagtgtgacagaagagaaaccccgagggtgcccggctggaaagatctttacgcagccattcagaatgaagcagggatcctactccacaggttttcctgtcgctaagccctgtttttcacagcctactagcaacatggagccccccaagcagataatgtctatggaaaaaacctccaaactgaacgtggtggaaacatccagactgaaccacactgaaaaacttaaccagctggagaatacattcaaatcagttatcgcacagatcggtcccggaggcacaatttcgagtgagctgaaacacaagataaagttcgtggtgtccaagttccccgaggggttgttcattagtaaactgctaggcgaatacgaggtcattttcaaagaacaactctccccgaagaaactgggtttccttaacgtaactgaattagtgggggctctatctgacattctccacgtggagttccgtaagggacaccaggatcttctggtctttgatgccgataagaaaccactgccccccgtacagtccgacaaaaaaatcgaggctaaagcttgcgtgagcagtcctccacggaattctctcagcacagcggctgtgaaagaaacagtctggaactgcccgtctaaaaaacaaaaggagcctcagcagaagatttgtaagaaacccaacctggtcgtgaaaccattgcaacttcaggtggaaacaaataagtcagaactgaacctagctatggcgaatcacgatatcccccctgatgccgtcccaaataagaaactgtgccgtttaccaccgctcgatacaagttccctcattggagtgtttgtcgaatatattatttctccaagtcagttctatatccggatctactcgagagactccagtgaactgctcgaggacatgatgattgagatgcggcgctgctattccaatcaactggtcagcgatcggtacgtgatgcctgaatgcttcatccagcccggccatctttgttgcgtacgaatttcggaagataaatggtggtaccgggtgatcatccaccgagtgctcgaaaagcaggaagtcgaagtgttctacccggatttcgggaacatcggcatcgtgcaaaagagcagcttgcgattcctgaaatgttgctacaccaagttacccgcccaggccattccttgttccttagcatgggttagaccagtagaggaacactggacatccaaggcaatccttcaatttcaaaaattatgcggactgaaaccgctggtaggagtggttgatgagtacgtagatggcatattgaacatcttcttgtgtgacacctcctctaatgaagacgtatatttccaccacgtgctcagaacagaaggccacgctatcgtctgcagggaaaacatctctagtaaaggtttctctgagctgaacccactcgccctgtacaccacttcaagtggcggcccagaggatatagtgttaacggaattaggctacccctcccagcagcattacttcaacgaagatagaaagatcagtccacagagtaaagagtcagaattaaggatcctcgatgaaatccccactgggatgccctgtctggagagcgtcacaataggcgatgatatttgggatgagaattggctcccattgcaagccaagatgggtaaaggcggagacgccgccagccatttatttacagcatcactaggggggaaaaaccaatatagctcttgtaaagaaatgccccagaaggattggtgcttctcaaccccaaaggacacttgggatgactcatggcagccttccggactcgttaatggaacaaaggtcgaggttcataaaccagaggtcctcggggcccaggagaagaacactggcacaaaccggacacagaaacaactagatatcaacggctcatccgacagctcaaccctgccaaagctggaggagttttgtacctcattgacccaatctgaacagtcagcagacgggtcccaatctgagcccaacaatagtcagactcaacccaagcaaatccagctgtccactgcggcgccttgtagcactaccgctgttgacgacagcgcagaaaagccttctgggtccgtggaaagctcccctgagatcctcaaaaatgaagactttagcagctctcgggccatcaccctgtacaaagacaaacgacaggagtccgtggatcagttgagcctgatcttgtcatacgagtgccagattagtcagaagctttatattcctagatctactgctacggccgctctgggcgcagcggcccgcctggcaaccagccgttcactgttacattggtatccctcagtgaagaggatggaggcctag

SEQ ID NO: 76883 - DNA, 2946 bp, Artificial Sequence
  derived and/or modified sequence
atgagtgaacaggaacgcattcaggagtgtctgagaaaggagatcaggtcactgctgattagcaccaaggacggcctaagtcctcaggaactcgagaaggaatacttgttgatggtgggaaaccatcttcccttgaggatccttggctaccgcagtacaatggaactggtcttagatatgcctgacgttgttagggtttgccctggtgcgggaggaacggtaatacttaaagccatccccgacgagagcaccaaaggaattgcctccctcgtggcaaaacagcgctcttctcacaaacttagaaatagtatgcacaagggacggccaagtatctactcaggcccaaggagccacagacgcgtgccatatcgcggacgcgttgcgcctatccttccggcagttgtgaaatctgagcttaaggacctgctcgctctctcacctgtgttgttgagcgatttcgagaaagccttcgccaaacggttcggccgatcattccagtacatgcagtacggttttctgtcaatgttcgaggtcctaaacgccgcttccgacgttatctcagtggagcagactcgcgctggctctctgctcatgctcaagaaaagtgtgacggaagagaagccccgaggatgccccgctggcaaaatttttacccagcctttccggatgaagcaagggagttactcaacaggcttccccgtagctaagccttgcttctcccagcccacctccaacatggagccgcctaagcaaatcatgtctatggaaaaaaccagcaaactcaacgttgtggagacctcgagattgaaccacacggaaaagttaaaccagctggaaaatacgttcaagtctgttattgcccaaatcggtcccggtggaaccatttctagtgaacttaaacataagatcaaatttgtggttagtaaattcccagaggggcttttcatctccaaactcttaggcgagtatgaagttatctttaaagagcagctaagccccaagaaattaggatttctgaacgttaccgaactggtgggtgcactttctgacatactgcacgtggaatttagaaaaggccaccaggatctgttggtcttcgatgcggacaaaaagcctcttccccctgtccagagtgacaagaagattgaggcaaaagcgtgtgtgtcttctcctccacgaaacagtttaagtacggccgctgttaaggaaacagtgtggaattgtccgagcaagaaacaaaaagagccgcagcaaaagatttgcaagaagcctaatcttgtggtgaaaccacttcagctgcaggtggagactaacaaatccgagctgaatctggctatggcaaaccacgatataccgccagatgccgtacccaacaaaaaactgtgcaggctgcctcctttggacactagctcccttatcggcgtgtttgtggagtatataatttccccaagccaattctacatacgcatttattcccgggacagttcagagctgctggaggacatgatgatcgaaatgcgcagatgttacagcaatcagttagttagcgatcgttatgtgatgcctgagtgctttattcagcctggccatctgtgctgtgtcaggatcagcgaggacaaatggtggtaccgggtgattattcacagggtgctcgaaaagcaggaggttgaagttttctacccagatttcggaaacatcggaatagtacagaagtctagccttagattcctgaaatgttgctatactaaactgccagcacaagccatcccctgctcactggcctgggtgaggcctgtcgaagagcactggacaagcaaggccattctccagttccagaagctctgcgggctgaaacctctggtgggggtagtggacgaatatgtggacggtatcttaaatatttttttgtgtgacacatcttctaatgaggatgtttactttcaccacgttctcaggaccgaggggcatgcaatcgtatgccgggagaatattagttcaaagggcttcagcgagcttaatcccctcgcgctctacacaacttcaagtggaggccctgaggacatcgtgctgacggagctgggctacccatcgcagcagcattatttcaatgaggaccgtaagatctcccctcaaagcaaagagtcggaactccgaatcctcgacgaaattccgaccggtatgccttgcctggaatccgtgaccattggcgatgacatttgggacgaaaactggctccccctgcaggcaaaaatgggtaaggggggagacgcagcgtctcatttattcaccgcttcactcggaggcaagaaccaatacagtagttgtaaagagatgcctcaaaaagattggtgcttcagcaccccgaaagatacatgggacgatagctggcagccctcaggcctggtgaacgggacaaaggtggaggttcacaagccagaagtgctgggagcccaggagaaaaacacgggcactaatcggacccagaaacagctcgatatcaacggatcatctgactcaagtacactgcccaaattggaagagttttgcactagcctgacccagagtgaacagtctgcagatggctcacagtcagagcccaataacagccagacccagcctaaacagattcaactgtcaacggcagcaccgtgttcaaccacagcagtggacgattcagccgagaagccatcagggtcggtggaatcctccccagagatcctaaaaaatgaggacttttcatccagtcgagcgatcaccctctacaaagataaacggcaagaatctgtggaccaactcagcttgatactgagttatgaatgtcaaatatctcagaagttgtatatccctcggagcacagctaccgctgccttaggagctgccgcaagactggccacctcccgatcccttctccattggtatcctagtgtgaaaaggatggaggcctag

SEQ ID NO: 76884 - DNA, 2946 bp, Artificial Sequence
  derived and/or modified sequence
atgtctgagcaggagcggattcaggagtgtcttaggaaggagatcagatccttgctaatttctacaaaagatgggctgtcgccacaggaattagagaaagaataccttcttatggtggggaaccacctgccactgcgcattctgggttacagatcaaccatggagctggtgctggacatgcccgacgtggtgagggtttgccctggtgccggaggaaccgtgatattgaaggcaatacctgacgaaagtactaaagggattgcaagcctcgttgctaagcaacgaagttctcataaacttaggaatagcatgcataagggtcgcccttcaatctacagtggcccaaggagccaccgacgtgtgccttatcggggtcgggtggcccctattctcccagccgtcgtgaagtccgaactgaaggacctattagctcttagcccggtgttgttgagcgactttgaaaaagcctttgccaaacgattcggccgaagttttcagtatatgcagtacggatttctatcaatgtttgaggtgttaaacgcagctagcgacgtaatcagcgttgaacagacccgagcagggtccctgttgatgctgaaaaaatcagttacagaggagaaaccgagaggttgccccgctggcaagatatttacacaaccgttcagaatgaaacagggatcctactctacaggcttccctgtcgctaagccgtgtttttcccaaccgacgtccaacatggaacccccaaagcagatcatgagcatggagaaaacaagtaagctcaacgttgtagaaaccagcagactgaatcacaccgagaagttaaatcagctcgagaacactttcaagagtgtgatcgctcagatcggtccaggtggaacaattagtagcgagttaaaacataagatcaagttcgtagtgagcaaatttcccgaagggttgttcatttccaagctactcggggagtacgaggtgattttcaaggagcaactgtcgccaaagaaactggggtttctcaacgtgacagagttggtcggcgcactcagcgacatcctccatgtcgagtttcgaaagggccaccaggacttactcgtttttgatgccgacaaaaagccactcccgcctgtgcagtccgataaaaagatagaagcaaaagcctgcgtttcttcaccacccagaaattctctgtccaccgcggcagtcaaggaaaccgtgtggaactgtcctagtaaaaaacaaaaggagccccagcaaaagatttgcaaaaagcctaacctagtggtgaagcctctccaactgcaagttgaaacaaacaagagcgagctgaaccttgccatggctaaccatgacattccacccgacgctgtgcccaataaaaagctctgcagactgcctcccttagacactagtagtcttatcggagtgttcgtggagtacattatctcgccctcccagttctatatccgcatatattcacgggacagcagtgagttactagaggatatgatgatcgaaatgaggagatgttactccaatcaactggtgagcgataggtatgtgatgccagaatgcttcatccaaccaggacacctgtgctgtgtgcgcatatctgaggataagtggtggtaccgcgtgatcatacaccgggttcttgagaaacaagaggtcgaggtgttttaccccgatttcggtaatatcgggatcgtccagaaaagcagcctccgctttttgaaatgctgctatacaaagctgcccgcacaagcaatcccatgttccctggcctgggtgcggccagtggaagagcactggacaagtaaggccattttgcaatttcagaagctgtgcggcctaaagcctctggttggggttgtggatgaatacgtggatggtattttaaacatctttctctgcgacacttcatcaaatgaggatgtctatttccaccacgtgttacgaacggaaggacatgccatcgtgtgcagggagaatatttcgtccaagggattttcagagcttaatcccctggccctctacacaacatccagtggcggacctgaggatatcgtactgacggagctggggtaccctagccagcagcattatttcaacgaggacaggaagataagtccacagtctaaagaatcagagctgaggattcttgatgagatccccacggggatgccgtgcctggaatcagtgacaataggagacgacatctgggacgaaaattggctgcctttacaggccaagatgggcaagggaggggatgctgcgtcacacctgtttaccgcatcgctgggtggcaaaaatcagtatagttcatgtaaggagatgccccagaaggactggtgctttagcacccctaaagacacgtgggacgatagctggcagccctccggccttgtgaacgggactaaagtggaggtacacaagcccgaggtgctgggagcccaggaaaaaaatactggtactaataggacacagaagcagctcgacattaatggaagctcagatagtagtacgctgcctaagttagaggagttttgtacgagcttgacccagtcagaacagtcagcggatggctcccagagtgaacccaataactctcaaactcaaccaaagcagattcagctttctacagccgctccgtgctccaccacggctgttgatgattcagctgagaaacctagcggctccgttgaatccagccctgagattttaaaaaatgaggactttagcagttctcgcgctatcactctgtataaagataagcggcaggagtctgtggatcagctctccctgattctgagctatgaatgccagatctctcagaaactgtatattcccaggtccaccgccaccgctgctcttggcgcagccgctagactggccacctcccgatctctgttgcattggtatccgagcgtcaaacggatggaggcttag

SEQ ID NO: 76885 - DNA, 3525 bp, Artificial Sequence
  derived and/or modified sequence
aatctctactcggcccgcaccagcagcgctggcgtcagggcgcggtgggggcaagacgggtgactggcagcagggcggtgccgggccgagaagggcgcctcacctggcgcctcctgccttcctttccacctcaggttgcagagagccgccagggcaggtggaagggccacgccccgctcccgtgagggtcaccgagagacgttgggggtggggcagggaccccaaccctagaccagtcctgtagggcacaatgtctgaacaagagcgtatacaggaatgtctgcggaaggaaataaggtcacttctcatttccaccaaagatggtttgagcccacaggagttggagaaggagtaccttttgatggttggcaaccatctaccactccgaatccttgggtatcggtccactatggagctggtattggacatgcctgatgttgttcgtgtctgccccggtgcaggtggtactgtaatactgaaagccattccagatgaatctaccaaaggaatagcaagcttagttgcaaaacagaggagcagccataagcttcgaaactcaatgcataagggaagacctagtatttattctggaccgagatctcatcggcgagtaccttaccgaggaagggttgcccctattcttccagctgttgtgaagagtgagttgaaggacctgttggcgttatctcctgttcttctttctgattttgaaaaggcatttgccaaaagatttggacgatcattccaatacatgcaatatggatttctctctatgtttgaagtgcttaatgcggcttcagatgtcatttctgtagagcagaccagagcaggttctttgttgatgctaaagaagagtgtaacagaggaaaagccgagaggatgtccagcaggtaaaatttttacccagccatttagaatgaaacaagggtcatactccacaggctttccggtagcaaagccatgcttttcacaacccacttcaaacatggaaccaccgaagcaaataatgagcatggaaaagacttccaagttaaatgtagtggagacttcaagactgaatcacactgaaaaattaaaccagctggagaacacattcaaatcagttattgcacagattggacctggaggaactatcagttcagaactaaaacataagataaaatttgttgtatctaagttcccagagggtttgtttatttctaaactgcttggagagtatgaggtaatttttaaagagcaactatcaccaaaaaaattaggcttcttaaatgtgacagaacttgttggagctcttagtgacattctccatgttgagttcaggaaaggacaccaagacttactagtgtttgatgcggataagaagcctctaccacctgttcagtcagataagaaaatagaagccaaagcttgtgtctccagtccacctagaaattcattgtctactgctgctgtcaaagagactgtatggaattgcccttcaaaaaaacaaaaagagccacaacagaagatttgcaagaagcctaatctggtggtaaagcctttacagctgcaagtagaaacaaacaaatcagagctcaacttggcaatggcaaatcatgacatcccgccagacgctgtgccgaacaagaaattatgcagactcccaccattagacaccagttccctcataggggtctttgtggagtatatcatctctcctagtcaattctacatccggatctatagcagggattcgtcagagttactcgaagacatgatgattgaaatgcggcgctgttattctaatcagctggtttctgatcgatatgtcatgccagaatgttttattcagccgggacatctctgttgtgtaaggatttctgaggataagtggtggtatcgggtcattatccatcgagtccttgagaaacaggaagttgaagtgttctacccagactttggaaatattggaattgttcagaagtcctccctgaggttcctcaagtgctgctacacaaagcttccagctcaggctatcccttgttctttggcttgggtgagaccagtagaggaacactggacatcgaaagctattttgcagttccagaagttgtgcggtttgaagccattagtgggggtagtggatgaatatgtagatggaatccttaacatttttttgtgtgacacatcctcaaacgaagatgtctatttccatcatgtcttgagaacagagggccatgctattgtatgccgagaaaatatctcttctaagggtttcagtgagctcaaccctttagctttatacacgacatccagtggagggccagaggacattgtcttgacagaactgggttatccttcccagcagcactattttaatgaagaccgaaagataagtccacagtcaaaagagagtgagttacgtatcttggatgagatccccactggaatgccatgcctggagtcagtgaccataggtgatgatatttgggatgagaactggttacctctacaggctaagatgggaaaaggaggtgatgctgcctcccatctatttactgcaagccttggtggaaagaatcagtattcatcatgtaaagaaatgccacagaaggactggtgtttttctacccctaaagatacatgggatgattcttggcagccttcaggccttgtaaatggaacgaaagtagaagttcataagccagaagtactgggtgctcaggaaaaaaatactggcacaaacaggactcaaaagcaactagacataaatggttcttcagattcttccacactgcccaaattggaagaattctgtacctctcttacccagtcagagcagtcagcagacgggagccagtctgaacccaacaacagtcagactcagccaaagcaaattcagctttccacagcagcaccctgttcaacaactgcagtggatgattccgcagaaaagccctctggttctgtggaaagctcaccagagatcctaaagaatgaagatttttctagcagccgtgctattacattgtacaaagacaagcgtcaagaatctgtagaccagctgtctttgattttgtcttatgagtgccagatttctcagaagctctacattcctcgaagtacagccactgctgccttaggtgctgccgcacggttagctacatccaggagcctcctacactggtaccccagtgtgaaaaggatggaagcatgagggagggagggaggagggagaaaaacagaatccagccgcttaggctttgatgaactcccaggccaaaatgaggagttattgaagcaaaatagtatcttgatcattgatacttttgtctttctgtgactatatgttagctttattatgctaacagtctactttgatgtgtaagtaagtattgatatttactgttaatcttgatttttcttgattttattctgtgtcattttgttcacctttgtttttaatgtagtttaaaggaatttgtttttttgtgtttgtttttcttgtacattatcatgactgataaatgaaaattgaaaaactaa

SEQ ID NO: 76886 - DNA, 2946 bp, Artificial Sequence
  derived and/or modified sequence
atgagcgagcaggagagaatccaggagtgcctgagaaaggagatcagaagcctgctgatcagcaccaaggacggcctgagcccccaggagctggagaaggagtacctgctgatggtgggcaaccacctgcccctgagaatcctgggctacagaagcaccatggagctggtgctggacatgcccgacgtggtgagagtgtgccccggcgccggcggcaccgtgatcctgaaggccatccccgacgagagcaccaagggcatcgccagcctggtggccaagcagagaagcagccacaagctgagaaacagcatgcacaagggcagacccagcatctacagcggccccagaagccacagaagagtgccctacagaggcagagtggcccccatcctgcccgccgtggtgaagagcgagctgaaggacctgctggccctgagccccgtgctgctgagcgacttcgagaaggccttcgccaagagattcggcagaagcttccagtacatgcagtacggcttcctgagcatgttcgaggtgctgaacgccgccagcgacgtgatcagcgtggagcagaccagagccggcagcctgctgatgctgaagaagagcgtgaccgaggagaagcccagaggctgccccgccggcaagatcttcacccagcccttcagaatgaagcagggcagctacagcaccggcttccccgtggccaagccctgcttcagccagcccaccagcaacatggagccccccaagcagatcatgagcatggagaagaccagcaagctgaacgtggtggagaccagcagactgaaccacaccgagaagctgaaccagctggagaacaccttcaagagcgtgatcgcccagatcggccccggcggcaccatcagcagcgagctgaagcacaagatcaagttcgtggtgagcaagttccccgagggcctgttcatcagcaagctgctgggcgagtacgaggtgatcttcaaggagcagctgagccccaagaagctgggcttcctgaacgtgaccgagctggtgggcgccctgagcgacatcctgcacgtggagttcagaaagggccaccaggacctgctggtgttcgacgccgacaagaagcccctgccccccgtgcagagcgacaagaagatcgaggccaaggcctgcgtgagcagcccccccagaaacagcctgagcaccgccgccgtgaaggagaccgtgtggaactgccccagcaagaagcagaaggagccccagcagaagatctgcaagaagcccaacctggtggtgaagcccctgcagctgcaggtggagaccaacaagagcgagctgaacctggccatggccaaccacgacatcccccccgacgccgtgcccaacaagaagctgtgcagactgccccccctggacaccagcagcctgatcggcgtgttcgtggagtacatcatcagccccagccagttctacatcagaatctacagcagagacagcagcgagctgctggaggacatgatgatcgagatgagaagatgctacagcaaccagctggtgagcgacagatacgtgatgcccgagtgcttcatccagcccggccacctgtgctgcgtgagaatcagcgaggacaagtggtggtacagagtgatcatccacagagtgctggagaagcaggaggtggaggtgttctaccccgacttcggcaacatcggcatcgtgcagaagagcagcctgagattcctgaagtgctgctacaccaagctgcccgcccaggccatcccctgcagcctggcctgggtgagacccgtggaggagcactggaccagcaaggccatcctgcagttccagaagctgtgcggcctgaagcccctggtgggcgtggtggacgagtacgtggacggcatcctgaacatcttcctgtgcgacaccagcagcaacgaggacgtgtacttccaccacgtgctgagaaccgagggccacgccatcgtgtgcagagagaacatcagcagcaagggcttcagcgagctgaaccccctggccctgtacaccaccagcagcggcggccccgaggacatcgtgctgaccgagctgggctaccccagccagcagcactacttcaacgaggacagaaagatcagcccccagagcaaggagagcgagctgagaatcctggacgagatccccaccggcatgccctgcctggagagcgtgaccatcggcgacgacatctgggacgagaactggctgcccctgcaggccaagatgggcaagggcggcgacgccgccagccacctgttcaccgccagcctgggcggcaagaaccagtacagcagctgcaaggagatgccccagaaggactggtgcttcagcacccccaaggacacctgggacgacagctggcagcccagcggcctggtgaacggcaccaaggtggaggtgcacaagcccgaggtgctgggcgcccaggagaagaacaccggcaccaacagaacccagaagcagctggacatcaacggcagcagcgacagcagcaccctgcccaagctggaggagttctgcaccagcctgacccagagcgagcagagcgccgacggcagccagagcgagcccaacaacagccagacccagcccaagcagatccagctgagcaccgccgccccctgcagcaccaccgccgtggacgacagcgccgagaagcccagcggcagcgtggagagcagccccgagatcctgaagaacgaggacttcagcagcagcagagccatcaccctgtacaaggacaagagacaggagagcgtggaccagctgagcctgatcctgagctacgagtgccagatcagccagaagctgtacatccccagaagcaccgccaccgccgccctgggcgccgccgccagactggccaccagcagaagcctgctgcactggtaccccagcgtgaagagaatggaggcctag

SEQ ID NO: 76887 - protein, 1116 aa, Artificial Sequence
  derived and/or modified sequence
MSTLLDIKSSVLRQVQVCPSFRRRTEQDPGSASADPQEPATGAWKPGDGVEFFAHMRLMLKKGEGRQGLPCLEVPLRSGSPAPPEPVDPSLGLRALAPEEVEMLYEEALYTVLYRAGTMGPDQVDDEEALLSYLQQVFGTSLEEHTEAIERVRKAKAPTYALKVSVMRAKNLLAKDPNGFSDPYCMLGILPASDATREPRAQKEQRFGFRKGSKRGGPLPAKCIQVTEVKSSTLNPVWKEHFLFEIEDVSTDQLHLDIWDHDDDVSLVEACRKLNEVIGLKGMGRYFKQIVKSARANGTAGPTEDHTDDFLGCLNIPVRRDTAMSQRGRSGFLSHLLLLSHLLRLEHSAEEPNSSSWRGELSTPAATILCLHGAQSNLSPLQLAVLHWQVSSRHHQTCTLDYSYLLGLLEDMQAHWEEAPSLPQEQEESLADSLSAFSEFGLQLLRQLRDYFPATNSTAVHRLELLLKCLGKLQLFQPSFEICPFESELNMDIAAALKRGNREWYDRILNDKSPREQPGPQRLPGLVVLADAVYDDLQFCYSVYASLFHSILNVDVFTLTFRQLERLVAEEAWVLTEELSPKMTLEVASGLFELYLTLADLQRFWDSIPGRDSRSLALAGIHAPFLPAVKLWFQVLRDQAKWRLQGAVDMDTLEPVDASSRHSSSAATAGLCLSHIQELWVRLAWPDPAQAQGLGTQLGQDVCEATLFYTELLRKKVDTQPGAAGEAVSEALCVVLNNVELVRKAAGQALKGLAWPEGATGPEGVLPRPLLSCTQALDDDLQREAHTVTAHLTSKMVGDIRKYVQHISLSPDSIQNDEAVAPLMKYLDEKLALLNASLVKGNLSRVLEALWELLLQAILQALGANRDVSADFYSRFHFTLEALVSFFHAEGQGLPLESLRDGSYKRLKEELRLHKCSTRECIEQFYLDKLKQRTLEQNRFGRLSVRCHYEAAEQRLAVEVLHAADLLPLDANGLSDPFVIVELGPPHLFPLVRSQRTQVKTRTLHPVYDELFYFSVPAEACRRRAACVLFTVMDHDWLSTNDFAGEAALGLGGVTGVARPQVGGGARAGQPVTLHLCRPRAQVRSALRRLEGRTSKEAQEFVKKLKELEKCMEADP

SEQ ID NO: 76888 - DNA, 3351 bp, Artificial Sequence
  derived and/or modified sequence
atgtccacactgttggacattaagtcttccgttttaagacaggtgcaggtgtgcccaagcttccgcagaagaaccgagcaggaccccggctccgcaagtgcagacccacaggagcctgctaccggcgcttggaagcccggcgacggtgttgagttcttcgcccacatgaggctgatgctcaaaaagggggaggggcggcaggggttgccatgcctggaagtccctcttcggagcggcagcccagcaccaccggaacccgtcgacccttccctcggtctccgggctctggcccccgaggaggttgaaatgctctacgaagaagctttgtacactgtcttataccgtgccggcacaatgggccccgatcaggtcgatgatgaggaggccctgctgtcctacctccagcaagtctttggcacatcactcgaggaacatactgaggccatcgagcgtgttcgcaaggcaaaagcaccaacttatgctctgaaggtgagcgtgatgcgcgctaaaaacttgctggccaaggatcccaatggattctcagatccatactgtatgctcgggatcctcccagcgtccgatgctacgcgtgagccaagagcacaaaaagagcagaggttcggttttcgcaaggggtctaagcgcggaggccctcttcccgcaaagtgcatccaagtcacagaagtgaaatcaagcacgcttaacccggtgtggaaggaacacttcctcttcgagatcgaagatgtgtcgactgatcagctgcatctggacatctgggatcatgacgatgatgtttctttggtggaggcttgcagaaagctaaacgaggtgatcgggttgaagggcatggggcgctactttaaacagatcgtgaagagcgctagagcaaacggaaccgccggacctactgaggatcatacggatgacttcctcggatgcttgaacattcctgtccgccgcgacactgcaatgtcccaacgaggtcgctctggctttctttctcacctgctgctcctttcacatctccttcgcctcgaacactccgccgaagagcctaacagttcgtcctggcgcggagaactttcgacacctgccgccactatcttgtgtctgcatggagctcaatccaatttaagcccactccaactggccgtgctgcattggcaagtttcatcgaggcaccaccagacatgcacattggattacagctatctcttaggcctactggaggacatgcaagctcactgggaagaggcaccttctctcccccaggagcaggaggagtctcttgcagactccctcagtgcattctccgaattcggactgcaactgctcagacagctacgggattacttccctgccacaaacagcactgccgtgcaccgactcgagttgctcctgaagtgcctggggaagttgcaattgtttcagcccagtttcgagatttgtcctttcgagagtgaactgaatatggatatagccgctgcgttgaagcgcgggaatagggagtggtatgataggattctcaacgacaagagccccagagaacagcctgggccccagcggctgccaggcctagtcgtcctagctgatgctgtatacgacgatctccagttctgttacagcgtatacgcttcactgttccattcaatcttaaacgtggatgttttcaccctaacattcaggcaactggagagactcgtggcagaggaggcatgggtgttgactgaagagctctctccaaaaatgacactggaagtcgcatccggactgtttgagctttatctcactctggccgacctacagcggttttgggactctatccccggtcgggatagcagatccctagctctggccggtatccatgcccccttcctgcctgccgtaaaactgtggtttcaggtgctgagggaccaggctaaatggcgactgcaaggagccgttgatatggataccctggaacctgttgatgcatcatctcgacatagttctagcgccgcgaccgccggactgtgcttgtcccatattcaagaactctgggtgaggctcgcctggcccgaccccgctcaggcccaaggcctcggcacacagcttggccaggatgtttgcgaggcgacattgttttataccgagctgctgcggaagaaggtggacacccagccaggggccgccggagaggctgttagcgaagctctttgcgtggtgctcaataatgtcgaattggtgcgtaaggctgccggccaagccctgaaaggtttggcctggccagagggagcaactggtcctgagggggtcctgcctcgacctttgctctcgtgcactcaggcgttagacgacgacctgcagcgcgaggcacacactgtgaccgcccacctgaccagcaaaatggtgggagatattagaaagtatgtgcaacacatttccctttcgccggatagtattcagaatgacgaggccgttgccccattaatgaaatatctggatgagaaactcgcgctcctgaacgccagtctggtgaagggcaacctgtcacgggtcctggaggccctttgggagctgttgctgcaggccatattgcaggccttgggggccaaccgggatgtgagtgctgatttctactcacgttttcacttcacactcgaagccctcgtgagcttctttcatgctgaagggcagggtctccccttggagagcttacgggatggcagttacaaacgactgaaggaggaactgcggcttcacaaatgctccacaagggaatgtatagaacagttctatctggacaagttaaaacaaagaaccctcgagcagaacagattcgggaggctctctgtcaggtgccattacgaagccgccgagcaaagactggccgttgaggtcctgcacgcagcggatctcctccctcttgatgcaaacgggctctccgatccctttgtgatcgtggaattgggccctccccaccttttcccgctagtgcggtctcagagaacacaagtgaagacaagaaccctccaccccgtctatgacgaattattctacttcagcgtgcccgccgaggcttgtcgacggagagccgcgtgcgtgctattcactgtgatggaccatgactggctgtccacaaacgacttcgccggtgaggctgcactcggtctgggcggtgtgaccggggtggcccgtccccaggtagggggcggcgctcgcgcaggtcaacctgtcaccctccatttgtgtaggcctcgcgcccaagtacggtcagcgcttaggcgcctggaggggcgcacctctaaagaagcccaggagtttgtgaaaaagcttaaggagctggagaagtgtatggaagccgacccctag

SEQ ID NO: 76889 - DNA, 537 bp, Artificial Sequence
  derived and/or modified sequence
atgagtcagaggggacgatctggatttttgtcacacctgctcctgctaagccatcttctccgacttgagcactcagcagaggagcccaattcttccagctggaggggagaactgagcacacctgcagcaaccatactatgtctacacggggctcagagcaatctgtccccgcttcagctggctgtcctgcattggcaagtctcttcaagacaccatcagacgtgtacactagattacagctatctgttaggcctcctcgaagatatgcaggcacactgggaggaggcgcctagcctcccacaggagcaggaggagtccctggccgattctcttagcgccttcagcgaattcggcctacagcttttgcgtcaactgcgggattattttccggccacaaactcaactgccgtgcatagactcgagctgctgctgaagtgcctcggaaagctgcagctattccagccctccttcgaaatctgcccacgtgtaggcgccgagcacggacattgttgcggccccgaagagagacagccatag

SEQ ID NO: 76890 - DNA, 3351 bp, Artificial Sequence
  derived and/or modified sequence
atgagcaccctgctggacatcaagagctctgtgctgcggcaggtgcaggtgtgccccagcttcagaagaagaacagagcaggaccccggcagcgccagcgctgacccccaggagcccgccactggagcctggaagccaggagatggagtggagttctttgcccacatgaggctgatgctgaagaagggggagggccggcagggcctgccctgcctggaggtgcccctgcggagcggcagccctgcccctcctgagcctgtggaccccagcctgggcctgcgggccctggcccctgaggaggtggagatgctgtatgaggaggccctgtacacagtgctgtaccgggccggcaccatgggccctgaccaggtggatgatgaggaggccctgctgagctacctgcagcaggtgtttggcaccagcctggaggagcacacagaggccatcgagcgggtgaggaaggccaaggcccccacctacgccctgaaggtgtctgtgatgagggccaagaacctgctggccaaggaccccaacggcttcagtgacccctactgcatgctgggcatcctgcctgccagtgatgccacccgggagccccgggcccagaaggagcagagatttggcttcaggaagggcagcaagaggggcggccccctgcctgccaagtgcatccaggtgacagaggtgaagagcagcaccctgaaccctgtgtggaaggagcacttcctgtttgaaattgaagatgtgtccacagaccagctgcacctggacatctgggaccatgatgatgatgtgtccctggtggaggcctgcaggaagctgaatgaagtcatcggcctgaagggcatgggccgctacttcaagcagatcgtgaagagcgcccgggccaatggaacagctggccccacagaggaccacacagatgacttcctgggctgcctgaacatccctgtgagaagagacacagccatgagccagaggggccgcagcggcttcctgagccacctgctgctgctgagccacctgctgcggctggagcacagcgctgaggagcccaacagcagctcctggagaggagagctgagcaccccagctgccaccatcctgtgcctgcacggggcccagagcaacctgagccccctgcagctggccgtgctgcactggcaggtgagcagccgccaccaccagacctgcaccctggactacagctacctgctgggcctgctggaggacatgcaggcccactgggaggaggcccccagcctgccccaggagcaggaggagagcctggccgacagcctgagcgccttcagcgagtttggcctgcagctgctgcggcagctgcgggactacttccctgccaccaacagcacagctgtgcaccggctggagctgctgctgaagtgcctgggcaagctgcagctgttccagcccagctttgagatctgcccctttgaaagtgagctgaacatggacattgctgctgccctgaagaggggcaaccgggagtggtatgaccgcatcctgaatgacaagagcccccgggagcagcccggcccccagaggctgcccggcctggtggtgctggctgatgctgtgtatgatgacctgcagttctgctacagcgtgtatgccagcctcttccacagcatcctgaatgtggatgtgttcaccctgaccttccggcagctggagcggctggtggccgaggaggcctgggtgctgacagaggagctgagccccaagatgaccctggaggtggccagcggcctgtttgagctgtacctgaccctggccgacctgcagcgcttctgggacagcatccctggccgggacagccgcagcctggccctggccggcatccacgcccccttcctgcctgctgtgaagctgtggttccaggtgctgcgggaccaggccaagtggaggctgcagggcgctgtggacatggacaccctggagcctgtggatgccagcagccgccacagcagcagcgctgccacagctggcctgtgcctgagccacatccaggagctgtgggtgcggctggcctggccagaccctgcccaggcccagggcctgggcacccagctgggccaggatgtgtgtgaggccaccctcttctacacagagctgctgaggaagaaggtggacacccagcctggagctgctggggaggccgtgtctgaggccctgtgtgtggtgctgaacaacgtggagctggtgaggaaggccgccggccaggccctgaagggcctggcctggccagagggcgccaccggccctgagggcgtgctgccccggcccctgctgagctgcacccaggccctggatgatgacctgcagcgggaggcccacacagtgacagcccacctgaccagcaagatggtgggggacatcagaaaatatgtgcagcacatcagcctgagcccagacagcatccagaatgatgaagctgtggcccccctgatgaagtacctggatgagaagctggccctgctgaatgccagcctggtgaagggcaacctgagccgggtgctggaggccctgtgggagctgctgctgcaggccatcctgcaggccctgggcgccaacagagatgtgtctgctgacttctacagccgcttccacttcaccctggaggccctggtgtccttcttccacgccgagggccagggcctgcccctggagagcctgagagatggcagctacaagaggctgaaggaggagctgcggctgcacaagtgcagcacccgggagtgcatcgagcagttctacctggacaagctgaagcagaggaccctggagcagaaccgcttcggccgcctgtctgtgcgctgccactatgaagctgctgagcagaggctggccgtggaggtgctgcatgctgctgacctgctgcccctggatgccaacggcctgagtgaccccttcgtcatcgtggagctgggccccccccacctgttccccctggtgcgcagccagaggacccaggtgaagaccaggaccctgcaccctgtgtatgatgagctgttctacttctctgtgcctgctgaggcctgcagaagaagagctgcctgtgtgctcttcaccgtgatggaccatgactggctgagcaccaatgactttgctggggaggccgccctgggcctgggcggcgtgactggagtggcccggccccaggtgggcggcggggcccgggccggccagcctgtgaccctgcacctgtgccggccccgggcccaggtgcgcagcgccctgcggcggctggagggccgcaccagcaaggaggcccaggagtttgtgaagaagctgaaggagctggagaagtgcatggaggccgacccctag

SEQ ID NO: 76891 - DNA, 537 bp, Artificial Sequence
  derived and/or modified sequence
atgagccagaggggccgcagcggcttcctgagccacctgctgctgctgagccacctgctgcggctggagcacagcgctgaggagcccaacagcagctcctggagaggagagctgagcaccccagctgccaccatcctgtgcctgcatggagcccagagcaacctgagccccctgcagctggccgtgctgcactggcaggtgagcagccgccaccaccagacctgcaccctggactacagctacctgctgggcctgctggaggacatgcaggcccactgggaggaggcccccagcctgccccaggagcaggaggagagcctggccgacagcctgagcgccttcagcgagtttggcctgcagctgctgcggcagctgcgggactacttccctgccaccaacagcacagctgtgcaccggctggagctgctgctgaagtgcctgggcaagctgcagctgttccagcccagctttgagatctgcccccgggtgggcgctgagcacggccactgctgcggccctgaggagcggcagccctag

SEQ ID NO: 76892 - DNA, 3351 bp, Artificial Sequence
  derived and/or modified sequence
atgagcaccctgctggacatcaagagcagcgtgctgcggcaggtgcaggtttgtccttcttttagacgaagaactgaacaggaccccgggtccgccagcgctgacccacaggaaccagccactggagcgtggaagccaggcgatggagtggaatttttcgcccacatgaggcttatgctgaaaaaaggtgagggcaggcagggtctgccatgcctcgaagtgccgctccggtctggtagtccagccccccccgagcccgtggatccaagtctgggcctgcgggcactcgcaccagaggaggtcgagatgctgtacgaggaagctctctatactgtgctttacagagcaggaactatgggaccagaccaagtggatgatgaggaagctttgctgagctacttacaacaagtctttggcacgagcctcgaggagcacactgaagccatcgagcgggtgagaaaagctaaagcaccgacttacgcactgaaagtgtccgtcatgcgggccaaaaacctgctggccaaggatccaaacggattctctgacccttattgtatgttgggaattctccctgcctcagacgcaaccagggagcctagggcacagaaggaacagcgcttcggatttcgaaaagggtcaaaaaggggaggcccacttccagcaaagtgcatccaagtgaccgaggtgaaatcttcaaccttgaacccggtgtggaaagagcacttcctttttgaaatcgaagatgtatccaccgatcagcttcacttggatatttgggatcacgacgatgatgtatcactggtggaggcctgtcgcaaactgaatgaggtgattgggttgaagggcatgggccgctacttcaaacagattgtcaaaagcgcccgggccaatgggactgccggccccactgaggatcataccgacgactttcttggctgtctaaacatcccagtgcgtagagataccgccatgtcccaacgaggaaggtcagggttcctctcccacctgctcctactgtctcatctgctcagactggagcactcagccgaagaacccaatagctcgtcttggaggggagaactgtccactccagcggccaccattctgtgtctgcacggggctcagtctaatctctctccactgcagttggcagtgcttcactggcaggtaagcagcaggcatcatcagacgtgtactctggactattcttacctgctggggttgctggaagatatgcaagcccattgggaagaagcgccctcgctgccacaggaacaggaagagagcctcgctgactctttgagcgcattttccgaattcggcttgcagctcctgcgacaacttcgtgactacttccctgccaccaattcaaccgctgtacatagactcgaactactgctcaagtgcctgggaaagttgcagctttttcagccctctttcgaaatctgtcctttcgaatctgaactcaacatggacattgccgcagccctgaagcgcggtaatagagaatggtatgacaggattctgaacgacaaatccccccgtgaacagccaggcccccagagactgcctggtctggtcgttctggccgacgccgtatatgatgatttgcagttttgctactcagtctacgccagcctttttcacagcatacttaatgtcgatgtttttacactgacattcagacaactcgagaggctcgtggcagaagaagcatgggtgctgacggaggaattatctccaaagatgactctggaggtggcatctggtctgtttgagctttatttaaccctggctgatctgcaacgtttctgggatagtatccctggccgcgattcgaggtccctggcgttggcaggaatccacgctcccttcctccctgccgttaagctttggtttcaagtgctgcgggatcaagccaagtggagacttcaaggagctgtcgatatggacacactggagcccgttgatgcgagcagtcgacactcatcctccgctgccaccgccggactttgcctgtcgcacatccaggagctgtgggttaggctggcctggccagaccctgcacaggcccagggcctgggcacccagctgggccaagatgtctgcgaggctactcttttctacacagagcttttgcgaaaaaaggtcgatacccaacccggagctgctggagaggctgtctccgaagcactgtgcgtggtgctgaataatgtggagcttgtccgaaaggctgcgggccaggccctcaagggcctggcatggcctgagggcgcgactggacccgagggggtactgcccagacctcttttgtcttgtactcaggcactggacgacgacctccaacgggaggcccacaccgtgacggcccacctgacaagcaaaatggtgggtgatattcgtaagtatgtacagcacatctccctcagtccagattccatccaaaatgacgaggcggtagctccactaatgaaatacctggatgaaaaactggcattactgaacgcgtcgctagtgaaaggcaatctttccagggtgctggaagctctgtgggagctcctgcttcaggcaatcttgcaggccctgggcgccaatagggacgtgagcgccgacttttactccaggtttcacttcacactcgaagctctcgtgtcctttttccatgccgaggggcagggacttcccttggaaagcctgcgggatggttcttacaagagattgaaagaagagctgcgtctgcataaatgttccactcgtgaatgcatcgagcagttctacctggacaagctaaaacagcgtacattggagcagaataggttcggccgcctatcagtcagatgccattacgaagccgcagagcaacggcttgctgtcgaggtgctgcatgccgccgaccttctcccactagacgccaacgggctgtctgacccttttgtgattgtggagctcgggccccctcatctgtttcccctggtcagatcgcagcggacccaagtgaagaccaggacactgcaccccgtgtatgacgagttgttttacttctctgtacctgcagaggcgtgtagacggcgggccgcgtgcgtcctgttcaccgtgatggatcatgactggctgagtacaaatgacttcgccggagaagcagcgctcggattgggcggtgtgaccggcgtcgccagaccccaggttggtgggggtgctagggccgggcagccagtgacactgcatttgtgtcgccccagagcccaggtgagatccgcacttcgcagactagaaggtaggactagcaaagaggcccaggagttcgtgaaaaaactgaaggagttggaaaagtgcatggaagcagatccatag

SEQ ID NO: 76893 - DNA, 537 bp, Artificial Sequence
  derived and/or modified sequence
atgagccagcggggccggagcggcttcctgagccacctgctgctgcttagccacttacttcgactggagcacagcgcagaggagcctaattcgtcttcttggaggggcgaactgtctactcctgctgccacgattctatgtctgcacggcgcccagtctaacttgtcccctctacagctagctgtcctacattggcaggtctcttcacgccatcaccaaacatgcacacttgactactcttatttgctcgggctgctggaggatatgcaggcccactgggaggaggcaccttctctccctcaggagcaggaggagtccctagccgattctctgtccgcctttagcgaatttgggctacagttgctaagacagcttcgcgactactttcccgctacaaactctacagctgtccaccgattggaactactgctgaaatgtctcggaaagttgcagctgtttcagccttcttttgagatctgtcccagagtgggagctgaacatggccactgttgcggccctgaagagaggcagccatag

SEQ ID NO: 76894 - DNA, 3351 bp, Artificial Sequence
  derived and/or modified sequence
atgtctactctgctggacataaaaagcagtgtgctgagacaggtgcaggtgtgcccctccttccgcaggagaacagagcaagatccagggtctgcaagtgccgatccacaggagcctgcaacgggcgcttggaagccaggggacggcgttgagttttttgcgcacatgagacttatgctaaaaaaaggcgagggaagacagggtctgccatgcctggaagtgcccctgaggagcggtagtcctgcgccacctgaacctgtggatccatcgctagggctgagagctctggcccctgaagaggtagagatgctctacgaagaagccctttacacagtgctctaccgggcaggaacaatgggccctgatcaagttgacgatgaagaggcactgttgtcatacctccagcaggtatttgggacgtctctcgaagaacatacggaggcaattgagcgcgtccgcaaggctaaggccccaacgtatgcgttgaaggtgagcgtgatgagagccaaaaatctgctggcgaaggacccaaacggcttctcggatccttactgtatgctcggcatccttccagcaagtgacgcaactcgggagccaagagctcagaaggagcagcgttttggcttcagaaaggggtccaagcgtggtggtcccttacccgctaagtgcatacaagtgaccgaagtcaagtcctcaactctaaatccagtatggaaagaacactttttgtttgagattgaggatgtgagcaccgaccagttacatttggacatttgggatcacgatgacgatgtgagcctcgtcgaagcctgcagaaaactgaacgaggtgatcggcctgaaaggtatgggacgctatttcaagcaaatcgtgaagtcagcaagggcaaacgggaccgccggacctaccgaagaccatactgacgacttcctaggatgtctgaatataccagtgagaagagataccgcaatgtcccagagaggaagatcaggtttcctgtctcatctgctcttattgagtcatctgttgcgcctggagcactccgctgaagagccgaatagcagcagctggcgcggagagctgtcaacccctgctgcaacaatcctttgcttacatggagcgcaaagtaatctaagtccacttcagttggccgtgctccactggcaggtgtcatcgagacatcaccagacctgcaccctggactactcgtacttgctggggctgcttgaggacatgcaagcgcattgggaggaggcaccatcactgccgcaggaacaggaggaatcgctggctgatagtctgtctgcattttccgagtttggcctccagctgctaagacaactccgggattacttccccgctaccaattccacagccgttcacagactagaacttcttctgaagtgtttggggaaactgcaactattccagccctcattcgagatctgtccttttgagagtgagctcaacatggacattgcagccgctctcaagcggggtaaccgggagtggtatgatcgaatcttgaatgacaagagtcctcgagagcagcctgggcctcaacgactgcccggtctggtcgtgttggctgacgctgtgtacgacgacctacagttctgctattctgtgtacgcttctcttttccactcaatcctgaatgtcgacgtgtttaccctgacgtttaggcagttagagcgcctggtggctgaagaggcctgggtattgaccgaggaactgtctcccaagatgacccttgaagttgcatccgggttgtttgaactttatttgaccctggcagacttgcaaagattttgggactctatcccagggagagattctaggtccctcgcattagcagggattcatgctccattcctacccgcagtgaaactctggtttcaggtgctgcgtgaccaggctaaatggcgccttcaaggcgcagttgacatggacaccctggagcccgttgatgctagctcccggcattcatccagcgccgctaccgcaggcctatgcctctcgcatatccaggaactatgggtgcggctggcctggcccgatccagcccaggcgcaaggactcggcacgcaacttggtcaagacgtctgcgaggccacccttttctataccgagttgttgaggaagaaagtggacacgcagccaggggcagcaggcgaggcagtgagcgaagcgctatgcgttgttctgaacaacgtcgagctcgtgagaaaagctgcagggcaggctctgaagggacttgcttggccagaaggtgcgacagggccagaaggcgtactgccacgcccacttttgtcctgcacccaagcgttggacgatgatctccagcgcgaagcccatacagtcacagctcatcttaccagtaaaatggtgggagatatcagaaagtatgtgcagcatatttcattaagccctgattctattcagaacgacgaagccgtggccccactcatgaaataccttgacgagaagttggccctgctgaatgctagcctggtgaaaggaaatttgagtagggtgctagaagctctttgggaacttctgctccaggcaatcctccaggcgctaggcgctaatagagatgtgtccgccgacttttactcgcggttccactttaccttagaggctcttgtgtcatttttccacgccgagggccaggggctgccactcgaatccctgcgtgatgggagctacaagcgcctcaaggaggagctccgtctgcacaagtgctccacaagagagtgtatcgaacaattctacttggacaaactcaagcaacggaccctcgagcagaaccgattcggcagactgagcgtgcgctgccactatgaagccgctgaacaaagactggccgtcgaagtgctgcacgctgcagacctgcttccactcgacgcgaatggtttatcagacccctttgtcattgtcgaactcggtcccccacacttgttcccattagtccgctcccaaaggacccaggtcaaaacccggaccctgcatcctgtctacgacgagctgttctacttctcagttcccgctgaggcctgtcggaggcgagcagcctgcgtactttttactgtgatggatcatgactggctgtcgactaatgacttcgctggggaagctgctcttggccttggaggcgtaaccggcgtggctagacctcaggttggcggaggtgcacgcgctgggcagccagtcacactgcacctttgccgcccaagggcgcaagtcagaagcgcgttgcgtcgtctggagggcagaacctctaaggaagcccaagaattcgtcaaaaaattgaaggagctagaaaaatgcatggaagccgatccttag

SEQ ID NO: 76895 - DNA, 537 bp, Artificial Sequence
  derived and/or modified sequence
atgtcacaacgtggtagaagcgggttcttgtctcacctcctccttctatcacacctgctcaggctggaacattctgccgaagagccaaactcctcctcctggcgaggcgagctgtcaactcccgcagcaactatactttgccttcacggagctcaatctaacctgtcccccctgcagttagcagtcctgcactggcaggtctcctccagacaccatcagacttgtactctcgactattcctatctactcgggttactggaagacatgcaggcccattgggaagaagctccctctctgccacaggagcaggaggagtcacttgcagacagtctgtccgcctttagcgagttcggtcttcaactcctccgtcaactccgcgactattttccagccaccaactccaccgccgtccacagactggaactccttctgaagtgcctcggaaagctccagctatttcagccaagcttcgaaatatgcccccgagtcggggcagagcatggtcactgctgcgggcctgaagaaaggcagccctag

SEQ ID NO: 76896 - DNA, 3875 bp, Artificial Sequence
  derived and/or modified sequence
actggcttcgggggacagcagggggagcagcctcttccacccagcaagggaggggaagggggcttgtgactcccaggcccctgaggatttcacgactggctgtgggggtgacagcttccagaagcactgtacccagcctaccaagcccccccatcttttgggggggaggctcacaggggaaggcactgataggtttgaaggaggtcacccgccatgtcgaccttgctggacattaagagcagcgtgctcaggcaggtgcaggtgtgcccgtccttccgccgcaggactgagcaggacccagggagtgccagcgccgacccgcaggagcctgccacgggggcctggaaacccggggatggcgtggagttctttgcccacatgcgcctcatgctgaagaagggggaaggcagacagggcttgccgtgcctcgaggtccccctgcgcagtggctcgccagcacccccggagcctgtggatcccagcctcggcctgagagccctggccccagaggaggtggagatgctctacgaggaggccctgtacacggtgctttaccgcgcgggtaccatgggccctgaccaggtggacgacgaggaggccctgctcagctatctccagcaggtgtttggcaccagccttgaggagcacactgaggccatcgagcgagtgaggaaggccaaggcccccacgtatgccctgaaagtctctgtcatgcgtgccaagaaccttctggccaaggaccccaacggcttcagcgacccatactgcatgctgggcatcctgcctgcctcggacgccacgcgggagccccgtgcacagaaggagcagcgcttcggcttccgcaagggcagcaagcgcggtggacccctgcctgccaagtgcatccaggtcaccgaggtgaagagcagcaccctgaaccccgtctggaaggagcacttcctcttcgagattgaggatgtgagcacggaccagctgcacctggacatctgggatcatgacgacgatgtatccctggtagaagcgtgcaggaagctgaatgaagtcatcggcctgaagggcatgggcaggtacttcaaacagatcgtcaagtcagcccgcgcaaacgggacagcaggacccaccgaggaccacaccgatgacttcctggggtgcctcaacatacctgtccggagggatacggccatgagccagcgcgggcgatccggcttcctgtcccacctgctgctgctcagccatctgctgcggttggagcactcagcagaggagcccaactccagcagctggcgaggagagctcagcacaccagccgccaccatcctctgcctgcacggagcccagagcaacctgtcacccttgcagctggccgtgctgcactggcaggtcagcagccgccaccatcaaacctgcacgctggactacagctacctgctggggctgctggaggacatgcaggcacactgggaagaggctccttcactgccccaggagcaggaggagagcctggctgatagcctttccgccttctctgagttcgggctgcagctgctgcgccagctccgagactacttccctgccaccaacagcaccgctgtccaccgcctggagctgctgctgaagtgtctgggcaagctgcagctcttccaaccctcctttgagatctgccccttcgagtcggagctgaacatggacattgctgcggccctgaagagaggcaaccgtgagtggtacgacaggatcctgaatgacaagagtccccgagagcagccaggaccacagcgcctgcctgggctggttgtgctggctgacgccgtctatgatgaccttcagttctgctacagtgtgtacgccagcctcttccacagcatcctcaatgtggacgtcttcaccctgaccttccggcagctggagcgtctggtggctgaggaggcgtgggtgctgacggaggagctgagccccaagatgaccctggaggtggcctcggggctctttgagctctacctgaccctggctgacctccagcgcttctgggatagcatccctggccgggacagccgctctctggccctggctggcatccacgcccccttcctgcctgctgtgaagctctggttccaagtgctgagggaccaggccaagtggaggcttcagggagccgtggacatggacacgctggagcccgtggacgcctcctccaggcacagcagctccgcagccactgctggtctctgcctcagccacatccaggagttgtgggtgcgcctggcgtggcctgaccctgcccaggctcaggggctgggcacccagcttggccaggacgtgtgtgaggccaccctcttctatacggagctgcttcggaagaaggtggacactcagccaggggcggccggtgaagcagtgagcgaggcgctctgcgtggtcctcaacaatgtggagctcgtgcgcaaggctgctgggcaggccttgaagggcctggcatggccagagggggccacggggcccgagggggtgctcccccgccctctgctcagctgcacacaggccctggacgatgatctgcaacgggaggcccacacggtgacagcgcacctgacctctaagatggtgggcgacatccgcaagtatgtacagcacatcagtctctcgcctgactccatccagaacgatgaggccgtggccccgctcatgaagtacctggatgagaagctggccctgctgaacgcctcgctggtgaaggggaacctgagcagggtgctggaggccctgtgggagctactcctccaggccattctgcaggcgctgggtgcaaaccgtgacgtctctgctgatttctacagccgcttccatttcacgctggaggccctggtcagttttttccacgcagagggtcagggtttgcccctggagagcctgagggatggaagctacaagaggctgaaggaggagctgcggctgcacaaatgttccacccgcgagtgcatcgagcagttctacctggacaagctcaaacagaggaccctggagcagaaccggtttggacgcctgagcgtccgttgccattacgaggcggctgagcagcggctggccgtggaggtgctgcacgccgcggacctgctccccctggacgccaacggcttaagtgacccctttgtgatcgtggagctgggcccaccgcatctctttccactggtccgcagccagaggacccaggtgaagacccggacgctgcaccctgtatacgacgaactcttctacttttccgtgcctgccgaggcgtgccgccgccgcgcggcctgtgtgttgttcaccgtcatggaccacgactggctgtccaccaacgacttcgctggggaggcggccctcggcctaggtggcgtcactggtgtcgcccggccccaggtgggcgggggtgcaagggctgggcagcctgtcaccctgcacctgtgccggcccagagcccaggtgagatctgcgctgaggaggctggaaggccgcaccagcaaggaggcgcaggagttcgtgaagaaactcaaggagctggagaagtgcatggaggcggacccctgagtccatcagctgccagccccggccctggcccccaccccaagttccctgaagcatcctccagctcactgtggccagctttgtgcaaccagggcccacggcgcccctcctgtgctgtgacgtgtgtgtcgtggctggccccgcggcgcctaccgccctggccgtgtctgtctggtgtgtgctgtgaacccctgcacccaaccccacatctgggtggccaacttggcaggacttggccagcagctgcccaggacacagtgcaggccagagcgggcttgaccacctggtgggcctccctgcccgcttccttgggc

SEQ ID NO: 76897 - DNA, 4528 bp, Artificial Sequence
  derived and/or modified sequence
ttcgactggaatgagaccccggggagcagcgtttgcagcgggcccgccaggtgacctgcacctgggcaccgccatcggcttcgcaggggccatctggaggagtcggtcacccgccatgtcgaccttgctggacattaagagcagcgtgctcaggcaggtgcaggtgtgcccgtccttccgccgcaggactgagcaggacccagggagtgccagcgccgacccgcaggagcctgccacgggggcctggaaacccggggatggcgtggagttctttgcccacatgcgcctcatgctgaagaagggggaaggcagacagggcttgccgtgcctcgaggtccccctgcgcagtggctcgccagcacccccggagcctgtggatcccagcctcggcctgagagccctggccccagaggaggtggagatgctctacgaggaggccctgtacacggtgctttaccgcgcgggtaccatgggccctgaccaggtggacgacgaggaggccctgctcagctatctccagcaggtgtttggcaccagccttgaggagcacactgaggccatcgagcgagtgaggaaggccaaggcccccacgtatgccctgaaagtctctgtcatgcgtgccaagaaccttctggccaaggaccccaacggcttcagcgacccatactgcatgctgggcatcctgcctgcctcggacgccacgcgggagccccgtgcacagaaggagcagcgcttcggcttccgcaagggcagcaagcgcggtggacccctgcctgccaagtgcatccaggtcaccgaggtgaagagcagcaccctgaaccccgtctggaaggagcacttcctcttcgagattgaggatgtgagcacggaccagctgcacctggacatctgggatcatgacgacgatgtatccctggtagaagcgtgcaggaagctgaatgaagtcatcggcctgaagggcatgggcaggtacttcaaacagatcgtcaagtcagcccgcgcaaacgggacagcaggacccaccgaggaccacaccgatgacttcctggggtgcctcaacatacctgtccgggaggtgcctgtggctggcgtcgaccgctggttcaagctggagccacgctccagtgcctcgcgtgtgcagggacactgccacctggttctcaagctgatcactacgcagagggatacggccatgagccagcgcgggcgatccggcttcctgtcccacctgctgctgctcagccatctgctgcggttggagcactcagcagaggagcccaactccagcagctggcgaggagagctcagcacaccagccgccaccatcctctgcctgcacggagcccagagcaacctgtcacccttgcagctggccgtgctgcactggcaggtcagcagccgccaccatcaaacctgcacgctggactacagctacctgctggggctgctggaggacatgcaggcacactgggaagaggctccttcactgccccaggagcaggaggagagcctggctgatagcctttccgccttctctgagttcgggctgcagctgctgcgccagctccgagactacttccctgccaccaacagcaccgctgtccaccgcctggagctgctgctgaagtgtctgggcaagctgcagctcttccaaccctcctttgagatctgcccccgagtcggagctgaacatggacattgctgcggccctgaagagaggcaaccgtgagtggtacgacaggatcctgaatgacaagagtccccgagagcagccaggaccacagcgcctgcctgggctggttgtgctggctgacgccgtctatgatgaccttcagttctgctacagtgtgtacgccagcctcttccacagcatcctcaatgtggacgtcttcaccctgaccttccggcagctggagcgtctggtggctgaggaggcgtgggtgctgacggaggagctgagccccaagatgaccctggaggtggcctcggggctctttgagctctacctgaccctggctgacctccagcgcttctgggatagcatccctggccgggacagccgctctctggccctggctggcatccacgcccccttcctgcctgctgtgaagctctggttccaagtgctgagggaccaggccaagtggaggcttcagggagccgtggacatggacacgctggagcccgtggacgcctcctccaggcacagcagctccgcagccactgctggtctctgcctcagccacatccaggagttgtgggtgcgcctggcgtggcctgaccctgcccaggctcaggggctgggcacccagcttggccaggacgtgtgtgaggccaccctcttctatacggagctgcttcggaagaaggtggacactcagccaggggcggccggtgaagcagtgagcgaggcgctctgcgtggtcctcaacaatgtggagctcgtgcgcaaggctgctgggcaggccttgaagggcctggcatggccagagggggccacggggcccgagggggtgctcccccgccctctgctcagctgcacacaggccctggacgatgatctgcaacgggaggcccacacggtgacagcgcacctgacctctaagatggtgggcgacatccgcaagtatgtacagcacatcagtctctcgcctgactccatccagaacgatgaggccgtggccccgctcatgaagtacctggatgagaagctggccctgctgaacgcctcgctggtgaaggggaacctgagcagggtgctggaggccctgtgggagctactcctccaggccattctgcaggcgctgggtgcaaaccgtgacgtctctgctgatttctacagccgcttccatttcacgctggaggccctggtcagttttttccacgcagagggtcagggtttgcccctggagagcctgagggatggaagctacaagaggctgaaggaggagctgcggctgcacaaatgttccacccgcgagtgcatcgagcagttctacctggacaagctcaaacagaggaccctggagcagaaccggtttggacgcctgagcgtccgttgccattacgaggcggctgagcagcggctggccgtggaggtgctgcacgccgcggacctgctccccctggacgccaacggcttaagtgacccctttgtgatcgtggagctgggcccaccgcatctctttccactggtccgcagccagaggacccaggtgaagacccggacgctgcaccctgtatacgacgaactcttctacttttccgtgcctgccgaggcgtgccgccgccgcgcggcctgtgtgttgttcaccgtcatggaccacgactggctgtccaccaacgacttcgctggggaggcggccctcggcctaggtggcgtcactggtgtcgcccggccccaggtgggcgggggtgcaagggctgggcagcctgtcaccctgcacctgtgccggcccagagcccaggtgagatctgcgctgaggaggctggaaggccgcaccagcaaggaggcgcaggagttcgtgaagaaactcaaggagctggagaagtgcatggaggcggacccctgagtccatcagctgccagccccggccctggcccccaccccaagttccctgaagcatcctccagctcactgtggccagctttgtgcaaccagggcccacggcgcccctcctgtgctgtgacgtgtgtgtcgtggctggccccgcggcgcctaccgccctggccgtgtctgtctggtgtgtgctgtgaacccctgcacccaaccccacatctgggtggccaacttggcaggacttggccagcagctgcccaggacacagtgcaggccagagcgggcttgaccacctggtgggcctccctgcccgcttccttgggctccccggccctgggtgggcggtgggcagctggtctccagggactcagtgagtggctgtgctctctgcacaacgggcaatgtgcagacgcatttttggtaatcacagctggggagtgaaaagggtgccactggcaccactgggtggatggtccagagcctccacccacagaggggatgcaaagggcaggtgagtcaagaaccgcataggtctccagtccccacggggctcccaggccggggaaaggttcccctgaggtcactctgaggccagggacgtcacccaaggctggtggtcagtgtgaagggctccgtgccaactggtcagctgtccttcacgcacatatccgtggccacctgagacctgctccacgacccttccaggcagagccgagagttcgccccaacccttccccaggcccagtgtgaaaaacagactcacaaggggcttcttggcctgcagcttcatttgcgagagcgccgaggcaggacacagagcacagctgtgctggaagtgtggggagaacccggacagctcagtcctgccagcagccgcaaagagccgaggctgccaggcccatttatgtccctcatgtctctagattttctcgtcacccagcctcaaaaatatatgtgtctgcaaccctc

SEQ ID NO: 76898 - DNA, 3351 bp, Artificial Sequence
  derived and/or modified sequence
atgagcaccctgctggacatcaagagcagcgtgctgagacaggtgcaggtgtgccccagcttcagaagaagaaccgagcaggaccccggcagcgccagcgccgacccccaggagcccgccaccggcgcctggaagcccggcgacggcgtggagttcttcgcccacatgagactgatgctgaagaagggcgagggcagacagggcctgccctgcctggaggtgcccctgagaagcggcagccccgccccccccgagcccgtggaccccagcctgggcctgagagccctggcccccgaggaggtggagatgctgtacgaggaggccctgtacaccgtgctgtacagagccggcaccatgggccccgaccaggtggacgacgaggaggccctgctgagctacctgcagcaggtgttcggcaccagcctggaggagcacaccgaggccatcgagagagtgagaaaggccaaggcccccacctacgccctgaaggtgagcgtgatgagagccaagaacctgctggccaaggaccccaacggcttcagcgacccctactgcatgctgggcatcctgcccgccagcgacgccaccagagagcccagagcccagaaggagcagagattcggcttcagaaagggcagcaagagaggcggccccctgcccgccaagtgcatccaggtgaccgaggtgaagagcagcaccctgaaccccgtgtggaaggagcacttcctgttcgagatcgaggacgtgagcaccgaccagctgcacctggacatctgggaccacgacgacgacgtgagcctggtggaggcctgcagaaagctgaacgaggtgatcggcctgaagggcatgggcagatacttcaagcagatcgtgaagagcgccagagccaacggcaccgccggccccaccgaggaccacaccgacgacttcctgggctgcctgaacatccccgtgagaagagacaccgccatgagccagagaggcagaagcggcttcctgagccacctgctgctgctgagccacctgctgagactggagcacagcgccgaggagcccaacagcagcagctggagaggcgagctgagcacccccgccgccaccatcctgtgcctgcacggcgcccagagcaacctgagccccctgcagctggccgtgctgcactggcaggtgagcagcagacaccaccagacctgcaccctggactacagctacctgctgggcctgctggaggacatgcaggcccactgggaggaggcccccagcctgccccaggagcaggaggagagcctggccgacagcctgagcgccttcagcgagttcggcctgcagctgctgagacagctgagagactacttccccgccaccaacagcaccgccgtgcacagactggagctgctgctgaagtgcctgggcaagctgcagctgttccagcccagcttcgagatctgccccttcgagagcgagctgaacatggacatcgccgccgccctgaagagaggcaacagagagtggtacgacagaatcctgaacgacaagagccccagagagcagcccggcccccagagactgcccggcctggtggtgctggccgacgccgtgtacgacgacctgcagttctgctacagcgtgtacgccagcctgttccacagcatcctgaacgtggacgtgttcaccctgaccttcagacagctggagagactggtggccgaggaggcctgggtgctgaccgaggagctgagccccaagatgaccctggaggtggccagcggcctgttcgagctgtacctgaccctggccgacctgcagagattctgggacagcatccccggcagagacagcagaagcctggccctggccggcatccacgcccccttcctgcccgccgtgaagctgtggttccaggtgctgagagaccaggccaagtggagactgcagggcgccgtggacatggacaccctggagcccgtggacgccagcagcagacacagcagcagcgccgccaccgccggcctgtgcctgagccacatccaggagctgtgggtgagactggcctggcccgaccccgcccaggcccagggcctgggcacccagctgggccaggacgtgtgcgaggccaccctgttctacaccgagctgctgagaaagaaggtggacacccagcccggcgccgccggcgaggccgtgagcgaggccctgtgcgtggtgctgaacaacgtggagctggtgagaaaggccgccggccaggccctgaagggcctggcctggcccgagggcgccaccggccccgagggcgtgctgcccagacccctgctgagctgcacccaggccctggacgacgacctgcagagagaggcccacaccgtgaccgcccacctgaccagcaagatggtgggcgacatcagaaagtacgtgcagcacatcagcctgagccccgacagcatccagaacgacgaggccgtggcccccctgatgaagtacctggacgagaagctggccctgctgaacgccagcctggtgaagggcaacctgagcagagtgctggaggccctgtgggagctgctgctgcaggccatcctgcaggccctgggcgccaacagagacgtgagcgccgacttctacagcagattccacttcaccctggaggccctggtgagcttcttccacgccgagggccagggcctgcccctggagagcctgagagacggcagctacaagagactgaaggaggagctgagactgcacaagtgcagcaccagagagtgcatcgagcagttctacctggacaagctgaagcagagaaccctggagcagaacagattcggcagactgagcgtgagatgccactacgaggccgccgagcagagactggccgtggaggtgctgcacgccgccgacctgctgcccctggacgccaacggcctgagcgaccccttcgtgatcgtggagctgggccccccccacctgttccccctggtgagaagccagagaacccaggtgaagaccagaaccctgcaccccgtgtacgacgagctgttctacttcagcgtgcccgccgaggcctgcagaagaagagccgcctgcgtgctgttcaccgtgatggaccacgactggctgagcaccaacgacttcgccggcgaggccgccctgggcctgggcggcgtgaccggcgtggccagaccccaggtgggcggcggcgccagagccggccagcccgtgaccctgcacctgtgcagacccagagcccaggtgagaagcgccctgagaagactggagggcagaaccagcaaggaggcccaggagttcgtgaagaagctgaaggagctggagaagtgcatggaggccgacccctag

SEQ ID NO: 76899 - DNA, 537 bp, Artificial Sequence
  derived and/or modified sequence
atgagccagagaggcagaagcggcttcctgagccacctgctgctgctgagccacctgctgagactggagcacagcgccgaggagcccaacagcagcagctggagaggcgagctgagcacccccgccgccaccatcctgtgcctgcacggcgcccagagcaacctgagccccctgcagctggccgtgctgcactggcaggtgagcagcagacaccaccagacctgcaccctggactacagctacctgctgggcctgctggaggacatgcaggcccactgggaggaggcccccagcctgccccaggagcaggaggagagcctggccgacagcctgagcgccttcagcgagttcggcctgcagctgctgagacagctgagagactacttccccgccaccaacagcaccgccgtgcacagactggagctgctgctgaagtgcctgggcaagctgcagctgttccagcccagcttcgagatctgccccagagtgggcgccgagcacggccactgctgcggccccgaggagagacagccctag

SEQ ID NO: 76900 - protein, 1152 aa, Artificial Sequence
  derived and/or modified sequence
MSTLLDIKSSVLRQVQVCPSFRRRTEQDPGSASADPQEPATGAWKPGDGVEFFAHMRLMLKKGEGRQGLPCLEVPLRSGSPAPPEPVDPSLGLRALAPEEVEMLYEEALYTVLYRAGTMGPDQVDDEEALLSYLQQVFGTSLEEHTEAIERVRKAKAPTYALKVSVMRAKNLLAKDPNGFSDPYCMLGILPASDATREPRAQKEQRFGFRKGSKRGGPLPAKCIQVTEVKSSTLNPVWKEHFLFEIEDVSTDQLHLDIWDHDDDVSLVEACRKLNEVIGLKGMGRYFKQIVKSARANGTAGPTEDHTDDFLGCLNIPVREVPVAGVDRWFKLEPRSSASRVQGHCHLVLKLITTQRDTAMSQRGRSGFLSHLLLLSHLLRLEHSAEEPNSSSWRGELSTPAATILCLHGAQSNLSPLQLAVLHWQVSSRHHQTCTLDYSYLLGLLEDMQAHWEEAPSLPQEQEESLADSLSAFSEFGLQLLRQLRDYFPATNSTAVHRLELLLKCLGKLQLFQPSFEICPFESELNMDIAAALKRGNREWYDRILNDKSPREQPGPQRLPGLVVLADAVYDDLQFCYSVYASLFHSILNVDVFTLTFRQLERLVAEEAWVLTEELSPKMTLEVASGLFELYLTLADLQRFWDSIPGRDSRSLALAGIHAPFLPAVKLWFQVLRDQAKWRLQGAVDMDTLEPVDASSRHSSSAATAGLCLSHIQELWVRLAWPDPAQAQGLGTQLGQDVCEATLFYTELLRKKVDTQPGAAGEAVSEALCVVLNNVELVRKAAGQALKGLAWPEGATGPEGVLPRPLLSCTQALDDDLQREAHTVTAHLTSKMVGDIRKYVQHISLSPDSIQNDEAVAPLMKYLDEKLALLNASLVKGNLSRVLEALWELLLQAILQALGANRDVSADFYSRFHFTLEALVSFFHAEGQGLPLESLRDGSYKRLKEELRLHKCSTRECIEQFYLDKLKQRTLEQNRFGRLSVRCHYEAAEQRLAVEVLHAADLLPLDANGLSDPFVIVELGPPHLFPLVRSQRTQVKTRTLHPVYDELFYFSVPAEACRRRAACVLFTVMDHDWLSTNDFAGEAALGLGGVTGVARPQVGGGARAGQPVTLHLCRPRAQVRSALRRLEGRTSKEAQEFVKKLKELEKCMEADP

SEQ ID NO: 76901 - protein, 178 aa, Artificial Sequence
  derived and/or modified sequence
MSQRGRSGFLSHLLLLSHLLRLEHSAEEPNSSSWRGELSTPAATILCLHGAQSNLSPLQLAVLHWQVSSRHHQTCTLDYSYLLGLLEDMQAHWEEAPSLPQEQEESLADSLSAFSEFGLQLLRQLRDYFPATNSTAVHRLELLLKCLGKLQLFQPSFEICPRVGAEHGHCCGPEERQP

SEQ ID NO: 76902 - protein, 533 aa, Artificial Sequence
  derived and/or modified sequence
MSQTSLKQKKNEPGMRSSKESLEAEKRKESDKTGVRLSNQGSQESSLRKTDSRGYLVRSQWSRISRSPSTKAPSIDEPRSRNTSAKVELPSSSTSSRTPSTSPSLHDSSPPPLSGQPSLQPPASPQLPRSLDSRPPTPPEPDPGSRRSTKMQENPEAWAQGIVREIRQTRDSQPLEYSRTSPTEWKSSSQRRGIYPASTQLDRNSLSEQQQQQREDEDDYEAAYWASMRSFYEKNPSCSRPWPPKPKNAITIALSSCALFNMVDGRKIYEQEGLEKYMEYQLTNENVILTPGPAFRFVKALQYVNARLRDLYPDEQDLFDIVLMTNNHAQVGVRLINSVNHYGLLIDRFCLTGGKDPIGYLKAYLTNLYIAADSEKVQEAIQEGIASATMFDGAKDMAYCDTQLRVAFDGDAVLFSDESEHFTKEHGLDKFFQYDTLCESKPLAQEEPRLDVLINNAGIFQCPYMKTEDGFEMQFGVNHLGHFLLTNLLLGLLKSSAPSRIVVVSSKLYKYGDINFDDLNSEQSYNKSFCYSR

SEQ ID NO: 76903 - DNA, 1602 bp, Artificial Sequence
  derived and/or modified sequence
atgagccagaccagcctgaagcagaagaagaacgagcccggcatgagaagcagcaaggagagcctggaggccgagaagagaaaggagagcgacaagaccggcgtgagactgagcaaccagggcagccaggagagcagcctgagaaagaccgacagcagaggctacctggtgagaagccagtggagcagaatcagcagaagccccagcaccaaggcccccagcatcgacgagcccagaagcagaaacaccagcgccaaggtggagctgcccagcagcagcaccagcagcagaacccccagcaccagccccagcctgcacgacagcagccccccccccctgagcggccagcccagcctgcagccccccgccagcccccagctgcccagaagcctggacagcagaccccccaccccccccgagcccgaccccggcagcagaagaagcaccaagatgcaggagaaccccgaggcctgggcccagggcatcgtgagagagatcagacagaccagagacagccagcccctggagtacagcagaaccagccccaccgagtggaagagcagcagccagagaagaggcatctaccccgccagcacccagctggacagaaacagcctgagcgagcagcagcagcagcagagagaggacgaggacgactacgaggccgcctactgggccagcatgagaagcttctacgagaagaaccccagctgcagcagaccctggccccccaagcccaagaacgccatcaccatcgccctgagcagctgcgccctgttcaacatggtggacggcagaaagatctacgagcaggagggcctggagaagtacatggagtaccagctgaccaacgagaacgtgatcctgacccccggccccgccttcagattcgtgaaggccctgcagtacgtgaacgccagactgagagacctgtaccccgacgagcaggacctgttcgacatcgtgctgatgaccaacaaccacgcccaggtgggcgtgagactgatcaacagcgtgaaccactacggcctgctgatcgacagattctgcctgaccggcggcaaggaccccatcggctacctgaaggcctacctgaccaacctgtacatcgccgccgacagcgagaaggtgcaggaggccatccaggagggcatcgccagcgccaccatgttcgacggcgccaaggacatggcctactgcgacacccagctgagagtggccttcgacggcgacgccgtgctgttcagcgacgagagcgagcacttcaccaaggagcacggcctggacaagttcttccagtacgacaccctgtgcgagagcaagcccctggcccaggaggagcccagactggacgtgctgatcaacaacgccggcatcttccagtgcccctacatgaagaccgaggacggcttcgagatgcagttcggcgtgaaccacctgggccacttcctgctgaccaacctgctgctgggcctgctgaagagcagcgcccccagcagaatcgtggtggtgagcagcaagctgtacaagtacggcgacatcaacttcgacgacctgaacagcgagcagagctacaacaagagcttctgctacagcagatag

SEQ ID NO: 76904 - DNA, 1602 bp, Artificial Sequence
  derived and/or modified sequence
atgtcccaaacctccctgaagcagaagaaaaacgaacccggcatgcgttccagcaaagaatccctagaagccgaaaaacggaaagaaagtgacaagacgggcgtgagactgtctaatcaaggttctcaggagtcaagtctgcgaaagacagatagccgcggctatctggtgagatcccaatggagcagaatttcccgaagcccaagtacaaaggcccccagcatagatgagccacgtagcaggaatacgagtgctaaggtggagctgccatcttcctctacctcgtccaggacgccaagcacttcaccatcactacatgactcaagccctccacccctctccgggcaaccttcactgcaaccaccagcctccccccaactccccagatccttagactcccgtcctcctaccccccctgaacccgacccaggctctcggaggagcaccaaaatgcaggaaaaccccgaagcctgggcccaggggattgtacgtgaaatcaggcagactagagactcccaaccactcgaatatagcaggacatcacccactgagtggaaaagcagtagccagcgaagaggtatctacccagcatcaacacaactggatcgaaactcactctcagaacaacagcagcaacagagggaggacgaggatgattacgaagctgcctactgggcttctatgcggtccttctacgagaagaacccctcgtgcagcaggccttggccaccaaagcccaaaaatgcaataaccatagccctctcatcctgcgctctgttcaatatggtggacggcaggaaaatctacgaacaggaggggttggagaagtatatggaatatcagctgactaatgagaatgtgattctgacacccggacctgccttcagatttgtgaaagcgctgcaatatgtgaacgctagactgcgagacttatacccggacgaacaggacctgtttgatatagtgttgatgacgaataaccacgcacaggtaggcgtacgtctgatcaacagtgtgaaccattatggcctcctcatcgaccgcttctgcctaaccggggggaaagacccaataggatacctcaaagcttacctaaccaatctatacatcgcagccgacagtgagaaggtgcaggaggccatacaagagggcatagcaagcgctactatgttcgatggcgccaaggatatggcctattgcgacacacagctgcgggttgcgttcgacggggacgctgtgctcttctccgatgaatccgaacactttactaaagagcacggcttagacaaattcttccagtacgacaccctgtgtgaatcaaaaccactggcgcaggaggagccacgcctcgacgtgctgataaataatgctggaatcttccagtgcccctatatgaagactgaagacggtttcgaaatgcagttcggcgttaaccatctgggccattttctgctgaccaaccttctgctgggcttgctgaaaagcagcgcgccctcaaggatagtggtagtaagttccaaactctataagtacggcgacatcaactttgacgacctgaactctgaacaatcctataataagtccttctgttacagccgttag

SEQ ID NO: 76905 - DNA, 1602 bp, Artificial Sequence
  derived and/or modified sequence
atgagccagaccagcctgaagcagaagaagaatgaacctggcatgaggagcagcaaggagagcctggaggccgagaagaggaaggagagtgacaagacaggagtgcggctgagcaaccagggcagccaggagagcagcctgaggaagacagacagccggggctacctggtgcgcagccagtggagccgcatcagccgcagccccagcaccaaggcccccagcattgatgagcccaggagcaggaacaccagcgccaaggtggagctgcccagcagcagcaccagcagcaggacccccagcaccagccccagcctgcatgacagcagccccccacccctgagcggccagcccagcctgcagcccccagccagcccccagctgcccaggagcctggacagcaggcctcccaccccacctgagccagaccccggcagccgccgcagcaccaagatgcaggagaaccctgaggcctgggcccagggcatcgtgcgggagatccggcagacccgggacagccagcccctggagtacagcaggaccagccccacagagtggaagagcagcagccagaggcggggcatctacccagccagcacccagctggacaggaacagcctgtctgagcagcagcagcagcagagagaagatgaagatgattatgaggccgcctactgggcctccatgaggagcttctatgagaagaaccccagctgcagccggccctggccacccaagcccaagaatgccatcaccatcgccctgagcagctgtgccctcttcaacatggtggatggcaggaagatctatgagcaggagggcctggagaagtacatggagtaccagctgaccaatgaaaatgtcatcctgaccccaggccctgccttccgctttgtgaaggccctgcagtatgtgaatgcccggctgcgggacctgtacccagatgagcaggacctgtttgatattgtgctgatgaccaacaaccacgcccaggtgggcgtgcggctcatcaacagcgtgaaccactacggcctgctgattgaccgcttctgcctgaccggcggcaaggaccccatcggctacctgaaggcctacctgaccaacctgtacatcgctgctgacagcgagaaggtgcaggaggccatccaggagggcatcgccagcgccaccatgtttgatggagccaaggacatggcctactgtgacacccagctgcgggtggcctttgatggagatgctgtgctcttcagtgatgaaagtgagcacttcaccaaggagcacggcctggacaagttcttccagtatgacaccctgtgtgagagcaagcccctggcccaggaggagccccggctggatgtgctgatcaacaatgccggcatcttccagtgcccctacatgaagacagaagatggctttgagatgcagtttggagtgaaccacctgggccacttcctgctgaccaacctgctgctgggcctgctgaagagcagcgcccccagcagaattgtggtggtgagcagcaagctgtacaagtatggagacatcaactttgatgacctgaacagcgagcagagctacaacaagagcttctgctacagcaggtag

SEQ ID NO: 76906 - DNA, 1602 bp, Artificial Sequence
  derived and/or modified sequence
atgagccagaccagcctgaagcagaagaagaacgagcccggcatgcgctcgagtaaagagagtctagaggccgagaaacgaaaggagtcagacaagactggggttagactgtcaaatcaggggtcccaggaaagtagtctcaggaagaccgatagccgcggttacctggtgcgtagccagtggagtcgtatctctcgctcccctagcacaaaggccccgtccatcgatgaaccgagatccagaaacacctcagccaaggtggaattaccctctagttccactagctcgcgcacacctagcacttccccctccctccacgacagcagtccacccccccttagcggccagcccagtctgcagccacctgcgagccctcagcttccacgttccttggattcgcggccccccacacccccagagcctgaccccgggtccagacgtagtacaaagatgcaggagaatccggaagcctgggcacaaggcatagtgcgagagataagacagacgcgggattcccaaccactggagtattctcggacatcaccaactgaatggaaaagcagctctcagcgcaggggaatttacccggcaagcacccagcttgacagaaattcgctctctgagcaacaacagcaacagagagaggacgaggacgattatgaagctgcatattgggcaagtatgcgctcattttatgaaaagaacccaagctgttctcgcccttggccacctaagccaaagaatgcaatcactatagctcttagcagctgtgctctgttcaacatggtagacgggcgtaaaatttatgagcaggaggggctggagaagtatatggaataccagctcaccaacgagaatgtgattttgacgcctggacccgccttcagattcgtgaaagctcttcaatacgtgaacgcgcggttgagagacctgtacccagacgagcaggacctattcgatatcgtgttaatgactaacaatcacgcccaggtgggagtacgcctgatcaatagtgtgaatcactacggactcctgatcgataggttttgcttaactggagggaaggatcctatcgggtatttgaaagcatatctgaccaacttatacatcgctgccgattccgagaaagtgcaagaagcaatacaggaaggtatagcctcggccacaatgttcgatggggctaaggacatggcttactgcgatactcaattgcgcgtggctttcgatggagatgctgtgctgttttccgacgagtccgagcattttacgaaggagcacggcttggacaagttttttcagtatgacactctgtgcgaaagcaaacccctcgcccaggaggagccaagattggacgtgttaatcaacaatgcaggtatatttcagtgcccctatatgaagaccgaagatgggtttgagatgcagttcggggtgaaccacctggggcactttttgctgaccaacctgctgctgggccttctaaaaagttccgcgcctagcagaatcgtggtagtgtctagcaagttgtacaagtacggcgacattaactttgatgatctgaactctgaacagagttataataaatctttttgctacagccgttag

SEQ ID NO: 76907 - DNA, 1695 bp, Artificial Sequence
  derived and/or modified sequence
aaatgcaaagctagactgagcaagggaagtgacaggaaatggagctggggagacaaaaatgtggataacaacaaaagaatttcaacaggtaaaaaaatgagtcaaacatctctcaaacagaaaaagaatgagcctggaatgaggtcctcaaaagagagtctagaagcagaaaaaagaaaggaatctgacaaaacaggagttcgtctgagcaatcagggatcacaagaatcatcactgcggaagacagactctcgagggtaccttgtgcgcagtcaatggtctagaatatcccggagcccatccaccaaggctccatccatagatgagcctagaagcaggaacaccagtgctaaggtagagctccccagcagctccacgagctcccggactccatccacctccccaagcctgcatgactcctcaccgccgccgctgtccgggcagccctcgctccagccacccgcgtcgccccagctgccccggtcgctggactcgcggcctcccacgcccccagagcccgatcctggctcccggcgcagcaccaaaatgcaagagaatccggaggcctgggcccaaggcatcgtgcgggaaatccgccagacccgggactcgcagccgctggaatattcgcgcacgtcccccaccgagtggaagtcctccagccagcgcagggggatctaccccgcctccacccagctggaccgcaactctctgtccgagcagcagcagcagcagcgggaggacgaggacgactacgaggctgcctactgggcatccatgaggtcgttctacgagaagaacccgagctgctcgcgcccctggccgcccaaacccaagaacgccatcaccattgctctctcatcctgcgcgctcttcaacatggtggacggcaggaaaatctacgagcaagagggtctggaaaagtacatggagtatcagctcaccaatgagaacgtcatcctgaccccgggcccggcgttccgcttcgtcaaggcactacagtatgtcaatgctagactccgtgatctatatcctgatgaacaggacttatttgatattgtactgatgactaataaccatgcccaagtgggagtgcggcttataaacagcgtcaatcactacggcttactgattgaccgcttctgtctgaccgggggaaaagaccccattggctatttgaaggcatatcttaccaacttgtatattgctgcagattctgaaaaagtgcaagaggcaatacaagaaggtattgcctctgcgacaatgtttgatggagccaaagacatggcttactgtgacactcagctccgtgtagcctttgatggggatgctgtcctcttctctgatgagtctgaacattttaccaaggagcatgggctcgacaaattcttccagtatgatacattatgtgaaagtaagcctcttgctcaggaagagcctaggctggatgtcttgatcaataacgcagggatcttccagtgcccttacatgaagactgaagatgggtttgagatgcagttcggagtgaaccatctggggcactttctactcaccaatcttctccttggactcctcaaaagttcagctcccagcaggattgtggtagtttcttccaaactttataaatacggagacatcaattttgatgacttgaacagtgaacaaagctataataaaagcttttgttatagccgg

SEQ ID NO: 76908 - DNA, 1602 bp, Artificial Sequence
  derived and/or modified sequence
atgagtcagacttctctgaaacaaaagaaaaacgagcctggcatgagaagcagcaaggaatctctggaagctgaaaagcgcaaggaaagtgataagacgggcgtgagattatccaaccagggatcacaggaaagttcactgcgcaagactgatagtagggggtacctggtgcgttcccagtggagtcgcatcagtaggtcccccagcaccaaagctccgtcgattgacgagcccagaagccggaatacttccgccaaagtggaactgcctagttctagcaccagcagtcgcaccccctccaccagcccaagtctacacgatagttctcctcccccacttagtggccagccctcactgcagccccctgcgtccccacaattaccccgatcactggactcaaggccacccaccccgccagaaccagatcccggatctcgacgctccaccaaaatgcaagagaaccccgaggcatgggcccagggcattgtgcgggaaattagacagacaagggactcccagccactcgagtactctcgaacttctccgaccgagtggaaaagctccagccagagacgcggaatctacccagcgtccacgcagttagacaggaattccctgtctgagcaacagcagcaacagcgggaagatgaagacgactacgaggccgcatattgggcgtctatgagatcattctacgagaagaacccctcttgctcaaggccctggccgcctaagcccaaaaatgccatcaccatcgcattgtccagctgtgcgctgttcaatatggtggatggccgaaaaatttatgagcaggagggactggaaaagtacatggaatatcagctgaccaatgagaacgtgattctaacgcctgggccagccttccggtttgttaaagcattacagtacgtgaacgcaagattaagggacttgtatccggatgagcaggacctgtttgacattgtgcttatgaccaacaaccatgcccaggtaggcgtgaggctgatcaatagcgttaaccattatggcttattgattgaccggttctgtctcacgggcggaaaggacccgatcggttatctgaaggcttacctgaccaatttatatatcgccgctgactccgagaaggtgcaggaggctattcaggagggcattgcatcagccaccatgtttgatggcgcaaaggatatggcttactgcgacacccagctccgagtggccttcgacggcgatgccgtgttatttagcgatgagtcggaacattttactaaagagcatggcctggacaaattcttccagtatgatactctgtgtgagtcaaaaccattggcgcaggaggaaccgaggcttgatgtgttgatcaataatgctgggattttccagtgcccatatatgaagaccgaagacgggttcgaaatgcagtttggcgtgaaccacttgggacactttttactgactaatttgctgctcgggctacttaagtcatctgctccttcccgtattgtcgttgtttccagcaaactgtacaagtatggcgatattaattttgatgacttaaactcagagcagagctacaacaagagcttctgttattctaggtag

SEQ ID NO: 76909 - protein, 602 aa, Artificial Sequence
  derived and/or modified sequence
MSQTSLKQKKNEPGMRSSKESLEAEKRKESDKTGVRLSNQMRRAVNPNHSLRCCPFQGHSSCRRCLCAAEGTALGPCHTIRIYIHMCLLWEQGQQITMMRGSQESSLRKTDSRGYLVRSQWSRISRSPSTKAPSIDEPRSRNTSAKLPSSSTSSRTPSTSPSLHDSSPPPLSGQPSLQPPASPQLPRSLDSRPPTPPEPDPGSRRSTKMQENPEAWAQGIVREIRQTRDSQPLEYSRTSPTEWKSSSQRRGIYPASTQLDRNSLSEQQQQQREDEDDYEAAYWASMRSFYEKNPSCSRPWPPKPKNAITIALSSCALFNMVDGRKIYEQEGLEKYMEYQLTNENVILTPGPAFRFVKALQYVNARLRDLYPDEQDLFDIVLMTNNHAQVGVRLINSVNHYGLLIDRFCLTGGKDPIGYLKAYLTNLYIAADSEKVQEAIQEGIASATMFDGAKDMAYCDTQLRVAFDGDAVLFSDESEHFTKEHGLDKFFQYDTLCESKPLAQGPLKGFLEDLGRLQKKFYAKNERLLCPIRTYLVTARSAASSGARVLKTLRRWGLEIDEALFLAGAPKSPILVKIRPHIFFDDHMFHIEGAQRKSLGWMS

SEQ ID NO: 76910 - DNA, 1809 bp, Artificial Sequence
  derived and/or modified sequence
atgagccagaccagcctgaagcagaagaagaacgagcccggcatgagaagcagcaaggagagcctggaggccgagaagagaaaggagagcgacaagaccggcgtgagactgagcaaccagatgagaagagccgtgaaccccaaccacagcctgagatgctgccccttccagggccacagcagctgcagaagatgcctgtgcgccgccgagggcaccgccctgggcccctgccacaccatcagaatctacatccacatgtgcctgctgtgggagcagggccagcagatcaccatgatgagaggcagccaggagagcagcctgagaaagaccgacagcagaggctacctggtgagaagccagtggagcagaatcagcagaagccccagcaccaaggcccccagcatcgacgagcccagaagcagaaacaccagcgccaagctgcccagcagcagcaccagcagcagaacccccagcaccagccccagcctgcacgacagcagccccccccccctgagcggccagcccagcctgcagccccccgccagcccccagctgcccagaagcctggacagcagaccccccaccccccccgagcccgaccccggcagcagaagaagcaccaagatgcaggagaaccccgaggcctgggcccagggcatcgtgagagagatcagacagaccagagacagccagcccctggagtacagcagaaccagccccaccgagtggaagagcagcagccagagaagaggcatctaccccgccagcacccagctggacagaaacagcctgagcgagcagcagcagcagcagagagaggacgaggacgactacgaggccgcctactgggccagcatgagaagcttctacgagaagaaccccagctgcagcagaccctggccccccaagcccaagaacgccatcaccatcgccctgagcagctgcgccctgttcaacatggtggacggcagaaagatctacgagcaggagggcctggagaagtacatggagtaccagctgaccaacgagaacgtgatcctgacccccggccccgccttcagattcgtgaaggccctgcagtacgtgaacgccagactgagagacctgtaccccgacgagcaggacctgttcgacatcgtgctgatgaccaacaaccacgcccaggtgggcgtgagactgatcaacagcgtgaaccactacggcctgctgatcgacagattctgcctgaccggcggcaaggaccccatcggctacctgaaggcctacctgaccaacctgtacatcgccgccgacagcgagaaggtgcaggaggccatccaggagggcatcgccagcgccaccatgttcgacggcgccaaggacatggcctactgcgacacccagctgagagtggccttcgacggcgacgccgtgctgttcagcgacgagagcgagcacttcaccaaggagcacggcctggacaagttcttccagtacgacaccctgtgcgagagcaagcccctggcccagggccccctgaagggcttcctggaggacctgggcagactgcagaagaagttctacgccaagaacgagagactgctgtgccccatcagaacctacctggtgaccgccagaagcgccgccagcagcggcgccagagtgctgaagaccctgagaagatggggcctggagatcgacgaggccctgttcctggccggcgcccccaagagccccatcctggtgaagatcagaccccacatcttcttcgacgaccacatgttccacatcgagggcgcccagagaaagagcctgggctggatgagctag

SEQ ID NO: 76911 - DNA, 1809 bp, Artificial Sequence
  derived and/or modified sequence
atgagtcagacgagcttaaaacaaaaaaagaatgagcctggcatgcggtccagcaaggagagcttggaggcagagaaaagaaaggaaagtgataaaaccggtgtccggctcagcaaccagatgcgcagagcagtcaatccaaaccactctctcaggtgctgtcctttccagggacacagctcctgtaggagatgcctctgcgctgctgaaggtaccgcactcgggccatgtcacactatccgcatttacattcacatgtgccttctttgggagcagggtcaacagatcactatgatgcgaggatctcaagagagttcactacgtaaaacagactccaggggctatctggtcagaagtcagtggagcagaatttcaagatccccttcgaccaaggctccttcaattgatgagcctcgtagtaggaatacatcagccaagcttccaagctcctccacttcctctcgcacaccttcaacgagcccttccttgcatgacagtagccctccgccactgtccgggcaaccttcactgcaaccaccagcatcgcctcagcttcccaggtcattggattcacggcctcctactcccccagaaccagatccagggtcgcgccgatcaaccaagatgcaagagaatcccgaggcctgggcccagggtattgtcagagagatccgacaaactagggacagccagcccttagagtacagccggaccagccccaccgagtggaaaagttcctcacagaggagaggcatttaccccgcttccacccagctagacagaaactcgctgagcgaacagcagcagcagcaacgagaggatgaagacgactatgaggccgcatactgggcgtcgatgaggagtttttacgagaaaaacccatcttgttccaggccatggccacctaaacctaagaatgcaatcacaatagctttgagctcttgcgcgctgttcaatatggtggatggccgaaagatatacgaacaagaaggcctggagaagtacatggaataccagttaaccaatgagaatgtgatcctcactcccggacctgcattccggttcgtaaaagccctgcaatacgttaacgcacggcttcgcgatctgtaccctgatgagcaggatttgtttgacattgtgctcatgacgaataaccatgcccaggtgggggtgcgcctgatcaactccgtgaaccattacggtcttttgatcgatcgcttttgtctgactggcggcaaagaccccatcgggtacctgaaagcttacctgaccaatctatatattgccgcagactcagagaaagtgcaggaggccattcaagaaggcatcgctagcgccacgatgtttgatggcgcaaaggatatggcctactgcgatacacaattacgcgtggcatttgacggagacgccgtgctcttctcagacgaatccgaacatttcacaaaggaacatggtctcgacaaattcttccagtacgatactctttgtgagagcaaacctctcgctcaaggaccactgaaagggttcttggaagatctgggtcgacttcagaagaagttttacgcaaagaatgagcgactgttatgtccaattagaacgtacctggtaacggccaggtccgcagccagctcaggcgctagagtcctcaagacactacgtagatggggcctggagatcgatgaggccctcttcctggcaggcgcgcccaaaagtccaatcttagtgaagattaggcctcatattttctttgatgaccacatgtttcatatcgaaggcgcccagagaaaaagcctagggtggatgtcttag

SEQ ID NO: 76912 - DNA, 1809 bp, Artificial Sequence
  derived and/or modified sequence
atgagccagaccagcctgaagcagaagaagaatgaacctggcatgaggagcagcaaggagagcctggaggccgagaagaggaaggagagtgacaagacaggagtgcggctgagcaaccagatgagaagagctgtgaaccccaaccacagcctgcgctgctgccccttccagggccacagcagctgccgccgctgcctgtgtgccgctgagggcacagccctgggcccctgccacaccatccgcatctacatccacatgtgcctgctgtgggagcagggccagcagatcaccatgatgaggggcagccaggagagcagcctgaggaagacagacagccggggctacctggtgcgcagccagtggagccgcatcagccgcagccccagcaccaaggcccccagcattgatgagcccaggagcaggaacaccagcgccaagctgcccagcagcagcaccagcagcaggacccccagcaccagccccagcctgcatgacagcagccccccacccctgagcggccagcccagcctgcagcccccagccagcccccagctgcccaggagcctggacagcaggcctcccaccccacctgagccagaccccggcagccgccgcagcaccaagatgcaggagaaccctgaggcctgggcccagggcatcgtgcgggagatccggcagacccgggacagccagcccctggagtacagcaggaccagccccacagagtggaagagcagcagccagaggcggggcatctacccagccagcacccagctggacaggaacagcctgtctgagcagcagcagcagcagagagaagatgaagatgattatgaggccgcctactgggcctccatgaggagcttctatgagaagaaccccagctgcagccggccctggccacccaagcccaagaatgccatcaccatcgccctgagcagctgtgccctcttcaacatggtggatggcaggaagatctatgagcaggagggcctggagaagtacatggagtaccagctgaccaatgaaaatgtcatcctgaccccaggccctgccttccgctttgtgaaggccctgcagtatgtgaatgcccggctgcgggacctgtacccagatgagcaggacctgtttgatattgtgctgatgaccaacaaccacgcccaggtgggcgtgcggctcatcaacagcgtgaaccactacggcctgctgattgaccgcttctgcctgaccggcggcaaggaccccatcggctacctgaaggcctacctgaccaacctgtacatcgctgctgacagcgagaaggtgcaggaggccatccaggagggcatcgccagcgccaccatgtttgatggagccaaggacatggcctactgtgacacccagctgcgggtggcctttgatggagatgctgtgctcttcagtgatgaaagtgagcacttcaccaaggagcacggcctggacaagttcttccagtatgacaccctgtgtgagagcaagcccctggcccagggccccctgaagggcttcctggaggacctgggccgcctgcagaagaagttctacgccaagaatgaaaggctgctgtgccccatccgcacctacctggtgacagcccggtctgctgccagcagcggggcccgggtgctgaagaccctgcggcgctggggcctggagattgatgaggccctcttcctggccggggcccccaagagccccatcctggtgaagatccggccccacatcttctttgatgaccacatgttccacatcgagggcgcccagaggaagagcctgggctggatgtcctag

SEQ ID NO: 76913 - DNA, 1809 bp, Artificial Sequence
  derived and/or modified sequence
atgagccagaccagcctgaagcagaagaagaacgagcccggcatgcggagcagcaaagaaagtttggaggctgagaagcgcaaagaaagtgataagacaggggtccggttgtcaaaccagatgagacgagcagtgaaccccaatcactcattgagatgttgcccattccagggccatagctcttgcagaaggtgtttgtgtgccgcagaagggacagccctcggtccttgtcataccattcggatctacattcacatgtgtcttctgtgggagcaaggacagcagataactatgatgcgcggcagtcaggagagctctctgagaaagacagatagccgcggataccttgtgagatcccaatggagtcggatctcgaggtctccttccactaaggccccatcaatcgatgagcctcgatctagaaataccagcgcaaagctgccctccagcagcacctcctccagaacgccctctacatctccttctcttcacgatagctcacccccacccctgtcgggacagccttcactccagcctcccgcatctccccagctgccccgctcactggacagtcgccctcccaccccaccagaaccggaccccggctcgaggagatccaccaaaatgcaggagaaccccgaggcctgggcccaaggaattgtaagagaaatccgccaaacacgtgactcacagccattggagtattcaagaacgtccccaactgagtggaagtcaagttcacaacggcggggaatataccctgcctccacccaattagaccgcaatagtctcagcgaacagcagcagcagcagcgggaagatgaggacgattacgaagcagcctactgggcaagcatgcggtctttttacgagaagaacccatcctgttcacgcccatggcccccgaaacccaagaatgccatcaccatcgcactcagctcatgcgcattgtttaacatggtggacggacggaaaatttacgagcaggagggattggaaaagtatatggagtaccagctgacaaatgagaacgtcattcttaccccagggcctgctttccgcttcgtgaaggccctccagtatgtcaacgcacgcctacgcgatctatatccagatgaacaggatctgttcgatatagtgcttatgactaacaatcatgcccaggtgggagtccgattgatcaacagtgtcaaccactacggtctgctgatcgatcggttctgtttgaccggcggcaaagaccccattgggtacctcaaggcatacttgacgaatttgtacatcgcagcggatagcgagaaagtccaagaggcaatacaggagggaattgcctccgcaactatgttcgacggcgctaaagatatggcttattgcgacactcagctcagagtggcttttgacggagacgccgtgctgttttcagatgagagcgaacactttacaaaagaacatgggctcgataaattcttccagtacgacactttgtgcgaatccaagccactggcccaggggcccctaaagggcttccttgaggacctgggacgactccaaaaaaagttttatgccaagaatgagaggctgctgtgtccgattcgcacctacctggtgacagccaggtctgctgcctccagtggcgcccgcgtcttaaaaacattacgtcgttgggggttagagattgatgaggctttatttctggccggtgcccccaaaagtcccatcctggtcaagataaggccgcacatcttcttcgatgatcacatgtttcacatagagggagcccagcgcaagtctctcggctggatgagctag

SEQ ID NO: 76914 - DNA, 2142 bp, Artificial Sequence
  derived and/or modified sequence
atgcaaagctagactgagcaagggaagtgacaggaaatggagctggggagacaaaaatgtggataacaacaaaagaatttcaacaggtaaaaaaatgagtcaaacatctctcaaacagaaaaagaatgagcctggaatgaggtcctcaaaagagagtctagaagcagaaaaaagaaaggaatctgacaaaacaggagttcgtctgagcaatcagatgaggcgtgcagtcaatccgaatcactcgctgagatgttgccccttccagggtcactcgtcgtgtagacgctgcctttgtgcagctgagggaacagcccttggcccctgccacacaatacgtatttatattcacatgtgcctgttgtgggagcagggccagcagatcaccatgatgaggggatcacaagaatcatcactgcggaagacagactctcgagggtaccttgtgcgcagtcaatggtctagaatatcccggagcccatccaccaaggctccatccatagatgagcctagaagcaggaacaccagtgctaagctccccagcagctccacgagctcccggactccatccacctccccaagcctgcatgactcctcaccgccgccgctgtccgggcagccctcgctccagccacccgcgtcgccccagctgccccggtcgctggactcgcggcctcccacgcccccagagcccgatcctggctcccggcgcagcaccaaaatgcaagagaatccggaggcctgggcccaaggcatcgtgcgggaaatccgccagacccgggactcgcagccgctggaatattcgcgcacgtcccccaccgagtggaagtcctccagccagcgcagggggatctaccccgcctccacccagctggaccgcaactctctgtccgagcagcagcagcagcagcgggaggacgaggacgactacgaggctgcctactgggcatccatgaggtcgttctacgagaagaacccgagctgctcgcgcccctggccgcccaaacccaagaacgccatcaccattgctctctcatcctgcgcgctcttcaacatggtggacggcaggaaaatctacgagcaagagggtctggaaaagtacatggagtatcagctcaccaatgagaacgtcatcctgaccccgggcccggcgttccgcttcgtcaaggcactacagtatgtcaatgctagactccgtgatctatatcctgatgaacaggacttatttgatattgtactgatgactaataaccatgcccaagtgggagtgcggcttataaacagcgtcaatcactacggcttactgattgaccgcttctgtctgaccgggggaaaagaccccattggctatttgaaggcatatcttaccaacttgtatattgctgcagattctgaaaaagtgcaagaggcaatacaagaaggtattgcctctgcgacaatgtttgatggagccaaagacatggcttactgtgacactcagctccgtgtagcctttgatggggatgctgtcctcttctctgatgagtctgaacattttaccaaggagcatgggctcgacaaattcttccagtatgatacattatgtgaaagtaagcctcttgctcagggtcccctaaaaggctttctggaagatttaggcagactgcaaaagaagttctatgccaaaaatgaacggttactttgtcctatcaggacctacctggttacagctaggagtgcagccagttcaggcgcccgtgtgctgaagacccttcgacgctggggtctagagatagacgaagctcttttccttgctggagcccccaaaagtcccatcttggtgaagatccggccccacatcttctttgatgaccacatgttccacattgaaggggcacagaggaagagcctaggctggatgtcttgatcaataacgcagggatcttccagtgcccttacatgaagactgaagatgggtttgagatgcagttcggagtgaaccatctggggcactttctactcaccaatcttctccttggactcctcaaaagttcagctcccagcaggattgtggtagtttcttccaaactttataaatacggagacatcaattttgatgacttgaacagtgaacaaagctataataaaagcttttgttatagccgg

SEQ ID NO: 76915 - DNA, 1809 bp, Artificial Sequence
  derived and/or modified sequence
atgagccaaacatctctgaagcagaaaaaaaatgagccgggaatgcggagttctaaagaatccttagaggccgaaaagcgaaaggagtcggacaaaaccggcgttcgtctgagcaatcagatgcggcgtgctgtcaatcctaaccactccctccggtgttgtccgttccagggtcattcaagctgccgcaggtgcctgtgcgcagccgagggaacagccctaggtccctgccatactatacggatttacattcatatgtgcctgctctgggaacaggggcagcagatcaccatgatgcgtggctctcaggaatcctccctacgcaagacagactccagagggtacttagttcgcagtcagtggtctagaatctcacggagtccatccaccaaggccccttccatcgacgagcctcgctctcggaacactagcgccaagcttcccagctcaagtacttctagcaggaccccctcaacctcccctagtttgcacgatagcagtcctccgccactgtctgggcagccttctctgcaaccacccgcttcaccccagctgccaagaagtcttgactcaagaccaccaacgcctcccgagcctgaccctggctcccgcagaagcacaaaaatgcaagaaaaccctgaggcctgggctcagggcatcgtgagagagattaggcagactcgcgacagccagccattggagtactcccggactagccctacggagtggaagtcaagctcccagaggcggggaatctatcccgcttcaacacagcttgaccgcaatagcttgtctgaacagcagcagcaacagcgggaagatgaggacgattacgaagccgcatactgggcatcaatgcgcagcttttacgagaaaaacccctcgtgctctaggccgtggcctcctaaaccgaaaaatgccattactattgcattatcctcctgtgcactgttcaatatggtggacggccgaaagatctacgaacaggagggcttagagaaatacatggaatatcagctgactaacgagaatgttatattaacccccggaccagcctttcgcttcgtgaaagctcttcagtatgtgaacgcacgccttcgggatctgtacccggacgagcaggacctattcgacatcgtcctcatgactaataaccacgcccaagtcggggttcgcctgataaattcagtgaaccattacggattgctcatcgacagattctgcctcaccggcggaaaggatcctatcgggtacctgaaggcatacctgacaaatctttatatcgctgctgactcagaaaaggtgcaggaggccattcaggagggcattgccagtgcaaccatgtttgacggcgctaaggacatggcgtactgtgacacccagcttagagttgcgttcgatggcgatgcagtgttattctctgatgagtccgagcacttcacaaaagagcatggactcgacaaatttttccagtacgataccttgtgtgaaagcaagcccctggctcagggccctttgaaaggattcctggaagatctcggtagacttcagaagaagttttacgcaaagaacgaaaggctgctctgccctatacggacctacctcgtaaccgccaggtccgccgctagttccggagctagagtactgaaaacactgagacggtggggtttggaaatcgacgaggcacttttcctggctggggctcccaagtcgccaattctcgtgaagatcaggccacacatattctttgatgaccacatgttccatatcgagggagcccagcgaaagtccttgggttggatgagctag

SEQ ID NO: 76916 - protein, 559 aa, Artificial Sequence
  derived and/or modified sequence
MDSPGYNCFVDKDKMDAAIQDLGPKELSCTELQELKQLARQGYWAQSHALRGKVYQRLIRDIPCRTVTPDASVYSDIVGKIVGKHSSSCLPLPEFVDNTQVPSYCLNARGEGAVRKILLCLANQFPDISFCPALPAVVALLLHYSIDEAECFEKACRILACNDPGRRLIDQSFLAFESSCMTFGDLVNKYCQAAHKLMVAVSEDVLQVYADWQRWLFGELPLCYFARVFDVFLVEGYKVLYRVALAILKFFHKVRAGQPLESDSVKQDIRTFVRDIAKTVSPEKLLEKAFAIRLFSRKEIQLLQMANEKALKQKGITVKQKSVSLSKRQFVHLAVHAENFRSEIVSVREMRDIWSWVPERFALCQPLLLFSSLQHGYSLARFYFQCEGHEPTLLLIKTTQKEVCGAYLSTDWSERNKFGGKLGFFGTGECFVFRLQPEVQRYEWVVIKHPELTKPPPLMAAEPTAPLSHSASSDPADRLSPFLAARHFNLPSKTESMFMAGGSDCLIVGGGGGQALYIDGDLNRGRTSHCDTFNNQPLCSENFLIAAVEAWGFQDPDTQ

SEQ ID NO: 76917 - DNA, 1680 bp, Artificial Sequence
  derived and/or modified sequence
atggacagccccggctacaactgcttcgtggacaaggacaagatggacgccgccatccaggacctgggccccaaggagctgagctgcaccgagctgcaggagctgaagcagctggccagacagggctactgggcccagagccacgccctgagaggcaaggtgtaccagagactgatcagagacatcccctgcagaaccgtgacccccgacgccagcgtgtacagcgacatcgtgggcaagatcgtgggcaagcacagcagcagctgcctgcccctgcccgagttcgtggacaacacccaggtgcccagctactgcctgaacgccagaggcgagggcgccgtgagaaagatcctgctgtgcctggccaaccagttccccgacatcagcttctgccccgccctgcccgccgtggtggccctgctgctgcactacagcatcgacgaggccgagtgcttcgagaaggcctgcagaatcctggcctgcaacgaccccggcagaagactgatcgaccagagcttcctggccttcgagagcagctgcatgaccttcggcgacctggtgaacaagtactgccaggccgcccacaagctgatggtggccgtgagcgaggacgtgctgcaggtgtacgccgactggcagagatggctgttcggcgagctgcccctgtgctacttcgccagagtgttcgacgtgttcctggtggagggctacaaggtgctgtacagagtggccctggccatcctgaagttcttccacaaggtgagagccggccagcccctggagagcgacagcgtgaagcaggacatcagaaccttcgtgagagacatcgccaagaccgtgagccccgagaagctgctggagaaggccttcgccatcagactgttcagcagaaaggagatccagctgctgcagatggccaacgagaaggccctgaagcagaagggcatcaccgtgaagcagaagagcgtgagcctgagcaagagacagttcgtgcacctggccgtgcacgccgagaacttcagaagcgagatcgtgagcgtgagagagatgagagacatctggagctgggtgcccgagagattcgccctgtgccagcccctgctgctgttcagcagcctgcagcacggctacagcctggccagattctacttccagtgcgagggccacgagcccaccctgctgctgatcaagaccacccagaaggaggtgtgcggcgcctacctgagcaccgactggagcgagagaaacaagttcggcggcaagctgggcttcttcggcaccggcgagtgcttcgtgttcagactgcagcccgaggtgcagagatacgagtgggtggtgatcaagcaccccgagctgaccaagcccccccccctgatggccgccgagcccaccgcccccctgagccacagcgccagcagcgaccccgccgacagactgagccccttcctggccgccagacacttcaacctgcccagcaagaccgagagcatgttcatggccggcggcagcgactgcctgatcgtgggcggcggcggcggccaggccctgtacatcgacggcgacctgaacagaggcagaaccagccactgcgacaccttcaacaaccagcccctgtgcagcgagaacttcctgatcgccgccgtggaggcctggggcttccaggaccccgacacccagtag

SEQ ID NO: 76918 - DNA, 1680 bp, Artificial Sequence
  derived and/or modified sequence
atggactctcctgggtataactgctttgtggataaggacaagatggacgccgccatccaggatctgggtcccaaggaattgtcttgcacggagcttcaggaattgaaacaactggcccggcaggggtattgggcccaatcccacgctttgagaggtaaagtgtatcagaggttaatcagggacataccctgtaggacggttacgcccgatgcaagcgtttacagtgatatagtcggcaaaattgtggggaaacattcaagctcatgtctacctcttcccgaatttgtcgataatactcaagtgccatcctactgcctgaacgctagaggggagggcgcggtgcgaaagattcttttgtgtctcgccaatcagtttcccgatatatctttttgtccagcgctccctgccgtggttgctctcctcttacactactcaattgacgaggctgaatgcttcgaaaaggcatgtaggatacttgcctgtaacgaccctggccgtagacttatcgatcagagctttctcgcatttgaatcatcctgcatgacttttggcgacctagtgaataaatactgtcaggccgctcacaagcttatggtggctgtctcggaggatgtgcttcaggtctatgccgactggcaacgttggctgttcggagaactccctctgtgctacttcgccagagtttttgatgtgttcctggtagaggggtataaagtgctgtatagagtggccttggccatactgaagtttttccataaggttcgggccggacaacctctggagtcggacagcgttaaacaggacatacggactttcgtacgcgatattgcaaaaactgtctctcccgagaaattgctggaaaaggccttcgccattaggctgttcagccgcaaagagattcagcttctccagatggcgaacgagaaagctctgaaacaaaaaggaatcaccgtgaagcagaaaagtgtctcattgtccaagcgccagttcgtgcatttggcggtgcacgccgagaattttagatctgagatagtttctgtgcgggaaatgagagatatttggagctgggtgccagaacgtttcgccctgtgccagcctctactgctcttttcatcacttcaacatgggtactccctggcaagattttactttcaatgcgaaggccatgaacccacactactcctaataaagaccacacagaaggaggtgtgtggagcctacctctcgactgactggtctgaaagaaataagttcggcgggaaactcggattcttcggaactggagagtgctttgtcttccggctgcaaccagaggtacaacggtacgagtgggtcgttattaagcatccagagctgaccaaaccacccccactaatggcagctgagccaaccgcccctctctctcactctgcatccagcgaccccgccgaccggttatcgccttttttggcagctcggcactttaatctacctagcaagacagagtcaatgtttatggctggggggtccgactgtctgattgttgggggtggtgggggccaggccctgtatatagatggggatctcaatagaggccggacttcccactgcgatacttttaataaccagcccttgtgcagtgagaacttcctgatcgctgctgttgaagcgtgggggttccaggacccggatacacagtag

SEQ ID NO: 76919 - DNA, 1680 bp, Artificial Sequence
  derived and/or modified sequence
atggacagccctggctacaactgctttgtggacaaggacaagatggatgctgccatccaggacctgggccccaaggagctgagctgcacagagctgcaggagctgaagcagctggcccggcagggctactgggcccagagccacgccctgcggggcaaggtgtaccagaggctcatccgggacatcccctgcaggacagtgaccccagatgcctctgtgtacagcgacatcgtgggcaagatcgtgggcaagcacagcagcagctgcctgcccctgcctgagtttgtggacaacacccaggtgcccagctactgcctgaatgcccggggggagggcgctgtgaggaagatcctgctgtgcctggccaaccagttcccagacatctccttctgcccagccctgcctgctgtggtggccctgctgctgcactacagcattgatgaagctgagtgctttgagaaggcctgccgcatcctggcctgcaatgaccccggccggcggctgattgaccagagcttcctggcctttgagagcagctgcatgacctttggagacctggtgaacaagtactgccaggccgcccacaagctgatggtggccgtgtctgaagatgtgctgcaggtgtatgctgactggcagcgctggctgtttggagagctgcccctgtgctactttgcccgggtgtttgatgtgttcctggtggagggctacaaggtgctgtacagagtggccctggccatcctgaagttcttccacaaggtgcgggccggccagcccctggagagtgacagcgtgaagcaggacatccgcacctttgtgcgggacatcgccaagacagtgtccccagagaagctgctggagaaggcctttgccatccgcctcttcagcaggaaggagatccagctgctgcagatggccaatgagaaggccctgaagcagaagggcatcaccgtgaagcagaagtctgtgtccctgagcaagaggcagtttgtgcacctggccgtgcatgctgagaacttccgctctgagatcgtgtctgtgcgggagatgagggacatctggagctgggtgcctgagagatttgccctgtgccagcccctgctgctcttcagcagcctgcagcacggctacagcctggcccgcttctacttccagtgtgagggccacgagcccaccctgctgctgatcaagaccacccagaaggaggtgtgtggggcctacctgagcacagactggagcgagaggaacaagtttggaggcaagctgggcttctttggaactggagaatgttttgtgttccggctgcagcctgaggtgcagagatatgagtgggtggtgatcaagcaccctgagctgaccaagcccccacccctgatggctgctgagcccacagcccccctgagccacagcgccagcagtgaccctgctgaccggctgagccccttcctggccgcccggcacttcaacctgcccagcaagacagagagcatgttcatggccggcggcagtgactgcctgattgtgggcggcggcggcggccaggccctgtacattgatggagacctgaacagaggccgcaccagccactgtgacaccttcaacaaccagcccctgtgcagcgagaacttcctgattgctgctgtggaggcctggggcttccaggaccctgacacccagtag

SEQ ID NO: 76920 - DNA, 1680 bp, Artificial Sequence
  derived and/or modified sequence
atggacagccccggctacaactgcttcgtggacaaggacaagatggacgctgccatacaggatctgggccccaaggagctgtcgtgtactgagctgcaggaactgaagcaacttgccaggcagggatactgggcccagtcgcacgcgttacgaggtaaagtctaccagaggctcattcgagatatcccttgccgcactgtaaccccagatgcaagcgtgtacagtgatatcgtgggaaaaatcgttggtaagcactcaagtagttgtcttccgctgcccgagttcgtggacaacactcaagtgcccagctactgcctcaacgcaaggggcgagggtgctgtgcggaagatcctgctatgcctggccaatcagttccctgacataagcttctgtcccgcgctcccggccgttgtcgcactactcttgcactactctatcgacgaggccgagtgttttgagaaagcctgtcggattctggcctgcaatgatccaggacggaggctcatcgaccagagcttcctggcattcgagtcttcatgtatgaccttcggcgacttggtgaataaatactgccaggccgcgcataaactaatggtagcagtatccgaagacgtcttacaggtatacgccgattggcagagatggttatttggggaattaccgctttgctacttcgctcgggtctttgacgtctttctggttgagggctataaagtgctctatcgagttgccctcgcaattctcaagttctttcataaagtgcgcgcaggccagcccctagagtctgacagcgttaagcaagatataagaacctttgttagggacatcgccaagaccgtttcccccgaaaagcttctcgaaaaagctttcgcaattagactcttttctcgtaaagagattcagctcctccaaatggcaaatgaaaaggcgctgaaacagaaaggaattaccgtcaagcaaaaatccgtgtccctgtcgaagaggcagttcgtgcacttggcagtccatgccgagaatttccgaagtgagatcgtctccgtgagggaaatgagagacatatggtcttgggtccccgagcgcttcgctctctgtcaaccgctacttctctttagctctctccaacacggctatagcctcgcccgattctacttccagtgcgaggggcatgagcctactctgctactaatcaagacgacgcagaaggaagtgtgcggggcttacttatccacagactggtctgaacggaataagttcggagggaagcttggttttttcgggactggtgagtgctttgtatttcgtctgcagccggaggtacaaagatacgagtgggttgtgatcaaacacccggagctgacaaagcctcccccattgatggcagcggaacctaccgcacccctatcgcactcagcctccagcgacccagcggatagactgagcccctttctcgcggcccgccattttaacctgccatccaaaaccgagtcaatgtttatggcaggtgggagcgattgcctcattgtggggggcggggggggtcaggcgctctacattgacggggatttaaatcggggccgaacctctcattgtgatacgtttaacaatcagcccttgtgcagcgaaaacttcctcattgccgcagttgaggcctggggattccaagaccccgatacacagtag

SEQ ID NO: 76921 - DNA, 1680 bp, Artificial Sequence
  derived and/or modified sequence
atggatagtccgggatacaactgcttcgtcgataaagataagatggacgccgctatccaggaccttgggcctaaggagctctcatgtactgaattacaggagctcaagcaattggctcgccaaggatattgggcacaatcacacgcccttcggggaaaggtgtatcagagactgatccgagacatcccttgtagaacagtaactcccgacgcttccgtctacagcgatatagtcgggaagattgttggcaagcactcatcttcctgtttacccctaccagagttcgtggataacacacaggtgccttcttattgtctcaatgcaagaggggaaggtgctgtgaggaagatattgctttgtttggccaatcagtttcctgatataagtttttgtccagctctgcccgctgtggtggctctcctcctgcactatagcatcgatgaggccgaatgtttcgagaaagcatgccggattttggcctgtaacgaccccggaagacgactgatcgaccagagcttccttgcttttgagtcatcctgcatgacctttggcgacctggtgaacaaatactgccaggcagcacataagctgatggtcgctgtaagcgaggatgttttgcaggtgtatgcagactggcagagatggttgtttggtgaactccctttatgctattttgccagggtgtttgacgtgtttcttgtcgagggctacaaagtcctgtatagagtggcgctcgcaattttgaaattcttccacaaagtgagggctggacagcccttggagtctgacagcgtcaagcaagatatccgtacttttgtccgggacatcgctaaaaccgtctccccggaaaaactgctggagaaggcattcgcaatcaggctgttctccagaaaggaaattcagctgttacagatggccaacgagaaggcgctgaaacagaaaggcatcacagtgaaacagaaatcagtgtcgttatcgaaacgccagttcgtgcatctggcggtccatgcggaaaactttcgttccgagattgtaagcgtccgggagatgagggacatctggtcctgggtcccagagcgctttgcgctatgccagccattgttgctcttcagctccctgcagcacgggtactccctggcccgattttatttccagtgtgaggggcatgagccaacccttctcctgatcaagactactcagaaggaggtgtgtggagcatacctctcaaccgactggtccgagcggaataagttcggaggcaagctggggttcttcggcaccggcgaatgcttcgtcttccgattacagccagaggtccaacgctacgaatgggtcgtcattaagcaccccgaactcactaagccccctcctctgatggcagcggaacccactgctcctctctctcacagtgcgtcgagcgaccccgctgataggctgagcccgttcctcgcggctagacacttcaacttaccatccaagactgaatcaatgttcatggctggaggaagtgactgccttattgtcggtggaggcggtggccaggccctctacattgacggggatctgaaccggggtaggacaagccactgcgatacatttaacaaccagcccctttgctctgaaaactttctcattgccgcagtggaggcatggggattccaggatcctgacacacagtag

SEQ ID NO: 76922 - DNA, 2423 bp, Artificial Sequence
  derived and/or modified sequence
actctgtcctccccttccggcagtccagggcctcctcccgagcacagcggcgctatggactctccaggatacaactgcttcgtggacaaagacaagatggacgctgccatccaggacctggggcccaaggagctgagctgcactgaactgcaggaactgaagcagctggcgcgccagggctactgggcccaaagccacgccctgcggggaaaggtgtaccagcgcctgatccgggacattccctgccgcacggtcacgcctgacgccagcgtgtacagcgacatcgtgggcaagatcgtgggcaagcacagcagcagctgcctgccgctgcccgagttcgtggacaacacgcaggtgcccagctactgcctgaatgcacgcggcgagggggccgtgcgcaagatcctcctgtgcctggccaaccagttccccgacatctccttctgccccgccctgccggccgtggtggccctgctgctgcactacagcatcgacgaggccgagtgcttcgagaaggcctgccgcatcctggcctgcaatgaccccggcaggaggctgatcgaccagagcttcctggcctttgagtcgtcctgcatgacgtttggggacctggtgaacaagtactgccaggcggcccacaagctgatggtggccgtgtcggaggatgtcctgcaggtctatgcggactggcagcgctggctgtttggggagctgcccctctgctacttcgcccgggtctttgacgtcttcctggtggagggctacaaggtgctgtaccgcgtggcgctggccatcctcaagttcttccacaaggtgagggccgggcagccgctggagtcggacagcgtgaagcaggacatccgcacgttcgtcagagacatcgcgaagacggtgtcccctgagaagctgctggagaaagcgttcgccatccgcctcttctcccgcaaggagatccagctcctgcagatggccaatgagaaagccctgaagcagaagggcatcaccgtgaagcagaagagtgtgtcactttctaaaaggcagtttgtacacttggccgtccatgcagagaacttccgctcggagatcgtcagcgtgagggagatgagagacatctggtcctgggtccccgagcgctttgccctgtgccagccccttctgctgttctcctccctgcagcacgggtacagcctggccaggttctacttccagtgtgaaggacatgagcctaccctcttgctcatcaagaccacgcagaaggaggtgtgtggtgcttacctgtccacagactggagtgagagaaataagtttggaggcaaactgggcttctttgggaccggagaatgctttgtgtttaggctgcagcctgaggtgcagcgctacgagtgggtggtgatcaagcaccccgagctgaccaagcccccacccttgatggctgccgagcccaccgccccactcagccactccgcctcctcagaccccgctgaccgcctctcgcccttcctggccgctcgccacttcaacctgccctccaagaccgagtccatgttcatggcggggggcagcgactgcctcatcgtcgggggaggaggcggccaggcgctctacatcgatggggacctgaaccggggccgcacaagccactgcgacaccttcaacaaccagcccctctgctccgagaacttcctcattgctgccgtggaggcctggggcttccaggaccctgacacccagtgacggcctgtgccacggtgactgagccgtggtggggcggtgggccgaggctgggctgccgcctcgggcagcagagagcagatgaaacccccatgtggtaggcagggttgggggacggcaggaccccatggccaagcctggcgttgcctggacctgctgctgcctctacctggggtttgggctgggcttccccagtccacctgcatctgggtcagagctggagggcctgctgtgcccccagccccacccagagctggcataggaagtaccttcctcctccgtggaggcttccatagcccaaggccttgggagtgtctgggtcttgctgcccctgagcctctctaggcagcctgagcccctggggtgggagtacaacggcagtgggaacgtgcagctaagggtgggcctgtggtgccccctgctggtgccgcatagcatcgcgccctcctgagcagggccctgcagcctggctggctggcgactgaatcccagcgtagatcccgagaacagactggcacccttgggcctgccccctggcggaccccaccccctgtcctgggcgtttgccccagttccctccccaggcctcctgggccacctctcacattaacccttcttggctgcctctgaggctcccctgggctgcgtttgggagctgctgggtgggaggaggagggtgggatttgtgctgg

SEQ ID NO: 76923 - protein, 352 aa, Artificial Sequence
  derived and/or modified sequence
MRRCSYFPKDVTVFDKDDKSEPIRVLVTGAAGQIAYSLLYSIGNGSVFGKDQPIILVLLDITPMMGVLDGVLMELQDCALPLLKDVIATDKEDVAFKDLDVAILVGSMPRREGMERKDLLKANVKIFKSQGAALDKYAKKSVKVIVVGNPANTNCLTASKSAPSIPKENFSCLTRLDHNRAKAQIALKLGVTANDVKNVIIWGNHSSTQYPDVNHAKVKLQGKEVGVYEALKDDSWLKGEFVTTVQQRGAAVIKARKLSSAMSAAKAICDHVRDIWFGTPEGEFVSMGVISDGNSYGVPDDLLYSFPVVIKNKTWKFVEGLPINDFSREKMDLTAKELTEEKESAFEFLSSA

SEQ ID NO: 76924 - DNA, 1059 bp, Artificial Sequence
  derived and/or modified sequence
atgcgcagatgcagttattttccaaaggatgtgactgtgttcgacaaggacgataaatcagagcctattcgcgtgctcgtcactggcgctgcggggcagattgcctacagcttattgtatagtattgggaatggcagcgtttttggcaaagaccagccaatcatcctcgtcctgttagacataactcctatgatgggggttcttgacggggtgctgatggaactgcaggactgcgcactcccactcttgaaagatgtgattgcaacagataaagaagacgtcgctttcaaagatctcgacgttgccatattggtaggaagtatgccccgacgtgaaggtatggaacggaaggacctgcttaaggctaacgtgaaaatcttcaaaagccaaggagctgccctggataaatacgctaagaaaagtgtaaaggtgatcgtggtcggcaaccccgcaaacacaaactgtcttaccgctagcaaaagcgcaccttccatccctaaggaaaactttagttgcttaacccgcttggatcacaatcgagcaaaggcccagatcgctctgaagttaggagtgactgccaacgacgtcaaaaacgttattatctgggggaatcactcgtccacccaatatccagatgttaaccatgctaaagtgaagctgcagggcaaagaggtgggcgtgtacgaggcactgaaggatgacagctggttaaagggcgaattcgtcacaactgttcagcaaagaggggctgcagtgataaaggcccgcaagttaagcagcgcaatgtcagcggccaaagcgatttgcgatcacgtgcgcgacatttggtttggcactccagaaggggagttcgtgagcatgggtgtcatttcagatggaaacagctacggggtccccgacgacttattgtatagctttcccgtggttatcaaaaataagacctggaaatttgtagaaggcctccctatcaacgacttctctagggagaaaatggaccttacggccaaggaactgacggaagaaaaagaaagcgcttttgagtttttatcgagcgcgtag

SEQ ID NO: 76925 - DNA, 1059 bp, Artificial Sequence
  derived and/or modified sequence
atgaggcgctgcagctacttccccaaggatgtgacagtgtttgacaaggatgacaagtctgagcccatccgggtgctggtgactggagctgctggccagatcgcctacagcctgctgtacagcattggaaatggatctgtgtttgggaaggaccagcccatcatcctggtgctgctggacatcacccccatgatgggcgtgctggatggagtgctgatggagctgcaggactgtgccctgcccctgctgaaggatgtgattgccacagacaaggaggatgtggccttcaaggacctggatgtggccatcctggtgggctccatgccccggcgggagggcatggagaggaaggacctgctgaaggccaacgtgaagatcttcaagagccagggcgccgccctggacaagtatgccaagaagtctgtgaaggtgattgtggtgggcaacccagccaacaccaactgcctgacagccagcaagagcgcccccagcatccccaaggagaacttcagctgcctgacccggctggaccacaacagagccaaggcccagatcgccctgaagctgggcgtgacagccaatgatgtgaagaatgtcatcatctggggcaaccacagcagcacccagtacccagatgtgaaccacgccaaggtgaagctgcagggcaaggaggtgggcgtgtatgaggccctgaaggatgacagctggctgaagggggagtttgtgaccaccgtgcagcagagaggagctgctgtgatcaaggccaggaagctgagcagcgccatgtctgctgccaaggccatctgtgaccacgtgcgggacatctggtttggcaccccagagggggagtttgtgtccatgggcgtcatcagtgatggcaacagctatggagtgcctgatgacctgctgtacagcttccctgtggtgatcaagaacaagacctggaagtttgtggagggcctgcccatcaatgacttcagccgggagaagatggacctgacagccaaggagctgacagaggagaaggagagcgcctttgagttcctgagcagcgcctag

SEQ ID NO: 76926 - DNA, 1340 bp, Artificial Sequence
  derived and/or modified sequence
cttgcggggtatggggcgctcttaggaggactctggagaagtagttgtcctgggagaggagcgatcttaatcctgctgcatgacgggaggacaaaatgcgacgctgcagctattttccaaaggacgttacggtgtttgataaggacgataagtctgaaccaatcagagtccttgtgactggagcagctggtcaaattgcatattcactgctgtacagtattggaaatggatctgtctttggtaaagatcagcctataattcttgtgctgttggatatcacccccatgatgggtgtcctggacggtgtcctaatggaactgcaagactgtgcccttcccctcctgaaagatgtcatcgcaacagataaagaagacgttgccttcaaagacctggatgtggccattcttgtgggctccatgccaagaagggaaggcatggagagaaaagatttactgaaagcaaatgtgaaaatcttcaaatcccagggtgcagccttagataaatacgccaagaagtcagttaaggttattgttgtgggtaatccagccaataccaactgcctgactgcttccaagtcagctccatccatccccaaggagaacttcagttgcttgactcgtttggatcacaaccgagctaaagctcaaattgctcttaaacttggtgtgactgctaatgatgtaaagaatgtcattatctggggaaaccattcctcgactcagtatccagatgtcaaccatgccaaggtgaaattgcaaggaaaggaagttggtgtttatgaagctctgaaagatgacagctggctcaagggagaatttgtcacgactgtgcagcagcgtggcgctgctgtcatcaaggctcgaaaactatccagtgccatgtctgctgcaaaagccatctgtgaccacgtcagggacatctggtttggaaccccagagggagagtttgtgtccatgggtgttatctctgatggcaactcctatggtgttcctgatgatctgctctactcattccctgttgtaatcaagaataagacctggaagtttgttgaaggtctccctattaatgatttctcacgtgagaagatggatcttactgcaaaggaactgacagaagaaaaagaaagtgcttttgaatttctttcctctgcctgactagacaatgatgttactaaatgcttcaaagctgaagaatctaaatgtcgtctttgactcaagtaccaaataataataatgctatacttaaattacttgtgaaaaacaacacattttaaagattacgtgcttcttggtacaggtttgtgaatgacagtttatcgtcatgctgttagtgtgcattct

SEQ ID NO: 76927 - DNA, 1059 bp, Artificial Sequence
  derived and/or modified sequence
atgcggcggtgcagctacttccccaaggacgtgaccgtgttcgacaaggatgataagtctgagccgattcgtgtcttggttacaggagccgctggtcagatagcttactcactcttgtactctataggcaacggatccgtgtttggaaaggaccagcctatcattttggtgttactagatatcactccaatgatgggcgtcctggacggcgtgttaatggaactccaggactgcgcactgccactgctcaaggatgtgatcgctactgataaggaagatgttgcttttaaagatctcgacgtggctatcctggtcggcagcatgccacggcgggaaggcatggaaaggaaggatttgctgaaagccaatgtgaagattttcaagtcacagggggccgcccttgataagtatgccaagaagtccgtgaaggtaatcgtagtcggaaaccctgctaacaccaactgtcttaccgcaagtaaatcagcgcccagcatcccaaaggagaattttagttgccttacccgattggatcataatcgagctaaggctcagattgcgctcaaactgggagtgacggcaaacgacgtaaaaaatgtgattatatggggaaatcattcctctacccagtatccagacgtcaaccacgccaaggttaagctacaaggaaaggaagtcggcgtttacgaggccctgaaagatgactcgtggcttaaaggcgaattcgtgaccacggtgcagcagcggggcgcagccgtaattaaggctaggaaactgtccagcgcaatgagtgccgccaaagccatttgcgaccatgttagggatatttggtttggcaccccagaaggtgagttcgtatctatgggagtgatcagcgacgggaattcctacggtgtgccagatgatctgctatacagtttcccggtggtgattaaaaataagacttggaaattcgtcgaaggcttacctattaatgatttcagccgggaaaaaatggaccttacagccaaggaacttactgaagagaaagaaagcgccttcgagttcctgtctagtgcatag

SEQ ID NO: 76928 - DNA, 1059 bp, Artificial Sequence
  derived and/or modified sequence
atgagaaggtgttcctacttccccaaggacgtgacagtatttgataaggacgacaaatccgagcccatcagggtgctggtgactggagctgctggtcagatcgcctattcactgctgtacagcataggcaatggctctgtcttcggcaaagaccagccaatcatcctagtcctacttgatatcactcccatgatgggtgtgttggatggagtgcttatggaattacaggactgcgcactgccacttctgaaagatgtgatagctacagacaaggaggacgtcgcctttaaagatctagacgtggccattcttgtggggtccatgccacgccgagaaggcatggagagaaaagacctgctcaaagctaacgtgaaaatttttaagagccagggggcagccctggacaagtacgcaaaaaagtccgtgaaagtgattgttgtggggaaccccgctaataccaactgtttaactgcctctaagtccgccccatctatccccaaggagaactttagttgtctgacaaggctggaccataacagggccaaggcccaaatcgctctcaaattaggtgttaccgcaaacgatgtcaagaatgtgattatctggggcaaccattcctccacccaatatccggatgtgaatcacgccaaggtgaagctgcagggaaaagaggtaggcgtgtatgaagccctgaaagacgacagctggctgaagggcgaatttgtaaccacagttcagcagcgtggagccgcagtgatcaaggcaagaaaactcagtagcgctatgagcgctgccaaggccatctgcgatcatgtgagagacatctggtttggtactcccgagggggagttcgtttctatgggtgttatttccgacggcaatagctacggagttccggacgatctgctctacagctttccagtcgtcataaaaaacaagacttggaaatttgtggaaggcctacctattaacgacttctctagagagaagatggatctgaccgcaaaggaactcacagaggagaaagagtctgccttcgagttcttgtccagcgcctag

SEQ ID NO: 76929 - DNA, 1059 bp, Artificial Sequence
  derived and/or modified sequence
atgagaagatgcagctacttccccaaggacgtgaccgtgttcgacaaggacgacaagagcgagcccatcagagtgctggtgaccggcgccgccggccagatcgcctacagcctgctgtacagcatcggcaacggcagcgtgttcggcaaggaccagcccatcatcctggtgctgctggacatcacccccatgatgggcgtgctggacggcgtgctgatggagctgcaggactgcgccctgcccctgctgaaggacgtgatcgccaccgacaaggaggacgtggccttcaaggacctggacgtggccatcctggtgggcagcatgcccagaagagagggcatggagagaaaggacctgctgaaggccaacgtgaagatcttcaagagccagggcgccgccctggacaagtacgccaagaagagcgtgaaggtgatcgtggtgggcaaccccgccaacaccaactgcctgaccgccagcaagagcgcccccagcatccccaaggagaacttcagctgcctgaccagactggaccacaacagagccaaggcccagatcgccctgaagctgggcgtgaccgccaacgacgtgaagaacgtgatcatctggggcaaccacagcagcacccagtaccccgacgtgaaccacgccaaggtgaagctgcagggcaaggaggtgggcgtgtacgaggccctgaaggacgacagctggctgaagggcgagttcgtgaccaccgtgcagcagagaggcgccgccgtgatcaaggccagaaagctgagcagcgccatgagcgccgccaaggccatctgcgaccacgtgagagacatctggttcggcacccccgagggcgagttcgtgagcatgggcgtgatcagcgacggcaacagctacggcgtgcccgacgacctgctgtacagcttccccgtggtgatcaagaacaagacctggaagttcgtggagggcctgcccatcaacgacttcagcagagagaagatggacctgaccgccaaggagctgaccgaggagaaggagagcgccttcgagttcctgagcagcgcctag

SEQ ID NO: 76930 - DNA, 738 bp, Artificial Sequence
  derived and/or modified sequence
atgccgaggagggaggggatggagagaaaggatcttctgaaggctaacgtgaagatcttcaagagccaaggagccgccctggacaaatacgcgaagaagtcagtgaaagtcatcgttgttggcaaccccgcgaatactaactgcctgacagcctcaaaaagtgcaccttcaatacccaaggagaacttctcctgcctaaccagactggatcacaatcgagcaaaagcccagatcgctttgaagcttggagtgaccgccaacgatgtcaaaaatgtgatcatatgggggaatcactcatccacgcaataccctgacgtcaatcatgccaaagtcaaactgcagggtaaggaagtcggcgtgtacgaggccctgaaggacgattcttggttaaaaggagagtttgtgaccactgtgcaacagaggggcgccgcagtgattaaagcacggaaattaagctctgcaatgtccgccgctaaggccatctgcgaccacgttagggacatttggtttggcactccggaaggggagttcgtatccatgggggtcatttctgacggtaacagctatggagtgcccgacgatctactgtactcttttcctgtggtgatcaagaataagacttggaagttcgttgaaggcctccccattaacgatttcagtagggagaagatggacctgaccgctaaagagctcacagaggagaaagagagcgcatttgaatttctgagctcagcctag

SEQ ID NO: 76931 - DNA, 738 bp, Artificial Sequence
  derived and/or modified sequence
atgccccggcgggagggcatggagaggaaggacctgctgaaggccaacgtgaagatcttcaagagccagggcgccgccctggacaagtatgccaagaagtctgtgaaggtgattgtggtgggcaacccagccaacaccaactgcctgacagccagcaagagcgcccccagcatccccaaggagaacttcagctgcctgacccggctggaccacaacagagccaaggcccagatcgccctgaagctgggcgtgacagccaatgatgtgaagaatgtcatcatctggggcaaccacagcagcacccagtacccagatgtgaaccacgccaaggtgaagctgcagggcaaggaggtgggcgtgtatgaggccctgaaggatgacagctggctgaagggggagtttgtgaccaccgtgcagcagagaggagctgctgtgatcaaggccaggaagctgagcagcgccatgtctgctgccaaggccatctgtgaccacgtgcgggacatctggtttggcaccccagagggggagtttgtgtccatgggcgtcatcagtgatggcaacagctatggagtgcctgatgacctgctgtacagcttccctgtggtgatcaagaacaagacctggaagtttgtggagggcctgcccatcaatgacttcagccgggagaagatggacctgacagccaaggagctgacagaggagaaggagagcgcctttgagttcctgagcagcgcctag

SEQ ID NO: 76932 - DNA, 738 bp, Artificial Sequence
  derived and/or modified sequence
atgccccggcgggagggcatggagcggaaggacctgctgaaggccaacgtgaagattttcaagtcgcaaggggccgccctcgacaaatacgcgaagaaatccgtgaaggtcatcgtagtagggaacccggctaacacaaactgccttacagcttcaaaatctgctccatcgataccaaaagagaatttcagttgtctgacccgactggatcataaccgagcgaaagctcagatcgcactgaaacttggagtgacggctaacgatgtcaaaaatgttatcatttggggcaaccatagcagcacacagtaccccgacgtgaatcatgctaaagtcaaactgcagggaaaggaagtgggggtgtatgaagcgctgaaggatgatagttggctgaagggggaattcgtgacaacagtccagcaacgcggtgccgccgtcataaaggccaggaagctgagctccgccatgtccgccgctaaggccatttgcgatcacgtgcgcgacatttggttcggcacaccggagggggagttcgtttcaatgggcgtgatctcagacgggaattcctacggagtgcccgacgacctgttgtacagcttccccgtggttatcaaaaacaagacatggaaatttgtcgagggcctgcccatcaatgatttttcaagggaaaaaatggacctgactgctaaagagctgaccgaggagaaggaaagtgccttcgagttcctcagtagtgcctag

SEQ ID NO: 76933 - DNA, 738 bp, Artificial Sequence
  derived and/or modified sequence
atgccgaggcgggaaggcatggaaagaaaggatctgcttaaagcgaatgttaaaatatttaagagccagggggcagctttagataaatatgcaaagaaatcggtcaaggtgattgttgtaggaaaccctgccaatacaaattgtctgaccgcaagtaaaagcgccccatccatacccaaagaaaacttcagctgcttaactaggctggaccataaccgcgcaaaggctcagattgctctgaagctgggtgtgacagctaacgacgtcaagaatgtgatcatctggggaaaccactcatccacgcagtatccggacgtgaaccatgcaaaggtcaagctacagggaaaagaagtgggagtttacgaagctctgaaagacgattcttggctgaaaggtgaattcgttacaaccgttcagcaacggggagcagctgtgattaaggctagaaaacttagctctgccatgtccgctgctaaagccatctgcgaccacgttcgcgatatttggttcgggactcccgaaggagaattcgtgtctatgggtgtcatttctgacggaaattcatatggagttccggatgacctgttgtacagtttccccgtcgtcatcaaaaataagacctggaagtttgtggagggtcttcccatcaacgacttttcccgcgaaaaaatggatctcaccgccaaagaactgactgaggagaaagagtccgccttcgaattcctaagctctgcatag

SEQ ID NO: 76934 - DNA, 738 bp, Artificial Sequence
  derived and/or modified sequence
atgcccagaagagagggcatggagagaaaggacctgctgaaggccaacgtgaagatcttcaagagccagggcgccgccctggacaagtacgccaagaagagcgtgaaggtgatcgtggtgggcaaccccgccaacaccaactgcctgaccgccagcaagagcgcccccagcatccccaaggagaacttcagctgcctgaccagactggaccacaacagagccaaggcccagatcgccctgaagctgggcgtgaccgccaacgacgtgaagaacgtgatcatctggggcaaccacagcagcacccagtaccccgacgtgaaccacgccaaggtgaagctgcagggcaaggaggtgggcgtgtacgaggccctgaaggacgacagctggctgaagggcgagttcgtgaccaccgtgcagcagagaggcgccgccgtgatcaaggccagaaagctgagcagcgccatgagcgccgccaaggccatctgcgaccacgtgagagacatctggttcggcacccccgagggcgagttcgtgagcatgggcgtgatcagcgacggcaacagctacggcgtgcccgacgacctgctgtacagcttccccgtggtgatcaagaacaagacctggaagttcgtggagggcctgcccatcaacgacttcagcagagagaagatggacctgaccgccaaggagctgaccgaggagaaggagagcgccttcgagttcctgagcagcgcctag

SEQ ID NO: 76935 - protein, 162 aa, Artificial Sequence
  derived and/or modified sequence
MAGPVKDREAFQRLNFLYQAAHCVLAQDPENQALARFYCYTERTIAKRLVLRRPLSSSAPRDPSVKRTLCRGCSSLLVPGLTCTQRQRRCRGQRWTVQTCLTCQRSQRFLNDPGHLLWGDRPEAQLGSQADSKPLQPLPNTAHSISDRLPEEKMQTKGSSNQ

SEQ ID NO: 76936 - protein, 162 aa, Artificial Sequence
  derived and/or modified sequence
MAGPVKDREAFQRLNFLYQAAHCVLAQDPENQALARFYCYTERTIAKRLVLRRPLSSSAPRDPSVKRTLCRGCSSLLVPGLTCTHRQRRCRGQRWTVQTCLTCQRSQRFLNDPGHLLWGDRPEAQLGSQADSKPLQPLPNTAHSISDRLPEEKMQTQGSSNQ

SEQ ID NO: 76937 - protein, 162 aa, Artificial Sequence
  derived and/or modified sequence
MAGPVKDREAFQRLNFLYQAAHCVLAQDPENQALARFYCYTERTIAKRLVLRRPLSSSAPRDPSVKRTLCRGCSSLLVPGLTCTQRQRRCRGQRWTVQTCLTCQRSQRFLNDPGHLLWGDRPEAQLGSQADSKPLQPLPNTAHSISDRLPEEKMQTQGSSNQ

SEQ ID NO: 76938 - DNA, 489 bp, Artificial Sequence
  derived and/or modified sequence
atggctggacccgtcaaggaccgcgaagccttccagcggttgaacttcctttaccaggccgcacattgtgtgcttgcccaggaccccgagaatcaggccctggcacgattttattgctacactgagagaaccatcgcaaaaagacttgtccttcgcaggccattatcctcctctgcaccacgggacccaagtgtgaagcgaactttgtgcagaggttgctcttcacttctggtgccgggcttaacctgcactcagagacagagaagatgccgcgggcaaagatggaccgttcagacgtgtcttacatgccagcgatcacagagattcctcaatgaccctggacacctgctgtggggagacaggcccgaggctcagttaggcagccaggccgactccaagcccctccaaccactgcccaataccgcccattcgatctctgatcgcttacccgaagagaaaatgcagactaaaggcagcagcaaccagtag

SEQ ID NO: 76939 - DNA, 489 bp, Artificial Sequence
  derived and/or modified sequence
atggccgggccggtaaaagatagagaggcttttcaacggttgaattttctgtaccaagctgcccactgcgtcctagctcaggaccccgaaaaccaggcactcgcacggttttactgttacacagagagaaccatagctaaacgtctcgtattgagaaggccactatctagttccgcgcccagggatccttccgtcaaacgcacactgtgtagaggctgctcctctttgctggtcccaggacttacttgcacccaccgtcagcggagatgcaggggccaacggtggaccgtccagacgtgcctgacctgtcaacgcagccagagatttctcaacgacccaggccacctgctatggggagatagacccgaggcacaactggggagccaagccgactccaagcctctgcaacctcttccaaacactgcgcattctattagcgacagactgcccgaggagaagatgcaaacccagggcagcagtaaccaatag

SEQ ID NO: 76940 - DNA, 489 bp, Artificial Sequence
  derived and/or modified sequence
atggcagggcccgttaaggaccgggaggccttccagcggctcaatttcctgtaccaggcagcccactgtgtccttgcacaggacccagaaaaccaggcattagctcggttttattgctacaccgaacgcacaattgcgaaaagattagtattaagaaggcccttatcgagctcagcaccacgagacccatccgtgaaaagaacactgtgccgggggtgctcaagcctcctcgtccccggtcttacctgcacgcagaggcaacggcgttgcagaggacagcgctggactgtccagacctgtcttacctgtcagcgaagccaacggttcctgaatgaccccggccacctgctctggggcgatagacctgaggcccaactgggctctcaggcagactccaaaccactccaaccactcccaaacaccgctcatagtatcagcgatcgattgcctgaagagaagatgcagactcagggtagttctaaccagtag

SEQ ID NO: 76941 - DNA, 489 bp, Artificial Sequence
  derived and/or modified sequence
atggcgggtcccgtcaaggaccgcgaggcctttcagcgcctgaatttcttgtaccaagctgcccactgcgtactggcgcaggatccagagaaccaggctttagcccgattttactgttacactgagagaactatcgccaaacgcctggtcctcagaaggcccctgagctcaagtgctccaagggatcctagtgtgaaacgaaccttatgtcgagggtgcagttccctgctggtgccagggctaacctgtactcataggcagcgtcggtgccgcggccaacgctggaccgtacagacttgcctcacgtgtcagaggagtcagcgctttctcaacgaccctggccatctcctgtggggggatcgacctgaagcccagctggggtctcaggcagactcgaagcctctgcaacccctaccgaacacggcacactcaattagcgatcgcctccccgaggagaaaatgcagactcaggggtcttctaaccagtag

SEQ ID NO: 76942 - DNA, 489 bp, Artificial Sequence
  derived and/or modified sequence
atggccggtcctgtgaaggatcgcgaagccttccagagactgaatttcctctaccaagccgcacattgcgttctggctcaggaccctgaaaaccaggcccttgcccgattttactgctacaccgagcggacaatcgcaaaaaggcttgttctcaggagacctcttagtagttccgccccaagggatccttcagtcaaaaggacactgtgtcgcgggtgctccagtcttctggtcccaggcctgacctgcactcagcgccaacggcgctgtagaggccagcgctggacagtgcagacctgtctgacctgtcaacgaagccagcgttttcttaacgatcctggacacctgctgtggggagatagacctgaggctcaactgggaagtcaggccgactccaaacctttgcagccactgcctaacacagctcattccatctcagatagacttcccgaggaaaaaatgcaaacacagggatcctcaaatcagtag

SEQ ID NO: 76943 - DNA, 489 bp, Artificial Sequence
  derived and/or modified sequence
atggcagggcccgttaaagaccgggaagctttccaacgcctgaactttctgtaccaggccgcccactgtgttctagcacaggatccagaaaaccaggcgttggccaggttctattgttataccgaacgaaccatcgccaaacggttggtacttagacgccccctctcctcttctgcaccccgcgatccctccgtgaagaggacactgtgcagagggtgtagctctctcctggttcccggattgacctgcacccaaaggcagcgtcggtgtaggggccagcggtggaccgtgcaaacctgtttaacttgtcagaggagtcaaaggttccttaacgaccccgggcatcttctctggggcgatagacctgaagcccaacttggctcccaggccgacagtaaaccactgcaaccactgcccaacacagcccatagcataagcgaccgcttacccgaggagaaaatgcagacacagggatcttctaaccagtag

SEQ ID NO: 76944 - DNA, 489 bp, Artificial Sequence
  derived and/or modified sequence
atggccggccccgtcaaagatcgggaagcgttccaacgcctaaatttcctttatcaagccgcccactgcgtactcgcgcaagatcccgagaaccaagcgctggctagattttactgttacactgaaaggacaatcgcaaaacggctggtgctgcggaggcccttgtcaagctcggcccctcgggacccctccgtgaagcgcaccctctgtaggggctgttccagtctgctggtacctggcctcacctgtacacatcggcagagacggtgccggggccagcgatggaccgtgcagacttgtctgacatgccagagaagtcaacgctttctaaacgacccgggccacctgctttggggtgataggccagaggcgcagctggggagccaggccgattccaagcccctgcagcccctgccgaatacggcacacagcattagcgaccggctccctgaggagaaaatgcagacccaagggagctctaaccagtag

SEQ ID NO: 76945 - DNA, 489 bp, Artificial Sequence
  derived and/or modified sequence
atggccggccctgtgaaggaccgggaggccttccagaggctgaacttcctgtaccaggccgcccactgtgtgctggcccaggaccctgagaaccaggccctggcccgcttctactgctacacagagaggaccatcgccaagaggctggtgctgcggcggcccctgagcagcagcgccccccgggaccccagcgtgaagaggaccctgtgccggggctgcagcagcctgctggtgcccggcctgacctgcacccagaggcagaggcgctgccggggccagcgctggacagtgcagacctgcctgacctgccagaggagccagcgcttcctgaatgaccccggccacctgctgtggggagacaggcctgaggcccagctgggcagccaggccgacagcaagcccctgcagcccctgcccaacacagcccacagcatcagtgaccggctgcctgaggagaagatgcagaccaagggcagcagcaaccagtag

SEQ ID NO: 76946 - DNA, 489 bp, Artificial Sequence
  derived and/or modified sequence
atggccggccctgtgaaggaccgggaggccttccagaggctgaacttcctgtaccaggccgcccactgtgtgctggcccaggaccctgagaaccaggccctggcccgcttctactgctacacagagaggaccatcgccaagaggctggtgctgcggcggcccctgagcagcagcgccccccgggaccccagcgtgaagaggaccctgtgccggggctgcagcagcctgctggtgcccggcctgacctgcacccaccggcagaggcgctgccggggccagcgctggacagtgcagacctgcctgacctgccagaggagccagcgcttcctgaatgaccccggccacctgctgtggggagacaggcctgaggcccagctgggcagccaggccgacagcaagcccctgcagcccctgcccaacacagcccacagcatcagtgaccggctgcctgaggagaagatgcagacccagggcagcagcaaccagtag

SEQ ID NO: 76947 - DNA, 489 bp, Artificial Sequence
  derived and/or modified sequence
atggccggccctgtgaaggaccgggaggccttccagaggctgaacttcctgtaccaggccgcccactgtgtgctggcccaggaccctgagaaccaggccctggcccgcttctactgctacacagagaggaccatcgccaagaggctggtgctgcggcggcccctgagcagcagcgccccccgggaccccagcgtgaagaggaccctgtgccggggctgcagcagcctgctggtgcccggcctgacctgcacccagaggcagaggcgctgccggggccagcgctggacagtgcagacctgcctgacctgccagaggagccagcgcttcctgaatgaccccggccacctgctgtggggagacaggcctgaggcccagctgggcagccaggccgacagcaagcccctgcagcccctgcccaacacagcccacagcatcagtgaccggctgcctgaggagaagatgcagacccagggcagcagcaaccagtag

SEQ ID NO: 76948 - DNA, 489 bp, Artificial Sequence
  derived and/or modified sequence
atggccggccccgtgaaggaccgggaggccttccagcggctgaacttcctctatcaggctgcacattgcgttctagctcaggacccagaaaaccaggccctggcgcgtttttactgttacacagagcgcactattgcaaaaaggctcgtgctccggagaccgctttctagctcagcccctcgggacccctcagtgaaacgtacactctgccggggatgtagtagtctgttagtacccggcttgacctgcacacagagacaacggcgctgcagagggcagaggtggacagtgcagacttgtttaacatgccagaggtcccagagattcttgaacgatccaggccacctcctgtggggggatcgccccgaggcacagctaggctcccaggccgactcaaagcccctgcagcccctgcctaatactgctcactccatctcagatcggttgccggaagagaagatgcagaccaagggctcatcaaatcaatag

SEQ ID NO: 76949 - DNA, 489 bp, Artificial Sequence
  derived and/or modified sequence
atggccggccccgtgaaggaccgggaggccttccagcggctgaactttctctatcaggccgcccattgcgttctcgcccaagaccctgaaaatcaggctttggcacgcttctactgctatactgaaaggacaatcgccaagcgattggttttgcggagaccactgagctctagtgcccctcgggacccgtccgttaaacggaccctctgccgggggtgttcctctttgcttgttcctggactgacctgtactcaccgccagaggaggtgtcggggtcaacggtggactgttcaaacatgcttgacatgtcagagaagccagaggttcctgaatgaccccggtcacttgctatggggtgatcggccagaggctcaactgggctctcaggctgacagcaaacccctccagcccttgcctaacacagctcacagcatctccgacagattgcctgaagaaaagatgcagactcagggcagcagtaaccagtag

SEQ ID NO: 76950 - DNA, 489 bp, Artificial Sequence
  derived and/or modified sequence
atggccggccccgtgaaggaccgggaggccttccagcggctgaacttcttatatcaggcggcgcactgcgtgcttgcacaggatcctgaaaatcaggctctggcacggttctactgttacaccgagcggacaatcgctaagcgcctggttcttagaagacccctcagctcatccgctcctagggacccaagcgtgaagcgcaccctctgcaggggttgttcaagtcttcttgtcccaggcctgacgtgtacccagcgccagcggaggtgtcgggggcagcgatggaccgtccagacctgcctaacttgccagaggtcccagcgctttctgaacgaccccggccacctcctctggggtgatagaccagaagctcagcttggatctcaggcggactccaaacctctgcaacccctacccaatacggcacatagtatctctgatcgcctgcccgaagaaaaaatgcaaacacagggaagttccaatcaatag

SEQ ID NO: 76951 - DNA, 489 bp, Artificial Sequence
  derived and/or modified sequence
atggccggccccgtgaaggaccgggaggccttccagcggctgaacttcctgtaccaggccgctcattgcgtcctcgcccaagatcctgagaatcaggcgctggccagattttattgctacaccgaacgcaccatcgccaagcggctggtgttgaggaggcccctgagctcctcagcacccagagatccgagcgtgaaacgaacactgtgccggggatgctcctccctccttgttcctggactaacatgcacacaccggcaaagaaggtgcaggggacaacgctggaccgttcagacctgtttgacctgtcagagaagccagcgctttttgaacgatcccgggcatcttctctggggtgatcgtcccgaggcgcagctggggagccaagcagattccaagcctctgcaacccctccccaatactgctcattccatttcagaccgtctcccagaagagaaaatgcagactcaaggatcctccaaccaatag

SEQ ID NO: 76952 - DNA, 489 bp, Artificial Sequence
  derived and/or modified sequence
atggccggccccgtgaaggaccgggaggccttccagcggctgaactttctgtatcaagcggctcactgcgttttggcacaggatcctgagaatcaagctttagcccggttttactgttatacagaacggaccatcgcgaaacgattggtacttaggaggcctctgtctagctctgcaccgagggaccctagcgtgaaaaggacgttatgtcgggggtgcagcagtttgctggtccctggcctgacctgtacacaaaggcaacgacgatgtcgcggacagaggtggaccgtgcagacctgtctgacctgccagagatcccaacgatttttaaacgatcctgggcacctcctctggggtgatcggcccgaagcgcagttgggtagccaggctgattccaaaccccttcagccacttcccaataccgcacactccatctcggacaggctccccgaggaaaagatgcagactcaggggagttctaatcagtag

SEQ ID NO: 76953 - DNA, 489 bp, Artificial Sequence
  derived and/or modified sequence
atggccggccccgtgaaggaccgggaggccttccagcggctgaactttctataccaagcagcccattgtgtcctcgcacaggatcctgaaaatcaggccttagctaggttctactgttatactgaacgtacaatcgccaaaagactcgtcctgcgccgccccctgtcttccagtgccccacgagatccaagcgtgaaaagaactctttgccgcggttgttcctccctcctggtgcctggcctgacttgtacacagcggcagcggagatgcagaggacagcgatggacggtacaaacctgtcttacatgtcagaggtctcagcgctttctgaacgaccccggtcacctgctgtggggcgataggcccgaagctcagctgggctcacaggccgacagtaagccactgcaacctctgccaaatactgcacacagtatctctgatcgactgcctgaagagaagatgcagactcaggggtcctccaatcagtag

SEQ ID NO: 76954 - DNA, 489 bp, Artificial Sequence
  derived and/or modified sequence
atggccggccccgtgaaggaccgggaggccttccagcggctgaactttctctaccaggccgcccattgcgtattggcccaggacccggagaatcaagctctggcaaggttttactgttataccgagcgaaccattgccaagagactggtcttacgccgccccctctccagttcagctcctcgcgacccctccgtcaagagaacgctatgtcgaggctgctcaagcctgcttgtgcctggcctcacttgtacgcatcgacagcgccggtgcaggggtcagcggtggactgtgcagacttgcttaacatgccaaagaagccagaggttcttaaacgatccagggcacctgctgtggggagacagacccgaagcccagcttggctcccaggcagatagcaaacctttgcagccgctgcccaacactgcccacagcatttctgatcgtttgcctgaggaaaagatgcagactcagggatcttccaaccagtag

SEQ ID NO: 76955 - DNA, 489 bp, Artificial Sequence
  derived and/or modified sequence
atggctggacccgtgaaggatcgggaggcattccagaggctgaacttcctatatcaggctgctcactgcgtgctggcacaggatccagagaatcaggccctggctcgtttctactgctacaccgagagaacaatcgccaaaagactcgttcttcgtcggcctctctcgtccagtgccccacgggacccatcagtcaaacggaccttgtgccgaggatgttccagccttctggttccaggattaacgtgcacccagcgccagcgcagatgccgaggacagaggtggacagtccagacctgccttacttgtcaacggtcacaaaggtttttgaatgacccaggccacctgctatggggggatcgtccagaagcccagctgggaagtcaagcagattctaagccactgcaacctctgcctaataccgctcattccatctcggataggttacccgaggagaaaatgcaaacgaaaggaagctcgaatcaatag

SEQ ID NO: 76956 - DNA, 489 bp, Artificial Sequence
  derived and/or modified sequence
atggcgggaccagtgaaggaccgagaagcgttccagcgccttaacttcctctatcaggctgctcactgcgttcttgcacaggaccctgaaaatcaggcactggcccgattctactgttatactgaacgtacaatcgccaaacgattggtgctgaggagaccactcagtagctcagcccctagagatccctcagtgaagagaactctgtgcagaggctgcagctcactgcttgtgccaggattgacttgtactcatcgacagcgcaggtgtcgcggtcagcggtggacagtacagacttgcctaacttgccagcggtcacaacgtttcctgaacgatcccggacatttgctgtggggtgacaggcccgaggcgcagctgggatcacaggctgactcaaaacccctgcagcctttgcctaacaccgcgcactccatcagtgataggttacctgaagagaagatgcagacccagggcagctctaaccagtag

SEQ ID NO: 76957 - DNA, 489 bp, Artificial Sequence
  derived and/or modified sequence
atggctggacccgtaaaggatagagaagccttccagagattgaacttcctgtatcaagctgcacactgtgtcttggcccaggaccccgagaatcaagccttggccagattttactgctacaccgagcggaccattgcgaagcggcttgtgctcaggaggccactgtcaagttccgcccctcgcgatccgagcgtgaagcgcaccctctgccggggatgcagcagcctgctcgtgcccggactgacttgcacacagcgacagaggcgatgccgaggacagaggtggactgtacagacctgcctgacatgtcaaaggtcacagcgcttcctgaatgatcccggtcacctcctgtggggcgatagaccagaagcacagttggggagtcaagccgactccaagccactgcagccacttcctaacaccgcacattctatcagtgaccggttgccagaggagaagatgcagacccagggcagctctaaccagtag

SEQ ID NO: 76958 - DNA, 489 bp, Artificial Sequence
  derived and/or modified sequence
atggccggtccagtcaaagacagggaggcattccaaaggcttaacttcctttatcaggccgcacactgtgtgctcgcccaggacccagaaaaccaggccctggcccgattttactgctacactgagaggactatcgccaaaagactcgtgctccggcgtcccctatcaagtagtgccccacgagaccctagcgtgaagcggacactctgtaggggctgctcgagtctgctggtgccaggccttacttgcactcatcggcagcgcagatgtcgcggtcagagatggacagtccagacttgcctcacttgccaaagaagtcagagatttctgaatgacccaggccatctattgtggggcgatcgacccgaagcgcaactggggagccaagcagacagtaagcccctgcagcctctgccaaatactgcccactccatcagtgaccggctccccgaggagaagatgcaaacacagggttcctctaaccagtag

SEQ ID NO: 76959 - DNA, 489 bp, Artificial Sequence
  derived and/or modified sequence
atggcgggtccagtgaaagatcgggaggctttccagcggctgaacttcctctaccaggccgcacactgtgtcctcgctcaggaccctgagaatcaagccctggccaggttctactgttacacagaacgcactatcgctaaacgtttagtgctaagaaggccactttcttcatctgccccacgggatcccagcgttaaacgtaccctatgtcggggatgctcttcactcctcgtccctggactgacatgcacccaaagacaaagacgatgccgcggacagcgctggacggtgcaaacctgcctgacgtgccagcgaagtcagcgctttctcaatgatcccggtcacctcctctggggcgaccgacctgaggcccagctgggatcccaggccgactctaagcccctacagcctttacccaacactgcgcattctatctccgaccgtctcccagaagagaagatgcagacccagggaagttctaatcagtag

SEQ ID NO: 76960 - DNA, 489 bp, Artificial Sequence
  derived and/or modified sequence
atggccggaccagtgaaggacagggaggctttccagagattgaacttcctttatcaagccgctcactgcgtgctggctcaagatccagagaatcaggctctcgcgaggttttactgttacaccgaacggaccatagctaaacggttagtcctgcggagaccactgagttcttccgcccctagagacccttccgtaaaacgcactctgtgccggggatgctctagtctcctcgtaccagggctcacatgcacccagaggcagcggcgatgcagaggtcagcgctggactgtgcagacctgcctaacttgtcaaaggagccagcgcttccttaatgatccgggacacctactgtggggagataggcctgaggcccaattggggtctcaggccgatagtaaaccgctgcaacctttgcccaatacggcgcatagtatttccgatagactgcctgaggaaaagatgcagacccaggggtcctccaatcaatag

SEQ ID NO: 76961 - DNA, 489 bp, Artificial Sequence
  derived and/or modified sequence
atggccggacctgtgaaagatcgggaggcctttcagaggcttaattttctgtatcaagctgcccactgtgtgctcgctcaagatcccgagaatcaggctttggctaggttctactgctacacggagcggaccatagcaaaacgtcttgttctacgcaggcccctgagtagctctgcccctagagatccgtcagtgaagcggaccctgtgtagaggatgttcttctctactggtgcctggcctcacttgcacgcaccgccaacgtaggtgtcggggacagaggtggacagtccagacctgcctaacttgtcagcgatcccagaggttcctcaatgatcctggtcacctcctgtggggcgatcggcctgaagcacaactggggtcccaagcagactctaagccattacagccattgcctaacacagcccactcaatttcagatcgtcttcctgaggagaaaatgcagacacaggggtcctctaatcagtag

SEQ ID NO: 76962 - DNA, 579 bp, Artificial Sequence
  derived and/or modified sequence
gcgaggggtggggcgctgcgggaggccctggagcgcggcggtgatggcggggccggtgaaggaccgcgaggccttccagaggctcaacttcctgtaccaggccgcccattgtgtccttgcccaggaccccgagaaccaggcgctggcgaggttttactgctacactgagaggaccattgcgaagcggctcgtcttgcggcgaccactatcctcctccgcccccagggatccctcggtgaagaggactctctgtcgaggctgctcttccctcctcgtcccgggcctcacctgcacccagcgccagagacgctgcaggggacagcgctggaccgtacagacctgcctaacatgccagcgcagccaacgcttcctcaatgatcccgggcatttactctggggagacaggcctgaggcccagctcgggagccaagcagattccaaaccactacaacccttgccaaacacagcccactccatttcagaccgccttcctgaggagaaaatgcagacgaagggttccagtaaccagtgatggattcacctcatctcccaaataaagtttacttgttttacattcca

SEQ ID NO: 76963 - DNA, 577 bp, Artificial Sequence
  derived and/or modified sequence
gcgaggggtggggctgcgggaggccctggagcgcggcggtgatggcggggccggtgaaggaccgcgaggccttccagaggctcaacttcctgtaccaggccgcccattgtgtccttgcccaggaccccgagaaccaggcgctggcgaggttttactgctacactgagaggaccattgcgaagcggctcgtcttgcggcgaccactatcctcctccgcccccagggatccctcggtgaagaggactctctgtcgaggctgctcttccctcctcgtcccgggcctcacctgcacccaccgccagagacgctgcaggggacagcgctggaccgtacagacctgcctaacatgccagcgcagccaacgcttcctcaatgatcccgggcatttactctggggagacaggcctgaggcccagctcgggagccaagcagattccaaaccactacaacccttgccaaacacagcccactccatttcagaccgccttcctgaggagaaaatgcagactcagggttccagtaaccagtgatggattcaccccatctcccaaataaagtttacttgttttacattcca

SEQ ID NO: 76964 - DNA, 577 bp, Artificial Sequence
  derived and/or modified sequence
gcgaggggtggggctgcgggaggccctggagcgcggcggtgatggcggggccggtgaaggaccgcgaggccttccagaggctcaacttcctgtaccaggccgcccattgtgtccttgcccaggaccccgagaaccaggcgctggcgaggttttactgctacactgagaggaccattgcgaagcggctcgtcttgcggcgaccactatcctcctccgcccccagagatccctcggtgaagaggactctctgtcgaggctgctcttccctcctcgtcccgggcctcacctgcacccagcgccagagacgctgcaggggacagcgctggaccgtacagacctgcctaacatgccagcgcagccaacgcttcctcaatgatcccgggcatttactctggggagacaggcctgaggcccagctcgggagccaagcagattccaaaccactacaacccttgccaaacacagcccactccatttcagaccgccttcctgaggagaaaatgcagactcagggttccagtaaccagtgatggattcaccccatctcccaaataaagtttacttgttttacattcca

SEQ ID NO: 76965 - DNA, 577 bp, Artificial Sequence
  derived and/or modified sequence
gcgaggggtggggctgcgggaggccctggagcgcggcggtgatggcggggccggtgaaggaccgcgaggccttccagaggctcaacttcctgtaccaggccgcccattgtgtccttgcccaggaccccgagaaccaggcgctggcgaggttttactgctacactgagaggaccattgcgaagcggctcgtcttgcggcgaccactatcctcctccgcccccagggatccctcggtgaagaggactctctgtcgaggctgctcttccctcctcgtcccgggcctcacctgcacccagcgccagagacgctgcaggggacagcgctggaccgtacagacctgcctaacatgccagcgcagccaacgcttcctcaatgatcccgggcatttactctggggagacaggcctgaggcccagctcgggagccaagcagattccaaaccactacaacccttgccaaacacagcccactccatttcagaccgccttcctgaggagaaaatgcagactcagggttccagtaaccagtgatggattcaccccatctcccaaataaagtttacttgttttacattcca

SEQ ID NO: 76966 - DNA, 489 bp, Artificial Sequence
  derived and/or modified sequence
atggccggccccgtgaaggacagagaggccttccagagactgaacttcctgtaccaggccgcccactgcgtgctggcccaggaccccgagaaccaggccctggccagattctactgctacaccgagagaaccatcgccaagagactggtgctgagaagacccctgagcagcagcgcccccagagaccccagcgtgaagagaaccctgtgcagaggctgcagcagcctgctggtgcccggcctgacctgcacccagagacagagaagatgcagaggccagagatggaccgtgcagacctgcctgacctgccagagaagccagagattcctgaacgaccccggccacctgctgtggggcgacagacccgaggcccagctgggcagccaggccgacagcaagcccctgcagcccctgcccaacaccgcccacagcatcagcgacagactgcccgaggagaagatgcagaccaagggcagcagcaaccagtag

SEQ ID NO: 76967 - DNA, 489 bp, Artificial Sequence
  derived and/or modified sequence
atggccggccccgtgaaggacagagaggccttccagagactgaacttcctgtaccaggccgcccactgcgtgctggcccaggaccccgagaaccaggccctggccagattctactgctacaccgagagaaccatcgccaagagactggtgctgagaagacccctgagcagcagcgcccccagagaccccagcgtgaagagaaccctgtgcagaggctgcagcagcctgctggtgcccggcctgacctgcacccacagacagagaagatgcagaggccagagatggaccgtgcagacctgcctgacctgccagagaagccagagattcctgaacgaccccggccacctgctgtggggcgacagacccgaggcccagctgggcagccaggccgacagcaagcccctgcagcccctgcccaacaccgcccacagcatcagcgacagactgcccgaggagaagatgcagacccagggcagcagcaaccagtag

SEQ ID NO: 76968 - DNA, 489 bp, Artificial Sequence
  derived and/or modified sequence
atggccggccccgtgaaggacagagaggccttccagagactgaacttcctgtaccaggccgcccactgcgtgctggcccaggaccccgagaaccaggccctggccagattctactgctacaccgagagaaccatcgccaagagactggtgctgagaagacccctgagcagcagcgcccccagagaccccagcgtgaagagaaccctgtgcagaggctgcagcagcctgctggtgcccggcctgacctgcacccagagacagagaagatgcagaggccagagatggaccgtgcagacctgcctgacctgccagagaagccagagattcctgaacgaccccggccacctgctgtggggcgacagacccgaggcccagctgggcagccaggccgacagcaagcccctgcagcccctgcccaacaccgcccacagcatcagcgacagactgcccgaggagaagatgcagacccagggcagcagcaaccagtag

SEQ ID NO: 76969 - protein, 144 aa, Artificial Sequence
  derived and/or modified sequence
MAGPVKDREAFQRLNFLYQAAHCVLAQDPENQALARFYCYTERTIAKRLVLRRDPSVKRTLCRGCSSLLVPGLTCTQRQRRCRGQRWTVQTCLTCQRSQRFLNDPGHLLWGDRPEAQLGSQAGERFQTTTTLAKHSPLHFRPPS

SEQ ID NO: 76970 - protein, 144 aa, Artificial Sequence
  derived and/or modified sequence
MAGPVKDREAFQRLNFLYQAAHCVLAQDPENQALARFYCYTERTIAKRLVLRRDPSVKRTLCRGCSSLLVPGLTCTHRQRRCRGQRWTVQTCLTCQRSQRFLNDPGHLLWGDRPEAQLGSQAGERFQTTTTLAKHSPLHFRPPS

SEQ ID NO: 76971 - DNA, 435 bp, Artificial Sequence
  derived and/or modified sequence
atggcagggcctgtcaaggaccgcgaggccttccagcggttgaacttcctgtaccaagccgcccactgtgtcctggcccaggaccctgagaaccaagcactggcccgattttactgctacacggagcgaactatcgccaagagactggtgcttaggcgagatccatccgttaaacggacgctgtgcagaggatgcagttctctgctggtgccggggctgacttgtacccagcggcagagaaggtgccgaggacagagatggacagtacagacctgcctgacatgccaaagaagtcagaggttcttgaatgaccccggccaccttttatggggcgaccgcccagaggcccagctgggaagtcaggccggagaacggttccagaccaccacaaccctggctaaacactccccactgcacttcaggcccccctcgtag

SEQ ID NO: 76972 - DNA, 435 bp, Artificial Sequence
  derived and/or modified sequence
atggcgggccctgttaaagacagggaggctttccaaaggttgaattttttgtaccaggcagcccactgcgtcttggcacaggaccccgagaaccaagctctggccaggttctattgttataccgagcgcaccattgccaaacggctggtgttgcgcagggacccatctgtgaaacgcactctctgcagaggctgctccagtcttctcgtcccaggtctaacctgcacacatagacagaggcgctgccgagggcaaagatggaccgtgcagacgtgtctgacctgccagaggtcgcagcgctttctgaatgacccaggtcatttactatggggtgatcgcccagaagcccagctgggcagccaggctggagaacgcttccagacaacgaccacgttagctaagcattcaccacttcactttaggcctcccagttag

SEQ ID NO: 76973 - DNA, 435 bp, Artificial Sequence
  derived and/or modified sequence
atggctggacctgtgaaagacagagaggccttccagcgccttaatttcctgtatcaggccgctcactgtgttctggctcaggacccagagaaccaagccctggcccgcttttattgttacaccgaaaggactattgctaagcgcctagtgttgagacgggatccctctgtgaaacgtacattatgtagagggtgctcctccctgctcgttcccgggctcacttgtacacacagacagcgacgatgcagagggcagcggtggaccgtccaaacatgcctgacgtgccagagaagtcagagatttctgaacgaccccgggcatctactctggggtgacaggccagaagcacaactgggatcacaggcaggtgaacggtttcaaactacaaccactctcgcgaaacacagtcctctgcactttagaccccccagctag

SEQ ID NO: 76974 - DNA, 435 bp, Artificial Sequence
  derived and/or modified sequence
atggctggcccagtaaaagaccgtgaagcctttcaacgactcaattttctctaccaagccgcgcactgcgtgttagctcaggatccagaaaaccaggctcttgcacggttctattgttatactgagaggaccatcgcaaaacgcctagtattgaggcgagatccttccgtgaagcgcacattatgtagaggctgttcctcacttctggtgcctgggctgacttgtactcagcgccagcgaagatgcaggggacagcggtggacagttcagacgtgtttgacatgccagcggagccaacggttcctgaacgaccccggacatttgctgtggggggacaggcccgaggcccagttgggttcacaggcgggtgaacggtttcagacgaccactaccctcgccaagcattccccgctccacttccgcccaccaagctag

SEQ ID NO: 76975 - DNA, 435 bp, Artificial Sequence
  derived and/or modified sequence
atggctggcccggtgaaggaccgggaagcctttcagagacttaattttctgtatcaagctgcccactgcgtgttagcacaggatcccgaaaaccaggcactcgctaggttttattgttatactgagagaactattgcaaagcggttagtgttgagaagagatccaagcgtgaaacgtactctgtgccggggatgttcctctctgctggtgccaggcctcacttgcacccagagacagaggaggtgcaggggccagcggtggactgtacaaacgtgtctgacatgtcagcgcagccagcgattcttgaacgaccctggacacctactctggggcgaccgaccagaggcccagctggggtcacaagccggcgagcgatttcagacaacaacaactctcgccaagcattcccccctacactttaggcccccgagttag

SEQ ID NO: 76976 - DNA, 435 bp, Artificial Sequence
  derived and/or modified sequence
atggctgggccggttaaggaccgggaggccttccagcgactcaattttctctatcaggctgcgcattgcgtgctcgcacaggatcccgaaaatcaagcactagctaggttctattgttatacggagcgcaccattgcaaagcgcctcgtgctcagaagggacccctctgttaagcgcactctctgtagaggatgctctagcctgctggtcccgggtcttacttgcacgcaaagacagcgccggtgccgggggcagcgttggaccgtccagacgtgtctgacatgtcaacgctcccagagatttctgaatgatcccggccacctcctatggggcgacagacctgaagcccaattgggttcccaggccggtgagcggttccagacgacgaccacacttgcgaagcactcacccctgcattttcgccccccaagttag

SEQ ID NO: 76977 - DNA, 435 bp, Artificial Sequence
  derived and/or modified sequence
atggccgggcctgtgaaagatagggaagccttccaacgcttgaattttttgtatcaagctgcacattgtgttctcgcccaggatcccgagaatcaagctctagcccgcttctattgctatacagagaggactatcgccaagcgactggtgctcaggcgtgatccatccgtgaagagaacactatgcaggggctgtagcagcctgcttgtccccggtttgacttgcacccaccgtcaacggcgttgccgggggcagcggtggacggtgcagacttgcctcacatgtcagcgatcccagaggttcctaaacgatcctgggcatcttctgtggggcgataggccagaagcccagttaggatcccaggccggtgagaggttccagacgacaaccacgttagctaagcacagcccgctccatttccggcccccctcgtag

SEQ ID NO: 76978 - DNA, 435 bp, Artificial Sequence
  derived and/or modified sequence
atggccggccctgtgaaggaccgggaggccttccagaggctgaacttcctgtaccaggccgcccactgtgtgctggcccaggaccctgagaaccaggccctggcccgcttctactgctacacagagaggaccatcgccaagaggctggtgctgcggcgggaccccagcgtgaagaggaccctgtgccggggctgcagcagcctgctggtgcccggcctgacctgcacccagaggcagaggcgctgccggggccagcgctggacagtgcagacctgcctgacctgccagaggagccagcgcttcctgaatgaccccggccacctgctgtggggagacaggcctgaggcccagctgggcagccaggccggggagcgcttccagaccaccaccaccctggccaagcacagccccctgcacttccggccccccagctag

SEQ ID NO: 76979 - DNA, 435 bp, Artificial Sequence
  derived and/or modified sequence
atggccggccctgtgaaggaccgggaggccttccagaggctgaacttcctgtaccaggccgcccactgtgtgctggcccaggaccctgagaaccaggccctggcccgcttctactgctacacagagaggaccatcgccaagaggctggtgctgcggcgggaccccagcgtgaagaggaccctgtgccggggctgcagcagcctgctggtgcccggcctgacctgcacccaccggcagaggcgctgccggggccagcgctggacagtgcagacctgcctgacctgccagaggagccagcgcttcctgaatgaccccggccacctgctgtggggagacaggcctgaggcccagctgggcagccaggccggggagcgcttccagaccaccaccaccctggccaagcacagccccctgcacttccggccccccagctag

SEQ ID NO: 76980 - DNA, 435 bp, Artificial Sequence
  derived and/or modified sequence
atggccggccccgtgaaggaccgggaggccttccagcggctgaacttcctgtatcaggccgcgcactgtgtgcttgcccaagatccggagaaccaggccttggcccggttttattgctacacggagagaactatcgccaaaagacttgttctcaggcgggacccaagcgtaaaaaggacattgtgccggggctgttccagcttattagttccagggcttacatgcacccagaggcagcgaaggtgtcggggtcaacgatggaccgtgcaaacctgcctcacgtgtcagagaagccaacgatttctcaacgatcccggccatctcctgtggggtgatcggcccgaggcccagcttggatctcaagcgggagagagattccagactactacgacactagctaagcatagcccacttcatttcagacccccttcctag

SEQ ID NO: 76981 - DNA, 435 bp, Artificial Sequence
  derived and/or modified sequence
atggccggccccgtgaaggaccgggaggccttccagcggctgaacttcctgtaccaagcggcccactgtgtcctggcacaggatcctgaaaaccaggctctcgcgcgattttactgttacaccgagagaaccattgccaagcgacttgtgctgcgcagagacccatccgtaaaacgcactctttgtagaggatgttcaagcctgttagtgccggggctcacctgcacccatagacagcgccgatgcaggggtcagcgatggaccgtacagacatgtttgacctgccagaggtcgcagcggtttctgaatgatcccggacacttattgtggggcgaccggccagaagcacagcttggaagccaggcaggggaacggttccaaacaacaacaaccctcgctaaacacagcccactccactttcgtcccccctcatag

SEQ ID NO: 76982 - DNA, 435 bp, Artificial Sequence
  derived and/or modified sequence
atggccggccccgtgaaggaccgggaggccttccagcggctgaacttcctctatcaggccgcgcattgtgtgctcgcacaagaccctgagaatcaggccctggcaaggttctactgttataccgagcgtactatagcaaaacgcttggtgctgcgcagagacccttcagttaaacgcacactgtgtcgcggctgcagtagcctactggtgccaggattgacatgtacacacagacagaggagatgccgtggccagagatggaccgtgcaaacctgcctgacctgtcagcgaagccagagatttctgaatgaccccgggcacttactgtggggcgatcgtccggaggctcagcttggatctcaggccggcgagcgcttccagaccaccaccaccctggctaagcactcacccctacacttccgccctccttcctag

SEQ ID NO: 76983 - DNA, 435 bp, Artificial Sequence
  derived and/or modified sequence
atggccggccccgtgaaggaccgggaggccttccagcggctgaactttctataccaggccgcccattgtgtgctggcacaggatccagagaaccaagcattggccagattttattgttacacagagagaacaattgctaaaagactggtcctgcgaagagacccttccgtgaaacgaacactgtgccgaggatgttcatctcttctcgtcccgggcctgacttgcacacagagacagagacggtgccggggtcagagatggacagttcagacctgtttgacgtgtcaaaggtcccagagattcctcaatgatcccggccacttactgtggggcgaccgaccagaagcccagcttggatcccaagccggggaaaggtttcaaactacaaccactctggccaaacactccccactgcactttagacccccctcatag

SEQ ID NO: 76984 - DNA, 435 bp, Artificial Sequence
  derived and/or modified sequence
atggccggccccgtgaaggaccgggaggccttccagcggctgaacttcctgtatcaggccgcccattgcgtgttagctcaagatcctgaaaatcaggccctggccagattttactgttataccgaacggaccattgcgaagagacttgtcctgagacgagacccaagtgtcaaacgtacactgtgcagaggatgttcatctctgttggtgccaggtctcacctgcacccagaggcaaagacggtgtaggggacagcgttggactgttcagacctgcctgacgtgccagcgcagtcagaggttcttaaatgaccccggtcacctgttgtggggcgatcgccctgaagctcagctgggaagtcaagccggcgagcgtttccagaccacaacaaccttagcaaagcattccccgctccatttccggcctccctcttag

SEQ ID NO: 76985 - DNA, 435 bp, Artificial Sequence
  derived and/or modified sequence
atggccggccccgtgaaggaccgggaggccttccagcggctgaactttctctatcaggctgcccactgcgtactcgcccaggatcctgagaaccaggcgctcgcccggttttattgctacactgagcgtactatagctaagcgccttgtgctgagaagggacccatcagttaaacgtaccctttgtcgtggctgcagttcccttctggttccaggtctcacatgtacccaacgccagaggaggtgtaggggtcaaagatggacagtgcagacgtgtctgacatgtcagcggtctcagagattcctgaacgaccccggacatctgttgtggggcgatcgccctgaggctcagctggggtcccaagccggggagcgatttcaaactaccaccactctcgccaagcactcccctctgcattttcggcccccttcctag

SEQ ID NO: 76986 - DNA, 435 bp, Artificial Sequence
  derived and/or modified sequence
atggccggccccgtgaaggaccgggaggccttccagcggctgaacttcttgtaccaggcggctcactgtgtgctcgcgcaggatccagagaaccaggctctggccagattctattgttacactgaacggactatcgctaagcgcctggtgctgcggcgagacccctcagtgaagcggaccctgtgccggggctgcagctcattgttggtaccaggattgacctgcacacataggcagaggcggtgtagagggcaaaggtggaccgtacaaacctgtctcacctgccagcgatcccagaggttcctaaacgaccccggccatctactctggggagataggccagaggcacagctcggttcccaggcgggagaacggttccaaaccacaaccacattagccaagcactctcctctccactttagacccccttcatag

SEQ ID NO: 76987 - DNA, 435 bp, Artificial Sequence
  derived and/or modified sequence
atggctggccctgtgaaagaccgggaagcgtttcagcggctgaattttctatatcaggcagctcattgcgttctggctcaagatccagagaaccaggccctggcaaggttttactgttataccgaaaggaccattgcaaagagactggtgttgaggcgcgatccctctgttaagaggaccctctgccgaggctgtagctccctcttggtgcccggactgacctgtactcagcgccagcggagatgcagaggtcagcgctggaccgtgcaaacctgtctaacctgtcaaagatcacagagatttctgaacgacccaggccatctactgtggggcgaccggccagaagcccagcttgggagccaggctggcgagcggtttcagactaccaccacactggctaagcactcccctttacacttcagaccgccttcctag

SEQ ID NO: 76988 - DNA, 435 bp, Artificial Sequence
  derived and/or modified sequence
atggcaggcccagtcaaagatagggaggcctttcagcgattgaatttcctttaccaggccgcacattgtgtattggcccaagatcccgaaaatcaggcgctggccagattttactgttatacagaacgaaccatcgccaagagattggtgctaaggagagacccgtctgttaaaaggactctgtgcagaggctgctccagcttgctggtccccggattgacttgcacccaccggcagagacggtgccggggacagcgttggaccgtgcagacgtgcctgacgtgtcagaggagtcaaaggtttcttaacgacccagggcatcttctctggggtgatcgacctgaggcgcagctgggcagtcaagccggagagagatttcagacgacaaccacacttgccaagcactcacctcttcatttccgacccccaagctag

SEQ ID NO: 76989 - DNA, 435 bp, Artificial Sequence
  derived and/or modified sequence
atggccggacccgtaaaggatagagaagcattccagcgcttgaactttctctatcaggctgcccattgtgtcctggcccaagatcccgagaatcaggccctggcccgattctattgttacacagaaaggaccatcgcaaagcgcctcgtgctgcggagggatccctccgtcaagcgcacgttatgccggggttgcagtagcctcttagtgcctggcctgacctgcactcacaggcaaagacgctgtcgcggacagagatggacggtccagacttgtctgacatgccagcgttcccagcggtttctgaacgatccagggcacttgctttggggggatcggcctgaagctcagttgggctcacaagctggagaaaggtttcagaccaccaccacgcttgccaaacactctcccttgcatttcagacccccatcctag

SEQ ID NO: 76990 - DNA, 435 bp, Artificial Sequence
  derived and/or modified sequence
atggccggaccggtgaaggatagagaggcttttcagcgactaaatttcctttaccaggccgctcactgcgtcctcgctcaggatcccgagaaccaggcactggcacgcttttattgttataccgagcgcaccatagcgaagaggctggtcttgaggcgagatccctctgtgaagcggaccctgtgtcgtggctgctcatctctgctggtgcccggactgacctgcacgcagagacagagacggtgccgcggacagagatggaccgttcaaacgtgcctgacttgccagaggagccaaaggttcttgaatgaccctggccatctgctgtggggtgatcgcccagaggcccaactcggatcccaagctggcgagcgctttcagacaaccacaaccctcgccaaacactctcctctgcacttcaggccaccatcatag

SEQ ID NO: 76991 - DNA, 435 bp, Artificial Sequence
  derived and/or modified sequence
atggcaggaccagttaaagaccgggaggcgttccagcggctcaacttcctgtaccaagccgcacactgtgtgttagcccaggaccctgagaaccaggccctggccaggttctactgctatacagaaaggacgatcgcgaagcgcctggtattaaggcgggacccctcagtcaaacggacactctgccggggatgttcttcacttcttgtcccaggactaacttgtacgcaacgtcagcgcagatgccgcggacagagatggacggttcaaacatgcctgacttgtcaacgatctcaacggtttctcaacgacccaggacacttactgtggggagatcgaccagaggcccaattgggaagccaggctggggagcggttccagactacaacgaccctggctaaacattcccccttgcatttcagaccaccctcctag

SEQ ID NO: 76992 - DNA, 435 bp, Artificial Sequence
  derived and/or modified sequence
atggccggtcccgtaaaagacagagaagcctttcaacgactgaattttctctaccaggctgcacattgtgtgctggcccaggaccccgagaaccaagcgctggccaggttctactgttatacagaaaggactatcgccaagagactcgtactccggcgtgatccctccgtgaagagaactctgtgccggggatgctcatccctcctggtccctggccttacgtgcacccagaggcagcggagatgccggggacagcgctggacggtgcaaacttgtctaacctgtcagaggagtcaaaggtttttaaacgatcctggtcacttactctggggggatagaccggaggctcaactgggctcacaggccggtgaacggtttcagaccactaccacactcgcaaagcatagcccacttcattttaggcctccctcttag

SEQ ID NO: 76993 - DNA, 435 bp, Artificial Sequence
  derived and/or modified sequence
atggcaggaccagttaaggaccgcgaagcatttcagcgcttgaattttctgtaccaagctgcccactgtgtcctcgcgcaagatcctgaaaaccaagcacttgccaggttctattgctataccgagcgcaccatcgccaagcgtctggtgcttcggagggacccgagcgtcaaacgtacattgtgcagaggatgttcctcactgctggtccctggactgacttgtacacataggcaacgaagatgccgcggacagaggtggaccgtccaaacttgtctgacttgccagaggtcacagagattcctcaatgaccctgggcacctcctgtggggtgaccgcccagaggcacagctaggatcccaggcgggtgagcgatttcagactaccactacattagctaagcatagcccactccacttccgcccaccctcttag

SEQ ID NO: 76994 - DNA, 522 bp, Artificial Sequence
  derived and/or modified sequence
gtgatggcggggccggtgaaggaccgcgaggccttccagaggctcaacttcctgtaccaggccgcccattgtgtccttgcccaggaccccgagaaccaggcgctggcgaggttttactgctacactgagaggaccattgcgaagcggctcgtcttgcggcgagatccctcggtgaagaggactctctgtcgaggctgctcttccctcctcgtcccgggcctcacctgcacccagcgccagagacgctgcaggggacagcgctggaccgtacagacctgcctaacatgccagcgcagccaacgcttcctcaatgatcccgggcatttactctggggagacaggcctgaggcccagctcgggagccaagcaggtgagagattccaaaccactacaacccttgccaaacacagcccactccatttcagaccgccttcctgaggagaaaatgcagactcagggttccagtaaccagtgatggattcaccccatctcccaaataaagtttacttgttttacattcca

SEQ ID NO: 76995 - DNA, 522 bp, Artificial Sequence
  derived and/or modified sequence
gtgatggcggggccggtgaaggaccgcgaggccttccagaggctcaacttcctgtaccaggccgcccattgtgtccttgcccaggaccccgagaaccaggcgctggcgaggttttactgctacactgagaggaccattgcgaagcggctcgtcttgcggcgggatccctcggtgaagaggactctctgtcgaggctgctcttccctcctcgtcccgggcctcacctgcacccaccgccagagacgctgcaggggacagcgctggaccgtacagacctgcctaacatgccagcgcagccaacgcttcctcaatgatcccgggcatttactctggggagacaggcctgaggcccagctcgggagccaagcaggtgagagattccaaaccactacaacccttgccaaacacagcccactccatttcagaccgccttcctgaggagaaaatgcagactcagggttccagtaaccagtgatggattcaccccatctcccaaataaagtttacttgttttacattcca

SEQ ID NO: 76996 - DNA, 522 bp, Artificial Sequence
  derived and/or modified sequence
gtgatggcggggccggtgaaggaccgcgaggccttccagaggctcaacttcctgtaccaggccgcccattgtgtccttgcccaggaccccgagaaccaggcgctggcgaggttttactgctacactgagaggaccattgcgaagcggctcgtcttgcggcgggatccctcggtgaagaggactctctgtcgaggctgctcttccctcctcgtcccgggcctcacctgcacccagcgccagagacgctgcaggggacagcgctggaccgtacagacctgcctaacatgccagcgcagccaacgcttcctcaatgatcccgggcatttactctggggagacaggcctgaggcccagctcgggagccaagcaggtgagagattccaaaccactacaacccttgccaaacacagcccactccatttcagaccgccttcctgaggagaaaatgcagacgaagggttccagtaaccagtgatggattcacctcatctcccaaataaagtttacttgttttacattcca

SEQ ID NO: 76997 - DNA, 522 bp, Artificial Sequence
  derived and/or modified sequence
gtgatggcggggccggtgaaggaccgcgaggccttccagaggctcaacttcctgtaccaggccgcccattgtgtccttgcccaggaccccgagaaccaggcgctggcgaggttttactgctacactgagaggaccattgcgaagcggctcgtcttgcggcgggatccctcggtgaagaggactctctgtcgaggctgctcttccctcctcgtcccgggcctcacctgcacccagcgccagagacgctgcaggggacagcgctggaccgtacagacctgcctaacatgccagcgcagccaacgcttcctcaatgatcccgggcatttactctggggagacaggcctgaggcccagctcgggagccaagcaggtgagagattccaaaccactacaacccttgccaaacacagcccactccatttcagaccgccttcctgaggagaaaatgcagactcagggttccagtaaccagtgatggattcaccccatctcccaaataaagtttacttgttttacattcca

SEQ ID NO: 76998 - DNA, 435 bp, Artificial Sequence
  derived and/or modified sequence
atggccggccccgtgaaggacagagaggccttccagagactgaacttcctgtaccaggccgcccactgcgtgctggcccaggaccccgagaaccaggccctggccagattctactgctacaccgagagaaccatcgccaagagactggtgctgagaagagaccccagcgtgaagagaaccctgtgcagaggctgcagcagcctgctggtgcccggcctgacctgcacccagagacagagaagatgcagaggccagagatggaccgtgcagacctgcctgacctgccagagaagccagagattcctgaacgaccccggccacctgctgtggggcgacagacccgaggcccagctgggcagccaggccggcgagagattccagaccaccaccaccctggccaagcacagccccctgcacttcagaccccccagctag

SEQ ID NO: 76999 - DNA, 435 bp, Artificial Sequence
  derived and/or modified sequence
atggccggccccgtgaaggacagagaggccttccagagactgaacttcctgtaccaggccgcccactgcgtgctggcccaggaccccgagaaccaggccctggccagattctactgctacaccgagagaaccatcgccaagagactggtgctgagaagagaccccagcgtgaagagaaccctgtgcagaggctgcagcagcctgctggtgcccggcctgacctgcacccacagacagagaagatgcagaggccagagatggaccgtgcagacctgcctgacctgccagagaagccagagattcctgaacgaccccggccacctgctgtggggcgacagacccgaggcccagctgggcagccaggccggcgagagattccagaccaccaccaccctggccaagcacagccccctgcacttcagaccccccagctag

SEQ ID NO: 77000 - DNA, 1212 bp, Artificial Sequence
  derived and/or modified sequence
atgacccaactctgcgagctcatcaacaaatctggggagctattggcgaaaaacctgtcacatttagacaccgttctcggcgcactggatgtgcaggagcattctttgggcgttctcgccgtattgtttgtgaaattctccatgccctccgtgcccgactttgaaactctcttttcacaggtgcagctcttcatctctacatgcaacggcgagcacatcaggtacgcgactgacacgttcgcagggctctgtcatcagctgaccaatgccctcgtggaacggaagcaacctctgagaggaatcggtattctgaaacaagctatcgacaaaatgcagatgaatacaaaccagctgaccagcatccatgctgacctatgccagctgtgtctactggcgaagtgtttcaaaccggctcttccctatctggacgtggatatgatggatatttgcaaagagaacggcgcatatgatgcgaaacatttcctatgttattactattatggcggcatgatctataccgggttaaagaatttcgaacgggccttatacttctacgagcaggccatcactactcccgccatggccgtgagccacattatgcttgagagctacaagaagtatatcctcgtttccttgatccttttgggcaaggtacagcagttaccaaagtatacaagccagattgttggacggttcataaagccgttgagcaacgcctaccacgagctggctcaggtatatagcacaaataacccttctgagctaaggaacttagttaataaacactctgagactttcaccagagacaataacatgggccttgtgaagcaatgcctgagcagcctgtataagaaaaatatccaaaggctgacgaaaacattcctgaccctgtcattacaagacatggcatcacgagtgcagctgtctggaccacaggaagcggagaaatacgttcttcacatgatagaggacggcgagatctttgccagcattaatcagaaagacgggatggtgagctttcatgataaccctgaaaaatataataacccggctatgctccacaacatagaccaggagatgctgaaatgcattgaactggatgaacggctgaaggccatggatcaggaaatcacagtgaatcctcagttcgttcagaagagtatggggtcccaggaggatgactccggcaataagccctcgtcctatagctag

SEQ ID NO: 77001 - DNA, 1212 bp, Artificial Sequence
  derived and/or modified sequence
atgacccagctgtgtgagctgatcaacaagtctggagagctgctggccaagaacctgagccacctggacacagtgctgggcgccctggatgtgcaggagcacagcctgggcgtgctggccgtgctgtttgtgaagttctccatgcccagcgtgcctgactttgagaccctcttcagccaggtgcagctgttcatcagcacctgcaatggagagcacatccgctatgccacagacacctttgctggcctgtgccaccagctgaccaatgccctggtggagaggaagcagcccctgcggggcatcggcatcctgaagcaggccatcgacaagatgcagatgaacaccaaccagctgaccagcatccatgctgacctgtgccagctgtgcctgctggccaagtgcttcaagccagccctgccctacctggatgtggacatgatggacatctgcaaggaaaatggagcctatgatgccaagcacttcctgtgctactactactatggaggcatgatctacacaggcctgaagaactttgagcgggccctgtacttctatgagcaggccatcaccaccccagccatggctgtgagccacatcatgctggagagctacaagaagtacatcctggtgtccctcatcctgctgggcaaggtgcagcagctgcccaagtacaccagccagatcgtgggccgcttcatcaagcccctgagcaatgcctaccacgagctggcccaggtgtacagcaccaacaaccccagcgagctgaggaacctggtgaacaagcacagcgagaccttcacccgggacaacaacatgggcctggtgaagcagtgcctgagcagcctgtacaagaagaacatccagaggctgaccaagaccttcctgaccctgagcctgcaggacatggccagccgggtgcagctgagcggcccccaggaggccgagaagtatgtgctgcacatgattgaagatggagagatctttgccagcatcaaccagaaggatggcatggtgtccttccatgacaaccctgagaagtacaacaacccagccatgctgcacaacatcgaccaggagatgctgaagtgcatcgagctggatgagcggctgaaggccatggaccaggagatcaccgtgaacccccagtttgtgcagaagtccatgggcagccaggaggatgattctggcaacaagcccagcagctacagctag

SEQ ID NO: 77002 - DNA, 1212 bp, Artificial Sequence
  derived and/or modified sequence
atgacccagctgtgcgagctgatcaacaagagcggcgagctgctggcgaagaacctgtcccaccttgatacagtgctgggcgcacttgatgtacaggagcacagcttgggcgtactggcagtattgttcgtgaaattctcgatgccatcagtccccgacttcgaaacactgttttcccaagtgcaattgtttatttctacatgcaacggagaacatattagatatgccaccgacacatttgccggtctctgccatcagcttacaaacgcacttgtcgaaaggaagcagccccttagaggcatcggaatcctcaaacaagctatcgacaagatgcagatgaatacaaaccaactgactagtattcacgcagatctttgtcagttgtgtctgctggctaaatgtttcaaacccgcgctgccctatctagatgtggacatgatggatatctgtaaagagaatggggcgtacgatgctaagcacttcctgtgttactattattacggaggaatgatctacactgggcttaagaatttcgaacgcgcactgtatttctatgaacaggctatcaccacccccgccatggccgtcagccacattatgctggagtcttataagaaatatatccttgtcagtttgatcctactgggaaaggtgcaacaactgcccaaatacacttcccagatcgttggccgctttattaagccactgtccaacgcttaccacgaattggcccaggtatatagtacgaataatccctctgagctcaggaatctggtgaataaacacagcgagacgttcacacgggacaataacatgggtcttgtgaaacagtgcttaagctctttatacaagaagaacattcaacggctgacgaagaccttcttgactctgtcactgcaggatatggctagtagggtccagctgtcaggcccgcaagaggccgagaagtacgtgctgcatatgattgaagacggggagatttttgcctctataaaccagaaggacggaatggtctcctttcacgataatccggaaaagtataataatccggccatgctacacaatatcgaccaagaaatgctgaaatgtatagaactcgacgaacgattgaaggccatggaccaggaaattacggtcaacccacagtttgtgcaaaaatccatgggaagtcaagaggacgattcggggaacaagccttcaagctattcttag

SEQ ID NO: 77003 - DNA, 1212 bp, Artificial Sequence
  derived and/or modified sequence
atgactcagctgtgcgagctgatcaataagagcggtgaactcctagccaagaatctcagtcatttagacactgtgttgggggcactcgatgtgcaggagcacagtctgggagttctcgccgtgctgtttgttaagtttagtatgccatcagtgcctgattttgaaacgctgttttcacaggtgcagttgtttatttctacgtgcaatggagaacatatccggtacgcaacagacacatttgccggtttgtgtcatcagcttacgaacgccctggtggagagaaagcaacctctccggggaattgggatccttaagcaggcaattgacaagatgcaaatgaacaccaaccagctcacaagcattcacgccgatttatgtcagctgtgcctgttggcaaagtgcttcaagcccgcacttccctacctagatgttgacatgatggacatctgtaaggaaaatggggcatacgatgccaagcatttcctatgctattactactacggtggtatgatctacacaggactgaagaactttgaaagggccctgtacttctatgagcaggcaatcaccacccccgcaatggcagtgtctcacatcatgctggagagctacaagaagtatattttggtatcactgattctgctgggtaaggtgcagcagctgcccaaatacacaagccagatcgtgggcagattcattaagcccctgtccaatgcctatcacgaattagcccaggtctattcaacaaataatccttccgagctcagaaatctggtgaacaagcattcagagactttcaccagagataataacatgggcctggtgaagcagtgcctcagctcgctgtataaaaaaaatatccagcgactcaccaaaaccttcctgaccctgtccctgcaagatatggcatcccgagtgcagctcagcggtccacaagaagcagagaaatatgtattgcacatgattgaggacggggagattttcgcaagcatcaaccagaaggacggtatggtgtcatttcacgacaacccagagaaatataacaaccccgctatgttacataacatagaccaagagatgctgaaatgtatcgaattagacgagcggctgaaagccatggatcaggagataaccgtgaacccccagtttgtgcaaaaatcaatggggtctcaggaggacgactctggcaacaagccatccagttactcgtag

SEQ ID NO: 77004 - DNA, 1212 bp, Artificial Sequence
  derived and/or modified sequence
atgacccagctgtgcgagctgatcaacaagagcggcgagctgctggccaagaacctgagccacctggacaccgtgctgggcgccctggacgtgcaggagcacagcctgggcgtgctggccgtgctgttcgtgaagttcagcatgcccagcgtgcccgacttcgagaccctgttcagccaggtgcagctgttcatcagcacctgcaacggcgagcacatcagatacgccaccgacaccttcgccggcctgtgccaccagctgaccaacgccctggtggagagaaagcagcccctgagaggcatcggcatcctgaagcaggccatcgacaagatgcagatgaacaccaaccagctgaccagcatccacgccgacctgtgccagctgtgcctgctggccaagtgcttcaagcccgccctgccctacctggacgtggacatgatggacatctgcaaggagaacggcgcctacgacgccaagcacttcctgtgctactactactacggcggcatgatctacaccggcctgaagaacttcgagagagccctgtacttctacgagcaggccatcaccacccccgccatggccgtgagccacatcatgctggagagctacaagaagtacatcctggtgagcctgatcctgctgggcaaggtgcagcagctgcccaagtacaccagccagatcgtgggcagattcatcaagcccctgagcaacgcctaccacgagctggcccaggtgtacagcaccaacaaccccagcgagctgagaaacctggtgaacaagcacagcgagaccttcaccagagacaacaacatgggcctggtgaagcagtgcctgagcagcctgtacaagaagaacatccagagactgaccaagaccttcctgaccctgagcctgcaggacatggccagcagagtgcagctgagcggcccccaggaggccgagaagtacgtgctgcacatgatcgaggacggcgagatcttcgccagcatcaaccagaaggacggcatggtgagcttccacgacaaccccgagaagtacaacaaccccgccatgctgcacaacatcgaccaggagatgctgaagtgcatcgagctggacgagagactgaaggccatggaccaggagatcaccgtgaacccccagttcgtgcagaagagcatgggcagccaggaggacgacagcggcaacaagcccagcagctacagctag

SEQ ID NO: 77005 - protein, 1024 aa, Artificial Sequence
  derived and/or modified sequence
MNFIKDNSRALIQRMGMTVIKQITDDLFVWNVLNREEVNIICCEKVEQDAARGIIHMILKKGSESCNLFLKSLKEWNYPLFQDLNGQSLFHQTSEGDLDDLAQDLKDLYHTPSFLNFYPLGEDIDIIFNLKSTFTEPVLWRKDQHHHRVEQLTLNGLLQALQSPCIIEGESGKGKSTLLQRIAMLWGSGKCKALTKFKFVFFLRLSRAQGGLFETLCDQLLDIPGTIRKQTFMAMLLKLRQRVLFLLDGYNEFKPQNCPEIEALIKENHRFKNMVIVTTTTECLRHIRQFGALTAEVGDMTEDSAQALIREVLIKELAEGLLLQIQKSRCLRNLMKTPLFVVITCAIQMGESEFHSHTQTTLFHTFYDLLIQKNKHKHKGVAASDFIRSLDHCGDLALEGVFSHKFDFELQDVSSVNEDVLLTTGLLCKYTAQRFKPKYKFFHKSFQEYTAGRRLSSLLTSHEPEEVTKGNGYLQKMVSISDITSTYSSLLRYTCGSSVEATRAVMKHLAAVYQHGCLLGLSIAKRPLWRQESLQSVKNTTEQEILKAININSFVECGIHLYQESTSKSALSQEFEAFFQGKSLYINSGNIPDYLFDFFEHLPNCASALDFIKLDFYGGAMASWEKAAEDTGGIHMEEAPETYIPSRAVSLFFNWKQEFRTLEVTLRDFSKLNKQDIRYLGKIFSSATSLRLQIKRCAGVAGSLSLVLSTCKNIYSLMVEASPLTIEDERHITSVTNLKTLSIHDLQNQRLPGGLTDSLGNLKNLTKLIMDNIKMNEEDAIKLAEGLKNLKKMCLFHLTHLSDIGEGMDYIVKSLSSEPCDLEEIQLVSCCLSANAVKILAQNLHNLVKLSILDLSENYLEKDGNEALHELIDRMNVLEQLTALMLPWGCDVQGSLSSLLKHLEEVPQLVKLGLKNWRLTDTEIRILGAFFGKNPLKNFQQLNLAGNRVSSDGWLAFMGVFENLKQLVFFDFSTKEFLPDPALVRKLSQVLSKLTFLQEARLVGWQFDDDDLSVITGAFKLVTA

SEQ ID NO: 77006 - DNA, 3075 bp, Artificial Sequence
  derived and/or modified sequence
atgaacttcatcaaggacaacagcagagccctgatccagagaatgggcatgaccgtgatcaagcagatcaccgacgacctgttcgtgtggaacgtgctgaacagagaggaggtgaacatcatctgctgcgagaaggtggagcaggacgccgccagaggcatcatccacatgatcctgaagaagggcagcgagagctgcaacctgttcctgaagagcctgaaggagtggaactaccccctgttccaggacctgaacggccagagcctgttccaccagaccagcgagggcgacctggacgacctggcccaggacctgaaggacctgtaccacacccccagcttcctgaacttctaccccctgggcgaggacatcgacatcatcttcaacctgaagagcaccttcaccgagcccgtgctgtggagaaaggaccagcaccaccacagagtggagcagctgaccctgaacggcctgctgcaggccctgcagagcccctgcatcatcgagggcgagagcggcaagggcaagagcaccctgctgcagagaatcgccatgctgtggggcagcggcaagtgcaaggccctgaccaagttcaagttcgtgttcttcctgagactgagcagagcccagggcggcctgttcgagaccctgtgcgaccagctgctggacatccccggcaccatcagaaagcagaccttcatggccatgctgctgaagctgagacagagagtgctgttcctgctggacggctacaacgagttcaagccccagaactgccccgagatcgaggccctgatcaaggagaaccacagattcaagaacatggtgatcgtgaccaccaccaccgagtgcctgagacacatcagacagttcggcgccctgaccgccgaggtgggcgacatgaccgaggacagcgcccaggccctgatcagagaggtgctgatcaaggagctggccgagggcctgctgctgcagatccagaagagcagatgcctgagaaacctgatgaagacccccctgttcgtggtgatcacctgcgccatccagatgggcgagagcgagttccacagccacacccagaccaccctgttccacaccttctacgacctgctgatccagaagaacaagcacaagcacaagggcgtggccgccagcgacttcatcagaagcctggaccactgcggcgacctggccctggagggcgtgttcagccacaagttcgacttcgagctgcaggacgtgagcagcgtgaacgaggacgtgctgctgaccaccggcctgctgtgcaagtacaccgcccagagattcaagcccaagtacaagttcttccacaagagcttccaggagtacaccgccggcagaagactgagcagcctgctgaccagccacgagcccgaggaggtgaccaagggcaacggctacctgcagaagatggtgagcatcagcgacatcaccagcacctacagcagcctgctgagatacacctgcggcagcagcgtggaggccaccagagccgtgatgaagcacctggccgccgtgtaccagcacggctgcctgctgggcctgagcatcgccaagagacccctgtggagacaggagagcctgcagagcgtgaagaacaccaccgagcaggagatcctgaaggccatcaacatcaacagcttcgtggagtgcggcatccacctgtaccaggagagcaccagcaagagcgccctgagccaggagttcgaggccttcttccagggcaagagcctgtacatcaacagcggcaacatccccgactacctgttcgacttcttcgagcacctgcccaactgcgccagcgccctggacttcatcaagctggacttctacggcggcgccatggccagctgggagaaggccgccgaggacaccggcggcatccacatggaggaggcccccgagacctacatccccagcagagccgtgagcctgttcttcaactggaagcaggagttcagaaccctggaggtgaccctgagagacttcagcaagctgaacaagcaggacatcagatacctgggcaagatcttcagcagcgccaccagcctgagactgcagatcaagagatgcgccggcgtggccggcagcctgagcctggtgctgagcacctgcaagaacatctacagcctgatggtggaggccagccccctgaccatcgaggacgagagacacatcaccagcgtgaccaacctgaagaccctgagcatccacgacctgcagaaccagagactgcccggcggcctgaccgacagcctgggcaacctgaagaacctgaccaagctgatcatggacaacatcaagatgaacgaggaggacgccatcaagctggccgagggcctgaagaacctgaagaagatgtgcctgttccacctgacccacctgagcgacatcggcgagggcatggactacatcgtgaagagcctgagcagcgagccctgcgacctggaggagatccagctggtgagctgctgcctgagcgccaacgccgtgaagatcctggcccagaacctgcacaacctggtgaagctgagcatcctggacctgagcgagaactacctggagaaggacggcaacgaggccctgcacgagctgatcgacagaatgaacgtgctggagcagctgaccgccctgatgctgccctggggctgcgacgtgcagggcagcctgagcagcctgctgaagcacctggaggaggtgccccagctggtgaagctgggcctgaagaactggagactgaccgacaccgagatcagaatcctgggcgccttcttcggcaagaaccccctgaagaacttccagcagctgaacctggccggcaacagagtgagcagcgacggctggctggccttcatgggcgtgttcgagaacctgaagcagctggtgttcttcgacttcagcaccaaggagttcctgcccgaccccgccctggtgagaaagctgagccaggtgctgagcaagctgaccttcctgcaggaggccagactggtgggctggcagttcgacgacgacgacctgagcgtgatcaccggcgccttcaagctggtgaccgcctag

SEQ ID NO: 77007 - DNA, 3075 bp, Artificial Sequence
  derived and/or modified sequence
atgaatttcatcaaggacaattctagagccctcatccaaaggatgggtatgaccgtgatcaagcagattacagatgatcttttcgtttggaacgtcctcaatagagaggaggtgaatattatatgttgcgagaaagtggagcaggatgcagccagggggataatccatatgattctgaaaaagggaagcgagtcctgtaatctgttcctgaagagtctgaaggagtggaattatcccctgtttcaagacttgaacggccagtccctcttccaccagacctctgagggcgatctggatgatcttgcacaggacctgaaggacctttaccatacacccagcttcctgaacttctaccccctgggtgaggatatcgacattatcttcaacttaaagtccacatttacagagccggtcttgtggagaaaggaccagcaccaccatcgtgttgaacaactgaccctgaacggcctgctgcaagcgctgcaatcaccctgcatcattgaaggagagtccgggaagggcaagtcgactttgctacagagaattgccatgctgtggggctctgggaagtgcaaagctctgacaaagtttaagtttgtgttctttctgagactttcccgagcccaaggaggactgttcgaaactctctgtgaccaactgttggacatacctggcaccattaggaaacagactttcatggctatgctgcttaagctgagacagagggtgctttttctactggacgggtataatgaattcaaaccacagaattgtccggagattgaggccctcattaaggagaaccataggtttaagaacatggtgatcgtgactaccacgactgaatgcttacgccatataaggcagttcggagcactgactgcagaagtgggagacatgactgaagactccgctcaggcccttattcgggaagtcctgataaaagagctcgccgaaggactcctcctgcagatccaaaaatcccgctgcctcagaaatctcatgaaaactccacttttcgtggtgataacttgcgctatccagatgggcgagagtgagttccacagtcacacccagaccacattgttccataccttctacgacctcttaatccagaagaacaagcacaagcacaaaggggttgccgcttcagactttattaggtccctggatcactgtggtgatttagcactcgagggggtgttctctcacaaattcgacttcgagttgcaagacgtgagctccgtgaacgaggacgtcctgttaaccaccggtctgctgtgcaagtataccgcccagcgcttcaagccaaagtataagttcttccacaaatcttttcaggaatacaccgcaggcaggagactatcatctctgttgaccagccatgaacccgaggaggtgactaaaggtaatggctacctgcaaaagatggtttctatctcagacatcacatccacatatagctctctcctccgctacacatgcggtagctccgtggaagcaacccgggctgtgatgaaacacctggcggccgtgtaccaacacggctgtctccttgggctctccatcgctaagagacctttgtggagacaggagtcgctacagtccgtcaaaaacactacagagcaggaaatcttaaaagccatcaacatcaacagtttcgtagagtgcggcatccacttgtaccaggagtccactagtaaatccgccctctcccaggaatttgaggcttttttccagggaaagtccctttacatcaactctggcaacattccagactacttatttgatttcttcgaacatttaccaaattgtgcatcagctctggacttcataaaactggacttctacgggggagctatggcaagttgggagaaggcggcagaagacaccgggggaattcacatggaggaagccccagaaacttatatcccgtctagagctgtctccctgttctttaattggaagcaagaattccgtaccctggaggtaactctgcgagatttctctaaactgaataaacaagacatccgctacctcggcaaaatcttttcttcggccacgtccctgcgtcttcagatcaaaaggtgtgcaggagtcgccggctctctcagcctagtcctctctacctgtaagaatatttactcccttatggttgaggcgtcaccattgacgattgaggatgagcggcatattaccagcgtcacaaacctaaagaccttatccatacacgacctgcaaaaccagcgtctacctggcgggctgactgattctttggggaatctaaaaaatctgaccaagttaattatggacaacataaagatgaacgaagaggatgctataaagctggcagagggacttaagaacctaaagaagatgtgcctgttccaccttactcacctgagtgatatcggcgagggcatggactacatcgtgaaaagcctctcctcagagccgtgtgaccttgaggaaattcagttggtgagttgttgcttaagcgctaacgccgtgaaaatacttgcccagaatctgcacaatcttgtgaagctcagtatcttggacttgagtgaaaattatctcgagaaggacggcaacgaggctctgcacgaactgatcgatcgcatgaacgttttagagcagctgaccgcactcatgctcccctggggctgcgatgtccagggctccctgagtagcttgttaaaacatcttgaggaggtcccgcagctggttaaactgggcctgaaaaactggagactcacagacaccgaaatccgcatcctgggagcattttttggaaagaacccccttaagaacttccagcagctgaaccttgccggaaacagggtgagtagtgatggctggttggcctttatgggggtgttcgagaatttgaaacagctggtcttctttgattttagcaccaaggaatttctgcctgacccggctctcgtgagaaagttgtcccaggtcctttcaaagctaacttttcttcaagaggctcggctcgtgggttggcagtttgatgacgatgatctgtccgtgatcaccggagccttcaagctcgttactgcatag

SEQ ID NO: 77008 - DNA, 3359 bp, Artificial Sequence
  derived and/or modified sequence
tgtttatactccggagggtgtccccgtgcgtcatcggtggagtggaccaaaactggtgatctgtttgccctgtgtgaccttgcccagaaccctgctgactgagagaacacatctgctggaagtcctctgggattcaaggtacagggaatgaagagtagttttacagaaaaaagaggacaatattgggatcacctttgacctttccatttggaaataatattttctattgtgttatagaaaggtgggaagctttcatccagaacaatgaatttcataaaggacaatagccgagcccttattcaaagaatgggaatgactgttataaagcaaatcacagatgacctatttgtatggaatgttctgaatcgcgaagaagtaaacatcatttgctgcgagaaggtggagcaggatgctgctagagggatcattcacatgattttgaaaaagggttcagagtcctgtaacctctttcttaaatcccttaaggagtggaactatcctctatttcaggacttgaatggacaaagtctttttcatcagacatcagaaggagacttggacgatttggctcaggatttaaaggacttgtaccataccccatcttttctgaacttttatccccttggtgaagatattgacattatttttaacttgaaaagcaccttcacagaacctgtcctgtggaggaaggaccaacaccatcaccgcgtggagcagctgaccctgaatggcctcctgcaggctcttcagagcccctgcatcattgaaggggaatctggcaaaggcaagtccactctgctgcagcgaattgccatgctctggggctccggaaagtgcaaggctctgaccaagttcaaattcgtcttcttcctccgtctcagcagggcccagggtggactttttgaaaccctctgtgatcaactcctggatatacctggcacaatcaggaagcagacattcatggccatgctgctgaagctgcggcagagggttcttttccttcttgatggctacaatgaattcaagccccagaactgcccagaaatcgaagccctgataaaggaaaaccaccgcttcaagaacatggtcatcgtcaccactaccactgagtgcctgaggcacatacggcagtttggtgccctgactgctgaggtgggggatatgacagaagacagcgcccaggctctcatccgagaagtgctgatcaaggagcttgctgaaggcttgttgctccaaattcagaaatccaggtgcttgaggaatctcatgaagacccctctctttgtggtcatcacttgtgcaatccagatgggtgaaagtgagttccactctcacacacaaacaacgctgttccataccttctatgatctgttgatacagaaaaacaaacacaaacataaaggtgtggctgcaagtgacttcattcggagcctggaccactgtggagacctagctctggagggtgtgttctcccacaagtttgatttcgaactgcaggatgtgtccagcgtgaatgaggatgtcctgctgacaactgggctcctctgtaaatatacagctcaaaggttcaagccaaagtataaattctttcacaagtcattccaggagtacacagcaggacgaagactcagcagtttattgacgtctcatgagccagaggaggtgaccaaggggaatggttacttgcagaaaatggtttccatttcggacattacatccacttatagcagcctgctccggtacacctgtgggtcatctgtggaagccaccagggctgttatgaagcacctcgcagcagtgtatcaacacggctgccttctcggactttccatcgccaagaggcctctctggagacaggaatctttgcaaagtgtgaaaaacaccactgagcaagaaattctgaaagccataaacatcaattcctttgtagagtgtggcatccatttatatcaagagagtacatccaaatcagccctgagccaagaatttgaagctttctttcaaggtaaaagcttatatatcaactcagggaacatccccgattacttatttgacttctttgaacatttgcccaattgtgcaagtgccctggacttcattaaactggacttttatgggggagctatggcttcatgggaaaaggctgcagaagacacaggtggaatccacatggaagaggccccagaaacctacattcccagcagggctgtatctttgttcttcaactggaagcaggaattcaggactctggaggtcacactccgggatttcagcaagttgaataagcaagatatcagatatctggggaaaatattcagctctgccacaagcctcaggctgcaaataaagagatgtgctggtgtggctggaagcctcagtttggtcctcagcacctgtaagaacatttattctctcatggtggaagccagtcccctcaccatagaagatgagaggcacatcacatctgtaacaaacctgaaaaccttgagtattcatgacctacagaatcaacggctgccgggtggtctgactgacagcttgggtaacttgaagaaccttacaaagctcataatggataacataaagatgaatgaagaagatgctataaaactagctgaaggcctgaaaaacctgaagaagatgtgtttatttcatttgacccacttgtctgacattggagagggaatggattacatagtcaagtctctgtcaagtgaaccctgtgaccttgaagaaattcaattagtctcctgctgcttgtctgcaaatgcagtgaaaatcctagctcagaatcttcacaatttggtcaaactgagcattcttgatttatcagaaaattacctggaaaaagatggaaatgaagctcttcatgaactgatcgacaggatgaacgtgctagaacagctcaccgcactgatgctgccctggggctgtgacgtgcaaggcagcctgagcagcctgttgaaacatttggaggaggtcccacaactcgtcaagcttgggttgaaaaactggagactcacagatacagagattagaattttaggtgcattttttggaaagaaccctctgaaaaacttccagcagttgaatttggcgggaaatcgtgtgagcagtgatggatggcttgccttcatgggtgtatttgagaatcttaagcaattagtgttttttgactttagtactaaagaatttctacctgatccagcattagtcagaaaacttagccaagtgttatccaagttaacttttctgcaagaagctaggcttgttgggtggcaatttgatgatgatgatctcagtgttattacaggtgcttttaaactagtaactgcttaaataaagtgtactcgaagcca

SEQ ID NO: 77009 - DNA, 3075 bp, Artificial Sequence
  derived and/or modified sequence
atgaatttcatcaaggacaatagccgggccctgatccagcgcatgggcatgaccgtcatcaagcaaatcacagacgatctgttcgtctggaatgtgctgaatagagaagaggttaacatcatatgctgtgaaaaagtggagcaggacgctgctaggggaattattcatatgattcttaaaaaaggcagcgagtcttgcaatctctttctgaaatctttaaaagagtggaactatcccctgtttcaggatctcaatggacagtctttgttccaccagactagtgagggggatctggatgatcttgcgcaggatctcaaagacctgtatcacaccccgtcattcctaaacttttatcctctcggggaggatattgatatcatctttaaccttaagtcaaccttcactgaaccagtgctgtggagaaaagaccagcatcaccaccgcgtcgagcaattaactctgaatggactattacaagcattacagagcccttgcataatagagggtgagagcggaaaaggaaaaagcactctgctccaacgtattgccatgctgtgggggagcggtaaatgtaaagcactgacaaaatttaagttcgtgttcttcctcagactcagcagggcccagggcgggctgtttgagactctgtgcgatcagcttttggatattcccgggaccatccgcaagcagacatttatggctatgttgctgaaactaagacaaagggtgttgtttctgctggacgggtacaacgagttcaaaccgcaaaactgtcccgagatcgaagcgcttataaaggaaaaccaccggtttaaaaatatggttatcgtcactaccaccaccgaatgtcttcgtcacatccggcaattcggggctctcacggccgaggtcggggacatgacggaggactctgcccaggcattgattcgggaagtgttgattaaagagttagcagagggcttgctgctccagattcaaaagtcacgctgcctgaggaacttgatgaagactccccttttcgtcgttataacctgcgccattcaaatgggggagagtgagttccattctcatacacagactaccctattccatacattttatgatctactcatccagaaaaacaaacacaaacacaaaggcgttgctgctagcgacttcatacggagcctggaccattgtggcgaccttgcgctggagggagtctttagtcacaagtttgactttgaacttcaggacgtgagctcggttaatgaagacgttctcctgactactgggttgctgtgtaagtataccgcacaaaggttcaagccaaaatataagtttttccataagagtttccaggaatatacagcaggccgccgcctgtcaagcttgttaacttctcacgagccggaggaggtgactaaaggtaatgggtacctccagaagatggtctctatttccgacattacatctacctattccagccttctgcgatacacctgcgggtcctcagtcgaggctacgcgcgccgtaatgaagcacctggcagccgtgtatcagcacggttgccttctgggcctgagcattgctaagcgccccttatggcgtcaggagtcactccagtcggttaaaaacactacagaacaggaaatcctgaaagctattaatattaactcttttgtggaatgtgggatacacctgtatcaggagtctacatcaaagtctgctctctcccaggaatttgaggccttcttccagggcaagagtctttatataaactccggaaacataccagactatctgttcgacttttttgaacatttgcctaactgtgcttcagctctcgacttcatcaagcttgatttctacggtggagcaatggcaagctgggaaaaggctgctgaagatacaggaggtatccatatggaagaggctccagaaacctacatccctagccgcgcagtgtccctctttttcaactggaaacaggagttcagaaccctggaagtgacactacgggatttttctaagctaaacaaacaagatattcgatacttaggcaagatcttctcaagtgccacaagtttgagactccaaatcaaacgatgcgccggagtggccggcagtctgagcctggtcttgtccacctgcaaaaacatttactctctgatggttgaggcctcccccttgaccatcgaggacgagagacacatcactagcgtaaccaatctgaagactctttcgatccacgacttacaaaaccagcgcctgcctggcggccttaccgactccctcggtaatctgaagaatctaactaagctgattatggacaacattaagatgaatgaggaggatgctatcaagttagccgaaggccttaaaaacctcaagaagatgtgtctattccacttaacccacctgtcggacatcggagagggaatggattacatagtgaagtcactgtcctcggagccatgcgacctggaggagattcaactcgtttcttgctgtctgtccgcaaatgctgttaagatcctggcacagaatttacataacttagtcaaactaagtatactggatctgtctgagaattatctcgaaaaggacggcaacgaggccttacacgagctgattgaccgcatgaacgtgctggaacagttgacggctctcatgttgccatggggatgtgacgtgcagggctccttgtccagtctactgaagcatctggaggaggtcccgcaactcgtcaaacttgggctcaagaactggaggcttacagacacagagatcaggattctgggcgccttttttggtaaaaacccgcttaagaactttcagcagcttaacctagctggaaatagagtttctagcgatggatggctggcatttatgggagtctttgagaatctcaaacaactcgtcttcttcgattttagcactaaagagtttctgcccgatccagctttagtgaggaaactgtcccaggttctgagtaagctaacatttctccaggaagctcgcctggtgggctggcagtttgacgacgacgacctatctgtcataaccggcgccttcaaactcgtcactgcctag

SEQ ID NO: 77010 - DNA, 3075 bp, Artificial Sequence
  derived and/or modified sequence
atgaatttcatcaaagataattccagagccctcatccagcgaatgggaatgaccgttataaaacagattactgatgatttgttcgtgtggaacgtcttgaaccgagaagaagtgaatatcatttgttgcgagaaagtcgaacaggacgccgcccgcggcatcatacacatgatcttgaaaaagggatctgagagctgtaatctttttctgaaatcccttaaagaatggaattacccccttttccaggatcttaacggtcagagtctttttcaccagaccagtgaaggggatttagacgatttagcacaggatctgaaggatttgtaccacactccatcctttcttaacttctatccactcggagaagatatagatattattttcaatctcaaatcgacattcacagaaccagtgctctggagaaaggatcagcaccatcaccgagtagaacaattgacacttaacggactgctgcaggctcttcaaagcccgtgcataatcgagggtgaatcaggcaaaggaaaaagcacactgcttcagagaattgcaatgctctggggctctggaaaatgtaaggctctaactaagttcaaattcgtgttctttctgaggttatctcgcgcccagggaggcctttttgagacgctgtgtgatcagctcctggatattccagggactatccgtaaacagacgttcatggccatgttgctgaagctgcggcagcgggtcctttttctcttagacggatacaatgaatttaaaccacagaattgcccagagatcgaggcactgataaaagagaaccaccgcttcaagaatatggtgattgtgaccactaccactgagtgcctgagacacattcggcagttcggggcccttaccgcagaagtcggagacatgactgaagacagtgctcaggctctcatcagggaagtacttattaaggagctcgcggaaggtctgcttctccagatacagaagtcacgctgcctcagaaaccttatgaagactcctttgttcgtcgtaattacatgcgctatccagatgggggaatcggaatttcactcccacacccagacaacactgttccacacattctatgatctcctgattcagaagaacaagcacaagcataaaggcgtcgcagccagcgattttatccgttctctagaccactgcggagatctggcacttgaaggggtgttttcccacaaattcgacttcgagctgcaggacgtgagtagtgtgaacgaagacgtcctgctaactactggcctcctgtgcaaatataccgcccagagattcaagcccaaatataagtttttccacaaatctttccaggaatatacagcgggccggcgcttaagcagcctgctgacgagccacgaaccagaggaggtgacgaaaggaaacgggtatctgcaaaaaatggtatcaatctcggatataacctccacgtattcatccctgctgcggtatacatgcggtagctccgtcgaagcaacccgagccgtcatgaagcacctggccgctgtctatcagcatggatgtcttcttggcctgtccatcgctaagcggcctctgtggcgacaggaaagtttgcaaagtgtgaagaacaccaccgagcaggaaatcctgaaagctatcaatatcaactctttcgtggagtgtgggattcacctgtaccaggaaagcacgtccaaatcggcactgagccaggagttcgaggccttctttcagggcaaatccctttatatcaattctggaaacattcctgactatcttttcgatttcttcgagcatcttcctaattgcgcatccgccctcgactttattaagctggatttctacgggggagctatggctagctgggaaaaagccgctgaagatacgggaggaatccatatggaagaggcgccggaaacttatatcccctctagagccgtcagcctgttcttcaactggaaacaggagtttaggacccttgaagttacactaagggatttctcaaaactgaacaagcaagatatccgctatctgggtaagatctttagtagtgcaacgtcgcttaggctgcaaattaaacggtgcgctggtgttgccggctcccttagtctggtgctgagcacgtgtaagaatatttattctctgatggtggaagcttcgccgctgacgatagaagatgagcggcacatcactagcgttaccaatcttaagacgctctctattcacgaccttcagaaccagcgccttcccggaggcctcaccgacagtctcggaaatctgaaaaatctgacaaagctcattatggataatatcaagatgaacgaagaagatgcaatcaagcttgccgaggggttaaaaaatttaaaaaaaatgtgtctatttcaccttacacatctctcagatatcggagaaggaatggattatatcgtgaagtctctttccagtgagccatgcgatctcgaggagatccagttagtgtcgtgctgcctcagtgcgaatgccgtaaagatcctggcccagaatttgcataacctcgtcaaactttccatcctggatttgagcgagaattatttggaaaaagacgggaacgaggcccttcacgagctgatcgatcggatgaatgtattggaacagcttaccgctctcatgttgccttggggatgcgacgtgcagggatcccttagtagcctactcaaacacctggaggaggtaccccagttagtaaaactcggcctgaagaattggagactcacagataccgaaatcaggatcctgggcgcatttttcggaaaaaatccactgaagaatttccaacagttgaaccttgcaggcaatagggtttcttccgatggatggcttgcttttatgggcgtctttgagaacctgaaacaattggtattttttgacttctcaaccaaggaattcttgccagatcctgcattggtgcgcaaactatctcaggtcctttcaaagttgactttcttgcaggaggccagactggtgggctggcagttcgatgatgatgacctgtccgtaatcacaggagccttcaagctggtgacagcctag

SEQ ID NO: 77011 - DNA, 3075 bp, Artificial Sequence
  derived and/or modified sequence
atgaacttcatcaaggacaacagccgggccctgatccagaggatgggcatgaccgtcatcaagcagatcacagatgacctgtttgtgtggaatgtgctgaaccgggaggaggtgaacatcatctgctgtgagaaggtggagcaggatgctgcccggggcatcatccacatgatcctgaagaagggcagcgagagctgcaacctcttcctgaagagcctgaaggagtggaactaccccctcttccaggacctgaatggccagagcctcttccaccagaccagcgagggggacctggatgacctggcccaggacctgaaggacctgtaccacacccccagcttcctgaacttctaccccctgggggaggacatcgacatcatcttcaacctgaagagcaccttcacagagcctgtgctgtggaggaaggaccagcaccaccaccgggtggagcagctgaccctgaatggcctgctgcaggccctgcagagcccctgcatcattgaaggagagagcggcaagggcaagagcaccctgctgcagagaattgccatgctgtggggcagcggcaagtgcaaggccctgaccaagttcaagtttgtgttcttcctgcggctgagccgggcccagggcggcctgtttgagaccctgtgtgaccagctgctggacatccctggcaccatcaggaagcagaccttcatggccatgctgctgaagctgcggcagagggtgctcttcctgctggatggctacaatgagttcaagccccagaactgcccagaaattgaggccctgatcaaggagaaccaccgcttcaagaacatggtgattgtgaccaccaccacagagtgcctgcggcacatccggcagtttggagccctgacagctgaggtgggggacatgacagaggacagcgcccaggccctgatccgggaggtgctgatcaaggagctggccgagggcctgctgctgcagatccagaagagccgctgcctgaggaacctgatgaagacccccctgtttgtggtgatcacctgtgccatccagatgggagagagcgagttccacagccacacccagaccaccctcttccacaccttctatgacctgctgatccagaagaacaagcacaagcacaagggcgtggccgccagtgacttcatccgcagcctggaccactgtggggacctggccctggagggcgtcttcagccacaagtttgattttgagctgcaggatgtgtcctctgtgaatgaagatgtgctgctgaccaccggcctgctgtgcaagtacacagcccagcgcttcaagcccaagtacaagttcttccacaagagcttccaggagtacacagctggaagaaggctgagcagcctgctgaccagccatgagcctgaggaggtgaccaagggaaatggctacctgcagaagatggtgtccatcagtgacatcaccagcacctacagcagcctgctgcgctacacctgtggcagctctgtggaggccaccagggctgtgatgaagcacctggccgctgtgtaccagcacggctgcctgctgggcctgagcatcgccaagaggcccctgtggaggcaggagagcctgcagagcgtgaagaacaccacagagcaggagatcctgaaggccatcaacatcaacagctttgtggagtgtggcatccacctgtaccaggagagcaccagcaagagcgccctgagccaggagtttgaggccttcttccagggcaagagcctgtacatcaacagcggcaacatcccagactacctgtttgacttctttgagcacctgcccaactgtgccagcgccctggacttcatcaagctggacttctatggaggagccatggcctcctgggagaaggccgcagaagatactggaggcatccacatggaggaggcccctgagacctacatccccagcagagctgtgtccctcttcttcaactggaagcaggagttccgcaccctggaggtgaccctgcgggacttcagcaagctgaacaagcaggacatccgctacctgggcaagatcttcagcagcgccaccagcctgcggctgcagatcaagagatgtgccggcgtggccggcagcctgagcctggtgctgagcacctgcaagaacatctacagcctgatggtggaggccagccccctgaccattgaagatgagcggcacatcacctctgtgaccaacctgaagaccctgagcatccatgacctgcagaaccagaggctgcccggcggcctgacagacagcctgggcaacctgaagaacctgaccaagctgatcatggacaacatcaagatgaatgaggaggatgccatcaagctggccgagggcctgaagaacctgaagaagatgtgcctcttccacctgacccacctgagtgacatcggggagggcatggactacatcgtgaagagcctgagcagcgagccctgtgacctggaggagatccagctggtgtcctgctgcctgagcgccaatgctgtgaagatcctggcccagaacctgcacaacctggtgaagctgagcatcctggacctgtctgagaactacctggagaaggatggaaatgaggccctgcacgagctgattgacaggatgaatgtgctggagcagctgacagccctgatgctgccctggggctgtgatgtgcagggcagcctgagcagcctgctgaagcacctggaggaggtgccccagctggtgaagctgggcctgaagaactggaggctgacagacacagagatccgcatcctgggcgccttcttcggcaagaaccccctgaagaacttccagcagctgaacctggccggcaacagagtgtccagtgatggctggctggccttcatgggcgtgtttgagaacctgaagcagctggtgttctttgacttcagcaccaaggagttcctgcctgaccctgccctggtgaggaagctgagccaggtgctgagcaagctgaccttcctgcaggaggcccggctggtgggctggcagtttgatgatgatgacctgagcgtcatcaccggggccttcaagctggtgacagcctag

SEQ ID NO: 77012 - DNA, 3075 bp, Artificial Sequence
  derived and/or modified sequence
atgaacttcatcaaggacaacagccgggccctgatccagcggatgggcatgaccgtgattaagcagatcacagatgacctgtttgtatggaacgtgcttaatagggaggaagttaatattatttgctgtgaaaaagttgaacaggatgcagcaagaggcataatccatatgattttaaaaaaaggctcagagtcatgcaacctatttctgaagtccctgaaggagtggaactaccctctgttccaggatctgaatggccagagtctgttccatcagacttctgagggcgacctcgatgacctggcccaagatctaaaagacttataccacacccccagtttcctgaatttctatcctctgggtgaggatatcgatatcatcttcaatctgaagagcaccttcacagagcccgtgttgtggcgtaaggatcagcatcaccatagggtggaacagctgaccctcaatgggctgctgcaagcgttgcagtctccttgtatcatcgagggcgaatccggaaagggcaaaagcaccctcctgcagcgcattgccatgctttggggctctgggaagtgcaaggcactcaccaagtttaaatttgtgttctttctgaggctaagtcgggcccaaggcggcttatttgagacgctgtgcgatcaactgctggatatccctggcacaattaggaaacagacgtttatggccatgctgttgaaattgcgccaaagggttttgtttcttctagacgggtataatgagttcaaaccacagaactgccccgagatcgaggccttaatcaaagagaaccacagattcaaaaatatggttattgtgactacgactactgagtgcctgcgccacattcgacagtttggggccctgacagctgaagtgggcgatatgaccgaagatagtgctcaagcactcatcagggaggttctgatcaaggagctggcggaggggctgttgctgcagatacagaaatcacgttgtctgcgtaacctgatgaagacacctctctttgtggtaattacttgcgccattcagatgggggaaagtgagttccactcacatacccagaccactctgtttcacactttctacgatctcctgatccagaaaaataaacataaacataagggggttgcggcaagcgattttattagatctttagaccattgcggcgaccttgccttggaaggagttttttctcacaagttcgactttgagctgcaggacgtgtcatccgtgaacgaagacgtgctcctgacaactggattgctatgtaagtatacagcccaacggttcaagccaaagtacaagttctttcataaaagcttccaggaatatactgccggtcgtcggcttagctctttgcttactagtcatgaacctgaagaggttacaaaagggaatgggtacctccaaaaaatggtatccatctccgacattaccagtacctatagctcactcttgagatatacatgcggcagttcagtggaagccactcgcgcagtcatgaaacacctggccgctgtttaccagcatggctgtttactgggtctgtccattgcgaaacgacctctgtggcgccaagaatcactgcagtctgttaaaaacaccacggaacaggagatattaaaagccataaatatcaattcctttgtggagtgtggtatccatttgtatcaggaatcaacgtccaagtcagcactgtcccaggagtttgaggccttctttcaaggtaagtcactgtacatcaactccggcaatattcctgactatctcttcgacttttttgagcatctaccgaactgcgcttcagccttggacttcattaagctcgacttctacggaggtgccatggcatcctgggagaaagccgcagaggacacaggaggcatacacatggaagaagctccggaaacatacatcccctcccgtgccgtctccttgtttttcaattggaagcaggaatttcggacattggaggtaactctacgcgacttcagcaagctgaataaacaggatatccggtacctgggaaagattttcagtagtgcaacttcacttaggctgcaaattaagagatgtgcgggtgtggccggatccctctccctggtcttgtcaacatgcaagaatatttattcgttgatggtggaagcctctcccctcacaattgaggacgagcgtcatataactagcgtgacgaacctgaagactctctcaatccacgatctccagaaccagagactgccaggtggacttactgacagccttggaaacctcaaaaacctgacaaagctcattatggacaatatcaagatgaacgaagaggatgcaattaagctcgctgaggggctcaaaaacctgaagaagatgtgtctcttccatcttacacaccttagtgacattggcgagggtatggactacatcgtcaaatctctttctagcgaaccttgcgacttggaggaaatccaactggtttcatgttgtctgtcagcaaacgcagtgaaaattttagctcagaacctgcacaacctcgtgaaactgtctatcctggatttgagtgagaactacctggagaaagacggtaatgaggctctgcacgaactgatcgatcggatgaatgtgctagaacaactgacagccctcatgttgccatggggatgtgacgtccagggatccctatcttcccttctcaaacatctggaggaagtaccacaactcgttaagctcgggcttaagaattggcggctgacagataccgagatccggattcttggtgctttttttggaaagaatcctttgaaaaattttcagcagctcaacctagccgggaatcgcgtcagctcagatgggtggctggctttcatgggcgttttcgagaatttaaagcagctcgtatttttcgacttctcaactaaagaattcctgcccgaccctgccttagtcaggaagctcagtcaggtcttatcaaagctaaccttcctgcaagaggcccgactggttggttggcagtttgacgacgacgatctttctgtgattacgggcgccttcaagctcgtcaccgcctag

SEQ ID NO: 77013 - DNA, 3075 bp, Artificial Sequence
  derived and/or modified sequence
atgaacttcatcaaggacaacagccgggccctgatccagcggatgggcatgacggtgattaagcagattaccgacgacctcttcgtttggaatgtactgaacagggaggaggtgaatataatttgctgcgagaaggtggagcaagatgccgctagaggcattattcacatgattcttaaaaaaggttctgagtcgtgcaatctgttcctgaagagcttgaaggagtggaactaccccctattccaggacctgaacggccagtccttatttcaccagacctcagagggcgacctggatgatctagcgcaggatctcaaggacctgtatcacacaccttcttttctgaatttctaccccctgggcgaagatattgatataattttcaacctgaagtcaaccttcacggaacctgttctctggagaaaggaccagcaccaccacagagtagagcagcttactctgaatggcctgttacaggcgctgcaatccccttgtattatagagggggagtccggcaaaggcaagtccaccttacttcagcgcatcgcaatgctttggggatccgggaaatgtaaagcactcaccaaatttaaatttgtgttttttctccgtctcagtcgcgcccaagggggactctttgagacactgtgcgatcagctactagatataccaggcaccatccggaaacagacattcatggccatgctactgaagttgcgccagcgcgtgttgtttctcctggacggctacaatgagttcaaaccccaaaattgtcctgaaatcgaggctttaataaaggagaaccaccgttttaaaaacatggtcatagtcacgacgacaaccgaatgtctgagacacattaggcagtttggcgccctgactgcagaagtaggggacatgaccgaagacagcgctcaggccctcattcgagaggtcctcattaaagaactcgccgaaggattgctcctccagattcagaagtcccggtgtttacgtaatctgatgaagacacctctatttgtggttatcacctgcgctatccagatgggagagagtgaatttcattcacatacccaaacgaccctcttccatacattttacgacctgctaatccagaaaaacaaacacaaacacaagggagttgccgcctctgattttatccgatctctggaccactgcggggatttggccctggaaggcgtgttttcgcacaagttcgatttcgagcttcaggatgtatctagtgtcaatgaagatgtgctgttgacgactggcttactgtgtaaatacaccgctcagcgattcaaaccgaaatataaatttttccataagtcctttcaggaatacacggctggtagacggctctcatcccttctgacatctcatgagccagaagaggtgaccaaaggtaatggatatttgcaaaagatggtgtccatcagcgacatcactagtacatattcttcgctgttgcggtatacttgcggctcctcagtggaggctacccgggctgtgatgaagcacctagctgcagtataccagcatggatgcttgttgggactttcgattgccaagcgccctctgtggagacaggagtccctccagtccgtgaaaaacaccacggagcaggaaatcttaaaagctattaacatcaactccttcgtggaatgtgggattcacctctaccaggaaagtacgagcaagagcgccctgtcacaggaattcgaggccttcttccagggaaaatccctgtacattaactcaggaaatatccctgactatctctttgatttcttcgaacaccttcccaattgtgcttcagcgctggacttcattaagctggacttttacggcggcgcaatggcaagctgggaaaaagcagctgaagataccggaggaatccacatggaggaggcgccagaaacttacattccatccagagcggtctccctgttctttaactggaagcaggagttcagaacacttgaagttacactgagggacttctctaagctgaacaaacaagatatccgctacctaggaaagatcttttctagcgcgaccagtcttcggctgcagattaaaagatgtgccggggtggctggcagtctttctctcgtcctctccacatgtaagaatatatatagcctgatggtggaggccagtccactaaccattgaggatgagcggcacattacatcggtgacaaatctcaagactcttagcatacatgatttgcagaaccagagactccctggggggcttactgacagcctcggcaatttaaaaaacctgactaaattaatcatggataatatcaagatgaacgaagaagacgctatcaagctggcagaaggattaaagaacttaaagaagatgtgcctgtttcatctgactcacctttcagacattggcgaaggaatggactacattgtcaagagcctgtcgagtgaaccctgcgatttggaggagattcaactagtgtcctgctgtctgtctgccaatgcagtcaagatattggcgcagaacctgcacaacctggttaaattgtctatactggatctgagcgagaactatcttgaaaaagacgggaacgaagcgctgcatgaacttattgatcggatgaatgtgctggagcaactcacggctcttatgttgccatggggatgcgatgtccagggctcactgagcagtctgctgaaacatttagaggaagtcccacagttagtgaagctggggctgaagaattggagactcacagacacggagatcagaatcctgggcgccttctttgggaagaatccactgaagaatttccaacaactgaacttagccggcaaccgtgtgtcgtcggacgggtggctggccttcatgggtgtgttcgaaaatctgaaacagctggttttcttcgacttctcgacaaaggaattcctgccagatccagctctggttaggaagttaagccaggtactttccaaacttacctttctgcaggaggctagacttgttggctggcaatttgacgacgacgacctctctgtgatcacaggcgcattcaagctggtgactgcttag

SEQ ID NO: 77014 - DNA, 3075 bp, Artificial Sequence
  derived and/or modified sequence
atgaacttcatcaaggacaacagccgggccctgatccagcggatggggatgaccgtgattaaacaaatcaccgacgacctgttcgtctggaacgttcttaaccgcgaggaggtgaacattatttgctgcgagaaggtggagcaggacgccgcacgaggcatcattcacatgatcctcaaaaagggaagtgagtcatgcaatctgtttctgaagagcctcaaagaatggaattaccccttgtttcaagatttgaacggccagagtctgtttcaccagacctcggaaggcgacctggatgacctggcccaggatttgaaagacctgtaccacaccccctctttcctcaacttttacccattaggagaagatatcgatatcattttcaacttgaaaagcacgttcactgagcctgtcctctggagaaaggaccagcatcaccatcgtgtcgagcaacttacactgaatggtctactacaggcgctgcagagcccttgcattattgaaggtgagagcgggaagggtaagagcacactcttgcagaggatagcaatgctctggggaagcggcaaatgtaaagccttgacaaagttcaagttcgtgttctttctccgactctcacgggcacagggcgggctctttgaaaccttgtgcgaccagcttctggatatcccaggcactatccggaagcagacatttatggcaatgctgctgaaactgcggcaaagagtgcttttcctgcttgatgggtacaatgagttcaaacctcaaaactgcccagagattgaggctctgataaaggagaaccaccggtttaagaatatggtgatagtgacgaccacaacagaatgcttacgccacatcaggcagtttggcgctttgaccgctgaagtcggtgacatgacggaagactccgctcaggccctgatcagagaggtgcttattaaggagctggccgagggcctgctcctgcagatccagaagagccgatgtttacggaatttgatgaagaccccactgtttgtggtgatcacatgtgccattcagatgggcgaatccgagttccatagccacactcagactacgctgtttcacactttctacgacctactgattcagaagaacaagcacaagcataaaggagttgcagccagcgattttattcggtcgctcgaccattgcggagacctggcacttgaaggcgttttcagtcacaagtttgactttgaattacaggatgtgagttcagtgaacgaggatgtccttctaaccaccggcctcctgtgcaaatacaccgctcagcgtttcaaacctaagtacaaatttttccacaagagtttccaggagtacaccgcaggccgccgattaagcagcctgttaacgagccacgaacccgaagaggtgaccaagggaaatgggtatctgcaaaaaatggtctctatcagtgacattacatctacctattctagcctgctccgatatacctgcggctctagcgttgaggccactcgagctgtcatgaagcaccttgccgccgtttatcagcacggttgcctgctcggcctgagtattgccaagcgtcccttatggaggcaagaaagcttgcaaagcgtgaagaatactacggagcaggagatcttgaaggccatcaatatcaatagtttcgttgagtgtggtatacacctctatcaggaatcaactagtaaatccgctctttcccaggagttcgaggctttcttccagggtaagtcgctgtatataaattccggcaatatacccgattacctgttcgattttttcgagcatctgccgaactgcgcttccgccctcgattttatcaagctcgacttttacgggggagccatggcctcttgggagaaagccgccgaggatacgggtgggatccatatggaagaagccccagaaacctacataccaagcagagccgtcagcctgttttttaattggaagcaggaatttcgaacccttgaggtgacattacgagatttcagtaagctcaataagcaggacatccgctacctggggaaaattttttcgtcagccactagcctaaggttgcagatcaagcgctgcgccggtgtcgccggctcccttagcctggtccttagcacatgcaaaaatatttacagtttgatggtggaagcttctcctttgacgattgaggatgaacgacacatcacaagcgtgacgaacttaaagacacttagcatccatgatctgcagaatcagcgactgccaggtggcctaacagacagcctcgggaacctgaaaaacctcaccaaactcattatggacaacataaaaatgaatgaagaggacgctatcaaactagcggaagggctgaagaatctcaagaagatgtgcctcttccacctcacgcaccttagtgacattggcgaaggcatggattatatcgtaaagtccctcagctccgaaccgtgcgatcttgaggaaatccagctcgtgtcatgttgcctgtctgctaacgccgtcaagatccttgctcagaatctgcacaacctcgtgaagctctctatccttgacctgagcgagaattacctggagaaagacggcaacgaagcgctgcatgagctcattgataggatgaacgtgttagaacagctgacagcgctaatgttaccttggggctgcgatgtacagggctccctgagctccctcctgaagcaccttgaggaggtccctcagcttgtaaagctgggcctgaagaattggcgactaactgatacggagattaggatcctcggggcttttttcggaaagaatccactgaaaaacttccagcaacttaacctggccggtaatcgagtttcttcggacggctggctggcttttatgggcgtgttcgagaacctcaaacagctggttttcttcgacttctctaccaaggaattcttgcccgatcccgccctggtgagaaagctgtctcaggtgctcagtaagctgacatttctgcaagaggctcggcttgtggggtggcagtttgacgatgacgatctctcggtgatcacaggagccttcaagttggtgacagcttag

SEQ ID NO: 77015 - DNA, 3355 bp, Artificial Sequence
  derived and/or modified sequence
acactgtcctctcacagaacaagaaggtatctggtctacaagaactcgaggcctcactgaaacggaaagcaaatacaaagaaactttattttaaaaacatgtcttggtctcccaagaagagggcaattggattgctcagccagaatgaagagtagttttacagaaaaaagaggacaatattgggatcacctttgacctttccatttggaaataatattttctattgtgttatagaaaggtgggaagctttcatccagaacaatgaatttcataaaggacaatagccgagcccttattcaaagaatgggaatgactgttataaagcaaatcacagatgacctatttgtatggaatgttctgaatcgcgaagaagtaaacatcatttgctgcgagaaggtggagcaggatgctgctagagggatcattcacatgattttgaaaaagggttcagagtcctgtaacctctttcttaaatcccttaaggagtggaactatcctctatttcaggacttgaatggacaaagtctttttcatcagacatcagaaggagacttggacgatttggctcaggatttaaaggacttgtaccataccccatcttttctgaacttttatccccttggtgaagatattgacattatttttaacttgaaaagcaccttcacagaacctgtcctgtggaggaaggaccaacaccatcaccgcgtggagcagctgaccctgaatggcctcctgcaggctcttcagagcccctgcatcattgaaggggaatctggcaaaggcaagtccactctgctgcagcgaattgccatgctctggggctccggaaagtgcaaggctctgaccaagttcaaattcgtcttcttcctccgtctcagcagggcccagggtggactttttgaaaccctctgtgatcaactcctggatatacctggcacaatcaggaagcagacattcatggccatgctgctgaagctgcggcagagggttcttttccttcttgatggctacaatgaattcaagccccagaactgcccagaaatcgaagccctgataaaggaaaaccaccgcttcaagaacatggtcatcgtcaccactaccactgagtgcctgaggcacatacggcagtttggtgccctgactgctgaggtgggggatatgacagaagacagcgcccaggctctcatccgagaagtgctgatcaaggagcttgctgaaggcttgttgctccaaattcagaaatccaggtgcttgaggaatctcatgaagacccctctctttgtggtcatcacttgtgcaatccagatgggtgaaagtgagttccactctcacacacaaacaacgctgttccataccttctatgatctgttgatacagaaaaacaaacacaaacataaaggtgtggctgcaagtgacttcattcggagcctggaccactgtggagacctagctctggagggtgtgttctcccacaagtttgatttcgaactgcaggatgtgtccagcgtgaatgaggatgtcctgctgacaactgggctcctctgtaaatatacagctcaaaggttcaagccaaagtataaattctttcacaagtcattccaggagtacacagcaggacgaagactcagcagtttattgacgtctcatgagccagaggaggtgaccaaggggaatggttacttgcagaaaatggtttccatttcggacattacatccacttatagcagcctgctccggtacacctgtgggtcatctgtggaagccaccagggctgttatgaagcacctcgcagcagtgtatcaacacggctgccttctcggactttccatcgccaagaggcctctctggagacaggaatctttgcaaagtgtgaaaaacaccactgagcaagaaattctgaaagccataaacatcaattcctttgtagagtgtggcatccatttatatcaagagagtacatccaaatcagccctgagccaagaatttgaagctttctttcaaggtaaaagcttatatatcaactcagggaacatccccgattacttatttgacttctttgaacatttgcccaattgtgcaagtgccctggacttcattaaactggacttttatgggggagctatggcttcatgggaaaaggctgcagaagacacaggtggaatccacatggaagaggccccagaaacctacattcccagcagggctgtatctttgttcttcaactggaagcaggaattcaggactctggaggtcacactccgggatttcagcaagttgaataagcaagatatcagatatctggggaaaatattcagctctgccacaagcctcaggctgcaaataaagagatgtgctggtgtggctggaagcctcagtttggtcctcagcacctgtaagaacatttattctctcatggtggaagccagtcccctcaccatagaagatgagaggcacatcacatctgtaacaaacctgaaaaccttgagtattcatgacctacagaatcaacggctgccgggtggtctgactgacagcttgggtaacttgaagaaccttacaaagctcataatggataacataaagatgaatgaagaagatgctataaaactagctgaaggcctgaaaaacctgaagaagatgtgtttatttcatttgacccacttgtctgacattggagagggaatggattacatagtcaagtctctgtcaagtgaaccctgtgaccttgaagaaattcaattagtctcctgctgcttgtctgcaaatgcagtgaaaatcctagctcagaatcttcacaatttggtcaaactgagcattcttgatttatcagaaaattacctggaaaaagatggaaatgaagctcttcatgaactgatcgacaggatgaacgtgctagaacagctcaccgcactgatgctgccctggggctgtgacgtgcaaggcagcctgagcagcctgttgaaacatttggaggaggtcccacaactcgtcaagcttgggttgaaaaactggagactcacagatacagagattagaattttaggtgcattttttggaaagaaccctctgaaaaacttccagcagttgaatttggcgggaaatcgtgtgagcagtgatggatggcttgccttcatgggtgtatttgagaatcttaagcaattagtgttttttgactttagtactaaagaatttctacctgatccagcattagtcagaaaacttagccaagtgttatccaagttaacttttctgcaagaagctaggcttgttgggtggcaatttgatgatgatgatctcagtgttattacaggtgcttttaaactagtaactgcttaaataaagtgtactcgaagcc

SEQ ID NO: 77016 - DNA, 3581 bp, Artificial Sequence
  derived and/or modified sequence
agaatgtcatcctcaagggaagtgcagagagatttcttcagtcctcagctgagtataagctggcctcctggagtctgtgaacacaaacgtccaatgtgagtgtgcctgtgcaagcccctggctgtttatactccggagggtgtccccgtgcgtcatcggtggagtggaccaaaactggtgatctgtttgccctgtgtgaccttgcccagaaccctgctgactgagagaacacatctgctggaagtcctctgggattcaaggtacagggagaactcgaggcctcactgaaacggaaagcaaatacaaagaaactttattttaaaaacatgtcttggtctcccaagaagagggcaattggattgctcagccagaatgaagagtagttttacagaaaaaagaggacaatattgggatcacctttgacctttccatttggaaataatattttctattgtgttatagaaaggtgggaagctttcatccagaacaatgaatttcataaaggacaatagccgagcccttattcaaagaatgggaatgactgttataaagcaaatcacagatgacctatttgtatggaatgttctgaatcgcgaagaagtaaacatcatttgctgcgagaaggtggagcaggatgctgctagagggatcattcacatgattttgaaaaagggttcagagtcctgtaacctctttcttaaatcccttaaggagtggaactatcctctatttcaggacttgaatggacaaagtctttttcatcagacatcagaaggagacttggacgatttggctcaggatttaaaggacttgtaccataccccatcttttctgaacttttatccccttggtgaagatattgacattatttttaacttgaaaagcaccttcacagaacctgtcctgtggaggaaggaccaacaccatcaccgcgtggagcagctgaccctgaatggcctcctgcaggctcttcagagcccctgcatcattgaaggggaatctggcaaaggcaagtccactctgctgcagcgaattgccatgctctggggctccggaaagtgcaaggctctgaccaagttcaaattcgtcttcttcctccgtctcagcagggcccagggtggactttttgaaaccctctgtgatcaactcctggatatacctggcacaatcaggaagcagacattcatggccatgctgctgaagctgcggcagagggttcttttccttcttgatggctacaatgaattcaagccccagaactgcccagaaatcgaagccctgataaaggaaaaccaccgcttcaagaacatggtcatcgtcaccactaccactgagtgcctgaggcacatacggcagtttggtgccctgactgctgaggtgggggatatgacagaagacagcgcccaggctctcatccgagaagtgctgatcaaggagcttgctgaaggcttgttgctccaaattcagaaatccaggtgcttgaggaatctcatgaagacccctctctttgtggtcatcacttgtgcaatccagatgggtgaaagtgagttccactctcacacacaaacaacgctgttccataccttctatgatctgttgatacagaaaaacaaacacaaacataaaggtgtggctgcaagtgacttcattcggagcctggaccactgtggagacctagctctggagggtgtgttctcccacaagtttgatttcgaactgcaggatgtgtccagcgtgaatgaggatgtcctgctgacaactgggctcctctgtaaatatacagctcaaaggttcaagccaaagtataaattctttcacaagtcattccaggagtacacagcaggacgaagactcagcagtttattgacgtctcatgagccagaggaggtgaccaaggggaatggttacttgcagaaaatggtttccatttcggacattacatccacttatagcagcctgctccggtacacctgtgggtcatctgtggaagccaccagggctgttatgaagcacctcgcagcagtgtatcaacacggctgccttctcggactttccatcgccaagaggcctctctggagacaggaatctttgcaaagtgtgaaaaacaccactgagcaagaaattctgaaagccataaacatcaattcctttgtagagtgtggcatccatttatatcaagagagtacatccaaatcagccctgagccaagaatttgaagctttctttcaaggtaaaagcttatatatcaactcagggaacatccccgattacttatttgacttctttgaacatttgcccaattgtgcaagtgccctggacttcattaaactggacttttatgggggagctatggcttcatgggaaaaggctgcagaagacacaggtggaatccacatggaagaggccccagaaacctacattcccagcagggctgtatctttgttcttcaactggaagcaggaattcaggactctggaggtcacactccgggatttcagcaagttgaataagcaagatatcagatatctggggaaaatattcagctctgccacaagcctcaggctgcaaataaagagatgtgctggtgtggctggaagcctcagtttggtcctcagcacctgtaagaacatttattctctcatggtggaagccagtcccctcaccatagaagatgagaggcacatcacatctgtaacaaacctgaaaaccttgagtattcatgacctacagaatcaacggctgccgggtggtctgactgacagcttgggtaacttgaagaaccttacaaagctcataatggataacataaagatgaatgaagaagatgctataaaactagctgaaggcctgaaaaacctgaagaagatgtgtttatttcatttgacccacttgtctgacattggagagggaatggattacatagtcaagtctctgtcaagtgaaccctgtgaccttgaagaaattcaattagtctcctgctgcttgtctgcaaatgcagtgaaaatcctagctcagaatcttcacaatttggtcaaactgagcattcttgatttatcagaaaattacctggaaaaagatggaaatgaagctcttcatgaactgatcgacaggatgaacgtgctagaacagctcaccgcactgatgctgccctggggctgtgacgtgcaaggcagcctgagcagcctgttgaaacatttggaggaggtcccacaactcgtcaagcttgggttgaaaaactggagactcacagatacagagattagaattttaggtgcattttttggaaagaaccctctgaaaaacttccagcagttgaatttggcgggaaatcgtgtgagcagtgatggatggcttgccttcatgggtgtatttgagaatcttaagcaattagtgttttttgactttagtactaaagaatttctacctgatccagcattagtcagaaaacttagccaagtgttatccaagttaacttttctgcaagaagctaggcttgttgggtggcaatttgatgatgatgatctcagtgttattacaggtgcttttaaactagtaactgcttaaataaagtgtactcgaag

SEQ ID NO: 77017 - DNA, 3075 bp, Artificial Sequence
  derived and/or modified sequence
atgaattttataaaggataactccagagctctgatccaacgcatggggatgaccgtgatcaagcaaatcaccgacgatttgttcgtctggaacgttctcaatagggaagaggtgaacattatatgttgcgaaaaggttgaacaggatgccgctcggggaattatccatatgatcctgaagaagggcagcgaaagctgtaatttattcctcaaatcactgaaggagtggaactaccctctgtttcaggacctgaatggtcaatcgctgttccaccagaccagtgaaggcgacctggacgacctggcccaggacctcaaagatctttaccacaccccatcgtttttaaacttctatccactgggcgaggacattgatatcattttcaatctcaaatcaaccttcactgaacctgtgctttggagaaaagatcaacaccatcatcgggtagagcagctcactctgaatgggcttcttcaggcactgcagagcccttgtataatcgagggagagtccgggaaaggcaagtccaccctattgcaacgtatcgcgatgctgtggggcagcggcaaatgcaaagcattgactaagttcaagtttgttttctttctgcgcttgtctcgggctcaggggggattgtttgaaaccctctgcgaccagttgctggatattccaggtactatcagaaaacagactttcatggctatgctgctgaaacttagacagagagtgctcttcctcctcgacggctacaatgagtttaagccacagaactgtcccgagatcgaggcactgataaaggaaaaccatcgcttcaaaaatatggtaattgtgaccacaaccacagagtgcctgcgccacatacgacagttcggcgcactgactgccgaggtgggagacatgactgaagattcagctcaggcactgatcagagaagtccttatcaaggaactggccgagggcctcctgctccagattcagaagtcgcgttgcctacgtaacttgatgaagacccctttattcgtagttatcacctgtgccatccagatgggagagagtgagtttcatagtcacactcagacaacgctgttccacacattttatgaccttctgattcaaaagaataagcacaagcacaagggcgtagcggcaagtgatttcatcagatccctcgatcattgtggtgatctggctttagaaggcgttttcagtcataaattcgactttgaactgcaagatgtttctagcgtcaatgaagatgtgctgctcacaactggcctgctgtgtaagtatactgctcagagatttaagccgaaatataaatttttccataagtcctttcaggaatatacggcaggccgacgcctcagctctctgcttaccagccacgagcccgaggaggtcaccaagggtaatggatacctgcaaaagatggtttcaatctctgatatcacctcaacttattctagtctgctgcggtatacttgcggaagtagtgtcgaggccacacgggcagtgatgaagcatctcgccgcagtataccaacatggctgtctgctgggactctccatcgcaaaaagaccactttggagacaagagagcctacaaagcgtcaaaaacaccaccgaacaggagatactgaaggctattaatatcaactcctttgtggaatgcggaatccatctgtatcaagagtcgacctcgaagtcagctctaagtcaagagtttgaggcatttttccagggaaaatccctgtacatcaatagcggcaatatccccgattacctttttgatttctttgagcatttgccgaattgcgcgtctgccctcgatttcattaaactagatttctacggcggtgcaatggctagctgggaaaaggctgcggaggacacagggggaattcacatggaagaggcaccagagacctacatcccttcaagggcggtgtctctgttctttaactggaagcaggaattcagaactctggaagtgacactgcgcgacttctcaaaactgaataaacaagacatccgataccttggcaagatttttagctccgccaccagcttgcggcttcagattaagagatgcgctggagtggcgggtagtctttccctcgtgctgtcgacctgcaagaacatctattcattgatggtggaggctagcccgctgacgattgaagatgagcgtcacatcacaagcgtgactaaccttaagacactctccatccacgatttgcagaaccagcgcctgcctggaggactgaccgatagtcttggtaaccttaaaaatttaacgaaactaattatggataatatcaagatgaacgaagaggacgccatcaagctggctgagggcctgaagaatctaaaaaagatgtgtctgtttcatctgacccatctgtctgacatcggggaaggcatggactatatcgtcaagagtctgtcaagcgagccatgtgacctggaggagatccaactggtgagctgttgccttagcgcaaatgctgtgaagatccttgcccagaaccttcacaacctagtgaaattaagcatcttagatctgtcggagaactatttggagaaagacggaaacgaggccttgcacgaacttattgaccgaatgaacgtcctggaacagttgactgctctcatgctgccctggggatgcgatgtgcagggttctctgtcctctcttctgaaacatcttgaagaagttccccagttggtgaagttagggttgaagaactggcgattgactgatacagaaattaggatcctgggcgctttctttggcaagaatccgttgaaaaattttcagcagttaaacctcgcgggaaaccgagtttcctcagatggatggctcgccttcatgggtgtgtttgagaaccttaaacagcttgtgtttttcgacttttccaccaaggaatttctgcccgaccctgcactcgtgcgtaagctgtctcaggtgttatcaaaactcaccttcctccaggaggcacggctggtggggtggcagtttgatgatgatgatctttctgtcatcactggagccttcaagctggtgaccgcctag

SEQ ID NO: 77018 - DNA, 3075 bp, Artificial Sequence
  derived and/or modified sequence
atgaatttcataaaggataattccagagccctgattcaaaggatgggtatgacagtcattaaacagatcaccgatgacttgttcgtgtggaacgttctaaacagggaagaggtgaacattatatgctgcgagaaggtggagcaggatgcagcccgaggtattatacacatgatccttaagaaggggagcgagtcctgcaacctctttttgaaaagtctcaaggagtggaactatccactattccaggatctaaatggacagtcgctgtttcatcagacctctgagggcgacctcgacgatttagctcaagacctgaaagatctttaccacacacccagctttttgaacttctatcctttgggggaggacatcgacatcatcttcaacttgaagtccactttcaccgaaccagtgctgtggcgaaaggaccagcaccaccaccgcgtcgagcagcttaccctcaatggacttctgcaggcactgcagtctccctgtattattgagggcgaaagcggcaagggtaagagcacattacttcagagaatagcaatgctctgggggtcaggcaaatgtaaggcactgacaaaattcaaattcgtgttttttctgcgcctgagccgggctcaggggggtcttttcgagactctctgcgatcaattattagacatccctggtacaattcgcaagcaaacttttatggccatgttgctgaagcttcgccaacgcgtgttattcctactagacggctacaatgagtttaaaccccagaactgtcctgagattgaagcactcatcaaggagaatcacaggttcaaaaatatggtcatagtaactacaaccaccgagtgcctacggcatattagacagttcggggcactgaccgccgaagttggcgacatgacagaagactcagctcaggctcttatacgcgaggtgctaataaaggagctggctgaaggcctgctgttacagatacagaagtctagatgcctgaggaatctcatgaagacacccctgttcgtagttattacatgtgccattcagatgggagaatcagagttccattctcacacccagaccaccctgtttcacaccttctatgacctactgattcaaaagaataaacacaaacataagggcgtcgctgcctccgacttcatccggtcattggatcactgcggggaccttgccttggagggggttttcagtcataagttcgacttcgaattgcaagacgtgagtagtgtcaacgaagacgtgctgcttactaccggactgctttgcaaatacacagcgcagaggttcaaaccgaaatacaagtttttccataaatctttccaggaatacacggcgggtaggagactgtcttccctgttgacctcccacgaacctgaagaagtaaccaaaggcaatggttatctccagaaaatggtttcaattagtgacatcacttctacctattccagcctgttaaggtacacatgtggaagcagtgtggaggccacccgggctgtgatgaaacacttagccgctgtctatcagcatggatgtcttcttggtttgagtatcgccaaaaggcccctgtggagacaggaatctctgcagtccgtgaaaaataccaccgagcaagagattctgaaagcaatcaatattaactcttttgtagaatgcggcatccacttgtaccaggagagcacgtcaaagtctgctcttagtcaagagtttgaagctttctttcaagggaaatccttgtatatcaattcagggaacattcccgactacctgttcgacttcttcgagcatttgcccaattgcgcttcagccttggattttattaagctggatttctacggcggtgcgatggccagctgggagaaggctgctgaagatacggggggaattcacatggaggaggcaccggagacatatattccctcacgagccgtgagcctctttttcaactggaaacaagaatttcgaactcttgaagtcactttgagagacttctctaaactgaataaacaggatatcagatacctgggcaagatcttctccagtgcgaccagcctcagactgcagataaaacggtgtgcaggcgtcgctggttctttatcactggtcttgtcgacctgtaaaaacatttactcattaatggtggaagcaagccccctaaccattgaagatgagcggcatataacatctgtgacaaacttgaagacactctctatccatgacctccaaaatcagcgtttgcctggcggactgacggacagtttgggaaacctgaagaatttaaccaagctcattatggacaacatcaagatgaatgaagaggacgctatcaaacttgccgagggcctgaagaacctcaagaaaatgtgcctgtttcatctaacccatctctccgatattggcgagggcatggactatatcgtcaagtcattaagcagcgagccttgcgatctcgaagagatccagctggtgtcatgctgcctcagcgcaaacgccgtaaagatccttgctcagaaccttcacaatctggtaaagctgtcgattctggatctttctgaaaactacctggagaaggatggcaatgaagcactgcatgaattaattgacaggatgaatgttctcgagcagctgaccgccctgatgctaccgtggggatgtgacgtgcaggggagcctttcgagtcttcttaaacacctggaggaagttccacagctggtgaagttgggcctgaaaaactggcgattgaccgatacggagatccgcatccttggcgcattcttcggcaaaaaccccctcaaaaatttccaacagttgaacctggccggtaatcgtgtctctagtgatggctggctggcctttatgggcgtgttcgagaatctcaaacaattagtgttttttgactttagcaccaaagaattcctcccagaccctgctcttgtgcggaagctgtcccaggtgttatctaagctaacattcctgcaggaggccagactggtgggctggcagttcgatgatgacgacctgtccgtaatcaccggggcattcaaactcgtcactgcctag

SEQ ID NO: 77019 - DNA, 3075 bp, Artificial Sequence
  derived and/or modified sequence
atgaatttcattaaagataactctcgggcactgatacagcgaatggggatgacggtaataaaacagatcacagatgatttgtttgtgtggaacgttctgaatagagaggaggttaacattatttgctgtgaaaaagtcgagcaggacgcggctaggggtatcattcatatgattttgaagaaggggtctgagtcatgtaacctcttcctgaaatcactgaaagagtggaactacccactctttcaagaccttaacggccagtctctcttccaccagactagcgagggcgacctcgatgatcttgcacaggacctcaaggatctgtatcacaccccgagcttcctcaacttctacccacttggcgaggacatcgacattattttcaatctcaaatctacattcacggagccagtgctgtggcgtaaagatcagcatcatcaccgagtggaacagctcaccttgaatggactcctgcaggccctgcaaagcccatgcataattgagggggagtcggggaagggcaagtccaccctgcttcagaggattgccatgttgtggggctctgggaaatgcaaagccctcacaaaattcaaattcgtgttcttcctgagactctcacgagcccaggggggacttttcgaaacactttgtgatcagctcctggatatcccagggacaatcaggaagcaaactttcatggctatgttattgaagctgcgccagagggtcctgtttctgctggacggctacaacgaattcaaaccacagaattgtcctgaaatagaagctcttatcaaggagaatcatcgcttcaagaacatggtcatcgtgaccactaccacagagtgtctgaggcatatcagacagttcggggcactcactgccgaagtgggagacatgactgaggacagcgcccaggcgctgattagagaggtgttgattaaggagctggccgaaggcctgctgctgcaaatccagaaatcaagatgcttgcgtaacctcatgaaaacccctctgttcgtggtgataacatgcgccatccaaatgggcgaaagtgagttccactcacatacccaaacaaccttgttccacacattctacgatctgctcatacagaaaaacaaacacaaacacaaaggtgtggcagcctccgacttcataaggtctctcgaccactgtggagatctggcactggagggagtgtttagccacaagttcgactttgaattgcaggacgtgtcatctgtaaatgaggacgtgctgttgactactggcctcttgtgcaaatatacagctcagagatttaagcctaagtacaaattctttcataagagcttccaggaatataccgctggcaggcggctctccagcctcctgacctcgcacgaacccgaggaggtgaccaagggcaacggttatttacagaagatggtgtctatcagcgatatcacttcgacttattcctccctcttgaggtacacatgtggaagctcagtcgaggccacgcgcgctgtgatgaagcacttagctgcagtgtaccagcacggttgtcttctaggcctctcaatcgccaaaagaccactttggcggcaggagagcttacaatcagtcaaaaacacgactgagcaagaaatcctcaaggccattaatatcaattccttcgtggagtgtgggattcatctctatcaggagagtacctccaagagcgcattgtcccaggaatttgaagcctttttccagggaaagtcactgtatatcaattccggtaacatccctgactatctgttcgacttctttgaacacttaccgaactgcgcttccgctctcgactttattaaattagatttttacggtggagccatggcctcatgggagaaagctgcggaagatacggggggaattcatatggaggaagcacctgagacttacattccctcccgcgctgtctctctgtttttcaattggaaacaggaattccggacccttgaagtgacgctgcgcgacttctcaaaacttaataagcaagacatccgatacctgggaaaaattttttcctcagcaacgagcctcagacttcagattaagcgatgtgccggagtggcaggctctctgtcgttagtgctgagcacctgcaagaacatttactcccttatggtcgaagcctcccccctgacaatcgaagatgaacggcacatcacaagtgtcacaaaccttaagacgctttccatccacgatctgcagaatcaacgcctgcctggagggctgactgactcactggggaatctaaaaaacctaactaaactgattatggacaacataaaaatgaacgaagaagatgcaatcaagctcgcggagggtttaaaaaatttaaaaaaaatgtgtctatttcacctcacacacctgagcgatataggagagggcatggattatatagtgaaatccctgtcctccgaaccttgcgacctcgaggagatccagctggtctcatgttgtctgagtgctaatgctgtgaaaatcctggcacagaatctgcacaatctggtcaagctgagtatcctggacctaagcgagaactaccttgagaaagacgggaacgaggctctacacgaactcattgataggatgaacgtactggagcagcttacagccttgatgctgccatggggctgcgacgtgcaaggctccctgtcatctctgttaaaacacctggaagaagtacctcagttggtaaagttgggactcaagaattggcggctgacggataccgaaatccgcattctgggcgctttcttcggcaaaaaccctctcaaaaactttcagcaactcaatctggccggaaatagagtgagcagcgacggttggctagcattcatgggcgtcttcgagaatctgaagcagttggtgttttttgatttcagcacaaaggaatttctacccgacccagcactggtgaggaagctttcccaggtactgtctaaactgacttttttgcaggaggcccgtctggtcggatggcaatttgacgacgatgatctgtcagtcattacaggagccttcaagctcgttactgcttag

SEQ ID NO: 77020 - protein, 716 aa, Artificial Sequence
  derived and/or modified sequence
MARYQAAVSRGDCRSFSANMMEESEMCAVPGGLAKVKKQFEDEITSSRNTFAQYQYQHQNRSEQEAIHSSQVGTSRSSQEMARNEQEGSKVQKIDVHGTEMVSHLEKHTEEVNQASQFHQYVQETVIDTPEDEEIPKVSTKLLKEQFEKSAQEKILYSDKEMTTPAKQIKKLLLQDKEICILCQKTVYPMECLVADKQNFHKSCFRCHHCNSKLSLGNYASLHGQIYCKPHFKQLFKSKGNYDEGFGHKQHKDRWNCKNQSRSVDFIPNEEPNMCKNIAENTLVPGDRNEHLDAGNSEGQRNDLRKLGERGKLKVIWPPSKEIPKKTLPFEEELKMSKPKWPPEMTTLLSPEFKSESLLEDVRTPENKGQRQDHFPFLQPYLQSTHVCQKEDVIGIKEMKMPEGRKDEKKEGRKNVQDRPSEAEDTKSNRKSAMDLNDNNNVIVQSAEKEKNEKTNQTNGAEVLQVTNTDDEMMPENHKENLNKNNNNNYVAVSYLNNCRQKTSILEFLDLLPLSSEANDTANEYEIEKLENTSRISELLGIFESEKTYSRNVLAMALKKQTDRAAAGSPVQPAPKPSLSRGLMVKGGSSIISPDTNLLNIKGSHSKSKNLHFFFSNTVKITAFSKKNENIFNCDLIDSVDQIKNMPCLDLREFGKDVKPWHVETTEAARNNENTGFDALSHECTAKPLFPRVEVQSEQLTVEEQIKRNRCYSDTE

SEQ ID NO: 77021 - protein, 971 aa, Artificial Sequence
  derived and/or modified sequence
MFPMQKGSLNLLRQKWESCDYQRSECHPRDSHCTIFQPQESKLLAPEGEVVSAPQSLDPTSLPYSTGEEMWSSKPEEKDSVDKSNNTREYGRPEVLKEDSLSSRRRIERFSIALDELRSVFEAPKSGNKPAEYGGKEVEIERSLCSPAFKSHPGSQLEDSVKDSDKKGKETSFDKMSPESGHSRIFEAVFSTDQAQILRLHLHPKLTKTPKNSLKSSTYISTAGPNKPESGFAEDSAARGEGVSDLHEVVSLKERMARYQAAVSRGDCRSFSANMMEESEMCAVPGGLAKVKKQFEDEITSSRNTFAQYQYQHQNRSEQEAIHSSQVGTSRSSQEMARNEQEGSKVQKIDVHGTEMVSHLEKHTEEVNQASQFHQYVQETVIDTPEDEEIPKVSTKLLKEQFEKSAQEKILYSDKEMTTPAKQIKKLLLQDKEICILCQKTVYPMECLVADKQNFHKSCFRCHHCNSKLSLGNYASLHGQIYCKPHFKQLFKSKGNYDEGFGHKQHKDRWNCKNQSRSVDFIPNEEPNMCKNIAENTLVPGDRNEHLDAGNSEGQRNDLRKLGERGKLKVIWPPSKEIPKKTLPFEEELKMSKPKWPPEMTTLLSPEFKSESLLEDVRTPENKGQRQDHFPFLQPYLQSTHVCQKEDVIGIKEMKMPEGRKDEKKEGRKNVQDRPSEAEDTKSNRKSAMDLNDNNNVIVQSAEKEKNEKTNQTNGAEVLQVTNTDDEMMPENHKENLNKNNNNNYVAVSYLNNCRQKTSILEFLDLLPLSSEANDTANEYEIEKLENTSRISELLGIFESEKTYSRNVLAMALKKQTDRAAAGSPVQPAPKPSLSRGLMVKGGSSIISPDTNLLNIKGSHSKSKNLHFFFSNTVKITAFSKKNENIFNCDLIDSVDQIKNMPCLDLREFGKDVKPWHVETTEAARNNENTGFDALSHECTAKPLFPRVEVQSEQLTVEEQIKRNRCYSDTE

SEQ ID NO: 77022 - DNA, 2916 bp, Artificial Sequence
  derived and/or modified sequence
atgttccccatgcagaagggcagcctgaacctgctgagacagaagtgggagagctgcgactaccagagaagcgagtgccaccccagagacagccactgcaccatcttccagccccaggagagcaagctgctggcccccgagggcgaggtggtgagcgccccccagagcctggaccccaccagcctgccctacagcaccggcgaggagatgtggagcagcaagcccgaggagaaggacagcgtggacaagagcaacaacaccagagagtacggcagacccgaggtgctgaaggaggacagcctgagcagcagaagaagaatcgagagattcagcatcgccctggacgagctgagaagcgtgttcgaggcccccaagagcggcaacaagcccgccgagtacggcggcaaggaggtggagatcgagagaagcctgtgcagccccgccttcaagagccaccccggcagccagctggaggacagcgtgaaggacagcgacaagaagggcaaggagaccagcttcgacaagatgagccccgagagcggccacagcagaatcttcgaggccgtgttcagcaccgaccaggcccagatcctgagactgcacctgcaccccaagctgaccaagacccccaagaacagcctgaagagcagcacctacatcagcaccgccggccccaacaagcccgagagcggcttcgccgaggacagcgccgccagaggcgagggcgtgagcgacctgcacgaggtggtgagcctgaaggagagaatggccagataccaggccgccgtgagcagaggcgactgcagaagcttcagcgccaacatgatggaggagagcgagatgtgcgccgtgcccggcggcctggccaaggtgaagaagcagttcgaggacgagatcaccagcagcagaaacaccttcgcccagtaccagtaccagcaccagaacagaagcgagcaggaggccatccacagcagccaggtgggcaccagcagaagcagccaggagatggccagaaacgagcaggagggcagcaaggtgcagaagatcgacgtgcacggcaccgagatggtgagccacctggagaagcacaccgaggaggtgaaccaggccagccagttccaccagtacgtgcaggagaccgtgatcgacacccccgaggacgaggagatccccaaggtgagcaccaagctgctgaaggagcagttcgagaagagcgcccaggagaagatcctgtacagcgacaaggagatgaccacccccgccaagcagatcaagaagctgctgctgcaggacaaggagatctgcatcctgtgccagaagaccgtgtaccccatggagtgcctggtggccgacaagcagaacttccacaagagctgcttcagatgccaccactgcaacagcaagctgagcctgggcaactacgccagcctgcacggccagatctactgcaagccccacttcaagcagctgttcaagagcaagggcaactacgacgagggcttcggccacaagcagcacaaggacagatggaactgcaagaaccagagcagaagcgtggacttcatccccaacgaggagcccaacatgtgcaagaacatcgccgagaacaccctggtgcccggcgacagaaacgagcacctggacgccggcaacagcgagggccagagaaacgacctgagaaagctgggcgagagaggcaagctgaaggtgatctggccccccagcaaggagatccccaagaagaccctgcccttcgaggaggagctgaagatgagcaagcccaagtggccccccgagatgaccaccctgctgagccccgagttcaagagcgagagcctgctggaggacgtgagaacccccgagaacaagggccagagacaggaccacttccccttcctgcagccctacctgcagagcacccacgtgtgccagaaggaggacgtgatcggcatcaaggagatgaagatgcccgagggcagaaaggacgagaagaaggagggcagaaagaacgtgcaggacagacccagcgaggccgaggacaccaagagcaacagaaagagcgccatggacctgaacgacaacaacaacgtgatcgtgcagagcgccgagaaggagaagaacgagaagaccaaccagaccaacggcgccgaggtgctgcaggtgaccaacaccgacgacgagatgatgcccgagaaccacaaggagaacctgaacaagaacaacaacaacaactacgtggccgtgagctacctgaacaactgcagacagaagaccagcatcctggagttcctggacctgctgcccctgagcagcgaggccaacgacaccgccaacgagtacgagatcgagaagctggagaacaccagcagaatcagcgagctgctgggcatcttcgagagcgagaagacctacagcagaaacgtgctggccatggccctgaagaagcagaccgacagagccgccgccggcagccccgtgcagcccgcccccaagcccagcctgagcagaggcctgatggtgaagggcggcagcagcatcatcagccccgacaccaacctgctgaacatcaagggcagccacagcaagagcaagaacctgcacttcttcttcagcaacaccgtgaagatcaccgccttcagcaagaagaacgagaacatcttcaactgcgacctgatcgacagcgtggaccagatcaagaacatgccctgcctggacctgagagagttcggcaaggacgtgaagccctggcacgtggagaccaccgaggccgccagaaacaacgagaacaccggcttcgacgccctgagccacgagtgcaccgccaagcccctgttccccagagtggaggtgcagagcgagcagctgaccgtggaggagcagatcaagagaaacagatgctacagcgacaccgagtag

SEQ ID NO: 77023 - DNA, 2916 bp, Artificial Sequence
  derived and/or modified sequence
atgtttcctatgcaaaagggttcattaaacctgctgcggcagaagtgggaaagctgcgattaccagcgtagcgagtgccatcctcgcgactcacattgcactattttccagcctcaggaatccaagctcctcgccccggaaggcgaggtggttagcgccccacagagtctcgacccaacgtcactcccttactcaactggagaggagatgtggtcaagtaagcctgaagaaaaggactctgtggataagtccaataatactcgggagtatggtcgtccagaggttttgaaggaagactccttgtcttctcggagacgcatcgaacggttctctatagcattggacgagctcaggagtgtcttcgaggcccccaagagcggcaacaagccagctgaatatgggggcaaagaagtagaaatcgaacgctcgctgtgttcccccgcctttaaaagccaccccggatcccagttggaggactctgtaaaagactcggacaaaaaggggaaggaaacctcattcgacaaaatgtcaccggaatccggccactctcggatctttgaagctgtgtttagtactgaccaggcccagatcttacgccttcatctacacccaaaactaaccaaaacccctaaaaattcattaaaatcttccacttacatcagcacggccggcccgaataaaccagagagtgggttcgctgaagactcagcagctcgaggggagggcgtctcagacctgcatgaggtcgtgtccctgaaggaacgtatggctcgttatcaggcggccgtgagccgaggggactgccggtctttttcggcgaacatgatggaggaatccgagatgtgtgccgtgcccggtgggttggcgaaagtcaaaaaacagtttgaggatgagataacatctagccgcaatactttcgctcagtatcagtaccagcatcagaatcgtagcgagcaagaagccatccatagctcgcaggtcgggactagccgctccagccaggaaatggcaaggaacgaacaggagggaagcaaagtgcagaaaattgacgtacacggaaccgagatggtaagccacctggagaagcatactgaggaggtcaaccaagcctcccagtttcatcagtatgtgcaggaaaccgtcatagacaccccagaggacgaagaaattcctaaagtgtcaaccaagttgctgaaggagcagtttgagaaatccgcacaggaaaaaatcttgtactcagataaggaaatgaccactcccgctaagcagatcaaaaaattgctgctgcaggacaaggagatctgcatcctgtgccagaagacggtctaccccatggagtgtttggtggctgataagcagaactttcacaagagctgtttccggtgccatcactgcaactcaaagctttctttaggaaactacgccagcttacatggccagatctactgtaagccgcactttaaacaactcttcaagagcaaaggcaactacgacgaggggttcggccacaagcagcacaaagaccggtggaattgtaaaaatcagagccggagcgtggactttatacctaatgaggaaccaaacatgtgcaagaacatagcagaaaatactctcgtccctggggacagaaacgaacacctggatgctggcaatagtgagggtcagcggaacgatctgagaaagcttggagaaagggggaagctgaaggtgatatggccacccagcaaggaaatccctaagaaaactctgcccttcgaagaggagctgaagatgagcaaaccgaaatggcctcccgaaatgaccaccctcctcagcccggagtttaagagtgagtcacttttggaggacgtaagaaccccagagaataaaggccagcgccaggaccattttccatttttgcaaccatacctgcagtccactcacgtgtgccaaaaggaggacgtgattgggatcaaagaaatgaaaatgcctgaaggaaggaaagatgaaaagaaggagggtaggaaaaatgtacaggaccggccctccgaggctgaagacacaaaatctaatcggaaaagtgccatggatttaaacgacaacaacaacgtgatcgtacagtctgcagagaaagagaaaaacgaaaaaacaaatcagacaaacggggctgaagtgctacaagtcacgaatactgatgatgagatgatgccagagaaccacaaagagaatctcaataaaaataacaataacaattacgtagcagtgagttaccttaacaattgtcggcagaaaacatccattttggagtttctcgatctactcccccttagttctgaggccaatgacacggcgaacgagtacgagattgagaaactcgaaaatacttcccgcattagcgagctcttagggattttcgagagcgagaagacctacagccgcaacgtcctggccatggccctcaagaaacagacagaccgggccgccgccggatcccccgtgcagccagcccctaaacctagcctcagccgaggtctgatggtgaagggaggttctagcattatctctccagacacgaatctactcaacatcaaaggtagtcactctaaatccaaaaacctacatttcttcttctccaataccgtgaaaattaccgccttcagcaaaaagaatgagaacatatttaactgtgatctgatcgattcagtcgatcagatcaaaaatatgccatgcctcgaccttcgcgaattcggtaaagatgtgaagccttggcatgtcgagacaactgaagccgcacgaaacaacgagaataccggctttgacgctctgtcccatgagtgcaccgcaaagcctctgtttccacgggttgaggttcagagtgagcagttgactgtggaagagcagatcaaaaggaacaggtgttatagtgacacagaatag

SEQ ID NO: 77024 - DNA, 2916 bp, Artificial Sequence
  derived and/or modified sequence
atgttccctatgcagaaaggttcactcaacctcctgcgacaaaagtgggaatcatgtgactaccagaggagtgagtgccatccccgggattcccactgcacaatctttcagccacaggagagcaagctgctggcacctgagggagaggttgtctccgccccccagagtctggaccctaccagcctcccctactctaccggtgaggagatgtggtcttctaagcccgaggaaaaggattctgtggataaaagcaataacacacgggagtatgggaggccagaagtgctgaaagaagatagcctaagtagtagaaggaggatcgagcgcttttcaatcgccctggatgagctgaggtcggttttcgaggcccctaagtccggtaacaagcccgccgagtacgggggtaaggaagttgaaattgaaaggagcctgtgctcccccgcttttaaaagtcaccccggaagccaactcgaggattccgttaaggattccgacaagaagggaaaggaaacaagtttcgacaaaatgtcgccagagtctggacattcacggatctttgaagccgtgttctcaacggaccaggcccagatcctacgactgcatctgcatcctaaactcactaagacgcccaagaattcactcaaaagcagtacgtatatcagcacggccgggcctaataagccagagagtggattcgctgaggatagtgcggcccgcggtgagggagtcagtgacttgcacgaagttgtctccctgaaagaaagaatggccaggtatcaggccgcagtcagtcgcggcgactgtcgatccttctctgcgaacatgatggaggaaagtgaaatgtgcgccgtgcctggcggtctggccaaagtgaagaagcagttcgaggacgagatcacatcaagccgcaacacctttgcacagtaccagtatcaacatcagaatagaagcgagcaagaagcgatccactcatcacaggtgggaacatctagaagcagccaggagatggcacgaaacgagcaagaaggatccaaggtgcagaaaattgacgtgcacggaaccgagatggtttcccaccttgagaaacacacggaagaggttaaccaggcctcccaattccaccagtatgtccaggaaaccgtcattgacactccagaagacgaggaaatccccaaggttagcactaagctgcttaaagagcagtttgaaaagtccgcacaggagaaaattctgtactcggacaaggagatgaccacccctgcaaaacagatcaagaaactccttctgcaagacaaggaaatttgtattttgtgccagaaaactgtgtatcctatggagtgtctggtggcagacaaacagaattttcacaagagttgtttcaggtgtcaccattgtaatagcaaactttctctaggtaattacgcctccttgcacggccagatatactgtaaaccacacttcaagcaactgtttaaatccaagggcaactatgacgagggttttgggcacaagcagcacaaggaccgctggaactgcaaaaatcaatcgcgtagcgtggattttattcctaacgaggagcctaatatgtgcaaaaacattgccgaaaatacactggtcccaggcgataggaacgaacacctcgatgctggaaacagcgaaggtcaaagaaatgacttgcgaaagctgggtgagcgggggaagctgaaggtgatctggcccccaagcaaggagatcccaaaaaaaactctaccatttgaggaagagctgaaaatgagcaaacccaagtggcctcccgaaatgacaactctactttcgcccgagttcaaatccgagtcactgctcgaagacgtcaggacacctgagaataaggggcaacggcaggaccattttcccttcttgcagccgtatctgcaatccactcacgtttgtcaaaaggaagacgtgattggcattaaggagatgaagatgcctgaagggagaaaggacgagaaaaaggaggggagaaagaacgttcaagatcggcctagtgaggcagaggatacaaagtctaatcgtaaaagcgcaatggacctgaacgacaataataacgtcatcgtccaaagtgccgagaaggagaagaatgaaaagacaaatcaaaccaacggcgccgaggtcttgcaggtaactaacacggacgatgagatgatgcctgaaaatcacaaggaaaatctgaacaagaacaataacaataattatgtggctgttagctatttgaataactgtaggcagaaaaccagtattttagaattcctcgatttactacccctgtcttctgaggctaatgacacggctaatgaatacgagatcgagaagctcgaaaatacatcgcggatatctgaacttttggggatctttgaatccgaaaaaacatatagcaggaacgtcctcgccatggccttaaaaaagcagaccgatagggccgccgcaggctctcccgtccagccagccccgaagcctagtctatcacggggtctgatggtcaagggaggctcctctatcatatctccggacacaaatcttctcaacattaagggatcacattctaagtcaaagaacctccacttcttttttagtaacactgtgaaaattaccgcattttcaaaaaagaatgagaatattttcaactgcgatttaattgacagcgttgaccagattaagaacatgccctgcctggatctgcgggagttcggcaaggatgtcaagccgtggcacgtggagactaccgaagccgctcgcaataacgagaacactggcttcgacgcattgtcacacgagtgtaccgcaaaacccctattcccgcgagtcgaagtgcagtcggagcagctaaccgtggaggagcagataaaacgcaaccgatgctactccgataccgaatag

SEQ ID NO: 77025 - DNA, 2916 bp, Artificial Sequence
  derived and/or modified sequence
atgttccccatgcagaagggcagcctgaacctgctgcggcagaagtgggagagctgtgactaccagaggtctgagtgccacccccgggacagccactgcaccatcttccagccccaggagagcaagctgctggcccctgagggggaggtggtgtctgccccccagagcctggaccccaccagcctgccctacagcactggagaggagatgtggagcagcaagccagaggagaaggacagcgtggacaagagcaacaacacccgggagtatggccggcctgaggtgctgaaggaggacagcctgagcagcagaagaagaattgagcgcttcagcatcgccctggatgagctgcggtctgtgtttgaggcccccaagagcggcaacaagccagcagaatatggaggcaaggaggtggagattgaaagaagcctgtgcagccctgccttcaagagccaccctggcagccagctggaggacagcgtgaaggacagcgacaagaagggcaaggagaccagctttgacaagatgagccctgagagcggccacagccgcatctttgaggccgtgttcagcacagaccaggcccagatcctgcggctgcacctgcaccccaagctgaccaagacccccaagaacagcctgaagagcagcacctacatcagcacagctggccccaacaagccagagagcggctttgctgaggacagcgctgcccggggggagggcgtgtctgacctgcacgaggtggtgtccctgaaggagaggatggcccgctaccaggccgctgtgtccagaggagactgccgctccttcagcgccaacatgatggaggagagcgagatgtgtgctgtgcctgggggcctggccaaggtgaagaagcagtttgaagatgagatcaccagcagcaggaacacctttgcccagtaccagtaccagcaccagaacagaagtgagcaggaggccatccacagcagccaggtgggcaccagccgcagcagccaggagatggccagaaatgagcaggagggcagcaaggtgcagaagattgatgtgcacggcacagagatggtgagccacctggagaagcacacagaggaggtgaaccaggccagccagttccaccagtatgtgcaggagaccgtcatcgacaccccagaagatgaggagatccccaaggtgtccaccaagctgctgaaggagcagtttgagaagagcgcccaggagaagatcctgtacagcgacaaggagatgaccaccccagccaagcagatcaagaagctgctgctgcaggacaaggagatctgcatcctgtgccagaagacagtgtaccccatggagtgcctggtggccgacaagcagaacttccacaagagctgcttccgctgccaccactgcaacagcaagctgagcctgggcaactatgccagcctgcacggccagatctactgcaagccccacttcaagcagctgttcaagagcaagggcaactatgatgagggcttcggccacaagcagcacaaggaccgctggaactgcaagaaccagagccgctctgtggacttcatccccaatgaggagcccaacatgtgcaagaacattgctgagaacaccctggtgcctggggacagaaatgagcacctggatgctggcaacagcgagggccagagaaatgacctgaggaagctgggggagcggggcaagctgaaggtgatctggccacccagcaaggagatccccaagaagaccctgccctttgaggaggagctgaagatgagcaagcccaagtggcccccagagatgaccaccctgctgagccctgagttcaagtctgagagcctgctggaggatgtgaggaccccagaaaataaaggccagaggcaggaccacttccccttcctgcagccctacctgcagagcacccacgtgtgccagaaggaggatgtgattggcatcaaggagatgaagatgcctgagggcaggaaggatgagaagaaggagggcaggaagaatgtgcaggaccggcccagcgaggccgaggacaccaagagcaacaggaagagcgccatggacctgaatgacaacaacaacgtcatcgtgcagagcgctgagaaggagaagaatgagaagaccaaccagaccaacggggctgaggtgctgcaggtgaccaacacagatgatgagatgatgcctgagaaccacaaggagaacctgaacaagaacaacaacaacaactacgtggccgtgtcctacctgaacaactgccggcagaagaccagcatcctggagttcctggacctgctgcccctgagcagcgaggccaatgacacagccaatgaatatgaaattgagaagctggagaacaccagccgcatcagcgagctgctgggcatctttgagagcgagaagacctacagcagaaatgtgctggccatggccctgaagaagcagacagacagagctgctgctggcagccctgtgcagcctgcccccaagcccagcctgagccggggcctgatggtgaagggcggcagcagcatcatcagcccagacaccaacctgctgaacatcaagggcagccacagcaagagcaagaacctgcacttcttcttcagcaacacagtgaagatcacagccttcagcaagaagaatgaaaacatcttcaactgtgacctgattgacagcgtggaccagatcaagaacatgccctgcctggacctgcgggagtttgggaaggatgtgaagccctggcacgtggagaccacagaagctgccagaaataatgaaaatacaggctttgatgccctgagccatgagtgcacagccaagcccctcttcccccgggtggaggtgcagagcgagcagctgactgtggaggagcagatcaagaggaaccgctgctacagcgacacagaatag

SEQ ID NO: 77026 - DNA, 2916 bp, Artificial Sequence
  derived and/or modified sequence
atgttccccatgcagaagggcagcctgaacctgctgcggcagaagtgggagagctgtgactatcagcgaagcgaatgccacccccgagattcgcactgcaccattttccagcctcaagagtctaagctgctggcccctgagggggaagtggttagcgccccacagagtcttgatcctacatcccttccatacagtacgggcgaagagatgtggtcgagcaagccagaagagaaagactccgtggataaatctaacaatacgcgagaatacggacggccagaagtactaaaagaagactcattgagctccaggaggagaattgaaagatttagtatcgccttggacgagctccgtagcgtgttcgaagctcccaaatctggaaacaaacctgctgaatacggaggaaaggaggtggagattgagagatccctgtgctctccagcctttaaaagtcatcccgggtctcagctcgaagactcagtgaaagactctgacaagaagggtaaggagactagcttcgacaaaatgtcacccgagtctggccatagcagaatattcgaggctgtgttctcaacagaccaggcccagatacttagattgcatttgcaccccaaactcaccaaaacaccgaagaatagtctcaagagctccacttacatatctacagctggacccaacaagccagagagtgggtttgcagaagactcggccgcgcggggggagggtgtctccgatctacacgaggtagtgagcctgaaagagcgcatggccaggtatcaggctgccgtctcccggggtgactgccgaagcttcagcgccaatatgatggaagaaagtgaaatgtgcgccgttcccggcggcctggcaaaggttaaaaagcagttcgaagacgagatcaccagctctcgtaacactttcgcacaatatcagtatcagcatcagaaccggagtgagcaggaagccatccattcttcccaggttgggaccagccggtcgagtcaagagatggctcggaatgaacaagaaggatctaaggtccaaaagatagatgtgcatggcaccgaaatggtttcgcacctggaaaagcacacagaagaagtcaatcaggcctctcaatttcaccagtacgtgcaggaaacagtcattgacacaccagaggatgaagagattcctaaagtcagcacaaagctactgaaggagcaattcgaaaaaagtgcacaggagaagatactctacagcgacaaggaaatgacgactccagcaaaacaaattaagaagctgctcctccaggacaaagaaatctgtatattgtgccaaaaaacagtataccctatggaatgcctggtggccgataaacagaatttccataaatcctgctttcggtgtcatcactgtaacagcaaactgtccctaggaaactacgctagtctgcatggccagatctactgcaaacctcactttaaacagctgtttaagtctaaaggtaactacgatgaagggtttggtcacaagcagcacaaggacaggtggaactgcaaaaaccagagtcgaagcgtggacttcataccaaatgaagagcctaacatgtgtaagaacatagccgaaaacaccttggttccaggcgatcgcaatgagcacctggatgcaggtaattctgaaggccagagaaacgatctgaggaaactgggcgagcgtggcaagttgaaggtgatttggccacctagcaaggaaattcctaagaaaacacttcctttcgaggaggagctgaagatgtcgaaacctaaatggccccctgagatgacaaccctgctgtctcccgaattcaaaagcgaatctctcctggaagacgtgcgtactcccgaaaataaggggcagcgccaggatcacttccccttcttgcagccctacctgcaatccactcacgtttgtcagaaagaagatgtgattggcattaaggaaatgaaaatgcccgagggccgaaaggatgaaaagaaggagggccgtaagaacgtgcaggatagaccgtcggaagcagaagataccaagagcaacaggaagtctgccatggatctcaatgataacaacaatgttatagtgcagtccgctgagaaagagaaaaatgaaaaaacaaaccaaaccaacggcgccgaggtcctacaggtcacgaacaccgatgacgaaatgatgcctgagaatcacaaagaaaacttaaataagaataacaacaataattatgtcgccgtgtcttacctgaacaactgcagacagaaaacctctatcctggaatttctggatctgctccctctgtcttctgaggccaacgatactgccaacgaatatgagattgagaagcttgaaaatacgagtcgtatatcagaactgcttggcatcttcgaatctgaaaaaacctatagccgtaatgtgcttgctatggccctgaagaaacaaactgatcgggctgctgccggatctcccgtccaacccgcgcctaaaccgagccttagtcgagggttaatggtaaaaggaggcagctcaatcatttcacctgacaccaacctcttaaacattaaaggatcgcattccaagtctaagaacctgcatttctttttttcaaatacagtgaagattactgcctttagcaagaagaatgagaacattttcaattgcgacctcattgattccgtcgaccagattaaaaacatgccctgtctggatctgagggagtttggaaaagatgtgaaaccatggcatgtagagaccactgaggccgcgcgaaacaacgaaaacacgggatttgatgcactgagccatgaatgcactgccaaaccattattccctagagtcgaagtgcaatccgaacagcttaccgtcgaggagcagatcaagaggaaccggtgctacagtgacactgaatag

SEQ ID NO: 77027 - DNA, 2916 bp, Artificial Sequence
  derived and/or modified sequence
atgttccccatgcagaagggcagcctgaacctgctgcggcagaagtgggagtcctgtgattatcaaagatcggagtgtcaccccagggattcccactgcaccatcttccaaccacaggagtcaaaactgctggcgcctgagggcgaagtggtgtctgccccacagagcttggacccaaccagcctcccctactcaaccggggaagagatgtggagtagtaagccagaggaaaaagattctgtagataagagcaataacacgcgcgaatatggtcgcccggaggtgctcaaggaagatagtctctcctctcgacggagaattgaaaggtttagtatcgcccttgatgagctgaggtccgtgtttgaggctcccaagtctgggaataaacctgcagaatacgggggtaaagaagtcgagatcgaacgaagcctatgttcgcccgcctttaaatcacaccctggtagccaattggaggactcggtgaaggactcagataaaaaaggtaaggagacaagctttgataaaatgtctcccgagagtggacatagtcgcatctttgaggctgtgttttccacagaccaagcgcaaatcctgcggctccaccttcatccgaaattaaccaaaacccctaaaaactccctgaaatctagtacatatattagcaccgccggacctaacaaacctgaatcaggcttcgcggaagattccgctgcccggggcgaaggagtgtctgatctccacgaggtggtctcacttaaggaacgcatggcccggtatcaagcagccgtaagtaggggcgactgtagaagtttcagtgctaatatgatggaagagtctgaaatgtgcgctgtgccgggcgggctggctaaagtgaagaaacagtttgaggacgaaattacatcctcacggaacacctttgcgcagtaccagtaccaacaccagaaccgaagcgaacaggaagccatacattccagccaggtggggacatccaggagttcccaagaaatggctcggaatgagcaagaaggtagtaaggtgcagaagatagatgtgcacggtacagagatggtgtcccatctggaaaagcacacagaagaggttaatcaggcctcacagtttcatcagtacgtgcaagaaacggtgatcgatacgccagaggatgaggaaatccctaaggtttccaccaagctactcaaggagcagtttgagaaaagtgcccaggaaaagatactgtacagcgacaaggagatgacaaccccagctaaacaaatcaaaaaactgctgctgcaggacaaggaaatctgtatcttatgccagaagacagtttacccgatggagtgcctcgtggcagataaacagaacttccataagtcctgttttcggtgccaccattgcaacagtaaactctctctcggaaactatgctagcctgcacgggcagatctattgcaaaccacattttaagcagctgtttaagtctaaagggaactacgatgagggctttggccacaaacaacataaggaccgctggaattgtaaaaatcaaagccgatccgtcgacttcatcccaaatgaggagccaaatatgtgtaaaaatatcgcagagaacacactggtcccgggcgatagaaatgagcacctagatgctggaaacagcgagggacagaggaacgatctcaggaaactgggagagagaggtaaactcaaggttatctggcccccatcaaaggaaattcccaagaagaccttgccatttgaggaggagctgaaaatgagtaaacctaagtggcccccagaaatgactaccctgttgtcgccagagttcaagtctgaatctctactggaagacgtgcgcacacccgagaataaaggccagcggcaagatcatttcccttttctgcagccctatcttcagagcacccatgtttgtcaaaaggaggatgtaatcggaatcaaggagatgaaaatgcctgaagggcgcaaggatgaaaaaaaggagggacggaagaacgtacaggacagaccaagcgaagcggaggataccaagtcaaaccgtaaatcagcaatggacctgaacgataataataatgtgattgtacagagcgccgagaaagagaaaaatgagaagactaatcagactaatggagccgaggttctccaggtgactaacactgacgacgaaatgatgcccgagaaccataaagagaatctcaataagaataataacaataattatgtggcagttagttatctgaacaactgcaggcaaaagacatcaatcctagagttcctcgacctgctgccactcagcagcgaagcgaatgacactgccaatgaatacgaaattgagaagttggaaaataccagcaggattagcgaactcctgggcatctttgaatcagaaaaaacgtatagtcgcaatgtgcttgccatggccctgaagaaacaaactgatcgcgctgcagctggatctcccgtccagccggcacccaagccatcgctctcacgggggctgatggttaagggggggagcagcattataagccctgatacaaatctgctgaacattaaggggagccactctaagtctaagaatctgcacttcttcttcagtaatactgtgaagatcactgccttctccaaaaagaatgaaaacatctttaattgcgatctgattgacagcgtggaccaaatcaagaacatgccctgcctggaccttagggaattcgggaaggatgttaaaccgtggcacgttgagaccactgaggctgcgagaaataacgagaatacaggctttgatgcattgagtcacgaatgcacggcgaagcccttgtttccaagagttgaggttcaatccgagcaactcaccgtcgaggagcaaattaagcgaaatagatgttactccgacactgagtag

SEQ ID NO: 77028 - DNA, 2916 bp, Artificial Sequence
  derived and/or modified sequence
atgtttcccatgcaaaagggcagcttgaatctgctgaggcagaagtgggaaagttgtgactaccagaggtctgagtgtcacccccgagattcacattgtacaatttttcagccacaggaaagcaagctgttggctccagaaggtgaagtcgttagcgcgcctcagtccctggaccccacatctctgccatatagtaccggcgaggagatgtggtcaagcaagcccgaagagaaggattctgtggataagtcaaataacactagggagtacggacgacctgaggtgctgaaggaagactccctgagcagtagacgcaggatcgaacgttttagtattgccctggacgagctcaggtctgtcttcgaggctcccaagtctgggaataagccggctgaatacggaggaaaggaggtggagatagagagatccctctgctctcctgccttcaaatctcaccccggttcccagcttgaagatagcgtaaaagattctgacaaaaagggtaaggagaccagcttcgataagatgtcccccgaatccggacactcgcgcatttttgaggccgtgttcagcaccgaccaggcacagatccttaggcttcatttgcaccccaagctgacgaagacaccgaagaactcacttaagagcagcacatatatcagcaccgccggtcctaacaaacccgagtccgggttcgctgaggactctgcagcccgaggcgagggcgtttccgacttgcacgaagtggtttcgctcaaggaaaggatggctcgctatcaggccgctgtatcaagaggcgactgcaggagcttctctgccaatatgatggaggaatcggaaatgtgtgcggttcctggtgggctggcaaaggtgaagaagcagttcgaagatgagattacttcgtcaaggaatacctttgcacagtaccagtatcagcaccaaaatcgttccgagcaggaagccatacattcaagccaagtcggtaccagcagatcttcccaggaaatggccaggaacgagcaggagggcagcaaagtacagaaaatagatgtccatggcaccgaaatggtgagtcatctcgagaaacacaccgaagaagtgaaccaagctagccaattccatcagtacgttcaagaaaccgtgatagacacaccagaggatgaagaaatccctaaggtttccaccaaactcctgaaggagcagttcgagaagagtgcgcaggaaaagattttatacagcgataaggaaatgactacacctgcaaaacagattaaaaagctgttactccaagataaagagatctgcatcctgtgtcagaaaaccgtttatcccatggagtgcctggtcgctgataagcagaacttccacaaatcctgctttcggtgtcaccactgtaacagtaagctcagcctgggcaactatgcctctttgcacgggcagatttactgcaagcctcattttaaacaactctttaagtccaagggcaattatgacgaaggattcggccataaacagcataaagacaggtggaactgcaagaaccaatcccggtcagtcgactttatcccaaacgaggagccaaacatgtgcaaaaatatcgcggagaataccctggttcccggagaccgcaacgagcatctcgacgctggaaactctgaggggcagagaaacgacctgcgaaagctgggagagagaggcaagctgaaggtcatttggccccctagtaaagaaattcctaagaaaacccttcctttcgaagaggagctgaaaatgagtaagcccaagtggcccccagaaatgactaccctgctgagccccgagtttaaatcagaaagcctactggaggatgttaggactcctgaaaacaagggacaacgacaggaccactttccatttttgcagccgtacctccagtcgacccacgtatgtcagaaggaggacgtcatcggcatcaaagagatgaagatgcccgaagggagaaaggacgagaaaaaagagggtaggaaaaacgtgcaggatcggccatctgaggctgaagataccaagagcaacaggaagtctgccatggatctcaatgacaacaataatgttatcgtgcaatctgcagagaaggagaagaatgagaaaaccaatcaaaccaatggggcagaggtgctgcaagttaccaacaccgatgatgagatgatgcccgagaatcataaggagaacttgaacaagaacaacaataataactatgtggctgtgtcctacctgaacaattgccgtcagaagactagtattcttgagtttctggatcttctcccactgagctccgaggcaaatgacacagcaaatgagtatgaaatcgagaagcttgaaaatacttcgcggatctctgaactattaggtattttcgagagtgaaaaaacatactctaggaacgtgctggccatggccctcaaaaaacagacagatcgagcggcagctgggtcccctgtgcagcccgcaccaaagccctccctctccaggggcctgatggtaaagggaggatcttcgattatatctccagataccaacttacttaatattaagggttctcacagcaagagtaaaaatttgcatttcttcttctctaacactgtcaagattactgcctttagcaaaaagaacgaaaacatctttaattgtgatctcatagattcagtcgatcagatcaaaaacatgccttgtctagatttgagggaatttggaaaggatgtgaaaccgtggcacgtggagaccacagaagctgcaagaaacaacgagaatacaggatttgatgctctttcgcatgagtgcacggcaaagccacttttccctcgtgtggaagtgcagtctgaacagctcactgtggaggagcagatcaagagaaaccggtgctacagtgatacagaatag

SEQ ID NO: 77029 - DNA, 2916 bp, Artificial Sequence
  derived and/or modified sequence
atgttcccgatgcagaagggaagcctaaatcttcttcgccagaagtgggagtcatgtgactaccagcgcagcgaatgccacccgcgtgatagccattgcactattttccaaccacaagagtccaaactccttgcacccgagggggaggtcgtgtcagctccacagagcctcgatcccactagtcttccctactcgacaggcgaagaaatgtggtctagcaagccggaagagaaggattctgtagacaaatctaacaatacgagggagtacgggcgaccagaggttctgaaagaggactccctctccagcaggcgcagaatcgagcgtttctcgattgctctggatgaactgcgatcagtatttgaggcgccaaagagtgggaataaacctgcggagtacggcggtaaagaggtggagatcgagagatctctctgctcacccgctttcaagtcacatccaggatcacagctcgaagactcagtgaaggattctgataagaaaggtaaagaaaccagctttgacaagatgtctccggagagtggtcactccaggatcttcgaggctgtgttctcaactgaccaggctcagatcttgcgcctgcatctgcaccctaagctgacaaagactcccaaaaattcactgaagtcttccacatatatttctaccgctggccctaacaagcccgaatccggcttcgccgaggactccgctgctcggggagagggtgtgtcagacctgcacgaggttgtctcgctgaaagagaggatggctcggtaccaagccgctgtatcgaggggagactgtaggtcattttccgccaatatgatggaggagtctgaaatgtgcgcggtgcctggaggattggcaaaggtgaaaaaacagttcgaagatgagattactagctccaggaatacgtttgctcaataccagtatcagcaccagaacagatccgagcaggaggctattcattctagccaggtgggtaccagtagatcttcacaggaaatggccagaaacgagcaggaagggtcgaaagtgcagaagatcgatgtgcacggcacagaaatggtgtctcatctggagaagcatactgaggaggttaaccaggcttctcagttccaccagtatgttcaggaaactgttatcgatacccctgaggacgaggaaattccaaaggttagtactaagctgctgaaagagcagtttgagaagtcggcacaggagaaaatactttattccgacaaagagatgacgacccccgctaagcagataaagaagcttctcctgcaagataaggaaatctgcatactttgccagaagacggtctacccgatggaatgtctcgtggccgacaaacaaaactttcataagtcatgctttagatgccatcactgcaatagtaaattatccctagggaattacgcatcgctccatggccagatctattgcaaaccacatttcaaacagctgtttaagtccaaagggaattacgatgagggcttcggccacaagcaacacaaagatagatggaattgcaagaaccagtccagaagcgtggacttcattcccaacgaggagccaaacatgtgcaaaaatatcgccgagaataccctggtgccaggcgaccgcaacgagcatcttgacgctggcaacagtgagggacaaagaaatgatttgcgtaagcttggcgagcgcggaaagctcaaggttatttggcctccgtctaaggagataccaaagaaaaccctacctttcgaggaggagttaaaaatgtctaagccaaaatggccacctgagatgacgactctgctgtccccggagtttaaatctgagtcactgctggaggatgtgcgaactccagagaataaaggtcagagacaggaccacttcccatttttgcagccctacctacaaagcacgcacgtgtgtcagaaagaagatgtgattggtatcaaggagatgaagatgcccgagggcaggaaagatgagaagaaagagggtcgcaaaaacgtgcaggataggccatccgaggcggaggacaccaaaagtaacaggaagtcagccatggatctcaacgacaacaacaacgtcatcgtacaatcagcagagaaggaaaagaacgaaaaaacgaatcagacgaacggagccgaggtcctgcaggtaactaacacagacgatgagatgatgcccgagaaccacaaggaaaatcttaataagaacaataacaacaactacgttgcagttagctatctcaacaattgtcggcagaagacgagcattctggaatttctcgatctcctgccactgtcctctgaagcaaacgatacagccaatgagtacgagatcgagaagctcgagaatactagtagaatttccgaattgctgggaatattcgagagtgaaaagacctattcaaggaatgttctggccatggctctgaaaaaacagaccgatcgcgcagccgctggttcgcctgtacaaccagctccaaagccttccctttcccgcggactcatggtgaagggcggatcctccatcattagccccgatacaaaccttctgaacataaagggctcccactcaaaaagcaaaaacctccatttctttttctccaacaccgtgaaaataaccgctttttccaaaaaaaacgagaacatattcaactgtgatttaatagactccgtggaccaaatcaaaaatatgccttgcctcgatctccgcgaattcggcaaggatgttaagccttggcacgttgagacaacggaagcagctcggaataacgagaataccggattcgatgccctcagccatgagtgcactgctaagccgctgtttccaagggtcgaggtccagtccgagcagctaacagtcgaagagcagataaaacggaaccgctgctacagcgataccgaatag

SEQ ID NO: 77030 - DNA, 2916 bp, Artificial Sequence
  derived and/or modified sequence
atgttcccaatgcagaagggctccctcaacctcctgaggcagaaatgggaatcttgtgattatcagagaagtgagtgtcatcccagggacagccattgtacaattttccagcctcaggaaagcaaattgcttgcgcctgaaggagaggtagtatcagcacctcaatctttggatcccacaagtctgccctacagtacaggggaagagatgtggagttcgaagccggaagagaaggattctgtggacaagagtaacaacaccagggaatatggtcggccagaagtgctgaaggaggattccctgagcagtcggcgcaggattgaacgcttttccattgcccttgatgagctgaggagtgtgtttgaggctcctaagagtggaaacaaaccagctgagtacggtggaaaggaagtggaaattgagcgaagtttgtgctcgccagcttttaagagtcaccctgggagccagctggaggattctgtgaaagattcagacaagaaaggcaaggaaacatcttttgacaagatgtcacctgaaagtggtcacagccgcatctttgaagcagtgttctccacggaccaagcccagattctcaggctccacctgcatccaaaattgacaaagacccccaagaacagcctcaaatcctcaacttatatttcgactgctggccctaataagcctgagagtggatttgcagaagacagtgctgctcggggcgagggtgtgtcagacctccacgaagtggtctccctgaaggagcggatggcgaggtaccaggcagctgtttccaggggtgactgccgcagcttctctgctaatatgatggaagaatcagaaatgtgcgcagtgcctggtggtttggccaaggtgaagaaacaatttgaggacgaaattacttcttcccgtaatacctttgctcaataccaatatcaacatcagaacagatctgagcaggaggcaattcatagcagccaggttggcacttcaagaagcagccaggaaatggcaagaaatgaacaagaagggtccaaagtacagaaaattgatgttcatggaacagaaatggtctctcatcttgaaaagcacaccgaggaagtaaaccaagcatctcagtttcatcaatatgttcaagaaactgtcattgatacacctgaggatgaagagattccaaaggtttcgactaagttgttaaaagagcagtttgaaaagtctgcccaggaaaagatcctttattctgacaaagagatgacaaccccagccaagcagattaagaagctgctgctccaagacaaggaaatatgtatactttgtcaaaagacagtttatccaatggagtgcctagtggcagacaagcagaattttcataagtcctgcttccgatgccaccattgcaacagtaaactaagtttgggaaattatgcatcacttcatggacaaatatactgtaaacctcactttaaacaacttttcaaatccaaaggaaattatgatgaaggttttggacataagcagcataaagatagatggaactgcaaaaaccaaagcagatcagtggactttattcctaatgaagaaccaaatatgtgtaaaaatattgcagaaaacacccttgtacctggagatcgtaatgaacatttagatgctggtaacagtgaagggcaaaggaatgatttgagaaaattaggggaaaggggaaaattaaaagtcatttggcctccttccaaggagatccctaagaaaaccttaccctttgaggaagagctcaaaatgagtaaacctaagtggccacctgaaatgacaaccctgctatcccctgaatttaaaagtgaatctctgctagaagatgttagaactccagaaaataaaggacaaagacaagatcactttccatttttgcagccttatctacagtccacccatgtttgtcagaaagaggatgttataggaatcaaagaaatgaaaatgcctgaaggaagaaaagatgaaaagaaggaaggaaggaagaatgtgcaagataggccgagtgaagctgaagacacaaagagtaacaggaaaagtgctatggatcttaatgacaacaataatgtgattgtgcagagtgctgaaaaggagaaaaatgaaaaaactaaccaaactaatggtgcagaagttttacaggttactaacactgatgatgagatgatgccagaaaatcataaagaaaatttgaataagaataataataacaattatgtagcagtctcatatctgaataattgcaggcagaagacatctattttagaatttcttgatctattacccttgtcgagtgaagcaaatgacactgcaaatgaatatgaaattgagaagttagaaaatacatctagaatctcagagttacttggtatatttgaatctgaaaagacttattcgaggaatgtactagcaatggctctgaagaaacagactgacagagcagctgctggcagtcctgtgcagcctgctccaaaaccaagcctcagcagaggccttatggtaaaggggggaagttcaatcatctctcctgatacaaatctcttaaacattaaaggaagccattcaaagagcaaaaatttacactttttcttttctaacaccgtgaaaatcactgcattttccaagaaaaatgagaacattttcaattgtgatttaatagattctgtagatcaaattaaaaatatgccatgcttggatttaagggaatttggaaaggatgttaaaccttggcatgttgaaacaacagaagctgcccgcaataatgaaaacacaggttttgatgctctgagccatgaatgtacagctaagcctttgtttcccagagtggaggtgcagtcagaacaactcacggtggaagagcagattaaaagaaacaggtgctacagtgacactgagtaa

SEQ ID NO: 77031 - DNA, 3391 bp, Artificial Sequence
  derived and/or modified sequence
ggagaaatctggcaggtctctaggcagacaaaagggaacatctggtagggactgggacatgtagaaaaaaggacaacctggacccatccatgttcccaatgcagaagggctccctcaacctcctgaggcagaaatgggaatcttgtgattatcagagaagtgagtgtcatcccagggacagccattgtacaattttccagcctcaggaaagcaaattgcttgcgcctgaaggagaggtagtatcagcacctcaatctttggatcccacaagtctgccctacagtacaggggaagagatgtggagttcgaagccggaagagaaggattctgtggacaagagtaacaacaccagggaatatggtcggccagaagtgctgaaggaggattccctgagcagtcggcgcaggattgaacgcttttccattgcccttgatgagctgaggagtgtgtttgaggctcctaagagtggaaacaaaccagctgagtacggtggaaaggaagtggaaattgagcgaagtttgtgctcgccagcttttaagagtcaccctgggagccagctggaggattctgtgaaagattcagacaagaaaggcaaggaaacatcttttgacaagatgtcacctgaaagtggtcacagccgcatctttgaagcagtgttctccacggaccaagcccagattctcaggctccacctgcatccaaaattgacaaagacccccaagaacagcctcaaatcctcaacttatatttcgactgctggccctaataagcctgagagtggatttgcagaagacagtgctgctcggggcgagggtgtgtcagacctccacgaagtggtctccctgaaggagcggatggcgaggtaccaggcagctgtttccaggggtgactgccgcagcttctctgctaatatgatggaagaatcagaaatgtgcgcagtgcctggtggtttggccaaggtgaagaaacaatttgaggacgaaattacttcttcccgtaatacctttgctcaataccaatatcaacatcagaacagatctgagcaggaggcaattcatagcagccaggttggcacttcaagaagcagccaggaaatggcaagaaatgaacaagaagggtccaaagtacagaaaattgatgttcatggaacagaaatggtctctcatcttgaaaagcacaccgaggaagtaaaccaagcatctcagtttcatcaatatgttcaagaaactgtcattgatacacctgaggatgaagagattccaaaggtttcgactaagttgttaaaagagcagtttgaaaagtctgcccaggaaaagatcctttattctgacaaagagatgacaaccccagccaagcagattaagaagctgctgctccaagacaaggaaatatgtatactttgtcaaaagacagtttatccaatggagtgcctagtggcagacaagcagaattttcataagtcctgcttccgatgccaccattgcaacagtaaactaagtttgggaaattatgcatcacttcatggacaaatatactgtaaacctcactttaaacaacttttcaaatccaaaggaaattatgatgaaggttttggacataagcagcataaagatagatggaactgcaaaaaccaaagcagatcagtggactttattcctaatgaagaaccaaatatgtgtaaaaatattgcagaaaacacccttgtacctggagatcgtaatgaacatttagatgctggtaacagtgaagggcaaaggaatgatttgagaaaattaggggaaaggggaaaattaaaagtcatttggcctccttccaaggagatccctaagaaaaccttaccctttgaggaagagctcaaaatgagtaaacctaagtggccacctgaaatgacaaccctgctatcccctgaatttaaaagtgaatctctgctagaagatgttagaactccagaaaataaaggacaaagacaagatcactttccatttttgcagccttatctacagtccacccatgtttgtcagaaagaggatgttataggaatcaaagaaatgaaaatgcctgaaggaagaaaagatgaaaagaaggaaggaaggaagaatgtgcaagataggccgagtgaagctgaagacacaaagagtaacaggaaaagtgctatggatcttaatgacaacaataatgtgattgtgcagagtgctgaaaaggagaaaaatgaaaaaactaaccaaactaatggtgcagaagttttacaggttactaacactgatgatgagatgatgccagaaaatcataaagaaaatttgaataagaataataataacaattatgtagcagtctcatatctgaataattgcaggcagaagacatctattttagaatttcttgatctattacccttgtcgagtgaagcaaatgacactgcaaatgaatatgaaattgagaagttagaaaatacatctagaatctcagagttacttggtatatttgaatctgaaaagacttattcgaggaatgtactagcaatggctctgaagaaacagactgacagagcagctgctggcagtcctgtgcagcctgctccaaaaccaagcctcagcagaggccttatggtaaaggggggaagttcaatcatctctcctgatacaaatctcttaaacattaaaggaagccattcaaagagcaaaaatttacactttttcttttctaacaccgtgaaaatcactgcattttccaagaaaaatgagaacattttcaattgtgatttaatagattctgtagatcaaattaaaaatatgccatgcttggatttaagggaatttggaaaggatgttaaaccttggcatgttgaaacaacagaagctgcccgcaataatgaaaacacaggttttgatgctctgagccatgaatgtacagctaagcctttgtttcccagagtggaggtgcagtcagaacaactcacggtggaagagcagattaaaagaaacaggtgctacagtgacactgagtaaaatatctatggccactgacagtccacacttaggcactgagagatattgatgttctgaaataagattttatgaatttggatacccttttgaggaacttgatgtaaacatggtgttcagaaatctcgtgtctatctcaatgggatatttcttgtattacaccttgtcatttttttcacaatttatttacatctacttttgtttgaactggaatgaagagatgaaacactatggatatgttttccattcaaatggcactttagcatattgttctgttttcctgtaaaacatcatgggtgtgatttttatactgctgctgcttgtcacaattattataacttctctgtaatttcctctgaaataaaattgaatcacctgaggtgcaaacc

SEQ ID NO: 77032 - protein, 3327 aa, Artificial Sequence
  derived and/or modified sequence
MARYQAAVSRGDCRSFSANMMEESEMCAVPGGLAKVKKQFEDEITSSRNTFAQYQYQHQNRSEQEAIHSSQVGTSRSSQEMARNEQEGSKVQKIDVHGTEMVSHLEKHTEEVNQASQFHQYVQETVIDTPEDEEIPKVSTKLLKEQFEKSAQEKILYSDKEMTTPAKQIKTESEYEETFKPSSVVSTSSTSCVSTSQRKETSTTRYSDHSVTSSTLAQINATSSGMTEEFPPPPPDVLQTSVDVTAFSQSPELPSPPRRLPVPKDVYSKQRNLYELNRLYKHIHPELRKNLEKDYISEVSEIVSSQMNSGSSVSADVQQARYVFENTNDSSQKDLNSEREYLEWDEILKGEVQSIRWIFENQPLDSINNGSPDEGDISRGIADQEIIAGGDVKYTTWMFETQPIDTLGAYSSDTVENAEKIPELARGDVCTARWMFETRPLDSMNKMHQSQEESAVTISKDITGGDVKTVRYMFETQHLDQLGQLHSVDEVHLLQLRSELKEIKGNVKRSIKCFETQPLYVIRDGSGQMLEIKTVHREDVEKGDVRTARWMFETQPLDTINKDITEIKVVRGISMEENVKGGVSKAKWLFETQPLEKIKESEEVIIEKEKIIGTDVSRKCWMFETQPLDILKEVPDADSLQREEIIGGDVQTTKHLFETLPIEALKDSPDIGKLQKITASEEEKGDVRHQKWIFETQPLEDIRKDKKEYTRTVKLEEVDRGDVKNYTHIFESNNLIKFDASHKIEVEGVTRGAVELNKSLFETTPLYAIQDPLGKYHQVKTVQQEEIVRGDVRSCRWLFETRPIDQFDESIHKFQIIRGISAQEIQTGNVKSAKWLFETQPLDSIKYFSDVEETESKTEQTRDIVKGDVKTCKWLFETQPMESLYEKVSLMTSSEEIHKGDVKTCTWLFETQPLDTIKDDSETAVKLQTVKQEEIQGGDVRTACFLFETENLDSIQGEEVKEIKPVEMDIQAGDVSSMRYKFENQSLDSISSSSEEVLKKIKTLKTEDIQKGNVLNCRWLFENQPIDKIKESQEGDECVKTVTDIQGGDVRKGCFIFETFSLDEIKEESDYISTKKTITEEVIQGDVKSYRMLFETQPLYAIQDREGSYHEVTTVKKEEVIHGDVRGTRWLFETKPLDSINKSETVYVIKSVTQEDIQKGDVSSVRYRFETQPLDQISEESHNIMPSIDHIQGGNVKTSRQFFESENFDKNNYIRTVSVNEIQKGNVKTSTWLFETHTMDELRGEGLEYENIKTVTQEDVQKGDVKQAVWLFENRTFDSIMEAHKGITKMTKEEIPPSDVKTTTWLFETTPLHEFNETRVEKIEIIGKSIKETLEDLYSQKVIQAPGIIIEADEIGDVRMAKYKLMNQASPEIQKEEIIRADLRNIMVNLLSKRDCTEREILISEEEKGNVNLTKTQLLNRSTEFHAEKEEIVKGDVQQAIKNLFSEERSVKKGILIQEDEKGDINMTIYCLLHENDGDTIEREEVIGGDVKRTIHNLLSSTSNNKISERAKIDASERGNVQFFTTCIEAGALDYLKQLHTESNETLTAKKQEGEKEIIGGDVEGTKLLLKKRQSLVERTVSETDIIPGDVHNTVKVFMTEPQSTFGKIPKEEIIKGDLTSTLNSLSQAVNQKTVTKTEEIIKGNMLATLKSLKESSHRWKESKQPDAIPGDIEKAIECLEKATNTKTEILKKELLKDDLETSLRSLKEAQRSFKEVHKEGVIKKDAKAVMAGSSGEQKTDIHQVAVQRNKNSLLQPKPGPFEPAAKWQGGADTLSQTMGKSCHGNLVEERTEVNLPKAPKGTVKIVIDREQNNDALEKSLRRLSNSHHKSNVLESGDKTGVWTDTTGEQHLRDEYMSRQLTSTVSVKNNLTTKESDRAVRELKKDDVFNSIQSAGKTVGKQQTYELRNDHQKMEGFHIKSPKKTKNIKILTDTQSSKPSPTQHPVSMPVGGTYDLSGDFQKQTLLKQETKYSNKDIKKKNINLQPMWQLLPVEQDTSNVTEMKVSEKSHNTFKATNKKRETDVHLKSQDFLMKTNTSTGLKMAMERSLNPINFNPENNVKESECPLPPPSPPPPPPSNASSEIEFPLPPPPPLMMFPEKNGFLPSLSTEKIKAEFESFPGLPLPPPPVDEKSERESSSMFLPPPPPPTPSQKPAHLLSSSAPEKHSGDFMQQYSQKEASNSQNSQAKIITGKTGVLPPPTLPKPKLPKHIKDNKNDFSPKVELATSLSDMECKITTSKDQKKVMVMTSSEHTETKQNVISKSLDERKQLSIDSANCLSHTVPGTSAPRKKQIAPLIKSHSFPESSGQQNPKPYMRKFKTPLMIAEEKYRQQKEEIEKQKQESSYYNIVKTQSQNQHITEVEKEMPLQKTNEEVSLSGIDSECTVVQPSPGSQSNARILGVCSDNQLSTTSPETVAAKRLHHVLAASEDKDKMKKEVLQSSRDIMQSKSACEIKQSHQECSTQQTQQKKYLEQLHLPQSKPISPNFKVKTIKLPTLDHTLNETDHSYESHKQQSEIDVQTFTKKQYLKTKKTEASTECSHKQSLAERHYQLPKKEKRVTVQLPTESIQKNQEDKLKMVPRKQREFSGSDRGKLPGSEEKNQGPSMIGRKEERLITERKHEHLKNKSAPKVVKQKVIDAHLDSQTQNFQQTQIQTAESKAEHKKLPQPYNSLQEEKCLEVKGIQEKQVFSNTKDSKQEITQNKSFFSSVKESQRDDGKGALNIVEFLRKREELQQILSRVKQFEAEPNKSGLKTFQTLLNTIPGWLISEDKREYAVHIAMENNLEKVKEEITHIKTQAEDMLVSYENIIQTAMMSSKTGKPGNKPTSLDETSSKVSNVHVSNNKNSEQKENKIAKEKTVQHQVAAHHEATVRSHVKTHQEIKLDDSNIPPPSLKTRPPSPTFITIESTARRTENPTKNELSQSPKKDSYVEPPPRRPMSQKSEIHRANTSPSPPRSRSEQLVRLKDTTAKLSKGAIPCPAATPVPIVEKRSEIIMSPATLRRQIKIETRGRDSPPTITIPVNINHAASGSFRESVDAQEEIRKVEKRATYVHKDGLNSTDHMVPDTESYDAVEIIRKVAVPPRLSEHTQRYEAANRTVQMAENFVNDPENEINRWFREFEHGPVSEAKSNRRVYAKGETNHNIQQESRTFCKEEFGLTSLGNTSFTDFSCKHPRELREKIPVKQPRICSETRSLSEHFSGMDAFESQIVESKMKTSSSHSSEAGKSGCDFKHAPPTYEDVIAGHILDISDSPKEVRKNFQKTWQESGRVFKGLGYATADASATEMRTTFQEESAFISEAAAPRQGNMYTLSKDSLSNGVPSGRQAEFS

SEQ ID NO: 77033 - protein, 963 aa, Artificial Sequence
  derived and/or modified sequence
MPLQKTNEEVSLSGIDSECTVVQPSPGSQSNARILGVCSDNQLSTTSPETVAAKRLHHVLAASEDKDKMKKEVLQSSRDIMQSKSACEIKQSHQECSTQQTQQKKYLEQLHLPQSKPISPNFKVKTIKLPTLDHTLNETDHSYESHKQQSEIDVQTFTKKQYLKTKKTEASTECSHKQSLAERHYQLPKKEKRVTVQLPTESIQKNQEDKLKMVPRKQREFSGSDRGKLPGSEEKNQGPSMIGRKEERLITERKHEHLKNKSAPKVVKQKVIDAHLDSQTQNFQQTQIQTAESKAEHKKLPQPYNSLQEEKCLEVKGIQEKQVFSNTKDSKQEITQNKSFFSSVKESQRDDGKGALNIVEFLRKREELQQILSRVKQFEAEPNKSGLKTFQTLLNTIPGWLISEDKREYAVHIAMENNLEKVKEEITHIKTQAEDMLVSYENIIQTAMMSSKTGKPGNKPTSLDETSSKVSNVHVSNNKNSEQKENKIAKEKTVQHQVAAHHEATVRSHVKTHQEIKLDDSNIPPPSLKTRPPSPTFITIESTARRTENPTKNELSQSPKKDSYVEPPPRRPMSQKSEIHRANTSPSPPRSRSEQLVRLKDTTAKLSKGAIPCPAATPVPIVEKRSEIIMSPATLRRQIKIETRGRDSPPTITIPVNINHAASGSFRESVDAQEEIRKVEKRATYVHKDGLNSTDHMVPDTESYDAVEIIRKVAVPPRLSEHTQRYEAANRTVQMAENFVNDPENEINRWFREFEHGPVSEAKSNRRVYAKGETNHNIQQESRTFCKEEFGLTSLGNTSFTDFSCKHPRELREKIPVKQPRICSETRSLSEHFSGMDAFESQIVESKMKTSSSHSSEAGKSGCDFKHAPPTYEDVIAGHILDISDSPKEVRKNFQKTWQESGRVFKGLGYATADASATEMRTTFQEESAFISEAAAPRQGNMYTLSKDSLSNGVPSGRQAEFS

SEQ ID NO: 77034 - DNA, 9984 bp, Artificial Sequence
  derived and/or modified sequence
atggccagataccaggccgccgtgagcagaggcgactgcagaagcttcagcgccaacatgatggaggagagcgagatgtgcgccgtgcccggcggcctggccaaggtgaagaagcagttcgaggacgagatcaccagcagcagaaacaccttcgcccagtaccagtaccagcaccagaacagaagcgagcaggaggccatccacagcagccaggtgggcaccagcagaagcagccaggagatggccagaaacgagcaggagggcagcaaggtgcagaagatcgacgtgcacggcaccgagatggtgagccacctggagaagcacaccgaggaggtgaaccaggccagccagttccaccagtacgtgcaggagaccgtgatcgacacccccgaggacgaggagatccccaaggtgagcaccaagctgctgaaggagcagttcgagaagagcgcccaggagaagatcctgtacagcgacaaggagatgaccacccccgccaagcagatcaagaccgagagcgagtacgaggagaccttcaagcccagcagcgtggtgagcaccagcagcaccagctgcgtgagcaccagccagagaaaggagaccagcaccaccagatacagcgaccacagcgtgaccagcagcaccctggcccagatcaacgccaccagcagcggcatgaccgaggagttccccccccccccccccgacgtgctgcagaccagcgtggacgtgaccgccttcagccagagccccgagctgcccagcccccccagaagactgcccgtgcccaaggacgtgtacagcaagcagagaaacctgtacgagctgaacagactgtacaagcacatccaccccgagctgagaaagaacctggagaaggactacatcagcgaggtgagcgagatcgtgagcagccagatgaacagcggcagcagcgtgagcgccgacgtgcagcaggccagatacgtgttcgagaacaccaacgacagcagccagaaggacctgaacagcgagagagagtacctggagtgggacgagatcctgaagggcgaggtgcagagcatcagatggatcttcgagaaccagcccctggacagcatcaacaacggcagccccgacgagggcgacatcagcagaggcatcgccgaccaggagatcatcgccggcggcgacgtgaagtacaccacctggatgttcgagacccagcccatcgacaccctgggcgcctacagcagcgacaccgtggagaacgccgagaagatccccgagctggccagaggcgacgtgtgcaccgccagatggatgttcgagaccagacccctggacagcatgaacaagatgcaccagagccaggaggagagcgccgtgaccatcagcaaggacatcaccggcggcgacgtgaagaccgtgagatacatgttcgagacccagcacctggaccagctgggccagctgcacagcgtggacgaggtgcacctgctgcagctgagaagcgagctgaaggagatcaagggcaacgtgaagagaagcatcaagtgcttcgagacccagcccctgtacgtgatcagagacggcagcggccagatgctggagatcaagaccgtgcacagagaggacgtggagaagggcgacgtgagaaccgccagatggatgttcgagacccagcccctggacaccatcaacaaggacatcaccgagatcaaggtggtgagaggcatcagcatggaggagaacgtgaagggcggcgtgagcaaggccaagtggctgttcgagacccagcccctggagaagatcaaggagagcgaggaggtgatcatcgagaaggagaagatcatcggcaccgacgtgagcagaaagtgctggatgttcgagacccagcccctggacatcctgaaggaggtgcccgacgccgacagcctgcagagagaggagatcatcggcggcgacgtgcagaccaccaagcacctgttcgagaccctgcccatcgaggccctgaaggacagccccgacatcggcaagctgcagaagatcaccgccagcgaggaggagaagggcgacgtgagacaccagaagtggatcttcgagacccagcccctggaggacatcagaaaggacaagaaggagtacaccagaaccgtgaagctggaggaggtggacagaggcgacgtgaagaactacacccacatcttcgagagcaacaacctgatcaagttcgacgccagccacaagatcgaggtggagggcgtgaccagaggcgccgtggagctgaacaagagcctgttcgagaccacccccctgtacgccatccaggaccccctgggcaagtaccaccaggtgaagaccgtgcagcaggaggagatcgtgagaggcgacgtgagaagctgcagatggctgttcgagaccagacccatcgaccagttcgacgagagcatccacaagttccagatcatcagaggcatcagcgcccaggagatccagaccggcaacgtgaagagcgccaagtggctgttcgagacccagcccctggacagcatcaagtacttcagcgacgtggaggagaccgagagcaagaccgagcagaccagagacatcgtgaagggcgacgtgaagacctgcaagtggctgttcgagacccagcccatggagagcctgtacgagaaggtgagcctgatgaccagcagcgaggagatccacaagggcgacgtgaagacctgcacctggctgttcgagacccagcccctggacaccatcaaggacgacagcgagaccgccgtgaagctgcagaccgtgaagcaggaggagatccagggcggcgacgtgagaaccgcctgcttcctgttcgagaccgagaacctggacagcatccagggcgaggaggtgaaggagatcaagcccgtggagatggacatccaggccggcgacgtgagcagcatgagatacaagttcgagaaccagagcctggacagcatcagcagcagcagcgaggaggtgctgaagaagatcaagaccctgaagaccgaggacatccagaagggcaacgtgctgaactgcagatggctgttcgagaaccagcccatcgacaagatcaaggagagccaggagggcgacgagtgcgtgaagaccgtgaccgacatccagggcggcgacgtgagaaagggctgcttcatcttcgagaccttcagcctggacgagatcaaggaggagagcgactacatcagcaccaagaagaccatcaccgaggaggtgatccagggcgacgtgaagagctacagaatgctgttcgagacccagcccctgtacgccatccaggacagagagggcagctaccacgaggtgaccaccgtgaagaaggaggaggtgatccacggcgacgtgagaggcaccagatggctgttcgagaccaagcccctggacagcatcaacaagagcgagaccgtgtacgtgatcaagagcgtgacccaggaggacatccagaagggcgacgtgagcagcgtgagatacagattcgagacccagcccctggaccagatcagcgaggagagccacaacatcatgcccagcatcgaccacatccagggcggcaacgtgaagaccagcagacagttcttcgagagcgagaacttcgacaagaacaactacatcagaaccgtgagcgtgaacgagatccagaagggcaacgtgaagaccagcacctggctgttcgagacccacaccatggacgagctgagaggcgagggcctggagtacgagaacatcaagaccgtgacccaggaggacgtgcagaagggcgacgtgaagcaggccgtgtggctgttcgagaacagaaccttcgacagcatcatggaggcccacaagggcatcaccaagatgaccaaggaggagatcccccccagcgacgtgaagaccaccacctggctgttcgagaccacccccctgcacgagttcaacgagaccagagtggagaagatcgagatcatcggcaagagcatcaaggagaccctggaggacctgtacagccagaaggtgatccaggcccccggcatcatcatcgaggccgacgagatcggcgacgtgagaatggccaagtacaagctgatgaaccaggccagccccgagatccagaaggaggagatcatcagagccgacctgagaaacatcatggtgaacctgctgagcaagagagactgcaccgagagagagatcctgatcagcgaggaggagaagggcaacgtgaacctgaccaagacccagctgctgaacagaagcaccgagttccacgccgagaaggaggagatcgtgaagggcgacgtgcagcaggccatcaagaacctgttcagcgaggagagaagcgtgaagaagggcatcctgatccaggaggacgagaagggcgacatcaacatgaccatctactgcctgctgcacgagaacgacggcgacaccatcgagagagaggaggtgatcggcggcgacgtgaagagaaccatccacaacctgctgagcagcaccagcaacaacaagatcagcgagagagccaagatcgacgccagcgagagaggcaacgtgcagttcttcaccacctgcatcgaggccggcgccctggactacctgaagcagctgcacaccgagagcaacgagaccctgaccgccaagaagcaggagggcgagaaggagatcatcggcggcgacgtggagggcaccaagctgctgctgaagaagagacagagcctggtggagagaaccgtgagcgagaccgacatcatccccggcgacgtgcacaacaccgtgaaggtgttcatgaccgagccccagagcaccttcggcaagatccccaaggaggagatcatcaagggcgacctgaccagcaccctgaacagcctgagccaggccgtgaaccagaagaccgtgaccaagaccgaggagatcatcaagggcaacatgctggccaccctgaagagcctgaaggagagcagccacagatggaaggagagcaagcagcccgacgccatccccggcgacatcgagaaggccatcgagtgcctggagaaggccaccaacaccaagaccgagatcctgaagaaggagctgctgaaggacgacctggagaccagcctgagaagcctgaaggaggcccagagaagcttcaaggaggtgcacaaggagggcgtgatcaagaaggacgccaaggccgtgatggccggcagcagcggcgagcagaagaccgacatccaccaggtggccgtgcagagaaacaagaacagcctgctgcagcccaagcccggccccttcgagcccgccgccaagtggcagggcggcgccgacaccctgagccagaccatgggcaagagctgccacggcaacctggtggaggagagaaccgaggtgaacctgcccaaggcccccaagggcaccgtgaagatcgtgatcgacagagagcagaacaacgacgccctggagaagagcctgagaagactgagcaacagccaccacaagagcaacgtgctggagagcggcgacaagaccggcgtgtggaccgacaccaccggcgagcagcacctgagagacgagtacatgagcagacagctgaccagcaccgtgagcgtgaagaacaacctgaccaccaaggagagcgacagagccgtgagagagctgaagaaggacgacgtgttcaacagcatccagagcgccggcaagaccgtgggcaagcagcagacctacgagctgagaaacgaccaccagaagatggagggcttccacatcaagagccccaagaagaccaagaacatcaagatcctgaccgacacccagagcagcaagcccagccccacccagcaccccgtgagcatgcccgtgggcggcacctacgacctgagcggcgacttccagaagcagaccctgctgaagcaggagaccaagtacagcaacaaggacatcaagaagaagaacatcaacctgcagcccatgtggcagctgctgcccgtggagcaggacaccagcaacgtgaccgagatgaaggtgagcgagaagagccacaacaccttcaaggccaccaacaagaagagagagaccgacgtgcacctgaagagccaggacttcctgatgaagaccaacaccagcaccggcctgaagatggccatggagagaagcctgaaccccatcaacttcaaccccgagaacaacgtgaaggagagcgagtgccccctgcccccccccagcccccccccccccccccccagcaacgccagcagcgagatcgagttccccctgcccccccccccccccctgatgatgttccccgagaagaacggcttcctgcccagcctgagcaccgagaagatcaaggccgagttcgagagcttccccggcctgcccctgccccccccccccgtggacgagaagagcgagagagagagcagcagcatgttcctgccccccccccccccccccacccccagccagaagcccgcccacctgctgagcagcagcgcccccgagaagcacagcggcgacttcatgcagcagtacagccagaaggaggccagcaacagccagaacagccaggccaagatcatcaccggcaagaccggcgtgctgcccccccccaccctgcccaagcccaagctgcccaagcacatcaaggacaacaagaacgacttcagccccaaggtggagctggccaccagcctgagcgacatggagtgcaagatcaccaccagcaaggaccagaagaaggtgatggtgatgaccagcagcgagcacaccgagaccaagcagaacgtgatcagcaagagcctggacgagagaaagcagctgagcatcgacagcgccaactgcctgagccacaccgtgcccggcaccagcgcccccagaaagaagcagatcgcccccctgatcaagagccacagcttccccgagagcagcggccagcagaaccccaagccctacatgagaaagttcaagacccccctgatgatcgccgaggagaagtacagacagcagaaggaggagatcgagaagcagaagcaggagagcagctactacaacatcgtgaagacccagagccagaaccagcacatcaccgaggtggagaaggagatgcccctgcagaagaccaacgaggaggtgagcctgagcggcatcgacagcgagtgcaccgtggtgcagcccagccccggcagccagagcaacgccagaatcctgggcgtgtgcagcgacaaccagctgagcaccaccagccccgagaccgtggccgccaagagactgcaccacgtgctggccgccagcgaggacaaggacaagatgaagaaggaggtgctgcagagcagcagagacatcatgcagagcaagagcgcctgcgagatcaagcagagccaccaggagtgcagcacccagcagacccagcagaagaagtacctggagcagctgcacctgccccagagcaagcccatcagccccaacttcaaggtgaagaccatcaagctgcccaccctggaccacaccctgaacgagaccgaccacagctacgagagccacaagcagcagagcgagatcgacgtgcagaccttcaccaagaagcagtacctgaagaccaagaagaccgaggccagcaccgagtgcagccacaagcagagcctggccgagagacactaccagctgcccaagaaggagaagagagtgaccgtgcagctgcccaccgagagcatccagaagaaccaggaggacaagctgaagatggtgcccagaaagcagagagagttcagcggcagcgacagaggcaagctgcccggcagcgaggagaagaaccagggccccagcatgatcggcagaaaggaggagagactgatcaccgagagaaagcacgagcacctgaagaacaagagcgcccccaaggtggtgaagcagaaggtgatcgacgcccacctggacagccagacccagaacttccagcagacccagatccagaccgccgagagcaaggccgagcacaagaagctgccccagccctacaacagcctgcaggaggagaagtgcctggaggtgaagggcatccaggagaagcaggtgttcagcaacaccaaggacagcaagcaggagatcacccagaacaagagcttcttcagcagcgtgaaggagagccagagagacgacggcaagggcgccctgaacatcgtggagttcctgagaaagagagaggagctgcagcagatcctgagcagagtgaagcagttcgaggccgagcccaacaagagcggcctgaagaccttccagaccctgctgaacaccatccccggctggctgatcagcgaggacaagagagagtacgccgtgcacatcgccatggagaacaacctggagaaggtgaaggaggagatcacccacatcaagacccaggccgaggacatgctggtgagctacgagaacatcatccagaccgccatgatgagcagcaagaccggcaagcccggcaacaagcccaccagcctggacgagaccagcagcaaggtgagcaacgtgcacgtgagcaacaacaagaacagcgagcagaaggagaacaagatcgccaaggagaagaccgtgcagcaccaggtggccgcccaccacgaggccaccgtgagaagccacgtgaagacccaccaggagatcaagctggacgacagcaacatccccccccccagcctgaagaccagaccccccagccccaccttcatcaccatcgagagcaccgccagaagaaccgagaaccccaccaagaacgagctgagccagagccccaagaaggacagctacgtggagcccccccccagaagacccatgagccagaagagcgagatccacagagccaacaccagccccagcccccccagaagcagaagcgagcagctggtgagactgaaggacaccaccgccaagctgagcaagggcgccatcccctgccccgccgccacccccgtgcccatcgtggagaagagaagcgagatcatcatgagccccgccaccctgagaagacagatcaagatcgagaccagaggcagagacagcccccccaccatcaccatccccgtgaacatcaaccacgccgccagcggcagcttcagagagagcgtggacgcccaggaggagatcagaaaggtggagaagagagccacctacgtgcacaaggacggcctgaacagcaccgaccacatggtgcccgacaccgagagctacgacgccgtggagatcatcagaaaggtggccgtgccccccagactgagcgagcacacccagagatacgaggccgccaacagaaccgtgcagatggccgagaacttcgtgaacgaccccgagaacgagatcaacagatggttcagagagttcgagcacggccccgtgagcgaggccaagagcaacagaagagtgtacgccaagggcgagaccaaccacaacatccagcaggagagcagaaccttctgcaaggaggagttcggcctgaccagcctgggcaacaccagcttcaccgacttcagctgcaagcaccccagagagctgagagagaagatccccgtgaagcagcccagaatctgcagcgagaccagaagcctgagcgagcacttcagcggcatggacgccttcgagagccagatcgtggagagcaagatgaagaccagcagcagccacagcagcgaggccggcaagagcggctgcgacttcaagcacgccccccccacctacgaggacgtgatcgccggccacatcctggacatcagcgacagccccaaggaggtgagaaagaacttccagaagacctggcaggagagcggcagagtgttcaagggcctgggctacgccaccgccgacgccagcgccaccgagatgagaaccaccttccaggaggagagcgccttcatcagcgaggccgccgcccccagacagggcaacatgtacaccctgagcaaggacagcctgagcaacggcgtgcccagcggcagacaggccgagttcagctag

SEQ ID NO: 77035 - DNA, 2892 bp, Artificial Sequence
  derived and/or modified sequence
atgcccctgcagaagaccaacgaggaggtgagcctgagcggcatcgacagcgagtgcaccgtggtgcagcccagccccggcagccagagcaacgccagaatcctgggcgtgtgcagcgacaaccagctgagcaccaccagccccgagaccgtggccgccaagagactgcaccacgtgctggccgccagcgaggacaaggacaagatgaagaaggaggtgctgcagagcagcagagacatcatgcagagcaagagcgcctgcgagatcaagcagagccaccaggagtgcagcacccagcagacccagcagaagaagtacctggagcagctgcacctgccccagagcaagcccatcagccccaacttcaaggtgaagaccatcaagctgcccaccctggaccacaccctgaacgagaccgaccacagctacgagagccacaagcagcagagcgagatcgacgtgcagaccttcaccaagaagcagtacctgaagaccaagaagaccgaggccagcaccgagtgcagccacaagcagagcctggccgagagacactaccagctgcccaagaaggagaagagagtgaccgtgcagctgcccaccgagagcatccagaagaaccaggaggacaagctgaagatggtgcccagaaagcagagagagttcagcggcagcgacagaggcaagctgcccggcagcgaggagaagaaccagggccccagcatgatcggcagaaaggaggagagactgatcaccgagagaaagcacgagcacctgaagaacaagagcgcccccaaggtggtgaagcagaaggtgatcgacgcccacctggacagccagacccagaacttccagcagacccagatccagaccgccgagagcaaggccgagcacaagaagctgccccagccctacaacagcctgcaggaggagaagtgcctggaggtgaagggcatccaggagaagcaggtgttcagcaacaccaaggacagcaagcaggagatcacccagaacaagagcttcttcagcagcgtgaaggagagccagagagacgacggcaagggcgccctgaacatcgtggagttcctgagaaagagagaggagctgcagcagatcctgagcagagtgaagcagttcgaggccgagcccaacaagagcggcctgaagaccttccagaccctgctgaacaccatccccggctggctgatcagcgaggacaagagagagtacgccgtgcacatcgccatggagaacaacctggagaaggtgaaggaggagatcacccacatcaagacccaggccgaggacatgctggtgagctacgagaacatcatccagaccgccatgatgagcagcaagaccggcaagcccggcaacaagcccaccagcctggacgagaccagcagcaaggtgagcaacgtgcacgtgagcaacaacaagaacagcgagcagaaggagaacaagatcgccaaggagaagaccgtgcagcaccaggtggccgcccaccacgaggccaccgtgagaagccacgtgaagacccaccaggagatcaagctggacgacagcaacatccccccccccagcctgaagaccagaccccccagccccaccttcatcaccatcgagagcaccgccagaagaaccgagaaccccaccaagaacgagctgagccagagccccaagaaggacagctacgtggagcccccccccagaagacccatgagccagaagagcgagatccacagagccaacaccagccccagcccccccagaagcagaagcgagcagctggtgagactgaaggacaccaccgccaagctgagcaagggcgccatcccctgccccgccgccacccccgtgcccatcgtggagaagagaagcgagatcatcatgagccccgccaccctgagaagacagatcaagatcgagaccagaggcagagacagcccccccaccatcaccatccccgtgaacatcaaccacgccgccagcggcagcttcagagagagcgtggacgcccaggaggagatcagaaaggtggagaagagagccacctacgtgcacaaggacggcctgaacagcaccgaccacatggtgcccgacaccgagagctacgacgccgtggagatcatcagaaaggtggccgtgccccccagactgagcgagcacacccagagatacgaggccgccaacagaaccgtgcagatggccgagaacttcgtgaacgaccccgagaacgagatcaacagatggttcagagagttcgagcacggccccgtgagcgaggccaagagcaacagaagagtgtacgccaagggcgagaccaaccacaacatccagcaggagagcagaaccttctgcaaggaggagttcggcctgaccagcctgggcaacaccagcttcaccgacttcagctgcaagcaccccagagagctgagagagaagatccccgtgaagcagcccagaatctgcagcgagaccagaagcctgagcgagcacttcagcggcatggacgccttcgagagccagatcgtggagagcaagatgaagaccagcagcagccacagcagcgaggccggcaagagcggctgcgacttcaagcacgccccccccacctacgaggacgtgatcgccggccacatcctggacatcagcgacagccccaaggaggtgagaaagaacttccagaagacctggcaggagagcggcagagtgttcaagggcctgggctacgccaccgccgacgccagcgccaccgagatgagaaccaccttccaggaggagagcgccttcatcagcgaggccgccgcccccagacagggcaacatgtacaccctgagcaaggacagcctgagcaacggcgtgcccagcggcagacaggccgagttcagctag

SEQ ID NO: 77036 - DNA, 9984 bp, Artificial Sequence
  derived and/or modified sequence
atggcccggtatcaggctgcagtgagtaggggagattgcagatctttcagcgcaaacatgatggaggagtccgaaatgtgtgccgtccccggtggattagctaaggttaagaagcagtttgaggatgaaattacgagtagcaggaatacttttgctcagtatcagtaccaacaccagaatcgctccgaacaggaagctatacattcatctcaggtcggcacaagcagatcaagccaggagatggctcggaacgagcaggaaggatccaaagttcagaaaatcgatgtacacggtacagagatggtctctcacctcgagaagcacaccgaagaggtaaaccaggcctcacagtttcatcaatatgtgcaggagactgtgatcgatacccctgaagatgaagagatccccaaggtgagtactaagctgctcaaggaacagtttgagaagtctgcccaggaaaaaattctctactcggataaagagatgactacacccgcgaagcagattaagacggaatctgagtatgaggaaaccttcaagcccagttctgttgtgagcacaagttcaacaagctgcgtgtccacctctcagcggaaagagactagtaccacccgctactcagaccactcagtcaccagctctaccttggcgcagattaacgccacatcttccgggatgacggaggagttcccccccccacccccggacgtactacagactagcgtcgacgtaaccgcattcagccagtcacccgagttgccgtcacccccacgccggctgcctgttccaaaggatgtgtatagcaagcagagaaacctctacgagctcaaccgcctgtataagcatatccaccccgagctccggaagaatttggaaaaagattatataagcgaggtatctgaaattgtatcttctcagatgaattctggaagtagcgtaagcgccgatgtgcagcaggccagatacgttttcgaaaacactaacgactcatctcaaaaagatctgaactctgagagggagtacctggagtgggatgaaatccttaaaggggaggttcagtccattcgctggatcttcgagaaccagccattagactctatcaataacgggtcacctgacgagggagatataagtagggggatcgctgaccaagagataattgcgggaggggatgtcaagtacaccacctggatgtttgaaacccagccaatagacacgctcggggcctactctagtgacacagtggagaatgctgaaaaaattccagagctggcccggggcgacgtgtgtaccgctcgctggatgttcgagacaagacccctcgattcaatgaacaagatgcaccagtcgcaggaagaaagtgccgttaccattagcaaagatattaccggtggggatgtgaagactgtacgctacatgtttgagacacagcatttggatcaactcgggcagttgcactcagtggacgaggttcatctgctacagttgcggagcgaacttaaggaaataaagggaaatgtaaaacgatccattaagtgcttcgaaactcagccgctgtacgtgatacgggacggatccggccaaatgctggagatcaagaccgtccaccgagaggatgtagagaagggcgacgttcgcaccgcaaggtggatgttcgaaactcaacccctggatacaataaacaaggatatcaccgagattaaagtggtcagggggatctctatggaagaaaacgtgaaaggcggtgtttctaaagccaagtggttgttcgagacccagccacttgagaaaatcaaggagtccgaggaagttataatcgagaaggagaagatcattggcaccgacgtcagcagaaaatgctggatgttcgagacacagcccctggacatcttaaaggaggttcctgatgccgatagcctgcagcgggaggagatcatcggaggcgacgtccagaccacaaagcatttgtttgagaccctcccaatcgaggctcttaaggatagcccagacattgggaaactgcaaaaaattaccgccagcgaagaagaaaagggagacgtgagacatcagaaatggattttcgaaacccagcccctggaggacatcagaaaggataagaaggagtacactcggaccgtcaagctggaggaagttgatcggggcgatgtgaaaaactacacccatatctttgagtcaaacaacttaatcaagtttgacgcgtcacataagattgaggtggagggcgtgactcggggcgcggtagaactgaacaaatcactattcgaaaccactcctctgtatgctatccaggacccattgggcaagtaccaccaagtcaagacagttcaacaggaagagatcgtgagaggggatgtccgcagttgtaggtggctcttcgaaaccaggcctatcgaccagttcgatgaatccattcacaaattccaaatcatccgaggtatctccgcccaagaaatccagacgggtaacgttaaatccgccaagtggttatttgagacacagccccttgatagtataaagtatttctcggatgtggaggagacggagagcaagactgaacagactcgcgatattgtgaagggagacgtcaaaacctgtaagtggttattcgagacccagcctatggagtctctatacgaaaaagtgtctcttatgacctcctctgaagaaattcataagggagacgttaaaacctgtacatggctctttgagacccagcccctggacaccataaaagacgacagcgagactgctgtgaaactccagactgttaaacaggaggaaatccagggaggagatgtgcgaacagcatgtttcctttttgagacagaaaacctggactccatacaaggcgaggaggtgaaggagataaagccagtcgagatggatatacaggcaggggacgtcagctccatgagatataagtttgagaatcagagtctagactccatttcgtccagctctgaagaggtcctgaagaagatcaagactctgaagacagaggatatacagaaagggaatgtactgaattgtcgctggctgttcgagaatcagcccatcgacaaaatcaaggaatcccaggaaggcgatgagtgtgtgaagaccgtaacggatatccaaggaggtgatgtgagaaagggatgcttcatcttcgaaacctttagtctggatgagattaaggaagagtcagactacatcagcactaaaaagaccatcactgaggaggtcatccagggtgatgtcaagtcttataggatgttattcgaaacccagcccttgtacgcaattcaggatcgcgagggctcttaccacgaggttaccacggtgaaaaaggaggaggtgatccatggcgacgtgcgtggtaccagatggctgttcgagacgaagcccctggacagcatcaataagtcagagactgtctatgttatcaaaagcgtcactcaagaagacattcagaaaggcgatgtgagcagcgtgcgctaccgattcgagacccagcctttggatcagattagcgaggagtctcacaatattatgccctctatcgaccacatccagggcggcaatgttaaaacatctcgtcagttctttgaatctgaaaacttcgataaaaacaactacatccgtactgtgtcagtgaatgagattcaaaaaggcaacgtgaaaacctccacttggctgttcgagacccacacaatggacgagttaagaggtgagggcctggaatatgaaaacataaaaaccgtgactcaggaggacgttcagaaaggggacgtcaagcaggctgtatggctttttgagaaccggactttcgattcgataatggaggcccacaagggtatcacaaagatgactaaggaggaaatcccaccatccgatgtaaagacaaccacctggcttttcgagacgacaccactgcacgagttcaacgaaactagggtcgagaagatagaaattattggaaaaagtatcaaagaaacactcgaggatttatacagccaaaaggtgatccaggccccaggaatcattattgaggcagatgaaatcggtgacgtgcgcatggcgaagtataagcttatgaaccaggcatcccctgagatacagaaggaagaaattatcagggctgacctgcggaacattatggttaacttgctgagcaaaagggattgcactgagagagaaatactgatatcagaagaagaaaaaggaaatgtgaacctgacaaagacccagcttctgaaccggtcaactgaatttcacgctgaaaaggaggagatcgtgaagggcgacgtgcagcaggctatcaagaacctattctccgaagagaggagtgtgaaaaagggaattcttatccaggaagacgaaaaaggcgacattaatatgacgatctattgcctactgcatgaaaacgacggggataccatcgaaagagaggaggtgattggaggagacgtgaaacgcaccatccataacctgctttcatcaacgtccaacaacaaaatatcggagcgggctaagatagacgcctctgagaggggaaatgtccagttcttcaccacgtgtatcgaggctggtgccttggattatttgaagcaactacatactgagtccaatgagaccctaacggccaagaaacaggaaggtgagaaggaaataattgggggcgacgtggagggcacaaaattgctgctgaagaaacgccagagtctggtggagcgaacagtgtcggagaccgatatcatcccaggagacgtgcataacaccgtcaaggtatttatgacagagcctcagagtacatttggcaaaatccccaaagaggaaattattaagggcgacctaacctccactctgaattccctgagtcaagcggtgaatcagaaaactgttactaagacagaggaaatcataaagggaaacatgcttgccacactaaagagcctcaaagagagctctcaccgatggaaggaatcaaagcaacccgacgccataccaggtgacatagagaaggcaatagagtgtctggaaaaggctactaacactaaaaccgagatactaaagaaggaactcctgaaggatgacttagagacaagcctgaggagcctgaaggaggctcagcgatctttcaaggaagtccataaagagggcgtgataaagaaggacgctaaagccgtgatggcagggtcatccggggagcagaagacagacattcaccaggtcgccgttcagcggaataaaaattcgctgctgcagccaaagcctgggcccttcgaaccagctgcaaaatggcaggggggggccgacaccctgagtcagacgatgggaaagagctgtcacggaaacctagttgaggaaagaacagaggtgaaccttccgaaagctccaaagggaacggtgaagatcgtaatcgatagagaacagaataatgatgccctcgagaagtctttgcggcgcctgtccaattcacaccacaagagtaatgtgcttgaatccggagacaagaccggcgtgtggaccgatacgactggcgaacaacacctcagagacgaatatatgtctaggcaactgaccagtaccgtgtcagtcaaaaataatcttacaaccaaggaatctgatcgggccgtgcgggaactcaagaaggacgacgtgttcaatagtatacagagcgctggaaaaacagtggggaaacaacaaacctacgagctccgaaatgatcaccagaaaatggagggattccacataaagtcccctaaaaagaccaagaacataaagatcctgactgacacgcagagctcaaagccatctccaactcaacacccggtgtcaatgccagtgggcggcacttatgatctgtccggggacttccagaaacagaccctgctgaagcaagagactaagtacagcaataaagacataaagaagaaaaacattaatctgcaacctatgtggcagttgctgcccgttgagcaagataccagtaacgtgaccgagatgaaggtgagtgagaaatctcataacacctttaaggccacgaataaaaaaagagagacagatgttcatctcaaatcgcaagattttcttatgaaaaccaatacctcgactggtctcaagatggctatggagaggagccttaaccctatcaactttaatcccgagaacaatgtgaaagaatcagagtgtccgcttcctcccccatctcctccacctcctccaccatccaacgcgtcaagcgagatcgaattccctctgcctccacctccaccactcatgatgttccccgaaaagaatggatttctgccgtctctgtccaccgagaagattaaggcggaatttgaatcttttccaggtttgccgctaccccctccacctgttgacgagaagagcgaacgtgagagctcgtctatgttcctcccgccccctccccctccaactccgagccagaagcccgctcaccttctgtcatcttcggccccggaaaaacatagtggggatttcatgcagcagtactcccagaaggaggcttctaacagccagaacagtcaggcgaagattatcacaggaaagaccggggtgctgccacccccaaccctccctaagcctaaactgccaaagcacattaaggacaacaagaatgattttagtcctaaggtggagttggctacgtcattatccgacatggaatgtaaaataacaacctctaaagaccagaagaaggtgatggtaatgacgagcagtgaacatacagaaaccaagcaaaatgtcatatctaaatccttggatgaaagaaaacagctgtccatagacagcgctaactgtcttagccacacggtcccaggaacttcagctccccggaagaagcagatcgcccctctgatcaaaagccattctttcccagaaagtagtggacagcagaaccccaagccgtacatgcggaagttcaagactcccctgatgatcgccgaggagaagtatagacagcaaaaagaagaaatcgaaaaacaaaaacaggaaagtagctattacaatatagtgaagacacagtctcagaatcaacacataacggaagtggaaaaagagatgcctctgcaaaaaacaaacgaggaggtctccctcagcgggatcgacagcgaatgcaccgttgtgcagcctagccctggatcgcaatccaatgccaggatcctgggcgtgtgttccgacaaccagctgagcaccacatctcccgagaccgtcgctgctaaacgattacaccatgtcttggccgccagcgaagacaaagacaagatgaagaaagaagttctgcagtcgagtagagatattatgcaatctaagtccgcctgcgagattaaacagtcccatcaagaatgcagtacacaacaaacgcagcaaaaaaaatatctcgaacagctgcacctgcctcagtcaaaaccgatttctcctaactttaaagtgaaaactatcaagcttcctaccttggaccacactctcaatgaaactgatcactcttatgagtcccacaaacagcagtccgagatcgatgtgcagacctttaccaaaaaacagtacctgaagactaaaaagaccgaggcctcaacagagtgctctcacaagcagagcctggccgaacgacactaccagctgcccaaaaaagaaaagcgagtcaccgtccaactccccactgaaagtatacagaaaaaccaggaggataaactcaagatggtgcctcgcaagcaaagagagttctcgggcagcgatagaggaaagttaccgggttcagaggaaaagaatcagggtcccagcatgattggtagaaaagaagagcggttgatcacagaaaggaagcacgaacacctcaagaataagtcagcgcctaaagtagtgaagcagaaggttattgatgcccacttggactctcaaacccaaaacttccagcaaacacagattcaaacagcagaaagcaaggccgagcataaaaagctgccccagccctataacagtctgcaagaggagaagtgtctggaagtcaagggcattcaggagaaacaggtcttcagcaacactaaggacagcaaacaggaaattactcagaacaagtccttcttttccagtgtcaaagaatcccagcgggacgatgggaagggtgcactgaatattgtggagttcctcaggaagcgggaagaactgcagcagatcctctcaagagtcaagcagtttgaggctgagccgaacaagagtggactgaaaacattccagacccttctcaatacaattccggggtggctaatttcggaagataaaagggagtacgctgtccatatagccatggagaacaaccttgagaaggtcaaggaagagattacccatatcaaaacccaagccgaagatatgctggtctcctacgaaaatattatccaaacagctatgatgtcttcaaagaccggaaaacccgggaacaaaccgacctccctagatgagacctcctctaaggtttccaatgtgcatgtatctaacaataagaattccgaacagaaggaaaacaagatagccaaggaaaaaacggtgcagcaccaggtcgccgcccatcacgaggccactgtgcgcagccatgttaaaacccatcaagagattaagcttgacgattctaacatccctcctcccagcctgaagactaggccaccaagccccacctttattactattgagagcaccgcgcgccggaccgagaaccccacaaagaatgagctctctcaatctccgaagaaggatagctacgtggaaccgccacccagacgcccaatgagccagaagagcgagatccatagggccaatacgtccccaagtcctccacggagcaggtccgaacagctggtgagattgaaagacacaacggctaagcttagcaagggagctataccctgtcccgctgccactcccgtgccgatagtagaaaaacggtctgaaatcatcatgtccccagcaactctgcgcaggcagatcaagatcgaaaccagaggcagggacagtccacccactatcaccatccccgtgaatatcaatcacgctgcctccggttcattccgcgaatcggttgatgcacaggaggaaatcaggaaagtggaaaagcgcgcgacctacgtccataaggatggccttaactcaacggatcatatggttccagatacagagagttacgacgctgtggaaatcatacggaaggtcgctgttccgcctcgattatcggagcatacccagcggtatgaagcggccaatcgcactgtccagatggctgagaactttgttaacgatcctgaaaacgagatcaatagatggttcagagagttcgagcatgggccagtctcggaagccaagagcaaccgcagggtctacgctaagggagagactaaccataacatccagcaggagagccgcacattttgcaaagaagagtttggcctgactagtctggggaacacatctttcacagattttagttgcaaacatccacgggagctgcgcgagaagatcccagtcaagcagcctcggatatgtagcgagacccgctcactgtctgaacacttcagcggcatggacgccttcgagagccaaatcgtcgaatcaaaaatgaaaacttcaagcagccattcctctgaggccgggaagagcggttgcgactttaaacacgcacctcccacatatgaggatgtgatcgcagggcacatattagacatctccgactctcctaaggaggtgcgcaagaacttccaaaagacatggcaggaatccggcagggtctttaaaggcctgggatacgcgaccgcagacgctagcgctacagaaatgaggacaacgtttcaggaagagagtgcattcatttctgaggcggctgccccaagacagggcaacatgtatacactgagcaaagattccctgtctaatggcgtacctagcgggcggcaggcggaattcagttag

SEQ ID NO: 77037 - DNA, 2892 bp, Artificial Sequence
  derived and/or modified sequence
atgccacttcagaaaaccaacgaagaagtgagcctgagtggtattgacagcgagtgcacagtggtgcagccctcacctggaagccaatcaaatgccagaattctcggagtgtgctcggacaatcagctgtctactacttcccctgagactgtggccgctaagcgattgcaccatgtattagccgcaagcgaggacaaagataagatgaagaaagaggtacttcagagcagcagagacatcatgcagtccaaaagcgcgtgcgaaatcaaacagagccaccaggagtgttcaactcagcagacacagcagaaaaagtacctcgaacaactgcacctcccgcaatcaaaacccatcagtcctaactttaaggtgaagaccataaagttaccgaccttggaccacacattgaatgaaacggaccactcctacgaatcccataaacagcagtccgaaattgacgtccaaactttcaccaaaaagcaatacctgaagactaagaaaacagaggcctccacggagtgctcacacaagcagtcgcttgcagaacgtcactatcagttgcctaagaaagagaaacgggtcacggtccagttaccaacggagtctattcaaaagaaccaggaggacaagctcaaaatggtaccacgaaagcagagggaattcagtggttccgacagagggaaactccccgggagcgaagagaaaaatcagggacccagcatgataggaaggaaggaggaacgcttaatcaccgaacggaaacacgagcatctcaagaacaagagtgccccgaaagtagtcaaacagaaggttattgacgcccacctggacagccagacgcagaacttccagcagacacagatacagactgctgagagtaaggccgagcacaagaagctgccacaaccctataactcgttacaggaggaaaagtgccttgaggtcaagggtatccaggagaagcaggtattctccaataccaaggactccaaacaggaaatcactcagaacaaaagctttttttcctcagtgaaggagagccagcgcgacgacggcaaaggtgccttgaacatcgtggaattcttacggaaacgcgaagagctccagcagatcttaagccgtgtgaagcagttcgaggcagagcccaataagtctgggctcaagactttccagacattacttaataccatcccaggttggttgatctctgaagacaagcgtgagtacgcagtgcacattgccatggaaaacaacctggaaaaggtgaaagaggaaattacgcatatcaaaacacaggcggaggatatgcttgtgtcgtacgaaaacatcatccaaaccgcaatgatgagctcaaaaacgggtaagcctggaaataaaccaacaagtctggacgaaacgtcaagtaaggttagcaatgttcacgtctcgaacaataagaatagcgagcagaaagaaaacaagattgccaaggagaagaccgttcagcatcaagtggctgcgcatcacgaggccacagtcaggtcccatgtcaaaactcatcaagaaattaaattagatgacagcaatatccctcccccatccctaaaaacccgtcctcccagtccaacctttatcacaattgaatctacagctaggcgaacggaaaacccaacaaagaacgagctgtcacaatctccgaaaaaagattcttacgtggagcctcccccacggcgcccaatgtcacagaagagtgaaattcatcgcgccaatacgtccccgtccccacctcgcagtcgctcagagcagctggtcaggcttaaagatactactgctaaattgtcgaagggcgccatcccctgcccagccgcgacgcccgtgccgatcgtggagaagcgaagcgaaattatcatgtctcccgcgaccctccggcgccagatcaagatcgaaacccggggccgcgacagtccacctactattacaatacccgtcaatattaatcacgccgccagcggatcgtttcgcgaatcagtagacgcccaagaggaaatacgcaaggtcgaaaaaagggccacatacgtccacaaggatggacttaattcaaccgatcacatggtccctgataccgaatcctacgacgcagtggagattataagaaaggtggccgtgccgccgcgcctctcagagcacacacagcggtatgaggctgccaaccgtaccgttcaaatggcagagaactttgttaacgatccagagaatgagattaatcgctggttccgcgagttcgaacatggccccgtgtccgaggccaaatctaataggagagtgtacgctaagggtgaaaccaatcataatatccaacaggagtcgaggaccttctgtaaggaagaattcggtttaacctcactcggcaatacttcctttacagacttctcatgcaaacatccccgagagctcagggaaaagattcccgtaaagcaacctagaatttgctcagagaccaggagcctatctgagcacttctctgggatggacgccttcgaaagtcaaattgtggaaagcaagatgaaaacgagttcctctcacagttctgaggccggcaaatctggatgtgactttaaacacgccccacccacctatgaagatgtcatcgcagggcatatacttgatatttctgacagtccaaaggaggtgcgcaaaaactttcagaaaacttggcaagaaagcggcagagtgtttaaaggattgggttacgctactgcggacgcgtccgccactgaaatgcgaaccacctttcaggaggaatccgctttcatttccgaagctgccgcaccacgacagggcaacatgtacacactgagcaaggattccctgtctaacggagtgccatccggccgccaagcagagttttcttag

SEQ ID NO: 77038 - DNA, 9984 bp, Artificial Sequence
  derived and/or modified sequence
atggcccgctaccaggccgctgtgtccagaggagactgccgctccttcagcgccaacatgatggaggagagcgagatgtgtgctgtgcctgggggcctggccaaggtgaagaagcagtttgaagatgagatcaccagcagcaggaacacctttgcccagtaccagtaccagcaccagaacagaagtgagcaggaggccatccacagcagccaggtgggcaccagccgcagcagccaggagatggccagaaatgagcaggagggcagcaaggtgcagaagattgatgtgcatggaacagagatggtgagccacctggagaagcacacagaggaggtgaaccaggccagccagttccaccagtatgtgcaggagaccgtgattgacaccccagaagatgaggagatccccaaggtgtccaccaagctgctgaaggagcagtttgagaagagcgcccaggagaagatcctgtacagcgacaaggagatgaccaccccagccaagcagatcaagacagaaagtgaatatgaggagaccttcaagcccagctctgtggtgtccaccagcagcaccagctgtgtgtccaccagccagaggaaggagaccagcaccacccgctacagcgaccacagcgtgaccagcagcaccctggcccagatcaatgccaccagcagcggcatgacagaggagttccccccacctcctccagatgtgctgcagacctctgtggatgtgacagccttcagccagagccctgagctgcccagccccccccggcggctgcctgtgcccaaggatgtgtacagcaagcagaggaacctgtatgagctgaacagactctacaagcacatccaccctgagctgaggaagaacctggagaaggactacatcagcgaggtgtctgagatcgtgagcagccagatgaacagcggcagctctgtgtctgcagatgtgcagcaggcccgctacgtgtttgagaacaccaatgacagcagccagaaggacctgaacagcgagcgggagtacctggagtgggatgagatcctgaagggggaggtgcagagcatccgctggatctttgagaaccagcccctggacagcatcaacaacggcagcccagatgaaggagacatcagccggggcattgctgaccaggagatcatcgctggaggagatgtgaagtacaccacctggatgtttgagacccagcccatcgacaccctgggcgcctacagcagtgacacagtggagaatgctgagaagatccctgagctggcccggggagatgtgtgcacagcccgctggatgtttgagacccggcccctggacagcatgaacaagatgcaccagagccaggaggagagcgctgtgaccatcagcaaggacatcactggaggagatgtgaagacagtgcgctacatgtttgagacccagcacctggaccagctgggccagctgcacagcgtggatgaggtgcacctgctgcagctgcggtctgagctgaaggagatcaagggaaatgtgaagaggagcatcaagtgctttgagacccagcccctgtatgtgatcagagatggcagcggccagatgctggagatcaagacagtgcaccgggaggatgtggagaagggagatgtgaggacagcccgctggatgtttgagacccagcccctggacaccatcaacaaggacatcacagagatcaaggtggtgcggggcatctccatggaggagaatgtgaagggcggcgtgtccaaggccaagtggctgtttgagacccagcccctggagaagatcaaggagagcgaggaggtgatcatcgagaaggagaagatcatcggcacagatgtgtccaggaagtgctggatgtttgagacccagcccctggacatcctgaaggaggtgcctgatgctgacagcctgcagcgggaggagatcattggaggagatgtgcagaccaccaagcacctgtttgagaccctgcccatcgaggccctgaaggacagcccagacatcggcaagctgcagaagatcacagccagcgaggaggagaagggagatgtgcgccaccagaagtggatctttgagacccagcccctggaggacatcaggaaggacaagaaggagtacaccaggacagtgaagctggaggaggtggacagaggagatgtgaagaactacacccacatctttgagagcaacaacctgatcaagtttgatgccagccacaagattgaggtggagggcgtgaccagaggagctgtggagctgaacaagagcctgtttgagaccacccccctgtatgccatccaggaccccctgggcaagtaccaccaggtgaagacagtgcagcaggaggagatcgtgagaggagatgtgcgcagctgccgctggctgtttgagacccggcccatcgaccagtttgatgagagcatccacaagttccagatcatccggggcatcagcgcccaggagatccagacaggaaatgtgaagagcgccaagtggctgtttgagacccagcccctggacagcatcaagtacttcagtgatgtggaggagacagagagcaagacagagcagacccgggacatcgtgaagggagatgtgaagacctgcaagtggctgtttgagacccagcccatggagagcctgtatgagaaggtgtccctgatgaccagcagcgaggagatccacaagggagatgtgaagacctgcacctggctgtttgagacccagcccctggacaccatcaaggatgattctgaaacagctgtgaagctgcagacagtgaagcaggaggagatccagggcggagatgtgaggacagcctgcttcctgtttgaaacagagaacctggacagcatccagggcgaggaggtgaaggagatcaagcctgtggagatggacatccaggccggagatgtgtcctccatgagatacaagtttgagaaccagagcctggacagcatcagcagcagcagcgaggaggtgctgaagaagatcaagaccctgaagacagaggacatccagaagggaaatgtgctgaactgccgctggctgtttgagaaccagcccatcgacaagatcaaggagagccaggagggagatgaatgtgtgaagacagtgacagacatccagggcggagatgtgaggaagggctgcttcatctttgagaccttcagcctggatgagatcaaggaggagagtgactacatcagcaccaagaagaccatcacagaggaggtgatccagggagatgtgaagagctacaggatgctgtttgagacccagcccctgtatgccatccaggaccgggagggcagctaccacgaggtgaccaccgtgaagaaggaggaggtgattcatggagatgtgcggggcacccgctggctgtttgagaccaagcccctggacagcatcaacaagtcagaaacagtgtatgtgatcaagtctgtgacccaggaggacatccagaagggagatgtgtcctctgtgcgctacagatttgagacccagcccctggaccagatcagcgaggagagccacaacatcatgcccagcattgaccacatccagggcggcaatgtgaagaccagccggcagttctttgaaagtgagaactttgacaagaacaactacatcagaacagtgtctgtgaatgagatccagaagggaaatgtgaagaccagcacctggctgtttgagacccacaccatggatgagctgcggggggagggcctggagtatgagaacatcaagacagtgacccaggaggatgtgcagaagggagatgtgaagcaggccgtgtggctgtttgaaaatagaacatttgacagcatcatggaggcccacaagggcatcaccaagatgaccaaggaggagatccccccatctgatgtgaagaccaccacctggctgtttgagaccacccccctgcacgagttcaatgagaccagggtggagaagattgagatcatcggcaagagcatcaaggagaccctggaggacctgtacagccagaaggtgatccaggcccctggcatcatcatcgaggctgatgaaattggagatgtgaggatggccaagtacaagctgatgaaccaggccagccctgagatccagaaggaggagatcatccgggctgacctgaggaacatcatggtgaacctgctgagcaagagggactgcacagagcgggagatcctgatcagcgaggaggagaagggaaatgtgaacctgaccaagacccagctgctgaacagaagcacagagttccacgccgagaaggaggagatcgtgaagggagatgtgcagcaggccatcaagaacctcttcagcgaggagaggtctgtgaagaagggcatcctgatccaggaggatgagaagggggacatcaacatgaccatctactgcctgctgcatgaaaatgatggagacaccatcgagcgggaggaggtgattggaggagatgtgaagaggaccatccacaacctgctgagcagcaccagcaacaacaagatcagcgagcgggccaagattgatgccagcgagagaggaaatgtgcagttcttcaccacctgcatcgaggccggggccctggactacctgaagcagctgcacacagagagcaatgagaccctgacagccaagaagcaggagggggagaaggagatcattggaggagatgtggagggcaccaagctgctgctgaagaagaggcagagcctggtggagaggacagtgtctgaaacagacatcatccctggagatgtgcacaacacagtgaaggtgttcatgacagagccccagagcaccttcggcaagatccccaaggaggagatcatcaagggggacctgaccagcaccctgaacagcctgagccaggccgtgaaccagaagacagtgaccaagacagaggagatcatcaagggcaacatgctggccaccctgaagagcctgaaggagagcagccaccgctggaaggagagcaagcagccagatgccatccctggggacatcgagaaggccatcgagtgcctggagaaggccaccaacaccaagacagagatcctgaagaaggagctgctgaaggatgacctggagaccagcctgcggagcctgaaggaggcccagaggagcttcaaggaggtgcacaaggagggcgtcatcaagaaggatgccaaggctgtgatggccggcagcagtggagagcagaagacagacatccaccaggtggccgtgcagaggaacaagaacagcctgctgcagcccaagccaggcccctttgagcctgctgccaagtggcagggcggcgctgacaccctgagccagaccatgggcaagagctgccacggcaacctggtggaggagaggacagaggtgaacctgcccaaggcccccaagggcaccgtgaagatcgtcatcgaccgggagcagaacaatgatgccctggagaagagcctgcggcggctgagcaacagccaccacaagagcaatgtgctggagagcggggacaagacaggagtgtggacagacaccactggagagcagcacctgagagatgagtacatgagccggcagctgaccagcacagtgtctgtgaagaacaacctgaccaccaaggagagtgacagagctgtgcgggagctgaagaaggatgatgtgttcaacagcatccagagcgctgggaagacagtgggcaagcagcagacctatgagctgagaaatgaccaccagaagatggagggcttccacatcaagagccccaagaagaccaagaacatcaagatcctgacagacacccagagcagcaagcccagccccacccagcaccctgtgtccatgcctgtgggcggcacctatgacctgagcggggacttccagaagcagaccctgctgaagcaggagaccaagtacagcaacaaggacatcaagaagaagaacatcaacctgcagcccatgtggcagctgctgcctgtggagcaggacaccagcaatgtgacagagatgaaggtgtctgagaagagccacaacaccttcaaggccaccaacaagaagcgggagacagatgtgcacctgaagagccaggacttcctgatgaagaccaacaccagcacaggcctgaagatggccatggagaggagcctgaaccccatcaacttcaacccagaaaataatgtgaaggagagcgagtgccccctgcccccacccagccccccacctcctccacccagcaatgccagcagcgagattgagttccccctgcccccacctccacccctgatgatgtttcctgagaagaatggcttcctgcccagcctgagcacagagaagatcaaggccgagtttgagagcttccctggcctgcccctgcccccacctcctgtggatgagaagtctgagcgggagagcagctccatgttcctgcccccacctcctccacccacccccagccagaagccagcccacctgctgagcagcagcgcccctgagaagcacagcggggacttcatgcagcagtacagccagaaggaggccagcaacagccagaacagccaggccaagatcatcaccgggaagacaggagtgctgcccccacccaccctgcccaagcccaagctgcccaagcacatcaaggacaacaagaatgacttcagccccaaggtggagctggccaccagcctgagtgacatggagtgcaagatcaccaccagcaaggaccagaagaaggtgatggtgatgaccagcagcgagcacacagagaccaagcagaatgtcatcagcaagagcctggatgagaggaagcagctgagcattgacagcgccaactgcctgagccacacagtgcccggcaccagcgcccccaggaagaagcagatcgcccccctcatcaagagccacagcttccctgagagcagcggccagcagaaccccaagccctacatgaggaagttcaagacccccctgatgattgctgaggagaagtaccggcagcagaaggaggagattgagaagcagaagcaggagagcagctactacaacatcgtgaagacccagagccagaaccagcacatcacagaggtggagaaggagatgcccctgcagaagaccaatgaggaggtgtccctgtctggaattgattctgagtgcaccgtggtgcagcccagccctggcagccagagcaatgcccgcatcctgggcgtgtgcagcgacaaccagctgagcaccaccagccctgagaccgtggccgccaagaggctgcaccacgtgctggccgccagcgaggacaaggacaagatgaagaaggaggtgctgcagagcagccgggacatcatgcagagcaagagcgcctgtgagatcaagcagagccaccaggagtgcagcacccagcagacccagcagaagaagtacctggagcagctgcacctgccccagagcaagcccatcagccccaacttcaaggtgaagaccatcaagctgcccaccctggaccacaccctgaatgaaacagaccacagctatgagagccacaagcagcagagcgagattgatgtgcagaccttcaccaagaagcagtacctgaagaccaagaagacagaggccagcacagaatgtagccacaagcagagcctggccgagcggcactaccagctgcccaagaaggagaagagggtgacagtgcagctgcccacagagagcatccagaagaaccaggaggacaagctgaagatggtgcccaggaagcagcgggagttcagcggcagtgaccggggcaagctgcccggcagcgaggagaagaaccagggccccagcatgattggaaggaaggaggagcggctcatcacagagaggaagcatgagcacctgaagaacaagagcgcccccaaggtggtgaagcagaaggtgattgatgcccacctggacagccagacccagaacttccagcagacccagatccagacagctgagagcaaggccgagcacaagaagctgccccagccctacaacagcctgcaggaggagaagtgcctggaggtgaagggcatccaggagaagcaggtgttcagcaacaccaaggacagcaagcaggagatcacccagaacaagagcttcttcagctctgtgaaggagagccagagagatgatggaaaaggagccctgaacatcgtggagttcctgaggaagcgggaggagctgcagcagatcctgagccgggtgaagcagtttgaggccgagcccaacaagagcggcctgaagaccttccagaccctgctgaacaccatccctggctggctgatcagcgaggacaagcgggagtatgctgtgcacatcgccatggagaacaacctggagaaggtgaaggaggagatcacccacatcaagacccaggccgaggacatgctggtgtcctatgagaacatcatccagacagccatgatgagcagcaagacaggcaagccaggcaacaagcccaccagcctggatgagaccagcagcaaggtgtccaatgtgcacgtgagcaacaacaagaacagcgagcagaaggagaacaagatcgccaaggagaagacagtgcagcaccaggtggccgcccaccacgaggccaccgtgcgcagccacgtgaagacccaccaggagatcaagctggatgacagcaacatccccccacccagcctgaagacccggccccccagccccaccttcatcaccatcgagagcacagccaggagaacagagaaccccaccaagaatgagctgagccagagccccaagaaggacagctatgtggagcccccaccccggcggcccatgagccagaagtctgagatccaccgggccaacaccagccccagcccccccaggagccgctctgagcagctggtgcggctgaaggacaccacagccaagctgagcaagggggccatcccctgcccagctgccacccctgtgcccatcgtggagaagaggtctgagatcatcatgagccctgccaccctgcggcggcagatcaagattgagacccggggccgggacagcccccccaccatcaccatccctgtgaacatcaaccacgccgccagcggcagcttccgggagagcgtggatgcccaggaggagatcaggaaggtggagaagagggccacctacgtgcacaaggatggcctgaacagcacagaccacatggtgcctgacacagagagctatgatgctgtggagatcatcaggaaggtggccgtgcccccccggctgtctgagcacacccagagatatgaggccgccaacagaacagtgcagatggctgaaaattttgtgaatgaccctgaaaatgagatcaaccgctggttccgggagtttgagcacggccctgtgtctgaggccaagagcaacagaagagtgtatgccaagggggagaccaaccacaacatccagcaggagagcaggaccttctgcaaggaggagtttggcctgaccagcctgggcaacaccagcttcacagacttcagctgcaagcacccccgggagctgcgggagaagatccctgtgaagcagccccgcatctgcagcgagaccaggagcctgtctgagcacttcagcggcatggatgcctttgagagccagatcgtggagagcaagatgaagaccagcagcagccacagcagcgaggccggcaagagcggctgtgacttcaagcacgccccacccacctatgaagatgtgattgctggccacatcctggacatcagtgacagccccaaggaggtgaggaagaacttccagaagacctggcaggagagcggccgggtcttcaagggcctgggctacgccacagcagatgccagcgccacagagatgaggaccaccttccaggaggagagcgccttcatcagcgaggccgccgccccccggcagggcaacatgtacaccctgagcaaggacagcctgagcaatggagtgcccagcggccggcaggccgagttctcctag

SEQ ID NO: 77039 - DNA, 2892 bp, Artificial Sequence
  derived and/or modified sequence
atgcccctgcagaagaccaatgaggaggtgtccctgtctggaattgattctgagtgcaccgtggtgcagcccagccctggcagccagagcaatgcccgcatcctgggcgtgtgcagcgacaaccagctgagcaccaccagccctgagaccgtggccgccaagaggctgcaccacgtgctggccgccagcgaggacaaggacaagatgaagaaggaggtgctgcagagcagccgggacatcatgcagagcaagagcgcctgtgagatcaagcagagccaccaggagtgcagcacccagcagacccagcagaagaagtacctggagcagctgcacctgccccagagcaagcccatcagccccaacttcaaggtgaagaccatcaagctgcccaccctggaccacaccctgaatgaaacagaccacagctatgagagccacaagcagcagagcgagattgatgtgcagaccttcaccaagaagcagtacctgaagaccaagaagacagaggccagcacagaatgtagccacaagcagagcctggccgagcggcactaccagctgcccaagaaggagaagagggtgacagtgcagctgcccacagagagcatccagaagaaccaggaggacaagctgaagatggtgcccaggaagcagcgggagttcagcggcagtgaccggggcaagctgcccggcagcgaggagaagaaccagggccccagcatgattggaaggaaggaggagcggctcatcacagagaggaagcatgagcacctgaagaacaagagcgcccccaaggtggtgaagcagaaggtgattgatgcccacctggacagccagacccagaacttccagcagacccagatccagacagctgagagcaaggccgagcacaagaagctgccccagccctacaacagcctgcaggaggagaagtgcctggaggtgaagggcatccaggagaagcaggtgttcagcaacaccaaggacagcaagcaggagatcacccagaacaagagcttcttcagctctgtgaaggagagccagagagatgatggaaaaggagccctgaacatcgtggagttcctgaggaagcgggaggagctgcagcagatcctgagccgggtgaagcagtttgaggccgagcccaacaagagcggcctgaagaccttccagaccctgctgaacaccatccctggctggctgatcagcgaggacaagcgggagtatgctgtgcacatcgccatggagaacaacctggagaaggtgaaggaggagatcacccacatcaagacccaggccgaggacatgctggtgtcctatgagaacatcatccagacagccatgatgagcagcaagacaggcaagccaggcaacaagcccaccagcctggatgagaccagcagcaaggtgtccaatgtgcacgtgagcaacaacaagaacagcgagcagaaggagaacaagatcgccaaggagaagacagtgcagcaccaggtggccgcccaccacgaggccaccgtgcgcagccacgtgaagacccaccaggagatcaagctggatgacagcaacatccccccacccagcctgaagacccggccccccagccccaccttcatcaccatcgagagcacagccaggagaacagagaaccccaccaagaatgagctgagccagagccccaagaaggacagctatgtggagcccccaccccggcggcccatgagccagaagtctgagatccaccgggccaacaccagccccagcccccccaggagccgctctgagcagctggtgcggctgaaggacaccacagccaagctgagcaagggggccatcccctgcccagctgccacccctgtgcccatcgtggagaagaggtctgagatcatcatgagccctgccaccctgcggcggcagatcaagattgagacccggggccgggacagcccccccaccatcaccatccctgtgaacatcaaccacgccgccagcggcagcttccgggagagcgtggatgcccaggaggagatcaggaaggtggagaagagggccacctacgtgcacaaggatggcctgaacagcacagaccacatggtgcctgacacagagagctatgatgctgtggagatcatcaggaaggtggccgtgcccccccggctgtctgagcacacccagagatatgaggccgccaacagaacagtgcagatggctgaaaattttgtgaatgaccctgaaaatgagatcaaccgctggttccgggagtttgagcacggccctgtgtctgaggccaagagcaacagaagagtgtatgccaagggggagaccaaccacaacatccagcaggagagcaggaccttctgcaaggaggagtttggcctgaccagcctgggcaacaccagcttcacagacttcagctgcaagcacccccgggagctgcgggagaagatccctgtgaagcagccccgcatctgcagcgagaccaggagcctgtctgagcacttcagcggcatggatgcctttgagagccagatcgtggagagcaagatgaagaccagcagcagccacagcagcgaggccggcaagagcggctgtgacttcaagcacgccccacccacctatgaagatgtgattgctggccacatcctggacatcagtgacagccccaaggaggtgaggaagaacttccagaagacctggcaggagagcggccgggtcttcaagggcctgggctacgccacagcagatgccagcgccacagagatgaggaccaccttccaggaggagagcgccttcatcagcgaggccgccgccccccggcagggcaacatgtacaccctgagcaaggacagcctgagcaatggagtgcccagcggccggcaggccgagttctcctag

SEQ ID NO: 77040 - DNA, 9984 bp, Artificial Sequence
  derived and/or modified sequence
atggcccggtaccaggccgccgtgagccggggcgactgccggagcttttcagcaaatatgatggaggaaagcgaaatgtgcgcggtccccggcggactggcaaaggtgaaaaagcagttcgaagacgagatcaccagcagcaggaacaccttcgcacagtaccaataccagcaccagaatcgctccgagcaggaggctatccactcgtcccaggtgggtactagtaggtcttctcaggaaatggcccgcaacgagcaagaggggtccaaggttcagaagattgatgtgcatgggaccgaaatggtgagccacctggaaaagcatacagaggaagtgaaccaggctagtcagtttcaccagtatgttcaggagacggttattgatacacccgaagacgaggagatcccaaaggttagcacgaaactgctgaaagagcaatttgaaaaatcggctcaggagaaaattctctattcggacaaggagatgaccacacccgccaaacagatcaagacagaatcagagtatgaggaaacatttaaaccatcatccgtggtctccactagcagcacatcttgcgtgagcacaagccagcgaaaggaaacatcaactacaagatattcagaccactcagtaacatcctcaaccttagcgcagattaatgccacttcatcgggcatgacggaagaatttcctccacctccccctgatgtcctgcagacgtccgtcgacgtcactgcctttagtcagagtcccgaattacctagcccaccacgcagactccctgtccccaaagatgtttatagtaaacaacgcaatctgtacgaactgaatagactgtacaagcacatccacccggagctgcgcaagaacctggaaaaggactatatcagtgaggtgtctgaaattgtgagctctcagatgaactcaggcagctctgtgtcggccgacgtgcagcaggctcggtatgtctttgaaaatacgaatgattcctcccagaaggatcttaacagtgaacgcgaatacctcgaatgggacgaaattctaaaaggcgaggtccagagcatccgatggattttcgaaaatcagccacttgactctattaataacggctcacccgacgaaggcgacatcagtaggggaatagcggaccaggaaatcatcgcaggcggggatgtgaagtatacgacctggatgttcgaaactcaacccattgacacactcggcgcatatagcagcgataccgttgaaaacgcagagaagatccctgagctggcaagaggcgacgtctgcaccgcacgatggatgtttgaaacacgccctctggattcaatgaataagatgcaccagtcccaggaagagtccgctgtgacaatctctaaggatatcacgggcggggacgtgaaaacggtccggtacatgttcgaaacacagcatttggaccagctggggcagctgcacagcgtagacgaggtgcaccttttgcagctcagatcagagctgaaagagataaaggggaatgttaagcgctctatcaaatgttttgagacacagccgttatacgtcatcagagatggcagtggccagatgctcgaaataaaaactgtgcaccgtgaagatgtcgaaaagggcgacgtacggaccgccagatggatgtttgagacccaacccctggataccatcaataaggatatcaccgagatcaaagtcgtgagaggcatctcgatggaggagaatgttaagggaggcgtcagcaaggcaaagtggctctttgagacccaacccctggaaaaaataaaagagtcagaagaggttataatcgagaaagagaaaatcatcggcacagatgttagcaggaagtgctggatgtttgagacccagccactcgatattttgaaagaagtgcccgacgccgactcactccaaagagaagagatcatcggaggcgatgtgcagactactaagcatctgtttgagaccctccccatcgaggccttgaaggacagcccagatatagggaagctccagaaaattactgcatccgaggaggaaaagggcgacgtgcgtcatcagaagtggatttttgagactcagccgctcgaagacattagaaaggacaaaaaggagtacacgcgaacagtgaaactcgaggaggtggatagaggcgacgtcaaaaactatacgcatatttttgagtccaataacctcataaaattcgatgcatcgcacaaaattgaagtggagggcgttacaaggggcgccgtggaactgaacaagtccctatttgaaacaacgcctctgtacgcaatccaagaccccttaggaaagtaccaccaagtcaaaacagtgcagcaggaagaaatcgtgcggggagatgtgcgctcctgtcgttggctgttcgagacccgtcccatcgaccagttcgacgagtccatccataagtttcagataattcgcggaatatctgctcaggagatacagaccggcaacgtgaaatcagcaaagtggctctttgaaacccaaccgctggattccattaagtacttttcggatgtcgaggagactgagtctaaaaccgagcagacccgggatatcgtgaagggcgacgttaagacatgcaagtggctgtttgagacccagccaatggaatcactctacgaaaaagtgagcctgatgactagctccgaggaaattcacaaaggcgacgtaaagacatgcacatggctcttcgaaactcagccccttgatacaattaaagacgactctgagactgcggtgaagctgcagaccgtcaagcaggaggagatacagggtggggacgtccgcaccgcatgtttcctgtttgagaccgagaatctggacagtattcagggtgaggaggttaaagagattaagcctgtggagatggatattcaggcgggagacgtgagttccatgaggtataaattcgagaatcaaagccttgattccatctccagttcttccgaggaggtgctgaagaaaataaagaccctgaaaactgaagacattcaaaaaggaaatgttttaaactgcaggtggctgtttgaaaaccagcccatcgacaaaatcaaggagtctcaggagggcgatgagtgtgttaaaactgttacagacatccagggtggtgacgtccgcaagggctgctttatatttgaaactttttctctggacgaaattaaggaagagagtgattacatttccaccaagaagaccattactgaagaggtaatccagggtgacgtgaaaagctatcgaatgctcttcgaaacccagcccctgtacgctattcaggatagggaagggtcttatcacgaggtgacaacagtgaaaaaagaggaagtgatccacggggacgtaagaggcacccgctggctgtttgagactaagcctctggactccatcaacaagagcgagacagtgtatgtgataaagtccgttactcaggaggacatccagaagggcgatgtttccagcgtcaggtaccggtttgagactcagccactcgaccagattagcgaagagtcccataacataatgccatcaatcgatcatatccaggggggaaacgtgaagacctcaagacagtttttcgagagcgaaaacttcgacaagaataactacatccgaactgtctccgtgaatgaaattcagaagggcaatgtgaagacaagcacctggctgtttgaaacgcacacgatggatgaactgcgtggcgagggactagaatatgagaacattaagacggtcactcaggaggatgtgcagaagggggacgttaagcaagctgtgtggctgttcgagaacaggacatttgattccatcatggaggctcataagggtatcacaaagatgaccaaggaagagattcctccttctgatgtcaagaccactacttggctgtttgaaaccacgccccttcatgagttcaacgaaacaagggtagaaaaaatcgagattattgggaaaagtattaaggagacgctcgaagacctgtactctcagaaagtaatacaggcgcctgggatcatcatcgaagctgatgagatcggagatgttcgaatggctaagtacaaactgatgaaccaggctagccccgagattcagaaagaggaaatcatccgcgcagacctgcgcaatatcatggtgaatctgctgtccaagcgcgactgcacggagagagagattcttataagcgaggaggagaagggaaatgtgaatctgacaaaaacgcagctgctcaacaggtcaacagagtttcatgcggagaaagaggagatcgtgaaaggcgatgtccagcaagcaataaagaacctgttctctgaggagcggtccgtgaaaaagggaattctgattcaggaagatgagaaaggggatatcaatatgactatctactgtctgctgcacgagaatgacggagacaccattgagcgagaggaagtgattgggggtgatgttaaacggactatccacaatttgctgagttcgacctctaataataagatttccgagcgggccaagatcgatgccagcgagcgaggcaatgtgcaattttttacaacatgcatagaggccggtgctctagactacctaaagcagctccacactgagagtaatgaaactctcacggcaaaaaagcaggagggcgagaaggaaatcataggcggagatgtggaaggaaccaaactccttctcaaaaagcgacagtcactggtagagagaacggtgtcagaaacggacatcatccccggcgatgtccataatactgtaaaagttttcatgactgagccacagagcacttttgggaaaattcccaaggaagagattattaagggcgatttgacatccaccctgaacagtctctcccaggctgtgaaccagaagactgtgaccaaaacagaagaaataattaaaggaaatatgctggcgacgttaaaaagcctcaaagagagctcccataggtggaaagaatctaagcagcccgacgccatcccaggggacattgaaaaggctatcgagtgtcttgagaaagccactaataccaagacagaaatcttgaaaaaagaactgctgaaagacgatcttgaaacctcgctccggagtctcaaagaggctcaacggtcattcaaggaggtgcataaagaaggggttataaaaaaggacgctaaggctgtaatggcaggctccagcggtgagcagaaaactgacatccatcaagtggccgtgcagagaaataaaaacagcctgctccagccaaaacctggtccatttgagccggccgccaaatggcaggggggcgctgatacactgtcccagacaatggggaaaagctgccacggaaatctcgtggaggaaagaacagaggtgaacctgccaaaagcccccaaagggacagtaaaaatcgtcattgaccgggaacagaacaatgatgcattggaaaaaagcctgaggagattatccaactcacaccacaaatctaatgtcttagaatcaggggacaaaaccggagtgtggactgatacaacaggggaacagcacctgagggacgaatatatgtcccgccagttgacttcgactgtcagcgtgaagaataatcttaccaccaaagaatccgatagggcggtgcgcgagttgaagaaggacgacgtcttcaactccatacagtccgctggtaagaccgtgggcaagcagcaaacctatgagctgaggaatgaccatcaaaagatggaggggttccacataaaaagcccaaaaaaaactaaaaacatcaaaatcctcacggatacacagtcttccaagccctcccccacccagcaccccgtgagtatgccagtcggagggacatatgatctgagtggtgatttccaaaagcaaacattgcttaagcaggaaactaagtactccaataaggacataaagaaaaaaaatataaacctgcaaccaatgtggcagctgctgcccgtggagcaggatactagcaacgtgaccgaaatgaaggtcagcgaaaagtcccataatacctttaaagctaccaataagaagcgcgagactgatgtccaccttaaatcacaagattttctgatgaagacaaacacctcaacgggactcaagatggccatggagagatcgcttaatcctatcaatttcaaccccgagaacaacgttaaagaaagtgagtgcccattgccacctccttcacccccccctcctcctccgtccaacgcgagttccgaaattgagttcccactacctccccctcctcccctcatgatgttcccagaaaaaaacgggtttttgccaagcctgtctaccgagaagatcaaggcagagttcgagtcattccccgggctgccactgccaccacctcccgtggacgagaagagcgagcgtgaaagctcctccatgttcctcccacctccaccgccacctacaccttcccagaagccagcccatctattaagttcttcggcgccagagaagcattcaggcgactttatgcagcagtattctcagaaggaagcttcaaatagtcagaactcccaggccaagattatcacggggaaaaccggagtcctcccgccgcccaccttgccaaaacccaaactgccaaagcacataaaggacaacaaaaacgactttagtcctaaagtggaattggccaccagtcttagtgatatggagtgcaagatcactaccagcaaggaccagaaaaaggtcatggtcatgactagttctgagcatacagagacaaagcagaatgtaatttccaaaagccttgatgagcgcaagcagctgagcatcgactctgccaattgcttatcacacactgttcccggtacctccgcccctcgcaaaaagcagatagccccactgataaagtcgcattccttcccggagagctccggccagcagaacccaaagccctacatgcgcaagttcaaaaccccactgatgatcgccgaggaaaaatataggcagcagaaggaggaaatagagaaacagaagcaggagtccagctactataatatcgttaagacccaatcgcagaaccagcatattacggaggtagaaaaagaaatgccattgcagaaaactaacgaggaggtgtccctttctggtattgatagtgagtgtacggtggtccagccatcacctgggtcacaatcaaacgcgaggatcctgggcgtttgtagcgataaccagctgagtactacatctcccgagacagttgcggctaagcgactgcatcacgtgttagctgccagtgaggataaggacaagatgaaaaaagaggtcttgcagtcttcacgggacattatgcagagcaagagcgcttgtgaaattaaacagtcccatcaggaatgcagcacccagcaaacgcaacagaagaaatacctggaacagttgcacctgccccagagtaaacccatctctcctaatttcaaggtgaagacaatcaaactccccaccctggatcacacgctgaatgagaccgatcattcatacgagagccataagcaacagagcgaaattgatgtccagactttcactaagaaacaatatctgaaaacgaagaaaaccgaggcctccaccgagtgtagtcacaaacaaagtcttgccgaacgacactatcaactgcccaagaaggagaagcgcgtgacagtgcagcttccaaccgagtcaatccagaagaatcaagaagacaagttgaagatggttccacgcaagcagcgtgagttctctggctcagatcgcggaaaacttcccggttcagaagaaaagaaccaggggccctccatgattggccggaaagaggaacgactgatcactgagagaaagcacgaacacttaaaaaacaaaagcgcccccaaagtggtcaaacagaaggtcattgatgcgcacctggactctcagacgcagaacttccagcagacacagatccaaactgcggagagtaaggcggaacacaagaagctgccgcagccctacaactctttgcaggaagagaagtgtttggaggttaagggcattcaagaaaagcaggtattcagcaacaccaaggactcgaagcaggaaattacccaaaataagtctttcttctcatcagtgaaagaaagccaaagagatgatggtaagggtgctctcaatatagttgagtttctccgaaagcgggaagaacttcaacagattctgtcacgagtcaagcagttcgaggcagaaccaaataagtcaggtctcaaaacattccagaccttgttaaatacaatccccggatggctgatatctgaagataagcgggagtacgctgtacatattgccatggagaataacctggagaaggtgaaggaggaaatcacccatataaaaacgcaggccgaggatatgttagtctcatatgagaatattatccagactgccatgatgtcttcaaagacaggcaagccaggcaacaaacccaccagcctcgatgagacaagctccaaggtgagcaatgtacacgtcagtaacaataagaacagcgagcagaaggaaaataagattgccaaagaaaagaccgtgcagcaccaggttgccgcccaccatgaagctaccgtacggtcccacgtgaaaactcatcaggagatcaaactggatgactctaatatacctccccccagcttgaagactcgacctccttcccccacattcattactatcgaatcgactgcacgccgtactgagaaccccacaaagaatgagctcagtcagagcccaaaaaaagactcctatgtggaacctccgcccaggcggccgatgtcccagaagagcgagatccaccgggcaaacacttccccctctcctcccagatctagatcagagcagctggtgcgcctaaaggacacaaccgcgaagctgtctaaaggcgccataccctgtcccgccgcaacgcccgttccaatcgtggaaaaacggagcgagatcattatgtcacctgcaacactgcgacggcagattaagatagaaactaggggccgcgattccccaccaactattaccatcccagtaaacataaaccacgcagcttctgggagctttcgggagagtgtcgatgctcaggaggaaatacgaaaagtggagaagcgggcaacttacgtacacaaggacgggctgaacagcactgatcacatggtgccggataccgagtcctacgatgccgtggaaattatcaggaaggttgctgtcccaccccgcctcagtgaacacacgcaacggtatgaggctgctaatagaactgttcagatggcagagaatttcgttaatgaccctgaaaacgaaattaacaggtggtttcgcgaattcgaacacgggccggtctcagaggcaaaatcaaataggcgggtgtatgctaaaggggagaccaaccacaacatacagcaggaatcgcgaacattctgcaaggaggagtttggacttacgtccctggggaacacaagcttcacagatttctcctgtaagcacccaagagaacttcgggaaaaaatccccgtaaagcagcccagaatctgttctgaaacccggtccctgagcgaacatttcagtggaatggacgcatttgagtcccagatcgtggagagtaagatgaagacgagctcaagccactcttccgaggcaggtaagtcgggctgcgatttcaagcatgcaccaccaacctatgaggacgttatcgcgggccatatcctcgacatttcagactctcccaaggaggtccgcaagaattttcagaaaacctggcaagagtcagggcgcgtctttaagggcctcggctatgccaccgccgatgcctccgcaaccgaaatgcgcaccacttttcaggaagagagtgctttcatctcagaggcagctgcaccccggcagggaaacatgtacacgctgagcaaagatagtttgagcaatggcgtaccatctggccgtcaagcggagttctcgtag

SEQ ID NO: 77041 - DNA, 2892 bp, Artificial Sequence
  derived and/or modified sequence
atgcccctgcagaagaccaacgaggaggtgagcctgagcggcatcgactcggagtgtaccgtggtccagccatcacctgggagccaatctaatgctagaatcctgggtgtctgctccgataatcaactcagtacgacctcaccagagacggtcgccgctaaaagactccatcatgtgctggccgcaagcgaggacaaggataagatgaaaaaggaggtcctgcagagttccagagacatcatgcaatccaaaagtgcatgtgagataaagcagtctcatcaggagtgcagtacgcagcagacccagcagaagaagtacctggaacaacttcacctcccccagtcgaagcccatctccccaaattttaaagtgaagaccatcaaacttccgacactggatcacactcttaatgaaacagatcacagttacgaatcccataagcaacagtctgaaattgacgtgcagacctttaccaaaaagcagtatctgaaaacaaaaaaaaccgaggccagtaccgaatgcagtcacaagcagtccctggcggagcggcactaccagctgcccaagaaggagaagcgggttacggtccagttgccaaccgaatccattcaaaagaatcaagaggacaaactcaaaatggtgcctcgcaagcagagggagttctctggctctgacagagggaagctccctggaagcgaggaaaaaaaccagggcccatccatgattggacgaaaggaggagcgactgattactgagcggaagcacgagcacctcaagaacaagtcagctcccaaagttgtcaaacaaaaagtgatcgatgcccatctcgacagccagacccagaacttccagcagacgcaaatacagacagccgagtccaaagcagaacacaaaaagctgccacagccctacaattctctgcaggaagagaagtgcctagaagtcaagggaattcaagaaaaacaagtgttcagcaacacgaaagacagcaagcaggagataactcagaataagtccttcttcagttctgtgaaagagagccagagagacgacggcaaaggggctctgaatattgttgaattcctaaggaagcgggaagaactccagcagattttatccagagtcaagcagtttgaggcagaaccaaataaatcagggctgaagactttccagacactgctgaataccattccagggtggctgatcagcgaggataagcgcgaatacgctgttcatatcgccatggagaacaatttggaaaaagtcaaggaggaaatcactcatattaaaacccaggcggaagacatgttggtgtcttatgaaaatatcattcagaccgcaatgatgagctcaaaaacaggaaagccgggaaataaacctacttcgttagacgaaacttcctccaaagtatccaatgtccatgtttccaataataagaacagcgaacagaaggagaataaaattgctaaagaaaagacagtgcagcaccaggtcgcagctcaccatgaagccaccgtgaggagccacgtcaagactcaccaggaaatcaaactagatgactccaacatcccccctccatctcttaagacacggccgccttcgcctactttcattaccattgagtcaaccgccaggagaacagaaaacccaaccaagaacgagttgagtcagtctccgaagaaggacagctatgtagaaccccctcctcgccgtcccatgtcacagaaatccgagatccatagggcaaatacaagcccctctcctccacgatcaaggtccgagcagctagtgaggttgaaggatacgaccgctaaactgtctaaaggagctatcccttgccctgctgccacacctgtgccaattgtggaaaaaaggagtgaaattatcatgagccctgcaacactccgcagacaaatcaagatcgagacaaggggccgggactcacctcctactatcaccattcctgttaacatcaaccacgcggcatctgggtcatttcgtgagtcagtggatgcccaggaagagatccgcaaggtggagaaacgggctacatatgtgcataaggatggcctgaactcaaccgaccacatggtgcctgatacggagagttatgacgccgtcgagattatccgtaaggttgccgttccaccaaggttgtccgaacacacacagcggtatgaggcagcgaataggaccgtgcagatggccgagaactttgtcaatgaccctgagaatgaaatcaatagatggtttcgcgaattcgagcacggcccggttagcgaagccaaatccaaccggcgagtgtacgccaagggcgagactaatcacaatattcagcaagagagccgtacattctgtaaagaagagtttggtctaaccagcctcggaaacactagttttaccgacttttcctgcaaacacccccgagaactccgcgaaaagattcccgtaaagcagcctaggatctgtagtgaaaccaggtccctgtccgagcactttagcggaatggacgcgtttgagagtcagatcgttgagtcgaagatgaagacgtccagcagccatagttccgaggcaggaaagtctgggtgtgacttcaagcatgcccccccaacatacgaagacgtaatcgccggtcatatcctggacatatcagattccccaaaggaagttagaaagaacttccagaagacctggcaggagtctgggcgtgtcttcaaggggctcgggtatgccactgccgacgcttccgcaacggaaatgcgcaccacttttcaagaggaatccgcctttattagcgaagctgcggctcctcgccagggcaatatgtatactctcagtaaagattcgctctcaaacggcgttccctccggcagacaggccgaattctcatag

SEQ ID NO: 77042 - DNA, 9984 bp, Artificial Sequence
  derived and/or modified sequence
atggcacggtaccaggccgctgtctctcggggagattgcaggtccttcagcgcaaacatgatggaagagtccgagatgtgcgccgtgcccggaggtttagccaaggtgaagaagcaattcgaagatgagatcacatcctctcggaatacctttgctcaatatcaatatcagcatcagaaccgatctgaacaagaggccattcattcttcacaagtgggaacctcaagaagttcccaggagatggccaggaatgaacaggaagggtccaaagtgcagaaaattgatgtccatggcacagaaatggtgagccaccttgagaaacacacagaggaagtgaaccaggcgtcccaatttcaccagtacgtccaagagaccgttatcgatacccccgaggatgaggagatacctaaggtgagcaccaaactgctgaaggaacaatttgagaaaagtgcccaggagaaaatcctctacagcgacaaagagatgactactcccgcaaagcagattaagactgagagcgagtatgaagagacgttcaagcctagttctgtggtctcaacctcttctacgtcctgtgtgtcaacatcacaacgtaaggagacatccaccacacggtacagtgaccattcagtgacttcgagcacacttgcccaaatcaacgcgacatctagcggaatgaccgaggagttcccaccaccccctcccgacgtgctccagacatctgtagacgtgacagccttttcacagagcccagaactcccatcaccccctagacgtcttccagtacccaaagatgtatacagcaagcagaggaacctgtatgagttaaacaggctttacaagcacatccaccctgagttgaggaagaatctcgagaaagattatatttctgaggtgagcgagatcgtgagcagccagatgaatagcggatcttctgtttccgccgacgttcaacaggctcgatatgtttttgagaacaccaacgactcctcacaaaaggatctaaactcagagcgggaataccttgaatgggacgaaatccttaagggcgaggttcaatcgataagatggatatttgaaaatcagcccctggatagtataaacaatggcagcccagacgaaggagacatttcaagaggcatcgccgatcaggagattatagctggaggggatgtcaaatacacgacgtggatgtttgagacccagcccatcgacacgcttggtgcctattcgagtgatacagtcgaaaatgcagagaaaattcccgagctggccaggggggatgtttgcactgctcggtggatgtttgaaacgcgacccttagactcaatgaataagatgcatcagagtcaggaagaatcagccgttaccatcagtaaggacattaccggtggcgatgttaaaacagtccggtacatgttcgaaactcagcacctcgaccagcttggccagctgcatagcgtggacgaagtgcatctgctgcaactgagatcagaactcaaagagatcaaaggcaacgtgaaaaggagtattaagtgcttcgagacacagcccctgtacgtgatacgggacggatcaggacagatgctagagatcaagaccgtgcaccgggaagacgttgagaagggagatgtcagaacagcacgctggatgttcgaaacccagcccctagacacaatcaacaaggatatcacggaaatcaaggtggtgcggggaattagcatggaagagaatgtgaaggggggagtgtcgaaagccaaatggctctttgagactcagcctctggagaagatcaaggagtctgaagaagtgattattgagaaggagaagatcattgggactgacgtctctcgcaagtgctggatgtttgaaacacagcccttggacattcttaaggaagttcctgacgccgactcccttcagcgtgaggagattatcgggggagatgtccaaacgacaaaacatctttttgaaactctgcctatcgaagcgctaaaggattcaccggacatcggaaaacttcagaaaatcacagcctctgaggaggagaaaggggacgtccggcaccagaaatggatatttgagacccagcccctcgaagacattcgtaaagataaaaaggaatatacccggaccgtcaaactcgaagaggtagatcgcggagacgtcaagaactacacacacattttcgagtctaataatctgatcaagttcgatgccagccataagatcgaggtggaaggcgtgaccaggggagcggtggaactgaacaaaagtcttttcgagactacgcctctgtatgctatccaagatcctctggggaagtatcaccaggttaagacggtccagcaggaagaaattgtccgaggggacgtgcgatcttgtagatggttgttcgagacgcggcctatcgaccagttcgatgagtctattcataaattccagatcataaggggcatcagcgcacaggaaattcaaaccggcaacgtgaaatctgcaaagtggctgttcgagacacagccacttgattcaattaagtatttttctgacgtcgaggaaaccgagagtaaaacagaacagacacgcgacattgtaaagggtgacgtgaaaacttgtaagtggctttttgaaacacagccaatggaatctctctatgagaaagtgagccttatgaccagcagcgaagagatacataaaggagacgtaaaaacttgcacttggctattcgagactcaacctctggacacgattaaagacgactctgaaactgcagtcaaactccaaacagtgaagcaagaggaaatccagggaggagacgtgcggaccgcctgctttctgttcgaaaccgaaaatttggacagcattcagggggaggaagtgaaggaaatcaagcccgtagaaatggatatccaggcaggggacgtgagttccatgcggtataaattcgagaaccagtccctcgacagtataagcagtagttcagaagaagtactgaaaaaaatcaagaccctgaaaaccgaagatatccagaaaggcaatgtgctcaactgtcgatggctgttcgagaatcagccgatcgacaaaatcaaggaatcccaagaaggtgacgagtgcgtgaagacagtgaccgacattcaaggaggcgacgtccgtaaaggatgcttcatctttgagaccttctctttggacgaaattaaagaggagtctgactatatctcaacaaagaagacaatcacagaggaagtgatccaaggagacgttaagtcttaccgcatgcttttcgaaacccagcccctgtacgcaattcaggatagggaggggagctatcatgaagttaccactgtgaagaaggaggaagttatccatggtgacgtgcgcggaactcgttggttgttcgagacaaagcctctggattctatcaacaaatcggagaccgtatacgttattaaatcagtaactcaggaagatattcagaagggtgacgtgagcagcgtgcggtaccgtttcgagacacagcccctggatcaaatcagtgaagaatcccataatatcatgccctcgatagatcacattcaggggggaaatgtaaagacctctcggcagttctttgagtcagagaacttcgataaaaacaattatataagaacagtgagtgtgaacgagattcagaaaggcaacgtgaagacttcgacctggctcttcgagactcacacaatggacgaattgcgaggcgaggggcttgagtatgagaacattaagactgtgacccaagaagatgttcagaagggggatgtgaagcaagcagtgtggctctttgaaaaccgaacctttgactcaataatggaagcccacaaggggatcaccaagatgacaaaggaagagattccaccctctgacgtaaagactacgacatggctctttgaaactacacctcttcacgaattcaatgagaccagggtggagaaaatcgagatcatcggtaaaagtattaaggagacactggaggacctgtattcccaaaaggtcatccaagcccctggaattatcatcgaagccgacgaaataggggatgtaagaatggctaaatacaaactgatgaatcaggcctcacccgaaatacagaaagaggaaattatccgtgcggacctgcgcaacattatggtgaacttgctctccaaacgggattgtacagaaagggagatactcatttccgaggaagagaaggggaacgtgaatcttaccaagactcagctgttgaaccgctctactgaattccacgcggagaaggaggagatagtgaaaggagacgtgcagcaggccatcaagaacctgttcagtgaggagaggagtgtgaaaaagggtattctgatccaagaggacgagaagggcgacattaacatgactatttactgcctcttgcacgaaaacgatggggatacaatagagagggaggaagttatagggggagacgtgaagcggactattcataacctgctctcctcaacctccaataacaagatatctgagcgagccaaaattgacgctagtgagcgagggaacgtgcagtttttcaccacttgtattgaagccggtgccctggactaccttaagcagctgcacaccgagagtaacgaaaccctgactgcaaagaagcaggagggcgagaaggaaattatcgggggtgatgtcgaaggcacaaagctgttgctgaagaaacggcaatctttggtagaaaggacagtctctgagacagatataattcctggagatgtgcataacactgtaaaagtcttcatgacagaaccacagtccacctttggcaagatcccaaaggaagaaattatcaagggggacctgacaagcaccttaaactcactgagtcaggccgtgaaccagaaaacggtaactaaaactgaggaaataataaaaggaaatatgctggcaacactgaaaagcctgaaagagtcctcacatagatggaaagagtcaaagcaaccggatgctattccaggtgatattgaaaaggccatcgagtgcctggagaaggctactaataccaaaaccgagatcctaaaaaaagaactcctgaaggacgacttagagacctccctgcgcagtctgaaggaagctcaacggagctttaaggaggtgcataaggagggagtgataaaaaaagatgcgaaggccgtgatggcaggatctagtggggaacagaagaccgatattcaccaggtggcagtacagcggaataagaacagtctcttgcagcccaagcccggaccatttgagccagcagcaaagtggcaggggggtgctgataccttgagtcaaactatgggaaaaagctgtcacggcaaccttgtagaagaaagaacggaggtgaacctgcccaaagccccaaagggaacagtcaagatcgtgattgatcgcgagcagaacaatgacgccctggaaaagagtctgcggagactgtctaattctcaccataagtctaacgtcctggaaagtggagacaaaactggtgtatggactgacacaaccggggaacagcacctccgcgacgagtacatgtccaggcagctgactagcactgtctcagtgaagaacaacctcacaaccaaggagtccgaccgggcagttcgggagttaaaaaaggatgatgtttttaacagtattcaatctgctggcaagactgtggggaaacagcagacctatgagctgagaaacgaccaccagaaaatggagggattccacatcaagtcccccaagaaaactaaaaatataaaaatcttaactgacacgcagtctagtaaaccaagtcctacacagcaccccgtatccatgcctgttggcggtacatatgacttgagcggggacttccagaagcagacactgcttaaacaggagactaaatacagtaacaaagatatcaagaaaaaaaatattaacctacaaccaatgtggcagcttctcccagttgagcaagataccagtaatgttacagagatgaaagtgtccgagaaaagtcataatacctttaaggctactaataagaagcgagagacagacgtgcacctaaagtctcaggactttttaatgaagaccaatacaagcacaggtctgaaaatggccatggagagatccctcaatccgattaactttaacccagaaaacaatgttaaagagtcggaatgcccgctgccccctccttccccaccacctcccccaccctctaatgcatcaagtgaaatcgagtttccgcttcccccaccacctcctcttatgatgttcccggagaagaatgggtttctgcccagtctgtcaaccgaaaaaatcaaagctgagttcgaaagcttcccaggcctgccactgcctcctcctcctgtggacgagaaatctgagagagaaagcagtagtatgtttttgccacctccccctccgcctactccttcccagaaaccagcacaccttcttagctcatctgcacccgagaagcacagcggcgactttatgcagcagtactctcagaaagaggcgagcaactcccaaaactcccaagccaaaattatcaccggcaagacaggggtgcttccccctccaacattgccaaagcccaagctgccgaagcacattaaagacaataaaaacgacttcagcccaaaagtagaactggccacctcattgtcagacatggagtgtaaaattaccacctcaaaggaccaaaagaaagtgatggtcatgactagctctgaacataccgagacaaaacagaacgtcattagcaagtctctggatgaacggaaacagctatccatcgacagtgccaactgcttgagccacaccgtccccggaacgagcgcaccccgtaagaaacagattgcccctctgattaagtcccactcctttcccgagagctcggggcaacagaatcccaagccttacatgcgtaagttcaagactcctctaatgatagcagaagaaaagtatcgccagcagaaggaggagattgagaaacagaaacaggaatctagctattacaacatcgtcaagacacagtctcaaaatcagcacatcaccgaggtagaaaaggagatgccccttcagaaaacgaacgaggaggtgtctctctccggtatcgactcggaatgtactgtggtacagccatctccgggtagtcaatccaacgccagaatccttggggtttgttccgataatcagctctccactacttctcctgagacggtcgccgctaaacgcctccaccatgtgttagctgctagcgaggacaaagataagatgaaaaaggaggttttgcagagcagtcgagacattatgcagagcaagtctgcgtgcgaaatcaaacagtctcatcaagagtgcagcacgcaacagacacaacagaagaaatatcttgaacaactgcatctaccacagtctaaacccatttctcccaatttcaaagtgaagacaattaagttaccaactctcgaccatacccttaatgaaactgaccatagctatgaaagccataaacaacaatctgagatcgacgttcagaccttcacgaaaaaacagtatctgaaaacaaaaaaaactgaggctagcactgaatgctcacacaagcagagcttggccgagaggcattatcaattgcctaaaaaggagaagagggtgaccgtgcagctccccaccgagagtatacaaaaaaatcaggaggacaagctgaaaatggtcccgcgaaagcaacgggaatttagcggtagcgatcggggaaaactccccggatctgaggagaagaatcagggccctagcatgatagggaggaaggaagagcgactgatcaccgaaaggaagcatgagcatctgaagaataaatcagctcccaaggttgtgaagcagaaggtgatagacgcccatcttgactcccagacccagaatttccagcaaacccaaatccagaccgccgaaagcaaagctgagcataagaagcttccacaaccttacaactcgctccaggaggaaaagtgtctggaagttaaaggtattcaggagaagcaggtgtttagtaacaccaaggacagcaagcaagaaatcacccagaacaaatcgttcttcagtagtgtaaaggagtcacagagggacgatgggaaaggagctctgaatatcgttgagttcctgcggaaaagagaggagttgcaacaaatactgtccagagtaaaacagttcgaggccgaaccgaacaagtccggacttaaaacttttcaaaccctacttaacaccattcccggatggctcattagtgaagacaaaagggaatacgcagtgcacatcgctatggagaataacctggaaaaggtaaaggaagagatcactcatataaagacacaggctgaggatatgctggtgtcatacgaaaacattattcagacagcgatgatgagttccaagacaggaaaacccggaaataagcctacctctctggatgaaacttcttcaaaggtgagtaatgtgcacgtgtcaaacaacaaaaactccgagcagaaggaaaacaaaattgctaaggagaagacagttcagcatcaggtagcagcacaccacgaggccacagttagatcccatgtcaagacacaccaagagatcaagctggacgactctaacataccgccaccttctctcaagacaagaccgccatccccaacgttcattactatcgagagcaccgcgagacgcaccgaaaatcctaccaagaacgaactatcacaatcccctaaaaaggattcatacgtcgaaccccctccacggagaccaatgagtcagaagtccgagatacaccgggctaacacatcgccgtcaccccctcgctcccgcagcgaacagctggtacgcctgaaggatacaaccgcgaagctgtccaagggcgcaataccctgtccagccgcaacccctgtcccaatcgtggagaagcggagtgaaattattatgtcgcctgctaccctccgccgtcagatcaagatagaaactaggggtcgcgactcccctcctacaatcactattcctgtgaatatcaatcacgctgcgagtggctctttcagagagtcggtggatgcccaagaggagattagaaaggtggagaaacgagctacctatgtacacaaagatggcctgaatagcaccgaccacatggtgcccgatacagaatcatacgacgcagtggagattattcggaaggtggcagtgccacccaggttatcagaacatacccagaggtacgaggccgcaaaccgtacggtacagatggctgaaaattttgtcaatgaccccgagaatgagatcaacagatggtttcgagagttcgaacacggcccagtgagcgaggcgaagtccaacaggcgtgtgtacgctaagggcgagactaatcacaacatccagcaggaatcgcggacattctgtaaagaggagttcggattaacctccctcggtaacacaagcttcaccgatttcagctgtaagcaccctcgagagttgcgcgaaaaaattccggtgaagcaaccgagaatttgtagcgaaacccgctcgcttagcgaacatttctccgggatggatgcgttcgaatcacagattgtggagtcaaagatgaaaacctcatccagccattcttccgaggcgggtaaatccgggtgtgacttcaagcatgctccaccaacctacgaagacgttattgctggacacattcttgatatatcagattctccaaaagaggttcgcaaaaactttcagaaaacctggcaggaaagcgggcgagtgtttaagggactcggatacgctacggctgatgcatccgctacagaaatgcgtacgacatttcaggaagagtctgcttttataagcgaagcggctgctcctcgacaggggaatatgtacaccctttcaaaagatagcctcagtaatggcgttccttctgggagacaggctgaattctcttac

SEQ ID NO: 77043 - DNA, 2892 bp, Artificial Sequence
  derived and/or modified sequence
atgcctcttcagaaaacaaacgaggaggtctccctcagtgggatagacagcgagtgcaccgtagtccagccaagcccaggaagtcagtccaatgccaggatcctcggagtgtgctcagacaaccaactcagcactactagcccggagactgttgcagcaaagcgccttcatcacgtgctcgctgcgtcagaggacaaggacaagatgaaaaaggaggtgctccaaagctctcgggacatcatgcagtcgaagtctgcatgcgagataaaacagtcgcatcaagaatgcagtacacaacagacacagcagaagaagtatttggagcaactccacctgccgcagtctaagcctatctcacccaacttcaaagttaaaaccattaagcttccaacactggatcacactctaaacgaaacagatcacagctacgagagtcacaaacagcagagtgagatcgatgtgcagacttttactaaaaagcaatacttgaaaactaagaagaccgaggcttccaccgaatgctcacacaaacagtctttggccgagcggcattaccaattacccaagaaggaaaagcgagtaacagtccagttaccgacagagtcgatccaaaagaaccaagaggataagttaaagatggtcccccgtaaacagcgtgagttcagcggtagtgatcgaggcaagctccccggatccgaggaaaagaaccaggggccaagcatgattggcaggaaggaggaacggttgatcaccgagcgtaagcacgaacacctgaagaataagtctgcaccaaaggtggttaagcagaaggtcatcgatgcccacttagattcccagacccaaaatttccagcagactcagatccagactgcagagtctaaagccgaacataagaagttacctcagccttacaatagtctgcaggaagaaaagtgtcttgaggtaaagggtattcaggagaaacaggtcttctcaaatactaaggattcgaagcaggagattactcagaacaagagtttcttttcttccgtgaaagaaagccaaagggacgatggaaagggagctctgaacatcgttgaattcctcagaaagcgcgaggagttacaacagatcctgtctcgcgtgaaacagttcgaggctgaaccaaacaaaagcgggttgaagacattccagactctgctgaataccattcccggatggctcatctctgaagacaaaagggaatacgcagtccatatcgccatggagaacaatctggaaaaggttaaagaagagataactcatataaaaacgcaagcggaagacatgcttgtgagttatgaaaatattattcagactgccatgatgtcatctaagaccgggaagccaggcaataaacctacgtctctagatgagacaagttcaaaagtgtctaacgtacacgtttcaaacaacaaaaattcagaacagaaagagaataagatcgcaaaggaaaagactgttcagcaccaggtggccgcacaccatgaggcgaccgtgcgctctcacgtcaagacacatcaggagattaagttagacgactctaatatcccaccccctagccttaaaacccgccctccatccccaacctttatcactatagagtccacagccagaaggacggagaatcctactaaaaatgaactctcacagtcacccaaaaaggactcttatgttgaaccccctccgcgacggcctatgagccagaagagtgagatccaccgcgcaaacacaagtccctccccacccagaagccgtagcgaacagctcgtgcgcctgaaagatactaccgcaaagttgtcaaagggcgctataccttgtcccgcagccacaccagtgccgattgtggagaagcggagcgagatcattatgtctcccgctacattacggaggcaaatcaaaattgagactagaggcagggattccccgccaaccatcactatcccagtgaatatcaatcacgcagcatctggttctttccgggaatcagtggatgcccaagaggaaatcagaaaagttgaaaaaagggcaacctacgtgcacaaggacggactgaatagtactgaccacatggtgccagacactgaatcatatgatgcagttgagattatacgcaaagtggccgtgccaccccgtctttctgaacacactcagcggtacgaagcggctaatcggaccgtgcaaatggccgagaacttcgtgaatgaccctgagaacgaaatcaataggtggttccgagagttcgagcacgggcctgtgagtgaagcaaaatctaatagaagagtctatgctaagggcgagacgaaccacaatattcagcaggaatcccggaccttctgtaaggaggaatttgggttgactagcctggggaacacctccttcacagatttttcctgcaaacatcctcgggaactcagagagaaaattcctgttaaacagcccagaatctgcagcgaaaccagatccctgagcgagcactttagcggaatggatgctttcgagtcccagatcgttgaatctaagatgaagaccagcagctcacattcgtctgaagcgggaaagtcagggtgcgactttaagcacgcacctccaacctacgaggatgtaatagcgggtcacatcttggatatttcagacagccccaaggaagtgcggaaaaactttcagaagacctggcaggagagcggacgcgtgttcaagggtctgggctatgcaacagccgatgcttccgcaaccgaaatgagaacaacttttcaggaagaaagtgctttcattagtgaggcagctgcccctcgtcagggtaacatgtatacactctctaaggactcattgtcaaacggggttccaagcggcaggcaggcggaattcagttag

SEQ ID NO: 77044 - DNA, 5246 bp, Artificial Sequence
  derived and/or modified sequence
caagcatataaaagataataagaacgatttttcccccaaagttgaactggcaacctccctgtcagatatggaatgtaaaattactacctcaaaggatcagaaaaaagtaatggtgatgaccagcagtgaacacacggagacaaagcagaacgttattagtaagagtcttgatgaaagaaaacaattatctattgactctgcaaactgtctctcacacacagttccaggaacttcagcacccaggaaaaaacagattgcgcctcttataaaatctcattcatttccagagagttcaggacaacaaaatccaaaaccttatatgagaaaatttaagacacctttaatgattgctgaagaaaaatatagacaacaatgttaaaactcaaagccaaaatcaacacataacagaggtggaaaaggaaatgccattacaaaaaaccaatgaggaggtttccctatctggaattgattcagaatgcactgtggttcaacccagcccaggctctcaaagtaatgctcggatactaggagtgtgttctgataaccaactctccacaacatcgccagaaacagtcgctgccaagaggctccaccatgttttagcagcttcagaagacaaagataagatgaaaaaggaagttttacaaagctcaagggacattatgcaatccaaatcagcttgcgaaattaaacaaagtcaccaagaatgtagtacccaacaaacacaacagaagaagtatttggagcagttgcacttgccccaaagcaaaccaatttccccaaatttcaaagttaaaaccatcaaacttccaactctagatcatacattaaatgaaacagaccacagctatgaaagtcataaacagcaatctgagattgatgttcaaacctttaccaaaaaacaatatctgaaaaccaagaaaactgaagcaagcactgaatgtagtcataagcaatctctggctgaaagacattatcagttacctaagaaggagaaaagagtgacagtacaattgcctacagaatccatacagaagaaccaggaagataagctcaagatggttcccaggaagcaaagagaatttagcggatctgacagagggaaacttccaggaagtgaagaaaaaaatcagggaccatcaatgattggtcgaaaagaagagagattaataactgaaagaaaacacgaacatctgaagaataaatcagcaccaaaggtcgtcaagcaaaaggttatcgatgcacatcttgattcacagactcagaattttcagcaaacacaaatacagaccgctgaaagtaaagctgaacataaaaaattgccccagccatataatagtctgcaggaagaaaaatgtctcgaagtcaagggcatacaagagaaacaagtcttctctaatactaaagattcaaagcaagagattacacagaacaaatctttcttttcctctgtgaaagaatcccagcgggatgatggaaaaggtgccttaaatatagtggaattcttgagaaaacgtgaagaactgcaacagattttgtcgagagtgaaacagtttgaagcagagccaaataaaagtggccttaaaacatttcagacactattaaatactatcccaggatggctgataagtgaagataagagagaatatgcagttcacattgccatggagaataatttagaaaaagtaaaagaagaaataacacatattaaaactcaagcggaagatatgcttgtgtcctatgaaaatataattcagacagccatgatgtcctccaaaacaggaaaaccgggaaataaacccactagtcttgatgaaacatcatccaaagtatctaatgttcatgtcagcaataataaaaatagtgaacagaaagaaaataaaattgccaaagagaaaacagtacagcaccaagtagcagctcatcatgaagcaactgttcgtagtcacgtgaaaacccatcaggaaattaaacttgatgatagcaacattcctcctccctctttaaaaacacgcccaccgtcaccaacttttatcacaatagaatctactgcccgacgaacagaaaaccctactaagaacgagctttctcagtcccctaaaaaggacagttatgttgaacccccaccaagaaggcccatgtcgcaaaaatctgaaattcacagagcaaacacttccccttctccacccaggagtcgctctgaacaacttgtcagactcaaagacaccactgcaaagttatccaaaggggccatcccatgtccagcagcaaccccggttccaattgtagagaagaggtctgaaatcatcatgtctcctgcaacacttcgtcgtcaaattaagatagaaactcgtggtagggactctccacctacaatcacaataccagtaaatataaatcatgctgctagtggttccttcagagaatctgtggacgctcaagaggaaatcaggaaagtggagaagagagctacttatgttcataaagatggactaaattccactgatcacatggtgcccgacactgaaagttatgatgcagttgaaatcatccgcaaggttgcagtgcctcctcgcctgtcagagcacacacagagatatgaagcggccaaccgaactgttcaaatggctgaaaatttcgtgaatgaccctgaaaatgaaataaacagatggttcagggaatttgagcatggcccagtttctgaagcaaagtcaaatagaagagtttatgcaaagggagaaacaaaccataacatacaacaagaaagtcgtacattttgtaaggaggaatttggattaacatctttaggaaacacgagttttacagacttttcttgcaaacatcctagagaactgcgagaaaagattcctgttaagcagcccaggatctgctctgaaaccaggtctctaagtgaacatttctcaggcatggatgcatttgagagtcaaattgttgagtcgaagatgaaaacctcttcatcacatagctcagaagctggcaaatctggctgtgacttcaagcatgccccaccaacctatgaggatgtcattgctggacatattttagatatctctgattcacctaaagaagtaagaaaaaattttcaaaagacgtggcaagagagtggaagagtttttaaaggcctgggatatgcaaccgcagatgcttctgcaactgagatgagaaccaccttccaagaggaatctgcatttataagtgaagctgctgctccaagacaaggaaatatgtatactttgtcaaaagacagtttatccaatggagtgcctagtggcagacaagcagaattttcataagtcctgcttccgatgccaccattgcaacagtaaactaagtttgggaaattatgcatcacttcatggacaaatatactgtaaacctcactttaaacaacttttcaaatccaaaggaaattatgatgaaggttttggacataagcagcataaagatagatggaactgcaaaaaccaaagcagatcagtggactttattcctaatgaagaaccaaatatgtgtaaaaatattgcagaaaacacccttgtacctggagatcgtaatgaacatttagatgctggtaacagtgaagggcaaaggaatgatttgagaaaattaggggaaaggggaaaattaaaagtcatttggcctccttccaaggagatccctaagaaaaccttaccctttgaggaagagctcaaaatgagtaaacctaagtggccacctgaaatgacaaccctgctatcccctgaatttaaaagtgaatctctgctagaagatgttagaactccagaaaataaaggacaaagacaagatcactttccatttttgcagccttatctacagtccacccatgtttgtcagaaagaggatgttataggaatcaaagaaatgaaaatgcctgaaggaagaaaagatgaaaagaaggaaggaaggaagaatgtgcaagataggccgagtgaagctgaagacacaaagagtaacaggaaaagtgctatggatcttaatgacaacaataatgtgattgtgcagagtgctgaaaaggagaaaaatgaaaaaactaaccaaactaatggtgcagaagttttacaggttactaacactgatgatgagatgatgccagaaaatcataaagaaaatttgaataagaataataataacaattatgtagcagtctcatatctgaataattgcaggcagaagacatctattttagaatttcttgatctattacccttgtcgagtgaagcaaatgacactgcaaatgaatatgaaattgagaagttagaaaatacatctagaatctcagagttacttggtatatttgaatctgaaaagacttattcgaggaatgtactagcaatggctctgaagaaacagactgacagagcagctgctggcagtcctgtgcagcctgctccaaaaccaagcctcagcagaggccttatggtaaaggggggaagttcaatcatctctcctgatacaaatctcttaaacattaaaggaagccattcaaagagcaaaaatttacactttttcttttctaacaccgtgaaaatcactgcattttccaagaaaaatgagaacattttcaattgtgatttaatagattctgtagatcaaattaaaaatatgccatgcttggatttaagggaatttggaaaggatgttaaaccttggcatgttgaaacaacagaagctgcccgcaataatgaaaacacaggttttgatgctctgagccatgaatgtacagctaagcctttgtttcccagagtggaggtgcagtcagaacaactcacggtggaagagcagattaaaagaaacaggtgctacagtgacactgagtaaaatatctatggccactgacagtccacacttaggcactgagagatattgatgttctgaaataagattttatgaatttggatacccttttgaggaacttgatgtaaacatggtgttcagaaatctcgtgtctatctcaatgggatatttcttgtattacaccttgtcatttttttcacaatttatttacatctacttttgtttgaactggaatgaagagatgaaacactatggatatgttttccattcaaatggcactttagcatattgttctgttttcctgtaaaacatcatgggtgtgatttttatactgctgctgcttgtcacaattattataacttctctgtaatttcctctgaaataaaattgaatcacctgaggtgcaaacc

SEQ ID NO: 77045 - DNA, 2151 bp, Artificial Sequence
  derived and/or modified sequence
atggccagataccaggccgccgtgagcagaggcgactgcagaagcttcagcgccaacatgatggaggagagcgagatgtgcgccgtgcccggcggcctggccaaggtgaagaagcagttcgaggacgagatcaccagcagcagaaacaccttcgcccagtaccagtaccagcaccagaacagaagcgagcaggaggccatccacagcagccaggtgggcaccagcagaagcagccaggagatggccagaaacgagcaggagggcagcaaggtgcagaagatcgacgtgcacggcaccgagatggtgagccacctggagaagcacaccgaggaggtgaaccaggccagccagttccaccagtacgtgcaggagaccgtgatcgacacccccgaggacgaggagatccccaaggtgagcaccaagctgctgaaggagcagttcgagaagagcgcccaggagaagatcctgtacagcgacaaggagatgaccacccccgccaagcagatcaagaagctgctgctgcaggacaaggagatctgcatcctgtgccagaagaccgtgtaccccatggagtgcctggtggccgacaagcagaacttccacaagagctgcttcagatgccaccactgcaacagcaagctgagcctgggcaactacgccagcctgcacggccagatctactgcaagccccacttcaagcagctgttcaagagcaagggcaactacgacgagggcttcggccacaagcagcacaaggacagatggaactgcaagaaccagagcagaagcgtggacttcatccccaacgaggagcccaacatgtgcaagaacatcgccgagaacaccctggtgcccggcgacagaaacgagcacctggacgccggcaacagcgagggccagagaaacgacctgagaaagctgggcgagagaggcaagctgaaggtgatctggccccccagcaaggagatccccaagaagaccctgcccttcgaggaggagctgaagatgagcaagcccaagtggccccccgagatgaccaccctgctgagccccgagttcaagagcgagagcctgctggaggacgtgagaacccccgagaacaagggccagagacaggaccacttccccttcctgcagccctacctgcagagcacccacgtgtgccagaaggaggacgtgatcggcatcaaggagatgaagatgcccgagggcagaaaggacgagaagaaggagggcagaaagaacgtgcaggacagacccagcgaggccgaggacaccaagagcaacagaaagagcgccatggacctgaacgacaacaacaacgtgatcgtgcagagcgccgagaaggagaagaacgagaagaccaaccagaccaacggcgccgaggtgctgcaggtgaccaacaccgacgacgagatgatgcccgagaaccacaaggagaacctgaacaagaacaacaacaacaactacgtggccgtgagctacctgaacaactgcagacagaagaccagcatcctggagttcctggacctgctgcccctgagcagcgaggccaacgacaccgccaacgagtacgagatcgagaagctggagaacaccagcagaatcagcgagctgctgggcatcttcgagagcgagaagacctacagcagaaacgtgctggccatggccctgaagaagcagaccgacagagccgccgccggcagccccgtgcagcccgcccccaagcccagcctgagcagaggcctgatggtgaagggcggcagcagcatcatcagccccgacaccaacctgctgaacatcaagggcagccacagcaagagcaagaacctgcacttcttcttcagcaacaccgtgaagatcaccgccttcagcaagaagaacgagaacatcttcaactgcgacctgatcgacagcgtggaccagatcaagaacatgccctgcctggacctgagagagttcggcaaggacgtgaagccctggcacgtggagaccaccgaggccgccagaaacaacgagaacaccggcttcgacgccctgagccacgagtgcaccgccaagcccctgttccccagagtggaggtgcagagcgagcagctgaccgtggaggagcagatcaagagaaacagatgctacagcgacaccgagtag

SEQ ID NO: 77046 - DNA, 2151 bp, Artificial Sequence
  derived and/or modified sequence
atggcccgttatcaggctgccgtttcaagaggggattgtaggagcttctccgcaaatatgatggaggaaagcgagatgtgcgcagtcccaggagggctcgctaaggtgaaaaagcagttcgaggatgagatcactagtagtaggaataccttcgctcagtaccaataccagcaccaaaacagatccgagcaggaagctatccattcttcccaggtgggaacatcaagaagtagccaggagatggcaagaaacgagcaggaagggagcaaggttcagaagatagacgtccacggcacagagatggtttctcacctagagaagcataccgaagaggtgaatcaggcatcacagttccatcaatacgtccaggaaaccgtcatagatacccctgaggacgaagaaattcccaaagtgtccactaagttactgaaagaacagttcgaaaaatccgcccaggagaaaattttgtatagcgataaagagatgacgacaccggctaagcaaattaagaagttactcttgcaagataaagagatatgcatcctgtgccaaaagacagtataccctatggaatgtctcgtggccgataaacaaaacttccacaagagttgttttaggtgccatcactgtaattctaaactgtcactgggaaattatgccagtctgcacggtcagatctactgtaagccgcactttaagcagctctttaaatccaaagggaattatgacgaaggatttggccataagcagcataaggaccgctggaactgcaagaatcagagccggagtgttgatttcatccccaacgaggagcctaatatgtgcaagaacattgcagagaatacactcgttccgggggataggaacgagcatctggacgcaggcaattcagagggacagcggaatgaccttcgaaaacttggcgaacgaggaaagcttaaggtcatttggcctccttccaaagaaattcctaagaagaccctaccatttgaggaggagctgaagatgtcaaagcctaagtggccgccggagatgacaactctcttaagcccagaatttaagagcgagagtctgctcgaggacgttcggacgccagagaacaagggccagcgacaggatcacttcccatttcttcagccatacttacagagcactcacgtttgtcagaaggaagatgtgatcggcatcaaggagatgaaaatgcccgaggggaggaaggacgaaaaaaaagaaggccggaaaaatgtccaggatcggccatctgaggcagaagatacaaaatccaacaggaagagcgccatggaccttaacgacaacaacaatgtgattgtgcagtccgccgagaaggaaaaaaatgaaaagaccaaccagaccaatggtgctgaagttctgcaagtgaccaacacagatgacgaaatgatgccagaaaaccacaaggagaatttgaataagaacaataataacaactacgtagcagtgtcgtatctcaataattgccgtcagaagacatcgattcttgaatttctcgatctcctgcccctctccagcgaggccaatgacaccgcgaatgaatacgagatcgagaaattggaaaacacttcacgaatctcagagctgctcgggatatttgaatctgagaagacatattcccgcaacgttctcgcaatggcactgaagaaacagaccgaccgggctgcggcgggctctccggtgcagcccgcgcctaaacccagtctctctcgcgggttgatggtgaaggggggttcaagcatcatcagtcccgacaccaatctgctaaacatcaagggctcgcattctaaatccaaaaatctgcacttcttcttttccaacaccgtcaaaattaccgcgttcagcaaaaagaatgagaatatatttaactgcgatctgattgattctgtcgatcagatcaagaacatgccctgtctcgatctcagagagtttggtaaggacgttaagccctggcacgtggaaacaacagaggcagcccgcaacaatgagaacaccggttttgacgccctgagtcatgagtgtactgcaaagcctttgttccccagggttgaggtacagtccgaacaactgaccgtggaagagcaaataaaacgcaatagatgttacagtgacacagagtag

SEQ ID NO: 77047 - DNA, 2151 bp, Artificial Sequence
  derived and/or modified sequence
atggcccgctaccaggccgctgtgtccagaggagactgccgctccttcagcgccaacatgatggaggagagcgagatgtgtgctgtgcctgggggcctggccaaggtgaagaagcagtttgaagatgagatcaccagcagcaggaacacctttgcccagtaccagtaccagcaccagaacagaagtgagcaggaggccatccacagcagccaggtgggcaccagccgcagcagccaggagatggccagaaatgagcaggagggcagcaaggtgcagaagattgatgtgcatggaacagagatggtgagccacctggagaagcacacagaggaggtgaaccaggccagccagttccaccagtatgtgcaggagaccgtgattgacaccccagaagatgaggagatccccaaggtgtccaccaagctgctgaaggagcagtttgagaagagcgcccaggagaagatcctgtacagcgacaaggagatgaccaccccagccaagcagatcaagaagctgctgctgcaggacaaggagatctgcatcctgtgccagaagacagtgtaccccatggagtgcctggtggccgacaagcagaacttccacaagagctgcttccgctgccaccactgcaacagcaagctgagcctgggcaactatgccagcctgcacggccagatctactgcaagccccacttcaagcagctgttcaagagcaaaggaaattatgatgagggcttcggccacaagcagcacaaggaccgctggaactgcaagaaccagagccgctctgtggacttcatccccaatgaggagcccaacatgtgcaagaacattgctgagaacaccctggtgcctggggacagaaatgagcacctggatgctggcaacagcgagggccagagaaatgacctgaggaagctgggggagcggggcaagctgaaggtgatctggccacccagcaaggagatccccaagaagaccctgccctttgaggaggagctgaagatgagcaagcccaagtggcccccagagatgaccaccctgctgagccctgagttcaagtctgagagcctgctggaggatgtgaggaccccagagaacaagggccagaggcaggaccacttccccttcctgcagccctacctgcagagcacccacgtgtgccagaaggaggatgtgattggcatcaaggagatgaagatgcctgagggcaggaaggatgagaagaaggagggcaggaagaatgtgcaggaccggcccagcgaggccgaggacaccaagagcaacaggaagagcgccatggacctgaatgacaacaacaacgtgattgtgcagagcgctgagaaggagaagaatgagaagaccaaccagaccaatggagctgaggtgctgcaggtgaccaacacagatgatgagatgatgcctgagaaccacaaggagaacctgaacaagaacaacaacaacaactacgtggccgtgtcctacctgaacaactgccggcagaagaccagcatcctggagttcctggacctgctgcccctgagcagcgaggccaatgacacagccaatgaatatgaaattgagaagctggagaacaccagccgcatcagcgagctgctgggcatctttgaaagtgagaagacctacagcagaaatgtgctggccatggccctgaagaagcagacagacagagctgctgctggcagccctgtgcagcctgcccccaagcccagcctgagccggggcctgatggtgaagggcggcagcagcatcatcagcccagacaccaacctgctgaacatcaagggcagccacagcaagagcaagaacctgcacttcttcttcagcaacacagtgaagatcacagccttcagcaagaagaatgaaaacatcttcaactgtgacctgattgattctgtggaccagatcaagaacatgccctgcctggacctgcgggagtttgggaaggatgtgaagccctggcacgtggagaccacagaggccgccaggaacaatgaaaatactggatttgatgccctgagccatgaatgtacagccaagcccctcttcccccgggtggaggtgcagagcgagcagctgactgtggaggagcagatcaagaggaaccgctgctacagcgacacagaatag

SEQ ID NO: 77048 - DNA, 2151 bp, Artificial Sequence
  derived and/or modified sequence
atggcccggtaccaggccgccgtgagccggggcgactgccggagctttagtgccaatatgatggaggaaagcgagatgtgtgcagtccctggggggcttgctaaggtgaagaaacaattcgaagacgaaatcacctcatcaagaaacaccttcgcccagtatcaatatcagcaccaaaaccgcagcgagcaggaagctatccactcgtcacaggtggggacgtccaggagcagccaggaaatggctcgtaacgagcaggaaggttccaaagtgcaaaagatagatgtccatggcaccgaaatggtctcccatctggagaaacatactgaggaggtcaatcaggcctctcagttccaccagtacgtgcaggagactgtcattgacacgccagaagatgaagagattcccaaagtgtcaaccaagcttctgaaggaacaattcgagaagtcagcccaagagaagatcctctattcggacaaagaaatgaccacgccggcaaaacagatcaagaaactccttctgcaggataaggaaatatgtatcctatgccaaaagactgtttatcccatggagtgtctcgtcgccgacaaacagaatttccacaagtcctgtttccgatgccatcactgcaacagcaagctgtctctgggaaattacgcatccttgcacggtcagatctactgtaaaccacactttaaacaactgtttaagagtaagggaaactacgacgagggttttggtcataagcagcacaaagaccggtggaattgcaaaaaccagagcaggtccgtagacttcattcctaatgaggaacccaacatgtgcaaaaacattgctgagaacacgcttgtgccgggcgatcgaaacgagcatctggacgccggcaactccgaaggacaaaggaacgatctccggaagcttggcgagcggggaaagctgaaagtcatatggcccccctccaaagagattcctaaaaagaccctcccttttgaagaagagctcaagatgtccaagccgaagtggcctcccgagatgactacgcttctgtccccagaattcaagagtgaaagtctgctagaggacgtgagaaccccagagaataaggggcagcgtcaagaccactttcctttccttcaaccctacctccagtccactcatgtgtgccagaaagaagatgtcattggaattaaagagatgaagatgcccgagggcagaaaagatgaaaagaaagagggcagaaaaaatgtacaggaccgcccgtccgaagcagaagacaccaaatctaaccgtaaaagcgctatggacctgaatgataacaacaacgtgattgtgcagtcggccgaaaaggaaaagaacgagaaaactaatcagacaaatggcgctgaagtgctccaggtaaccaacacagacgacgaaatgatgccagagaaccataaagaaaacctgaataaaaataacaataacaactatgtggccgtctcatatcttaacaactgtcgccagaagactagtattttggagtttttagatctcctgcctcttagctcagaagctaatgatacggccaatgaatacgagattgagaaactcgaaaacacaagcagaataagtgaactgttgggaattttcgaaagcgagaaaacttatagccggaacgttctcgccatggctctaaaaaagcagacagatagagccgccgccgggtctcccgtacaacccgccccaaaaccttccctgagccggggcttgatggtaaaggggggaagctccatcataagccccgataccaatctcctgaacatcaagggatcacactccaaatcaaagaatttgcacttctttttttctaataccgttaaaatcacggcatttagcaagaaaaatgagaatatttttaactgcgatctgatcgatagtgtcgatcagatcaaaaacatgccctgcctcgatctgcgagagtttggcaaagacgtgaagccctggcatgtggagactactgaagctgcacgcaacaacgaaaacacaggatttgatgccctctctcacgagtgcacagcgaaacctctatttccccgagtggaagtccagagtgaacagcttacagtggaagagcagatcaaaagaaaccgttgctattctgacaccgaatag

SEQ ID NO: 77049 - DNA, 2151 bp, Artificial Sequence
  derived and/or modified sequence
atggcgcgataccaggcggcagtctcacgaggtgactgcaggtcattttccgcaaacatgatggaagaatccgagatgtgtgctgtgccaggcggtctcgctaaggtaaagaagcagttcgaagacgaaatcaccagcagcagaaacacgttcgcacagtaccaataccagcatcaaaacagaagtgaacaggaagcaattcactcttcacaagtggggacatcccgttcctctcaggaaatggctcggaatgagcaggaaggctcaaaagttcagaagatagatgttcatgggacagagatggtctcccacctcgagaagcatacggaagaggtgaatcaggcctctcaatttcaccagtatgttcaagaaactgtgattgacacacccgaggatgaagaaatccctaaggtctctacgaagcttcttaaagagcaattcgagaagagcgcacaggagaagatcttgtactccgataaggagatgaccactccagccaaacaaataaagaaactcctgctgcaagataaggagatctgtatcttatgccagaaaactgtatacccaatggagtgtctggtcgcagacaagcagaacttccacaagagttgttttagatgccaccactgtaacagcaagctgtctctcgggaactacgcctctctgcacggtcagatctactgtaagccccacttcaagcaactctttaaatctaaaggaaactatgatgaggggtttggtcataagcagcacaaggaccgctggaactgcaagaatcagtctcgatctgtcgactttatcccaaatgaggagcctaatatgtgtaaaaacatagccgaaaacaccctcgttcccggtgaccggaacgagcacctggacgcagggaattccgaaggccagaggaacgatttacgcaaactcggtgagcgaggaaagctgaaggtgatttggcctccgtctaaggaaatcccaaagaagacgttgcctttcgaagaagagttgaaaatgtcaaagcctaagtggccccctgaaatgacgacgctgctgtcacctgaattcaagtccgaaagcttactagaggatgtcaggactcccgagaataagggccagcgccaggatcactttccctttctgcagccatacttgcagtccacacacgtctgtcaaaaagaagatgttatcgggatcaaggaaatgaagatgcctgaaggacgtaaagatgagaagaaggaaggtcgcaaaaatgtccaggatcgccctagcgaggccgaggacaccaagtctaatcgaaagagcgccatggatttgaacgacaacaataacgtcatcgtccaaagcgcagagaaagaaaagaacgaaaagacaaaccagacgaatggcgcagaggttctgcaggtgacgaataccgatgacgaaatgatgccggaaaatcacaaagagaatctcaataagaacaacaataataactatgtggctgtcagttacctcaacaactgccgccagaaaacctccatcctggagttcctcgacctactgcccctctcttcagaggccaatgatacagccaacgaatatgagattgagaagctggagaatacttctaggatttctgaactgctcggaatctttgagtctgaaaagacctatagcaggaacgtcttggccatggccctgaaaaagcaaactgatcgcgctgccgctggatcgccagtccaacctgcccctaaaccgtctctctctagggggttaatggttaaaggaggtagctccataatcagccccgatactaacctgctcaacattaaaggctcacactcaaaaagcaaaaatttacatttctttttttctaacacagttaaaattactgcgttttctaaaaagaatgagaacatcttcaactgcgacctgattgactctgtggatcagatcaagaacatgccctgtctggaccttcgcgaatttggcaaggacgtaaagccttggcatgtggagactacagaagcagctagaaataacgagaataccggctttgacgcgcttagccatgagtgtacagcaaagcccttattccctcgcgttgaggtccagtccgaacagctgacagtggaggagcagataaagcggaacaggtgctactccgatactgaatag

SEQ ID NO: 77050 - protein, 666 aa, Artificial Sequence
  derived and/or modified sequence
MRKVRGPPVSCIKRDSPIQCIQAIAENRADAVTLDGGFIYEAGLAPYKLRPVAAEVYGTERQPRTHYYAVAVVKKGGSFQLNELQGLKSCHTGLRRTAGWNVPIGTLRPFLNWTGPPEPIEAAVARFFSASCVPGADKGQFPNLCRLCAGTGENKCAFSSQEPYFSYSGAFKCLRDGAGDVAFIRESTVFEDLSDEAERDEYELLCPDNTRKPVDKFKDCHLARVPSHAVVARSVNGKEDAIWNLLRQAQEKFGKDKSPKFQLFGSPSGQKDLLFKDSAIGFSRVPPRIDSGLYLGSGYFTAIQNLRKSEEEVAARRARVVWCAVGEQELRKCNQWSGLSEGSVTCSSASTTEDCIALVLKGEADAMSLDGGYVYTAGKCGLVPVLAENYKSQQSSDPDPNCVDRPVEGYLAVAVVRRSDTSLTWNSVKGKKSCHTAVDRTAGWNIPMGLLFNQTGSCKFDEYFSQSCAPGSDPRSNLCALCIGDEQGENKCVPNSNERYYGYTGAFRCLAENAGDVAFVKDVTVLQNTDGNNNEAWAKDLKLADFALLCLDGKRKPVTEARSCHLAMAPNHAVVSRMDKVERLKQVLLHQQAKFGRNGSDCPDKFCLFQSETKNLLFNDNTECLARLHGKTTYEKYLGPQYVAGITNLKKCSTSPLLEACEFLRK

SEQ ID NO: 77051 - DNA, 2001 bp, Artificial Sequence
  derived and/or modified sequence
atgaggaaggtgagggggccacctgtctcttgtataaagcgggacagtccgattcagtgcatccaggccattgcagagaatcgggctgatgctgtgaccctggatggaggattcatttacgaggcggggctcgctccctacaagcttcggccggttgccgccgaagtgtacggaactgagagacagccgcgtacgcactattacgccgtcgccgtcgtgaaaaaaggtggcagctttcagctgaatgaactgcaggggttaaaaagttgccatacgggtctcagacggacggctggatggaacgtgccaattggcactctgaggccgttccttaattggactgggccccccgaacccattgaagcagccgtcgctcgctttttttcagcgtcttgcgtccctggagcagataaaggtcagtttcctaacctctgcaggctctgcgccggcaccggggagaacaaatgtgcattctcttcccaggagccctatttctcctactccggagcatttaaatgcctgcgcgacggcgccggggatgtcgccttcatcagggagtccaccgtcttcgaggacctttcagacgaggccgaaagggatgagtacgaactgctctgtcctgataatactcgcaaacctgttgacaagtttaaggactgtcatctggcaagagttccaagtcacgccgtagtcgcacgcagtgtgaacggcaaagaagacgccatttggaacctgctccgacaagcccaggagaagttcggtaaggataaatctccaaaattccaactgttcggctcgcctagcggacaaaaggacctgctgtttaaggacagtgcgataggcttctctagagtcccacctcgcattgattcagggctgtacctcggaagtgggtacttcactgctatccagaaccttcgtaagtccgaagaggaggtggcggcccgacgtgccagggtcgtctggtgcgctgtcggggagcaggagctgcgaaagtgcaatcagtggtccggcctttcagagggatctgtgacatgttcaagcgcttcgacaacagaggattgcatagccctagtgttgaaaggggaagcggacgccatgtcactggacggcggttatgtgtatactgctggcaaatgtgggctagtcccggtcctcgccgaaaactacaagtcacaacagtcaagtgaccccgatccaaactgcgtggatcggccagttgagggctatcttgctgttgcagtggtccgcaggagtgatacatcattgacgtggaatagcgtgaagggcaagaagtcatgccatacagcagtcgataggaccgccgggtggaatatcccaatggggctgttgttcaatcagaccggtagttgcaagttcgacgaatatttcagccagtcatgtgccccagggagcgacccacgcagtaatctgtgcgcgctgtgcatcggagatgagcagggtgaaaataaatgcgtgccgaatagcaacgagcgatactatggctatacaggcgcttttcgctgcttggccgagaacgcaggggacgtggccttcgtgaaggacgttacagttctgcagaacacagacgggaataacaatgaggcctgggccaaggacctaaagttagccgatttcgccctgttgtgcctagacggcaaacggaaacctgtaaccgaggccaggtcatgtcatctagcgatggctcctaaccacgccgtggtcagtcgtatggataaggtggagaggctgaagcaagtgctgctgcaccaacaagctaaattcgggcgaaatggatctgactgtccagataaattctgcctctttcaatcggagacaaagaacctgttgttcaatgataatacagagtgccttgcgcgcctgcatggaaagacaacatacgagaaatacctcggaccacagtacgtggctgggatcaccaacctgaagaaatgttcaactagtccccttctggaggcctgcgaattcttaaggaaatag

SEQ ID NO: 77052 - DNA, 1100 bp, Artificial Sequence
  derived and/or modified sequence
agagccttcgtttgccaagtcgcctccagaccgcagacatgaaacttgtcttcctcgtcctgctgttcctcggggccctcggactgtgtctggctggccgtaggaggagtgttcagtggtgcgccgtatcccaacccgaggccacaaaatgcttccaatggcaaaggaatatgagaaaagtgcgtggccctcctgtcagctgcataaagagagactcccccatccagtgtatccaggccattgcggaaaacagggccgatgctgtgacccttgatggtggtttcatatacgaggcaggcctggccccctacaaactgcgacctgtagcggcggaagtctacgggaccgaaagacagccagctgtgttcccggtgcagataaaggacagttccccaacctgtgtcgcctgtgtgcggggacaggggaaaacaaatgtgccttctcctcccaggaaccgtacttcagctactctggtgccttcaagtgtctgagagacggggctggagacgtggcttttatcagagagagcacagtgtttgaggacctgtcagacgaggctgaaagggacgagtatgagttactctgcccagacaacactcggaagccagtggacaagttcaaagactgccatctggcccgggtcccttctcatgccgttgtggcacgaagtgtgaatggcaaggaggatgccatctggaatcttctccgccaggcacaggaaaagtttggaaaggacaagtcaccgaaattccagctctttggctcccctagtgggcagaaagatctgctgttcaaggactctgccattgggttttcgagggtgcccccgaggatagattctgggctgtaccttggctccggctacttcactgccatccagaacttgaggaaaagtgaggaggaagtggctgcccggcgtgcgcgggtcgtgtggtgtgcggtgggcgagcaggagctgcgcaagtgtaaccagtggagtggcttgagcgaaggcagcgtgacctgctcctcggcctccaccacagaggactgcatcgccctggtgctgaaaggagaagctgatgccatgagtttggatggaggatatgtgtacactgcag

SEQ ID NO: 77053 - DNA, 2001 bp, Artificial Sequence
  derived and/or modified sequence
atgaggaaggtgcggggcccccctgtgtcctgcatcaagagggacagccccatccagtgcatccaggccatcgccgagaacagagcagatgctgtgaccctggatggcggcttcatctatgaggccggcctggccccctacaagctgcggcctgtggccgctgaggtgtatggaacagagcggcagcccaggacccactactatgctgtggccgtggtgaagaagggcggcagcttccagctgaatgagctgcagggcctgaagagctgccacacaggcctgcggaggacagctggctggaatgtgcccatcggcaccctgcggcccttcctgaactggacaggccccccagagcccatcgaggccgctgtggcccgcttcttcagcgccagctgtgtgcctggagctgacaagggccagttccccaacctgtgccgcctgtgtgccggcactggagaaaataaatgtgccttcagcagccaggagccctacttctcctacagcggggccttcaagtgcctgagagatggagctggagatgtggccttcatccgggagagcacagtgtttgaggacctgagtgatgaagctgagagagatgaatatgagctgctgtgcccagacaacaccaggaagcctgtggacaagttcaaggactgccacctggcccgggtgcccagccatgctgtggtggcccggtctgtgaatggcaaggaggatgccatctggaacctgctgcggcaggcccaggagaagtttgggaaggacaagagccccaagttccagctgtttggcagccccagcggccagaaggacctgctcttcaaggacagcgccatcggcttcagccgggtgcccccaagaattgattctggcctgtacctgggcagcggctacttcaccgccatccagaacctgaggaagtctgaggaggaggtggccgcccggcgggcccgggtggtgtggtgtgctgtgggggagcaggagctgaggaagtgcaaccagtggagcggcctgtctgagggctctgtgacctgcagcagcgccagcaccacagaggactgcatcgccctggtgctgaagggggaggctgatgccatgagcctggatggcggctacgtgtacacagctggaaaatgtggcctggtgcctgtgctggccgagaactacaagagccagcagagcagtgaccctgaccccaactgtgtggacaggcctgtggagggctacctggccgtggccgtggtgagaagaagtgacaccagcctgacctggaacagcgtgaagggcaagaagagctgccacacagctgtggacagaacagctggctggaacatccccatgggcctgctcttcaaccagacaggcagctgcaagtttgatgagtacttcagccagagctgtgcccctggcagtgaccccaggagcaacctgtgtgccctgtgcattggagatgagcagggagaaaataaatgtgtgcccaacagcaatgaaagatactacggctacaccggggccttccgctgcctggccgagaatgctggagatgtggcctttgtgaaggatgtgacagtgctgcagaacacagatggcaacaacaatgaggcctgggccaaggacctgaagctggccgactttgccctgctgtgcctggatggcaagaggaagcctgtgacagaggcccggagctgccacctggccatggcccccaaccacgctgtggtgtccaggatggacaaggtggagcggctgaagcaggtgctgctgcaccagcaggccaagtttggaagaaatggaagtgactgcccagacaagttctgcctcttccagagcgagaccaagaacctgctcttcaatgacaacacagaatgtctggcccggctgcacggcaagaccacctatgagaagtacctgggcccccagtatgtggccggcatcaccaacctgaagaagtgcagcaccagccccctgctggaggcctgtgagttcctgaggaagtag

SEQ ID NO: 77054 - DNA, 2001 bp, Artificial Sequence
  derived and/or modified sequence
atgcggaaggtgcggggcccccccgtgagctgcatcaagcgggactcacccatccagtgcattcaggccatcgccgagaaccgcgcagacgctgtaactcttgacggcgggttcatctacgaagctggattggccccctacaagcttcggcccgtcgccgccgaagtgtatggaacagaaagacagccaagaacacactattacgccgtagccgtcgtgaagaagggcggaagctttcaactgaatgagctccagggcttgaaatcatgccacactggccttcggcgcacagctggttggaacgtgccaattggaactctacggcccttcctaaattggacaggccctccggagcccatcgaggcagccgtagcaaggttcttttcagcatcatgtgttcctggggccgataaagggcagtttcctaacctctgtagactttgtgctgggacaggagaaaataagtgtgcatttagctcccaggaaccttactttagttactctggtgcctttaaatgcctcagagatggggccggcgatgtggcctttatacgggagtccaccgtttttgaggatctctccgatgaggccgagcgtgatgagtatgaattgctctgtcccgataatacaagaaaacctgtggacaagtttaaagactgccatttagccagggttccctcacacgccgttgtcgcgagaagcgtaaacgggaaagaggacgcgatttggaatctgctgcgacaggcccaggaaaaattcggtaaggacaagtcacccaagtttcaactgttcggctctccctcaggccagaaggacttgcttttcaaggactccgccatcgggttttctcgggttccacccaggatcgacagcggcctgtatctcgggagcggctattttacagctattcaaaacctgaggaagagcgaggaggaagtcgccgcccgaagagcacgtgttgtttggtgtgccgtcggcgaacaggagctccgaaagtgcaaccagtggagtggactgtccgaaggcagcgtgacttgcagctcagcctctaccacggaagattgtatcgctttagttctcaaaggggaggcagatgccatgagcctggacggtggttatgtgtacactgcaggcaagtgcggactggtgccagtactcgctgaaaactacaaatcccaacaatcttcggatcctgaccccaattgcgtggacagaccagttgaaggatacctcgctgtggccgttgtgaggcggtccgatacaagtttgacctggaactctgtcaaaggcaagaagtcatgtcacactgctgtggatcgtaccgccgggtggaatattcccatgggcttgctattcaaccagacaggttcctgtaagtttgacgagtacttttctcagtcatgtgctcccggcagcgaccccaggtcaaacctgtgcgccctttgtatcggggacgaacaaggggaaaataaatgtgtgccaaactccaacgaaagatattatggatacactggcgcattccgttgcttggctgaaaacgctggagatgtggcatttgtgaaagatgttacagtccttcagaacaccgatggcaacaataatgaagcttgggcaaaggatttaaagctggccgacttcgccttgctgtgcctagacgggaagcgcaagccggttactgaagcacgatcctgtcatcttgcaatggcgcctaaccacgccgtagtgtcacggatggataaggtcgagagattaaagcaggtgttactgcaccaacaggctaagtttgggaggaacggctctgactgtcctgacaaattttgcttatttcagagtgaaacaaagaacttgctgtttaacgataataccgaatgcctggcccggctacatggcaaaaccacttacgaaaagtatctgggtccgcaatatgtcgccggaattacgaatctgaagaagtgctccacatctcccttgctcgaggcctgcgaatttctacgtaagtag

SEQ ID NO: 77055 - DNA, 2001 bp, Artificial Sequence
  derived and/or modified sequence
atgcgtaaggttaggggccctcccgttagctgcattaagcgcgactctccaattcagtgcatccaagccatcgcagaaaacagggctgatgctgtgacgctagacggtggctttatctacgaggcaggactcgccccttacaaattgcggccagtcgccgctgaggtgtacggtactgagcgtcagcccagaacacattactacgcagttgcagtcgtcaaaaaggggggttctttccagctgaacgagttacagggtctaaagtcctgccatactggtcttaggcgcacagcaggctggaacgtccccataggaaccctgagaccctttctgaattggactgggcctcccgagcccatcgaagccgctgtcgccagattcttttctgcaagctgcgtgccaggtgccgataagggccagttccctaacctttgcagactttgcgcaggaaccggcgaaaacaaatgcgctttctcttcgcaggagccatacttcagttacagcggcgctttcaaatgtctcagggatggagcaggcgatgtggcattcatcagggaatcaacggtgttcgaggatctttctgatgaggcggagagagacgaatatgagcttctttgcccagacaacacccgcaaacccgtggataagtttaaagactgtcacttggccagggtcccgtcacatgctgtcgtggcaaggtctgttaacggtaaagaggacgccatctggaacctcctccggcaggcccaggagaagttcgggaaagataagtccccaaagtttcaactgttcggctcgccatcagggcaaaaggatttgctattcaaggatagtgcaatcggattttcacgtgtacccccacgcatcgactccggcttataccttggctccggatacttcactgctatacagaatttacggaaatctgaagaggaagttgcggctagaagagctcgcgtggtgtggtgcgcagtgggagaacaagagctccgtaagtgtaatcaatggtccgggctgagcgagggctcagtaacctgttcaagcgcttcaaccacggaagactgtatcgccctggtccttaaaggcgaggctgatgctatgtccttagacggcggttatgtctacaccgctggtaagtgtggactggttcctgtcttagctgagaactacaagagccaacagtcaagtgacccagacccaaattgtgttgatcggcctgttgaaggatatctagctgttgcagtggtgagacgatcagacaccagcttgacctggaatagcgtcaaaggcaagaaaagctgtcatacagccgtcgatagaaccgctggatggaatatccctatgggtctgctatttaaccagaccggctcctgcaaattcgacgagtacttttcccagtcttgcgcccctggttctgatcccagatcaaatctgtgcgcgctgtgcatcggggatgagcagggggagaataaatgcgtgccaaacagtaatgagcgctattatgggtacacgggggcttttaggtgtctggccgagaatgccggagacgtggctttcgttaaagacgtcaccgtgctgcaaaacactgacggcaacaataacgaagcctgggccaaagacttgaaactcgcagatttcgccttgctctgcctggatggcaagagaaaaccagtgacagaggctaggtcttgtcacttggccatggcaccaaatcatgcagttgtttcccggatggacaaagtggagcgacttaagcaggtactgctacatcagcaggcaaagtttggacgcaatggatctgattgtcctgacaaattttgcctctttcagtctgagacaaagaacctgctttttaatgacaacaccgagtgcttagccaggctgcacggcaaaaccacatacgagaagtatctaggaccccagtatgtagcagggatcacgaatttgaaaaaatgctctacctcaccgctgctcgaggcctgtgagttcctgcggaaatag

SEQ ID NO: 77056 - DNA, 2001 bp, Artificial Sequence
  derived and/or modified sequence
atgagaaaggtgagaggcccccccgtgagctgcatcaagagagacagccccatccagtgcatccaggccatcgccgagaacagagccgacgccgtgaccctggacggcggcttcatctacgaggccggcctggccccctacaagctgagacccgtggccgccgaggtgtacggcaccgagagacagcccagaacccactactacgccgtggccgtggtgaagaagggcggcagcttccagctgaacgagctgcagggcctgaagagctgccacaccggcctgagaagaaccgccggctggaacgtgcccatcggcaccctgagacccttcctgaactggaccggcccccccgagcccatcgaggccgccgtggccagattcttcagcgccagctgcgtgcccggcgccgacaagggccagttccccaacctgtgcagactgtgcgccggcaccggcgagaacaagtgcgccttcagcagccaggagccctacttcagctacagcggcgccttcaagtgcctgagagacggcgccggcgacgtggccttcatcagagagagcaccgtgttcgaggacctgagcgacgaggccgagagagacgagtacgagctgctgtgccccgacaacaccagaaagcccgtggacaagttcaaggactgccacctggccagagtgcccagccacgccgtggtggccagaagcgtgaacggcaaggaggacgccatctggaacctgctgagacaggcccaggagaagttcggcaaggacaagagccccaagttccagctgttcggcagccccagcggccagaaggacctgctgttcaaggacagcgccatcggcttcagcagagtgccccccagaatcgacagcggcctgtacctgggcagcggctacttcaccgccatccagaacctgagaaagagcgaggaggaggtggccgccagaagagccagagtggtgtggtgcgccgtgggcgagcaggagctgagaaagtgcaaccagtggagcggcctgagcgagggcagcgtgacctgcagcagcgccagcaccaccgaggactgcatcgccctggtgctgaagggcgaggccgacgccatgagcctggacggcggctacgtgtacaccgccggcaagtgcggcctggtgcccgtgctggccgagaactacaagagccagcagagcagcgaccccgaccccaactgcgtggacagacccgtggagggctacctggccgtggccgtggtgagaagaagcgacaccagcctgacctggaacagcgtgaagggcaagaagagctgccacaccgccgtggacagaaccgccggctggaacatccccatgggcctgctgttcaaccagaccggcagctgcaagttcgacgagtacttcagccagagctgcgcccccggcagcgaccccagaagcaacctgtgcgccctgtgcatcggcgacgagcagggcgagaacaagtgcgtgcccaacagcaacgagagatactacggctacaccggcgccttcagatgcctggccgagaacgccggcgacgtggccttcgtgaaggacgtgaccgtgctgcagaacaccgacggcaacaacaacgaggcctgggccaaggacctgaagctggccgacttcgccctgctgtgcctggacggcaagagaaagcccgtgaccgaggccagaagctgccacctggccatggcccccaaccacgccgtggtgagcagaatggacaaggtggagagactgaagcaggtgctgctgcaccagcaggccaagttcggcagaaacggcagcgactgccccgacaagttctgcctgttccagagcgagaccaagaacctgctgttcaacgacaacaccgagtgcctggccagactgcacggcaagaccacctacgagaagtacctgggcccccagtacgtggccggcatcaccaacctgaagaagtgcagcaccagccccctgctggaggcctgcgagttcctgagaaagtag

SEQ ID NO: 77057 - protein, 581 aa, Artificial Sequence
  derived and/or modified sequence
MPRRKRNAGSSSDGTEDSDFSTDLEHTDSSESDGTSRRSARVTRSSARLSQSSQDSSPVRNLQSFGTEEPAYSTRRVTRSQQQPTPVTPKKYPLRQTRSSGSETEQVVDFSDRETKNTADHDESPPRTPTGNAPSSESDIDISSPNVSHDESIAKDMSLKDSGSDLSHRPKRRRFHESYNFNMKCPTPGCNSLGHLTGKHERHFSISGCPLYHNLSADECKAPTERQLRYKEKVAELRKKRNSGLSKEQKEKYMEHRQTYGNTREPLLENLTSEYDLDLFRRAQARASEDLEKLRLQGQITEGSNMIKTIAFGRYELDTWYHSPYPEEYARLGRLYMCEFCLKYMKSQTILRRHMAKCVWKHPPGDEIYRKGSISVFEVDGKKNKIYCQNLCLLAKLFLDHKTLYYDVEPFLFYVMTEADNTGCHLIGYFSKEKNSFLNYNVSCILTMPQYMRQGYGKMLIDFSYLLSKVEEKVGSPERPLSDLGLISYRSYWKEVLLRYLHNFQGKEISIKEISQETAVNPVDIVSTLQALQMLKYWKGKHLVLKRQDLIDEWIAKEAKRSNSNKTMDPSCLKWTPPKGT

SEQ ID NO: 77058 - protein, 425 aa, Artificial Sequence
  derived and/or modified sequence
MSLKDSGSDLSHRPKRRRFHESYNFNMKCPTPGCNSLGHLTGKHERHFSISGCPLYHNLSADECKAPTERQLRYKEKVAELRKKRNSGLSKEQKEKYMEHRQTYGNTREPLLENLTSEYDLDLFRRAQARASEDLEKLRLQGQITEGSNMIKTIAFGRYELDTWYHSPYPEEYARLGRLYMCEFCLKYMKSQTILRRHMAKCVWKHPPGDEIYRKGSISVFEVDGKKNKIYCQNLCLLAKLFLDHKTLYYDVEPFLFYVMTEADNTGCHLIGYFSKEKNSFLNYNVSCILTMPQYMRQGYGKMLIDFSYLLSKVEEKVGSPERPLSDLGLISYRSYWKEVLLRYLHNFQGKEISIKEISQETAVNPVDIVSTLQALQMLKYWKGKHLVLKRQDLIDEWIAKEAKRSNSNKTMDPSCLKWTPPKGT

SEQ ID NO: 77059 - DNA, 3469 bp, Artificial Sequence
  derived and/or modified sequence
caggaggcactagggatcgtccgcaggattgggactgatacagaggccgccacggagcccgccggagccaccgttcctgctgctgccgccgctgcccgaatcggaaccgtcgggccgcagccgccggcaatgccgcgaaggaagaggaatgcaggcagtagttcagatggaaccgaagattccgatttttctacagatctcgagcacacagacagttcagaaagtgatggcacatcccgacgatctgctcgagtcacccgctcctcagccaggctaagccagagttctcaagattccagtcctgttcgaaatctgcagtcttttggcactgaggagcctgcttactctaccagaagagtgacccgtagtcagcagcagcctaccccagtgacaccgaaaaaataccctcttcggcagactcgttcatctggttcagaaactgagcaagtggttgatttttcagatagagaaactaaaaatacagctgatcatgatgagtcaccgcctcgaactccaactggaaatgcgccttcttctgagtctgacatagacatctccagccccaatgtatctcacgatgagagcattgccaaggacatgtccctgaaggactcaggcagtgatctctctcatcgccccaagcgccgtcgcttccatgaaagctacaacttcaatatgaagtgtcctacaccaggctgtaactctctaggacaccttacaggaaaacatgagagacatttctccatctcaggatgcccactgtatcataacctctcagctgacgaatgcaaggcaccaacggagagacagcttcgatataaggaaaaagtggctgaactcaggaagaaaagaaattctggactgagcaaagaacagaaagagaaatatatggaacacagacagacctatgggaacacacgggaacctcttttagaaaacctgacaagcgagtatgacttggatcttttccgaagagcacaagcccgggcttcagaggatttggagaagttaaggctgcaaggccaaatcacagagggaagcaacatgattaaaacaattgcttttggccgctatgagcttgatacctggtatcattctccatatcctgaagaatatgcacggctgggacgtctctatatgtgtgaattctgtttaaaatatatgaagagccaaacgatactccgccggcacatggccaaatgtgtgtggaaacacccacctggtgatgagatatatcgcaaaggttcaatctctgtgtttgaagtggatggcaagaaaaacaagatctactgccaaaacctgtgcctgttggccaaactttttctggaccacaagacattatattatgatgtggagcccttcctgttctatgttatgacagaggcggacaacactggctgtcacctgattggatatttttctaaggaaaagaattcattcctcaactacaacgtctcctgtatccttactatgcctcagtacatgagacagggctatggcaagatgcttattgatttcagttatttgctttccaaagtcgaagaaaaagttggctccccagaacgtccactctcagatctggggcttataagctatcgcagttactggaaagaagtacttctccgctacctgcataattttcaaggcaaagagatttctatcaaagaaatcagtcaggagacggctgtgaatcctgtggacattgtcagcactctgcaagcccttcagatgctcaaatactggaagggaaaacacctagttttaaagagacaggacctgattgatgagtggatagccaaagaggccaaaaggtccaactccaataaaaccatggatcccagctgcttaaaatggacccctcccaagggcacttaaagtgacctgtcattccgagccagcgaaccccagcagtaggaatccgtaccctagggatctgtctgtcatttctctgttgctcttgtgattggcaagtacagtatcctttgggaaggccatccccctcaggactgtcctggctccgacctttgtgtacactgcagacgctggttctgaggaactgttgtttcggcctcagtgaggttgcctggatgggatctgtattagacttgagtgcaggtctctcagcactgacccaaggagttctgttatggtactgtacctgtccagtcactggttctctcctcatgtcctctcgccccatgaggttgtgttgtgtcttctaagcgtggtactagtgcttgccacctggtcaccagacctccaaatatggctgccaccaccaggacctttccagttactccttatatgtgtgttctatggaggggcagggaaaaggtggcacttgtgagtgtgtgtggattggcagggggtccattcactttgggttccatcttgctttaaatttcttcattttgattaagagacctctttttgatctgtattgggctaaccagagccaaatacttttgaagagtttcccagggactagtcatggtaatagcatataattgatctgaatgagatggagagaagaatgaaggggtggtggttctgggtttgatttgagttcacctgtgggcagtgggcagtgggcagtgtcttggtgaaagggaacggatactactttttgcctcaccgtaaagtactcactagtaaatatttccttctctctttactcccactttttacgtttgcaggtgccaaagtaatgtccacttttccctttcatgctgcatattaactggttaattatactgcagaaaccttttcacctccactagtctgatacagtacatctgtacttccatataccttgcactgattttgtctgagtgccctgggagaagtagaaaatgattgaaagtgacttccgtatctcagcccatgactcagcaaggcagaatggccacccctgccaaagtttgcttctcttttcaacagtgcctcaccctccctctaggattaaagtgcttctgcccttccacgaactcctcctccatttcctttttgggatttgtcaccatccttctattctctggtcttctatttttggtgttgttcaagtgaaggaagagatgttccctctaatttctctctagcccattataacctgctatcttggggcaacttttgatgtatgacatgtcacccttcccaacttggtctcctccaacatgctgtcttcatgtggagccctcaccacaatccctgactccggtcatttgtgcctttctcttgtcatctctgtacactacttatattcactgtgggttgggggagctaattttaagcatgttcagtggcagctcccctccagtttcagtgtcactgttaaaatttatcaaaaagcaacttcactaggggttttcttaagggataaaggccttttacagaagctaaacccttccccacatgtggtagaatgtgctcttctatatctactcctcaataaagcatgttctctgctcaa

SEQ ID NO: 77060 - DNA, 3638 bp, Artificial Sequence
  derived and/or modified sequence
tcaattcaacaaatgtctattgactactttctgcgcggtggttgctgtggattcagaaattaattagatgtgatccctggcttaagggtgtcacagcccgataggagaaaacagacatgaataatcttagaaggatctagtaagttctcagcttggaggtgtatacaaggtgttgctggaaggaagtgaaggagcagttaagtctgccctggagtacaatgggagatatattggtaaaagccacagagaagagctgagttccaggatcaagccaggaaggaataagtctcacgtcaaggctttaaatatctcgaggaatgcaggcagtagttcagatggaaccgaagattccgatttttctacagatctcgagcacacagacagttcagaaagtgatggcacatcccgacgatctgctcgagtcacccgctcctcagccaggctaagccagagttctcaagattccagtcctgttcgaaatctgcagtcttttggcactgaggagcctgcttactctaccagaagagtgacccgtagtcagcagcagcctaccccagtgacaccgaaaaaataccctcttcggcagactcgttcatctggttcagaaactgagcaagtggttgatttttcagatagagaaactaaaaatacagctgatcatgatgagtcaccgcctcgaactccaactggaaatgcgccttcttctgagtctgacatagacatctccagccccaatgtatctcacgatgagagcattgccaaggacatgtccctgaaggactcaggcagtgatctctctcatcgccccaagcgccgtcgcttccatgaaagctacaacttcaatatgaagtgtcctacaccaggctgtaactctctaggacaccttacaggaaaacatgagagacatttctccatctcaggatgcccactgtatcataacctctcagctgacgaatgcaaggcaccaacggagagacagcttcgatataaggaaaaagtggctgaactcaggaagaaaagaaattctggactgagcaaagaacagaaagagaaatatatggaacacagacagacctatgggaacacacgggaacctcttttagaaaacctgacaagcgagtatgacttggatcttttccgaagagcacaagcccgggcttcagaggatttggagaagttaaggctgcaaggccaaatcacagagggaagcaacatgattaaaacaattgcttttggccgctatgagcttgatacctggtatcattctccatatcctgaagaatatgcacggctgggacgtctctatatgtgtgaattctgtttaaaatatatgaagagccaaacgatactccgccggcacatggccaaatgtgtgtggaaacacccacctggtgatgagatatatcgcaaaggttcaatctctgtgtttgaagtggatggcaagaaaaacaagatctactgccaaaacctgtgcctgttggccaaactttttctggaccacaagacattatattatgatgtggagcccttcctgttctatgttatgacagaggcggacaacactggctgtcacctgattggatatttttctaaggaaaagaattcattcctcaactacaacgtctcctgtatccttactatgcctcagtacatgagacagggctatggcaagatgcttattgatttcagttatttgctttccaaagtcgaagaaaaagttggctccccagaacgtccactctcagatctggggcttataagctatcgcagttactggaaagaagtacttctccgctacctgcataattttcaaggcaaagagatttctatcaaagaaatcagtcaggagacggctgtgaatcctgtggacattgtcagcactctgcaagcccttcagatgctcaaatactggaagggaaaacacctagttttaaagagacaggacctgattgatgagtggatagccaaagaggccaaaaggtccaactccaataaaaccatggatcccagctgcttaaaatggacccctcccaagggcacttaaagtgacctgtcattccgagccagcgaaccccagcagtaggaatccgtaccctagggatctgtctgtcatttctctgttgctcttgtgattggcaagtacagtatcctttgggaaggccatccccctcaggactgtcctggctccgacctttgtgtacactgcagacgctggttctgaggaactgttgtttcggcctcagtgaggttgcctggatgggatctgtattagacttgagtgcaggtctctcagcactgacccaaggagttctgttatggtactgtacctgtccagtcactggttctctcctcatgtcctctcgccccatgaggttgtgttgtgtcttctaagcgtggtactagtgcttgccacctggtcaccagacctccaaatatggctgccaccaccaggacctttccagttactccttatatgtgtgttctatggaggggcagggaaaaggtggcacttgtgagtgtgtgtggattggcagggggtccattcactttgggttccatcttgctttaaatttcttcattttgattaagagacctctttttgatctgtattgggctaaccagagccaaatacttttgaagagtttcccagggactagtcatggtaatagcatataattgatctgaatgagatggagagaagaatgaaggggtggtggttctgggtttgatttgagttcacctgtgggcagtgggcagtgggcagtgtcttggtgaaagggaacggatactactttttgcctcaccgtaaagtactcactagtaaatatttccttctctctttactcccactttttacgtttgcaggtgccaaagtaatgtccacttttccctttcatgctgcatattaactggttaattatactgcagaaaccttttcacctccactagtctgatacagtacatctgtacttccatataccttgcactgattttgtctgagtgccctgggagaagtagaaaatgattgaaagtgacttccgtatctcagcccatgactcagcaaggcagaatggccacccctgccaaagtttgcttctcttttcaacagtgcctcaccctccctctaggattaaagtgcttctgcccttccacgaactcctcctccatttcctttttgggatttgtcaccatccttctattctctggtcttctatttttggtgttgttcaagtgaaggaagagatgttccctctaatttctctctagcccattataacctgctatcttggggcaacttttgatgtatgacatgtcacccttcccaacttggtctcctccaacatgctgtcttcatgtggagccctcaccacaatccctgactccggtcatttgtgcctttctcttgtcatctctgtacactacttatattcactgtgggttgggggagctaattttaagcatgttcagtggcagctcccctccagtttcagtgtcactgttaaaatttatcaaaaagcaacttcactaggggttttcttaagggataaaggccttttacagaagctaaacccttccccacatgtggtagaatgtgctcttctatatctactcctcaataaagcatgttctctgctcaa

SEQ ID NO: 77061 - DNA, 1746 bp, Artificial Sequence
  derived and/or modified sequence
atgccccgcaggaaaaggaacgcgggaagcagctccgacggcacggaggactctgattttagcaccgacctcgagcatacagacagcagcgaatcagacgggacaagcaggcggtccgcccgcgttactagatcctcggcgcgccttagtcagtccagtcaagattcaagtcctgtccggaacttacagtctttcggtacagaggagcccgcatactccacaagacgggtgactcggtcgcaacagcagcccacacccgttacgcctaagaagtaccctctgagacagaccagatcaagcggcagcgagacagagcaggttgtcgacttctctgatcgggaaacaaagaataccgcggatcatgacgaatcgccaccccgcactccaactggaaatgctccaagtagtgaatcagacattgacatcagttcacccaacgtttcccacgatgagagtatagcgaaggacatgagcctgaaggactctggctctgatctgtcgcatcgacccaagcgtcgcagattccatgagtcatacaactttaacatgaagtgccccacacctggttgcaattccctggggcatctgactgggaaacatgaacggcacttctctattagcggctgtcccctttaccacaacctctctgcggacgagtgcaaggctcctacagaacgccagctcaggtataaagaaaaggtcgccgaactgcggaaaaagagaaatagcggtctctcgaaagagcagaaggagaaatatatggaacacaggcagacatatggaaacactagagagcccttgctggagaatttaacctctgaatacgatttggatctcttccggcgggctcaggcacgggcctctgaggatttggaaaagctcagattgcagggacagatcaccgaaggctcaaacatgattaaaacaattgcgtttggtcggtatgagcttgacacttggtaccacagtccttatcccgaggagtacgctagactcggacggttatacatgtgcgagttttgtcttaagtacatgaagtcgcagacaatcttgaggaggcacatggccaaatgtgtgtggaagcatccacctggggatgaaatctaccgaaagggaagtattagcgtgttcgaggtggatggaaagaagaataaaatttattgccagaatttgtgccttctcgcaaaactgtttctggatcataaaaccttatattacgatgtggagcctttcttgttttacgtcatgaccgaggctgacaatactgggtgtcatctgatcggctacttctcaaaagaaaaaaatagcttcttaaattataatgtctcatgcatactgaccatgccccagtacatgcgccaggggtatggcaaaatgctgattgatttcagctatctgctatcaaaagtagaggaaaaggtgggttcccctgagaggccactgagcgacctgggtctgataagctacagatcctattggaaggaggtgttactgaggtacctccacaactttcagggcaaagagattagtatcaaagaaatctctcaggaaaccgcggtgaacccagtggacatcgtctctactctgcaagcactgcaaatgctgaagtattggaaagggaaacacctggtgctcaagcgacaagacttaattgatgaatggatcgcaaaagaggcgaagcgttccaatagtaataaaactatggatccttcttgccttaagtggaccccccccaaagggacttag

SEQ ID NO: 77062 - DNA, 1278 bp, Artificial Sequence
  derived and/or modified sequence
atgtccctcaaagactccggcagcgacctgagccatcgcccaaaacgtagacgctttcacgaatcctataacttcaacatgaaatgcccaaccccaggctgtaattccctcggtcacctcactggcaaacatgaacgccacttcagcataagtggatgccctctgtatcacaacctctcagcggatgagtgcaaagccccgaccgagcggcagcttaggtacaaggagaaggttgctgagctccggaagaagcgcaattcaggcttgtccaaagagcagaaagaaaagtatatggaacacagacagacatacggcaatacaagggagcccctgctagaaaacctcactagcgaatacgacttagatttgtttagaagggctcaggctcgtgccagtgaagacctggagaaattgcgactgcaaggacagataaccgaaggcagtaatatgatcaaaacgatagcctttggccgctacgagctcgatacgtggtaccattcaccctatcctgaggagtatgcaaggctaggaaggctttatatgtgcgaattttgtctcaaatacatgaagtctcaaacgatcttaagaaggcacatggcgaaatgcgtttggaagcacccccccggcgatgagatctataggaagggttcgatcagtgtgttcgaggtggacggaaagaagaacaagatctattgccaaaacttgtgcttgctggcgaaactcttcctggatcacaagaccctttattacgatgtggagccattcctcttctacgtcatgaccgaggcggacaataccggttgccatctgatcggctatttttctaaggagaaaaattcgttcctaaattacaacgtgtcgtgcatcctcaccatgccgcaatatatgagacaggggtatggaaaaatgctgatcgattttagttacctgctgtcgaaggtcgaggagaaggtgggctctccagaacgtcctctctccgacctgggccttatctcctacagatcctattggaaagaggtccttctgcgatacttgcataacttccaggggaaggaaataagcattaaagagatctctcaagaaaccgcggtgaaccccgttgacatagtgagtacactgcaggctctccagatgttgaaatattggaaaggaaaacatttggtcctgaaacggcaagatctgattgatgagtggattgcaaaagaggcaaaacgatctaacagcaataagactatggacccctcctgtcttaagtggacgccacccaaagggacttag

SEQ ID NO: 77063 - DNA, 1746 bp, Artificial Sequence
  derived and/or modified sequence
atgcccaggaggaagagaaatgccggcagcagcagtgatggaacagaggacagcgacttcagcacagacctggagcacacagacagcagcgagagtgatggcaccagcagaagaagtgcccgggtgaccaggagcagcgcccggctgagccagagcagccaggacagcagccctgtgaggaacctgcagagctttggaacagaggagcccgcctacagcaccaggagagtgaccaggagccagcagcagcccacccctgtgacccccaagaagtaccccctgcggcagaccaggagcagcggcagcgagacagagcaggtggtggacttcagtgaccgggagaccaagaacacagctgaccatgatgagagcccccccaggacccccactggaaatgcccccagcagcgagagtgacatcgacatcagcagccccaacgtgtcccatgatgagagcatcgccaaggacatgagcctgaaggacagcggcagtgacctgagccaccggcccaagagaagacgcttccacgagagctacaacttcaacatgaagtgccccaccccaggctgcaacagcctgggccacctgaccgggaagcatgagcggcacttcagcatcagcggctgccccctgtaccacaacctgtctgcagatgagtgcaaggcccccacagagcggcagctgcgctacaaggagaaggtggccgagctgaggaagaagagaaattctggcctgagcaaggagcagaaggagaagtacatggagcaccggcagacctacggcaacacccgggagcccctgctggagaacctgaccagtgaatatgacctggacctcttcagaagagcccaggcccgggccagcgaggacctggagaagctgcggctgcagggccagatcacagagggcagcaacatgatcaagaccatcgccttcggccgctatgagctggacacctggtaccacagcccctacccagaggagtatgcccggctgggccgcctgtacatgtgtgagttctgcctgaagtacatgaagagccagaccatcctgcggcggcacatggccaagtgtgtgtggaagcaccccccaggagatgagatctacaggaagggcagcatctctgtgtttgaggtggatggcaagaagaacaagatctactgccagaacctgtgcctgctggccaagctgttcctggaccacaagaccctgtactatgatgtggagcccttcctgttctacgtgatgacagaagctgacaacacaggctgccacctgattggctacttcagcaaggagaagaacagcttcctgaactacaacgtgtcctgcatcctgaccatgccccagtacatgaggcagggctacggcaagatgctgattgacttctcctacctgctgagcaaggtggaggagaaggtgggcagccctgagcggcccctgagtgacctgggcctcatctcctaccgcagctactggaaggaggtgctgctgcgctacctgcacaacttccagggcaaggagatcagcatcaaggagatcagccaggagacagctgtgaaccctgtggacatcgtgtccaccctgcaggccctgcagatgctgaagtactggaagggcaagcacctggtgctgaagaggcaggacctgattgatgagtggatcgccaaggaggccaagaggagcaacagcaacaagaccatggaccccagctgcctgaagtggaccccacccaagggcacctag

SEQ ID NO: 77064 - DNA, 1278 bp, Artificial Sequence
  derived and/or modified sequence
atgagcctgaaggacagcggcagtgacctgagccaccggcccaagagaagacgcttccacgagagctacaacttcaacatgaagtgccccaccccaggctgcaacagcctgggccacctgaccgggaagcatgagcggcacttcagcatcagcggctgccccctgtaccacaacctgtctgcagatgagtgcaaggcccccacagagcggcagctgcgctacaaggagaaggtggccgagctgaggaagaagagaaattctggcctgagcaaggagcagaaggagaagtacatggagcaccggcagacctacggcaacacccgggagcccctgctggagaacctgaccagtgaatatgacctggacctcttcagaagagcccaggcccgggccagcgaggacctggagaagctgcggctgcagggccagatcacagagggcagcaacatgatcaagaccatcgccttcggccgctatgagctggacacctggtaccacagcccctacccagaggagtatgcccggctgggccgcctgtacatgtgtgagttctgcctgaagtacatgaagagccagaccatcctgcggcggcacatggccaagtgtgtgtggaagcaccccccaggagatgagatctacaggaagggcagcatctctgtgtttgaggtggatggcaagaagaacaagatctactgccagaacctgtgcctgctggccaagctgttcctggaccacaagaccctgtactatgatgtggagcccttcctgttctacgtgatgacagaagctgacaacacaggctgccacctgattggctacttcagcaaggagaagaacagcttcctgaactacaacgtgtcctgcatcctgaccatgccccagtacatgaggcagggctacggcaagatgctgattgacttctcctacctgctgagcaaggtggaggagaaggtgggcagccctgagcggcccctgagtgacctgggcctcatctcctaccgcagctactggaaggaggtgctgctgcgctacctgcacaacttccagggcaaggagatcagcatcaaggagatcagccaggagacagctgtgaaccctgtggacatcgtgtccaccctgcaggccctgcagatgctgaagtactggaagggcaagcacctggtgctgaagaggcaggacctgattgatgagtggatcgccaaggaggccaagaggagcaacagcaacaagaccatggaccccagctgcctgaagtggaccccacccaagggcacctag

SEQ ID NO: 77065 - DNA, 1746 bp, Artificial Sequence
  derived and/or modified sequence
atgccccggcggaagcggaacgccggcagcagcagcgacggcaccgaagatagcgattttagcaccgatttggagcatacagatagcagtgaaagcgatgggacatccaggcggtcggccagagtgacgcgcagctctgcccgcctctcccagtctagtcaagatagcagtcccgtgcgcaacctgcaaagtttcggcaccgaggaacctgcgtattccacaagacgagtgaccaggtcacagcagcagccgaccccagtcaccccgaagaagtatcctctgcgccaaacccgttctagtggatccgagactgagcaagtcgttgatttctccgaccgcgaaacaaaaaatacagcagaccacgacgagtcacccccccgcactcctaccggaaatgctccctcatcagagtccgacatagacattagtagtccaaacgtatcccacgatgagagtatcgcaaaagacatgtctcttaaagattcagggtctgacctttcgcaccggcctaagcgcaggcgctttcacgagagttataatttcaatatgaagtgccctactcctggatgtaactccttggggcatcttacaggtaaacatgagcgccatttctccatttccggctgccccctttatcataacctgtccgcagacgaatgtaaagcaccaactgaacgtcagcttcgctacaaggagaaagtcgctgaactcaggaagaaaagaaacagcgggctatctaaggaacagaaggagaagtacatggaacatagacagacatatgggaataccagagagcccctgctagaaaatctgaccagcgagtatgacttagatctgttccgtcgagcccaagctagggcctccgaggacctcgagaaattgagactgcagggacaaataactgaaggtagcaatatgatcaagacgatcgcatttggaaggtacgagctggatacttggtaccattcaccttaccccgaagaatatgcccggctaggtaggctttacatgtgcgaattttgtctgaagtacatgaagagtcagactatactgcggcgacacatggcaaagtgcgtatggaagcacccccctggtgacgaaatctaccggaaaggatcaatctccgttttcgaggtggacggaaagaagaacaaaatttactgccagaacctctgtctgctggcgaaattattcctcgatcataagactttatactacgacgttgaaccgttcctattttacgttatgactgaggccgacaataccggctgccacttaatcggttattttagcaaagagaagaattcttttctgaactataacgtgtcctgcatcctcacaatgcctcagtacatgaggcaaggctacggcaagatgttaatagacttttcatacctcttatcaaaggtggaggagaaggtggggagtccagagagacctctctccgacctgggactcatcagctaccgctcttactggaaggaggtgctgctgaggtacctccacaactttcaggggaaggaaatctcgataaaggagatctctcaggagacagctgtgaacccagtggacatcgtgtcaacactccaagctcttcaaatgctcaagtattggaagggaaaacatctggtgctgaagcgccaagacctcatcgacgaatggatagctaaggaggccaagagaagcaatagtaataagactatggatcccagctgcctgaaatggactcccccgaaaggtacttag

SEQ ID NO: 77066 - DNA, 1278 bp, Artificial Sequence
  derived and/or modified sequence
atgagcctgaaggacagcggcagcgacctgagccaccggcccaagcgcagaaggtttcacgaaagctacaatttcaatatgaaatgtcctaccccaggatgtaattcactggggcatctgacggggaaacacgagaggcacttctcgatcagcggctgccccctgtaccataatctgtcagccgatgagtgtaaggctcccactgaacgccaactgagatacaaggaaaaggtcgcggaactgaggaagaagaggaatagcggcctgtccaaggagcaaaaagagaagtatatggagcaccggcagacctatggcaacaccagagagcctctgctggagaatttaacatccgagtacgacctagacctgttcagaagagcacaggctcgggccagtgaggacttagagaaactcaggcttcagggacagatcaccgaagggtctaacatgatcaagaccattgcattcggacgttatgagttggacacttggtaccacagtccttaccccgaggagtacgcgcgtcttggcaggctctacatgtgtgagttttgcttaaagtatatgaagtctcagaccatcctgcgccggcacatggctaagtgcgtgtggaaacaccctccaggggacgaaatctatcgtaagggatcaattagtgtgttcgaagtggacggaaagaaaaacaaaatttattgccagaatctgtgtctgctggccaaactttttttggaccacaaaacgctgtactacgacgttgagccctttctgttttatgtgatgacagaagcagataataccggctgccatctgatcggatatttttcaaaggagaagaatagtttcctgaattataacgtgtcttgcattctgaccatgccccaatatatgcggcagggctatggcaagatgcttatagatttttcctatctcctgagcaaagttgaagagaaagtaggatcccctgagagaccactgtccgacctgggactcatttcgtatcgatcgtactggaaagaggtgctgttaaggtacctgcacaatttccagggcaaggagatctcaattaaggaaatctcacaggaaactgcagtaaatccagtggacatcgtctctacccttcaggccctgcagatgcttaaatattggaagggaaaacatctggtcctcaagcgacaagacctgatcgacgagtggattgccaaggaggctaagcgcagcaattccaacaagaccatggaccccagctgcctaaaatggactccccccaaagggacatag

SEQ ID NO: 77067 - DNA, 1746 bp, Artificial Sequence
  derived and/or modified sequence
atgcctcgtagaaaacgcaacgctggcagctcatctgacgggactgaggacagtgatttttcgactgaccttgagcatactgatagcagtgagtccgatgggacttcacgcaggagcgctcgggtgactaggagctccgccaggctctcccaatcgagtcaggacagcagtccagtcagaaaccttcagtcctttggcacagaagaaccagcctactcaacgaggagggtcactcggtcccaacagcaaccgactccagtcacccctaaaaaataccccctcagacaaactagaagctcaggttcggaaactgagcaggtggtagatttctctgacagggaaacgaagaataccgccgaccacgacgagtcaccgcctagaacacccactggcaacgcaccttcttccgagagcgacattgatatatcctcccccaacgtgtcacacgatgaaagcatagctaaggatatgtccctgaaggatagtggaagtgacctgagccataggcctaagaggcggaggttccacgagagctacaattttaatatgaagtgccctacaccgggatgtaattccctagggcacctcacagggaagcacgagagacacttctcaattagcggttgccccttgtaccacaacttaagtgcagacgaatgcaaggccccaacggaacggcagctcagatataaagagaaggtcgccgagcttcgtaagaagagaaacagtggcctgtcaaaagagcagaaggaaaagtacatggagcatcgacaaacgtatggcaataccagagaacccctgctagagaatctaaccagtgagtatgacctggatctgtttcgcagggctcaggccagagcaagtgaagatctcgagaaacttaggttacaaggccagatcacagagggcagcaacatgattaaaaccatcgccttcgggaggtacgagttagatacctggtatcactcaccctaccctgaagagtatgccaggttaggaaggctgtacatgtgtgagttttgtctgaagtatatgaaatcccagactatcctgcgacgtcacatggcgaagtgtgtgtggaagcatccgcctggggacgagatttaccgcaagggtagcataagtgtcttcgaggtggatggaaaaaaaaacaaaatttattgtcaaaacctgtgtttgctcgctaaactctttctggatcataaaaccctatactatgacgtggaaccattccttttctacgtgatgaccgaagctgataataccggatgccacctgataggctatttctctaaggagaaaaactcctttctaaattacaatgtctcatgtattttgaccatgccacagtacatgcgacagggatatggtaaaatgctcattgattttagctacctgctgagtaaagtcgaggagaaagtcggctctcctgaaaggcctctgtctgatcttggcttaatttcatataggagctactggaaagaggtcctgttaagatacctgcataactttcaggggaaggagatttccataaaagagattagtcaggagaccgctgttaacccagtggatatagtgtccaccctgcaggccttgcagatgctgaagtactggaaaggcaaacatctggtgctgaaacggcaggatcttatcgacgaatggatcgctaaggaagctaaacgtagcaacagcaacaaaaccatggatcctagctgtctgaagtggactcctcccaagggaacttag

SEQ ID NO: 77068 - DNA, 1278 bp, Artificial Sequence
  derived and/or modified sequence
atgtccctgaaagactccggatccgatctctcccaccgtcctaagagacgtcgatttcacgaatcgtacaattttaacatgaagtgccccacccctgggtgcaattcactgggacatttaaccggaaagcatgagaggcacttcagtatatccggctgccctctgtaccacaatttgagtgctgatgagtgtaaggcccctactgagcgtcaactgcgctataaggagaaggtggcagagctgagaaagaaaagaaattccggcctctcaaaggaacaaaaagagaagtatatggaacaccgccagacctatggaaatacacgcgaacctctgctggagaacctcacaagtgaatatgacctggatctcttcagacgcgctcaggcaagggccagcgaagacttagaaaagctgagactccaaggccagatcactgaggggtcaaacatgattaaaacaatcgcattcggcaggtacgagctagacacctggtaccactcaccttacccggaagaatacgccagactcgggagactctatatgtgcgaattttgtctgaagtacatgaaaagccaaactatactgcgacggcatatggcgaaatgtgtatggaaacatcccccaggggatgagatttatcggaagggctctatctccgttttcgaggttgatgggaaaaagaacaaaatatattgtcagaacttgtgtctgctcgcaaaattatttctggaccacaaaaccctgtattatgacgtggaaccttttctattctatgtgatgactgaggccgacaacacaggctgccacttaattggctacttcagcaaggaaaagaactcgttcttaaattataatgtgtcatgtattttgaccatgcctcagtatatgagacaggggtacgggaagatgctcattgatttttcctacctgctctccaaagtggaagagaaggtgggctcaccggaacgtcctttaagtgacctgggcttgattagctacagaagctattggaaggaagtgctgctacgctacctgcacaactttcagggtaaggaaatctccattaaagagatctcccaagagacagccgtaaatccagtcgacattgtctcaaccctccaggccctgcaaatgttgaaatattggaaggggaagcacctggtactgaaacgccaggatctcattgatgaatggatcgccaaggaggccaagaggtcgaactcaaataaaactatggaccccagttgtctgaagtggaccccacctaagggcacctag

SEQ ID NO: 77069 - DNA, 1746 bp, Artificial Sequence
  derived and/or modified sequence
atgcccagaagaaagagaaacgccggcagcagcagcgacggcaccgaggacagcgacttcagcaccgacctggagcacaccgacagcagcgagagcgacggcaccagcagaagaagcgccagagtgaccagaagcagcgccagactgagccagagcagccaggacagcagccccgtgagaaacctgcagagcttcggcaccgaggagcccgcctacagcaccagaagagtgaccagaagccagcagcagcccacccccgtgacccccaagaagtaccccctgagacagaccagaagcagcggcagcgagaccgagcaggtggtggacttcagcgacagagagaccaagaacaccgccgaccacgacgagagcccccccagaacccccaccggcaacgcccccagcagcgagagcgacatcgacatcagcagccccaacgtgagccacgacgagagcatcgccaaggacatgagcctgaaggacagcggcagcgacctgagccacagacccaagagaagaagattccacgagagctacaacttcaacatgaagtgccccacccccggctgcaacagcctgggccacctgaccggcaagcacgagagacacttcagcatcagcggctgccccctgtaccacaacctgagcgccgacgagtgcaaggcccccaccgagagacagctgagatacaaggagaaggtggccgagctgagaaagaagagaaacagcggcctgagcaaggagcagaaggagaagtacatggagcacagacagacctacggcaacaccagagagcccctgctggagaacctgaccagcgagtacgacctggacctgttcagaagagcccaggccagagccagcgaggacctggagaagctgagactgcagggccagatcaccgagggcagcaacatgatcaagaccatcgccttcggcagatacgagctggacacctggtaccacagcccctaccccgaggagtacgccagactgggcagactgtacatgtgcgagttctgcctgaagtacatgaagagccagaccatcctgagaagacacatggccaagtgcgtgtggaagcacccccccggcgacgagatctacagaaagggcagcatcagcgtgttcgaggtggacggcaagaagaacaagatctactgccagaacctgtgcctgctggccaagctgttcctggaccacaagaccctgtactacgacgtggagcccttcctgttctacgtgatgaccgaggccgacaacaccggctgccacctgatcggctacttcagcaaggagaagaacagcttcctgaactacaacgtgagctgcatcctgaccatgccccagtacatgagacagggctacggcaagatgctgatcgacttcagctacctgctgagcaaggtggaggagaaggtgggcagccccgagagacccctgagcgacctgggcctgatcagctacagaagctactggaaggaggtgctgctgagatacctgcacaacttccagggcaaggagatcagcatcaaggagatcagccaggagaccgccgtgaaccccgtggacatcgtgagcaccctgcaggccctgcagatgctgaagtactggaagggcaagcacctggtgctgaagagacaggacctgatcgacgagtggatcgccaaggaggccaagagaagcaacagcaacaagaccatggaccccagctgcctgaagtggaccccccccaagggcacctag

SEQ ID NO: 77070 - DNA, 1278 bp, Artificial Sequence
  derived and/or modified sequence
atgagcctgaaggacagcggcagcgacctgagccacagacccaagagaagaagattccacgagagctacaacttcaacatgaagtgccccacccccggctgcaacagcctgggccacctgaccggcaagcacgagagacacttcagcatcagcggctgccccctgtaccacaacctgagcgccgacgagtgcaaggcccccaccgagagacagctgagatacaaggagaaggtggccgagctgagaaagaagagaaacagcggcctgagcaaggagcagaaggagaagtacatggagcacagacagacctacggcaacaccagagagcccctgctggagaacctgaccagcgagtacgacctggacctgttcagaagagcccaggccagagccagcgaggacctggagaagctgagactgcagggccagatcaccgagggcagcaacatgatcaagaccatcgccttcggcagatacgagctggacacctggtaccacagcccctaccccgaggagtacgccagactgggcagactgtacatgtgcgagttctgcctgaagtacatgaagagccagaccatcctgagaagacacatggccaagtgcgtgtggaagcacccccccggcgacgagatctacagaaagggcagcatcagcgtgttcgaggtggacggcaagaagaacaagatctactgccagaacctgtgcctgctggccaagctgttcctggaccacaagaccctgtactacgacgtggagcccttcctgttctacgtgatgaccgaggccgacaacaccggctgccacctgatcggctacttcagcaaggagaagaacagcttcctgaactacaacgtgagctgcatcctgaccatgccccagtacatgagacagggctacggcaagatgctgatcgacttcagctacctgctgagcaaggtggaggagaaggtgggcagccccgagagacccctgagcgacctgggcctgatcagctacagaagctactggaaggaggtgctgctgagatacctgcacaacttccagggcaaggagatcagcatcaaggagatcagccaggagaccgccgtgaaccccgtggacatcgtgagcaccctgcaggccctgcagatgctgaagtactggaagggcaagcacctggtgctgaagagacaggacctgatcgacgagtggatcgccaaggaggccaagagaagcaacagcaacaagaccatggaccccagctgcctgaagtggaccccccccaagggcacctag

SEQ ID NO: 77071 - protein, 472 aa, Artificial Sequence
  derived and/or modified sequence
MPRRKRNAGSSSDGTEDSDFSTDLEHTDSSESDGTSRRSARVTRSSARLSQSSQGHLTGKHERHFSISGCPLYHNLSADECKVRAQSRDKQIEERMLSHRQDDNNRHATRHQAPTERQLRYKEKVAELRKKRNSGLSKEQKEKYMEHRQTYGNTREPLLENLTSEYDLDLFRRAQARASEDLEKLRLQGQITEGSNMIKTIAFGRYELDTWYHSPYPEEYARLGRLYMCEFCLKYMKSQTILRRHMAKCVWKHPPGDEIYRKGSISVFEVDGKKNKIYCQNLCLLAKLFLDHKTLYYDVEPFLFYVMTEADNTGCHLIGYFSKEKNSFLNYNVSCILTMPQYMRQGYGKMLIDFSYLLSKVEEKVGSPERPLSDLGLISYRSYWKEVLLRYLHNFQGKEISIKEISQETAVNPVDIVSTLQALQMLKYWKGKHLVLKRQDLIDEWIAKEAKRSNSNKTMDPSCLKWTPPKGT

SEQ ID NO: 77072 - DNA, 1774 bp, Artificial Sequence
  derived and/or modified sequence
gcagaacgctccagacgctgagaggcaggaggcactagggatcgtccgcaggattgggactgatacagaggccgccacggagcccgccggagccaccgttcctgctgctgccgccgctgcccgaatcggaaccgtcgggccgcagccgccggcaatgccgcgaaggaagaggaatgcaggcagtagttcagatggaaccgaagattccgatttttctacagatctcgagcacacagacagttcagaaagtgatggcacatcccgacgatctgctcgagtcacccgctcctcagccaggctaagccagagttctcaaggacaccttacaggaaaacatgagagacatttctccatctcaggatgcccactgtatcataacctctcagctgacgaatgcaaggtgagagcacagagccgggataagcagatagaagaaaggatgctgtctcacaggcaagatgacaacaacaggcatgcaaccaggcaccaggcaccaacggagagacagcttcgatataaggaaaaagtggctgaactcaggaagaaaagaaattctggactgagcaaagaacagaaagagaaatatatggaacacagacagacctatgggaacacacgggaacctcttttagaaaacctgacaagcgagtatgacttggatcttttccgaagagcacaagcccgggcttcagaggatttggagaagttaaggctgcaaggccaaatcacagagggaagcaacatgattaaaacaattgcttttggccgctatgagcttgatacctggtatcattctccatatcctgaagaatatgcacggctgggacgtctctatatgtgtgaattctgtttaaaatatatgaagagccaaacgatactccgccggcacatggccaaatgtgtgtggaaacacccacctggtgatgagatatatcgcaaaggttcaatctctgtgtttgaagtggatggcaagaaaaacaagatctactgccaaaacctgtgcctgttggccaaactttttctggaccacaagacattatattatgatgtggagcccttcctgttctatgttatgacagaggcggacaacactggctgtcacctgattggatatttttctaaggaaaagaattcattcctcaactacaacgtctcctgtatccttactatgcctcagtacatgagacagggctatggcaagatgcttattgatttcagttatttgctttccaaagtcgaagaaaaagttggctccccagaacgtccactctcagatctggggcttataagctatcgcagttactggaaagaagtacttctccgctacctgcataattttcaaggcaaagagatttctatcaaagaaatcagtcaggagacggctgtgaatcctgtggacattgtcagcactctgcaagcccttcagatgctcaaatactggaagggaaaacacctagttttaaagagacaggacctgattgatgagtggatagccaaagaggccaaaaggtccaactccaataaaaccatggatcccagctgcttaaaatggacccctcccaagggcacttaaagtgacctgtcattccgagccagcgaaccccagcagtaggaatccgtaccctagggatctgtctgtcatttctctgttgctcttgtgattggcaagtacagtatcctttgggaaggccatccccctcaggactgtcctggctccgacctttgtgtacactgcagacgctggttctgaggaactgttgtttcggcctcagtg

SEQ ID NO: 77073 - DNA, 1419 bp, Artificial Sequence
  derived and/or modified sequence
atgccccgcagaaagcgtaacgcggggagctcctcagatggaacagaggattccgatttcagtaccgatctggagcacactgacagctctgagagcgacgggacttcacggcgatccgctcgcgtcacacgaagcagcgccaggctgagccagtcttcccaggggcacctgacaggcaagcatgagcgccatttttcaattagcggttgcccgctgtaccataacctgtctgccgacgaatgtaaggttcgggcccagtcccgggacaagcagattgaggagagaatgctctctcacaggcaagatgataacaatagacacgctaccagacaccaggcccccacagaaaggcagctgaggtataaagaaaaagtggccgaattgagaaagaagaggaacagtggcctctcaaaagagcagaaggaaaagtatatggaacaccggcagacatatgggaacacaagagaacctctacttgagaacctgaccagcgaatacgacctggatctgttcaggcgtgcccaggcccgcgctagcgaggacctcgagaagttaagactccagggccaaatcactgagggctccaatatgataaagaccatcgcattcgggcgctacgaactggatacgtggtaccactccccatacccagaagaatatgcccgacttggtagactctacatgtgtgaattctgcctcaagtacatgaagtctcaaaccatactcagacgtcatatggccaaatgcgtctggaagcatccccccggagatgaaatctatcgcaagggctccatctctgtttttgaggtcgacgggaaaaagaataagatctattgtcagaacctctgcctattagccaaactttttcttgatcacaagacgctctactatgacgtagaaccctttctcttctatgtgatgaccgaggcggacaacactggctgccatctcatcggatatttcagtaaagaaaagaattcctttttgaactacaacgtgagttgcatcctcacaatgccgcagtacatgcgccagggatacggaaagatgctgattgatttctcatatctgctgtctaaggttgaagagaaagtcgggtcaccagaacggcctttatcagacctagggctgatcagttataggtcctattggaaggaggtattgcttcggtatctccacaactttcagggaaaagaaattagtattaaagaaatctcccaggaaactgctgttaatccagtggacatagtatctaccctgcaggcacttcagatgctgaagtactggaagggaaagcacctggttctaaagagacaggatctgatagatgagtggatcgccaaagaagcgaaaaggtccaactccaataagacaatggatccctcctgtctgaagtggacgccacccaaggggacctag

SEQ ID NO: 77074 - DNA, 1419 bp, Artificial Sequence
  derived and/or modified sequence
atgcccaggaggaagagaaatgccggcagcagcagtgatggaacagaggacagcgacttcagcacagacctggagcacacagacagcagcgagagtgatggcaccagcagaagaagtgcccgggtgaccaggagcagcgcccggctgagccagagcagccagggccacctgaccgggaagcatgagcggcacttcagcatcagcggctgccccctgtaccacaacctgtctgcagatgagtgcaaggtgcgggcccagagccgggacaagcagatcgaggagaggatgctgagccaccggcaggatgacaacaacagacatgccaccaggcaccaggcccccacagagcggcagctgcgctacaaggagaaggtggccgagctgaggaagaagaggaacagcggcctgagcaaggagcagaaggagaagtacatggagcaccggcagacctacggcaacacccgggagcccctgctggagaacctgaccagtgaatatgacctggacctcttccggcgggcccaggcccgggccagcgaggacctggagaagctgcggctgcagggccagatcacagagggcagcaacatgatcaagaccatcgccttcggccgctatgagctggacacctggtaccacagcccctacccagaggagtatgcccggctgggccgcctgtacatgtgtgagttctgcctgaagtacatgaagagccagaccatcctgcggcggcacatggccaagtgtgtgtggaagcaccccccaggagatgagatctacaggaagggcagcatctctgtgtttgaggtggatggcaagaagaacaagatctactgccagaacctgtgcctgctggccaagctgttcctggaccacaagaccctgtactatgatgtggagcccttcctgttctacgtgatgacagaggccgacaacacaggctgccacctgattggctacttcagcaaggagaagaacagcttcctgaactacaacgtgtcctgcatcctgaccatgccccagtacatgaggcagggctacggcaagatgctgattgacttctcctacctgctgagcaaggtggaggagaaggtgggcagccctgagcggcccctgagtgacctgggcctcatctcctaccgcagctactggaaggaggtgctgctgcgctacctgcacaacttccagggcaaggagatcagcatcaaggagatcagccaggagacagctgtgaaccctgtggacatcgtgtccaccctgcaggccctgcagatgctgaagtactggaagggcaagcacctggtgctgaagaggcaggacctgattgatgagtggatcgccaaggaggccaagaggagcaacagcaacaagaccatggaccccagctgcctgaagtggaccccacccaagggcacctag

SEQ ID NO: 77075 - DNA, 1419 bp, Artificial Sequence
  derived and/or modified sequence
atgccccggcggaagcggaacgccggcagcagcagcgacggcaccgaggacagtgacttcagcacagatctggagcataccgatagctccgagagcgacggaacttcaaggaggagcgcaagagtcacacggagtagtgcccgtctgtcacaaagctcccaagggcatctgactggaaagcacgagaggcactttagtatttcaggctgtccattgtaccacaatctcagcgcagatgagtgcaaggttcgggcccagagtcgtgataagcaaatcgaagaacggatgctgagtcaccgacaggacgataacaatcgtcatgccacaagacaccaggcccctaccgagaggcaacttcgctacaaggagaaggtggccgaacttcggaaaaaaaggaattctggcctgtcgaaggagcagaaagagaagtacatggaacacagacagacttacggtaatacccgggagccactcctcgagaatctgacctctgagtatgatcttgatctgtttaggcgggctcaggcacgcgcgagcgaggatctcgaaaagttacgcctgcaggggcagatcaccgagggttcaaatatgattaagaccattgccttcggacgatatgaactggacacgtggtaccactctccataccccgaagaatatgcacggttgggacggttgtacatgtgtgaattctgccttaaatatatgaaatctcagactatcttgcgccgccacatggcgaaatgtgtctggaagcaccctcccggggacgagatttaccggaaaggcagtatctctgttttcgaagtcgacgggaagaagaataagatctattgccaaaatctgtgtctccttgctaagctgtttctggatcataaaaccctatactacgacgtggaaccgttcttgttctacgtgatgacagaggctgacaacactggttgccatcttattggatattttagcaaagagaagaattcctttcttaattataatgtgagctgtatcctgactatgccacagtacatgaggcagggttacggcaagatgcttatagactttagctatctgctctctaaagtcgaggaaaaggtgggcagtcctgaacgacctctctccgacctaggattgatttcctaccgaagctattggaaggaggttctactccgctatctgcataactttcagggtaaagagatcagtattaaagagatctctcaggaaacagcggttaaccccgtcgacatcgtttctacgctccaggcccttcagatgctaaagtactggaaaggaaagcacctggtcctgaaacgtcaggacctcattgatgagtggattgccaaggaggctaaacgaagtaattcaaacaagaccatggatccaagctgtctgaagtggaccccaccaaagggcacctag

SEQ ID NO: 77076 - DNA, 1419 bp, Artificial Sequence
  derived and/or modified sequence
atgccgcgacgcaaacgaaacgcagggagttcttcagatggaaccgaagactccgactttagtacagatctggagcacaccgatagctccgaatccgacggaaccagtcgcagatcagccagagtcacgcgctctagcgcaagactgtcccagagctctcagggtcatttaactgggaaacacgaacggcatttctccatttcagggtgtccactctaccataacctgagcgccgatgagtgcaaggttagagcccagtcccgggacaaacagatcgaggagcgcatgctgtctcatcggcaggatgacaataaccgccacgcaaccagacaccaggcgcctaccgagagacagcttcgctataaggaaaaggtggctgagctgaggaaaaagagaaactctggtcttagtaaagagcagaaggagaaatacatggagcataggcagacttatggaaatacccgcgaacctctgttagaaaacctgacgagtgagtatgatcttgacctttttaggagggcacaagcccgagcgagcgaggatctggaaaagcttcgtttgcaagggcaaataaccgaaggctcaaatatgattaagaccatcgcattcggcaggtatgagctggatacatggtaccactccccttacccagaggagtacgcacgcctggggcgactgtacatgtgcgaattctgtttgaagtacatgaagtctcaaacaatactgcgcaggcatatggctaagtgtgtctggaagcacccccctggcgacgaaatctaccgtaagggatctatcagcgtgttcgaggtggacggtaagaagaataaaatatattgtcaaaacctttgcctgctggctaaactgtttctcgatcataaaaccctgtattatgatgtggagccgtttctgttctatgtgatgaccgaggcggataatacagggtgccacctgatcggctatttttcaaaagagaagaacagcttccttaactacaacgtgagctgcattctgacaatgcctcaatatatgcggcaggggtatggtaaaatgctcattgactttagttacctgcttagcaaggtagaagagaaagttggaagccccgaacgacccctgagtgacctaggtctcattagctacagaagctattggaaagaagttcttctgcgctacttacacaactttcagggtaaagaaattagcataaaggagatctctcaggagacagccgtcaatccagtcgacatcgttagcacattacaggccctacagatgctgaagtactggaaggggaaacatctggtgctcaagcgccaggacttgatagatgaatggatagctaaggaggccaaacgatccaactcaaataagaccatggatcctagctgtctgaaatggaccccaccaaaaggaacctag

SEQ ID NO: 77077 - DNA, 1419 bp, Artificial Sequence
  derived and/or modified sequence
atgcccagaagaaagagaaacgccggcagcagcagcgacggcaccgaggacagcgacttcagcaccgacctggagcacaccgacagcagcgagagcgacggcaccagcagaagaagcgccagagtgaccagaagcagcgccagactgagccagagcagccagggccacctgaccggcaagcacgagagacacttcagcatcagcggctgccccctgtaccacaacctgagcgccgacgagtgcaaggtgagagcccagagcagagacaagcagatcgaggagagaatgctgagccacagacaggacgacaacaacagacacgccaccagacaccaggcccccaccgagagacagctgagatacaaggagaaggtggccgagctgagaaagaagagaaacagcggcctgagcaaggagcagaaggagaagtacatggagcacagacagacctacggcaacaccagagagcccctgctggagaacctgaccagcgagtacgacctggacctgttcagaagagcccaggccagagccagcgaggacctggagaagctgagactgcagggccagatcaccgagggcagcaacatgatcaagaccatcgccttcggcagatacgagctggacacctggtaccacagcccctaccccgaggagtacgccagactgggcagactgtacatgtgcgagttctgcctgaagtacatgaagagccagaccatcctgagaagacacatggccaagtgcgtgtggaagcacccccccggcgacgagatctacagaaagggcagcatcagcgtgttcgaggtggacggcaagaagaacaagatctactgccagaacctgtgcctgctggccaagctgttcctggaccacaagaccctgtactacgacgtggagcccttcctgttctacgtgatgaccgaggccgacaacaccggctgccacctgatcggctacttcagcaaggagaagaacagcttcctgaactacaacgtgagctgcatcctgaccatgccccagtacatgagacagggctacggcaagatgctgatcgacttcagctacctgctgagcaaggtggaggagaaggtgggcagccccgagagacccctgagcgacctgggcctgatcagctacagaagctactggaaggaggtgctgctgagatacctgcacaacttccagggcaaggagatcagcatcaaggagatcagccaggagaccgccgtgaaccccgtggacatcgtgagcaccctgcaggccctgcagatgctgaagtactggaagggcaagcacctggtgctgaagagacaggacctgatcgacgagtggatcgccaaggaggccaagagaagcaacagcaacaagaccatggaccccagctgcctgaagtggaccccccccaagggcacctag

SEQ ID NO: 77078 - protein, 501 aa, Artificial Sequence
  derived and/or modified sequence
MPRRKRNAGSSSDGTEDSDFSTDLEHTDSSESDGTSRRSARVTRSSARLSQSSQDSSPVRNLQSFGTEEPAYSTRRVTRSQQQPTPVTPKKYPLRQTRSSGSETEQVVDFSDRGHLTGKHERHFSISGCPLYHNLSADECKAPTERQLRYKEKVAELRKKRNSGLSKEQKEKYMEHRQTYGNTREPLLENLTSEYDLDLFRRAQARASEDLEKLRLQGQITEGSNMIKTIAFGRYELDTWYHSPYPEEYARLGRLYMCEFCLKYMKSQTILRRHMAKCVWKHPPGDEIYRKGSISVFEVDGKKNKIYCQNLCLLAKLFLDHKTLYYDVEPFLFYVMTEADNTGCHLIGYFSKEKNSFLNYNVSCILTMPQYMRQGYGKMLIDFSYLLSKVEEKVGSPERPLSDLGLISYRSYWKEVLLRYLHNFQGKEISIKEISQETAVNPVDIVSTLQALQMLKYWKGKHLVLKRQDLIDEWIAKEAKRSNSNKTMDPSCLKWTPPKGT

SEQ ID NO: 77079 - DNA, 1774 bp, Artificial Sequence
  derived and/or modified sequence
cagaacgctccagacgctgagaggcaggaggcactagggatcgtccgcaggattgggactgatacagaggccgccacggagcccgccggagccaccgttcctgctgctgccgccgctgcccgaatcggaaccgtcgggccgcagccgccggcaatgccgcgaaggaagaggaatgcaggcagtagttcagatggaaccgaagattccgatttttctacagatctcgagcacacagacagttcagaaagtgatggcacatcccgacgatctgctcgagtcacccgctcctcagccaggctaagccagagttctcaagattccagtcctgttcgaaatctgcagtcttttggcactgaggagcctgcttactctaccagaagagtgacccgtagtcagcagcagcctaccccagtgacaccgaaaaaataccctcttcggcagactcgttcatctggttcagaaactgagcaagtggttgatttttcagatagaggacaccttacaggaaaacatgagagacatttctccatctcaggatgcccactgtatcataacctctcagctgacgaatgcaaggcaccaacggagagacagcttcgatataaggaaaaagtggctgaactcaggaagaaaagaaattctggactgagcaaagaacagaaagagaaatatatggaacacagacagacctatgggaacacacgggaacctcttttagaaaacctgacaagcgagtatgacttggatcttttccgaagagcacaagcccgggcttcagaggatttggagaagttaaggctgcaaggccaaatcacagagggaagcaacatgattaaaacaattgcttttggccgctatgagcttgatacctggtatcattctccatatcctgaagaatatgcacggctgggacgtctctatatgtgtgaattctgtttaaaatatatgaagagccaaacgatactccgccggcacatggccaaatgtgtgtggaaacacccacctggtgatgagatatatcgcaaaggttcaatctctgtgtttgaagtggatggcaagaaaaacaagatctactgccaaaacctgtgcctgttggccaaactttttctggaccacaagacattatattatgatgtggagcccttcctgttctatgttatgacagaggcggacaacactggctgtcacctgattggatatttttctaaggaaaagaattcattcctcaactacaacgtctcctgtatccttactatgcctcagtacatgagacagggctatggcaagatgcttattgatttcagttatttgctttccaaagtcgaagaaaaagttggctccccagaacgtccactctcagatctggggcttataagctatcgcagttactggaaagaagtacttctccgctacctgcataattttcaaggcaaagagatttctatcaaagaaatcagtcaggagacggctgtgaatcctgtggacattgtcagcactctgcaagcccttcagatgctcaaatactggaagggaaaacacctagttttaaagagacaggacctgattgatgagtggatagccaaagaggccaaaaggtccaactccaataaaaccatggatcccagctgcttaaaatggacccctcccaagggcacttaaagtgacctgtcattccgagccagcgaaccccagcagtaggaatccgtaccctagggatctgtctgtcatttctctgttgctcttgtgattggcaagtacagtatcctttgggaag

SEQ ID NO: 77080 - DNA, 1506 bp, Artificial Sequence
  derived and/or modified sequence
atgcctagacggaaaaggaatgccgggagctcctccgatggcactgaagattctgatttctcaacagatctcgaacacaccgattcttcagagtcggatggtacatctcggcgcagcgcacgcgtgacaagatcctctgctcgactttcacagagttctcaggactcttccccggtgaggaacctgcagtcttttgggacagaggagcctgcatacagcactcgccgtgtgactcggtcgcagcagcaaccgacgccagtgaccccgaagaaataccctttgcgacagaccaggtcatcaggttccgagacagagcaagtggtagacttcagcgatcgggggcacctgactggcaagcatgaaagacacttctccatctcagggtgcccgctttatcacaacctatctgctgacgaatgcaaggcaccaactgagaggcagctgcgctataaggaaaaagttgctgagctgaggaaaaaaagaaatagtggactatctaaggagcagaaggaaaaatacatggaacacaggcagacttatggaaacacgagagaacccctgcttgaaaatctgaccagtgagtatgacttagatctattccgtcgtgcccaggcccgagcatccgaggatttggagaagcttaggctccagggtcaaattactgaaggcagcaacatgatcaaaacaattgcctttggacggtatgaactggacacatggtatcacagcccttaccccgaagagtatgcccgactcggtaggctgtacatgtgtgaattctgcttgaagtatatgaagtcgcaaaccattctgagaagacacatggctaagtgcgtgtggaagcaccctccgggtgatgagatatatcggaagggctcaatttctgtattcgaagtggatggtaagaagaataagatatactgtcagaacttatgtctactggctaagctgttccttgaccataaaaccctgtactatgatgtggaacctttcctgttctatgtgatgaccgaggcagataatacagggtgccatttgattggttactttagtaaggaaaagaattccttccttaactacaacgtatcatgcattctgaccatgccccagtacatgcgacaggggtacggaaagatgctgatagacttctcatatttactttcaaaggtggaggagaaggtcggatcaccggagagacccttgagcgacttggggctgattagttaccggagttattggaaggaggtcctgctacgctacctccataacttccagggcaaggagatcagtatcaaggagatctcccaagaaacagcagtcaatccagtggacatagtgtctaccctccaggctcttcagatgctgaagtattggaaaggcaagcatctagtgttaaagagacaggatctgatcgacgaatggatcgcaaaggaggccaagaggagtaacagcaataagactatggatccttcttgccttaagtggaccccacctaagggaacctag

SEQ ID NO: 77081 - DNA, 1506 bp, Artificial Sequence
  derived and/or modified sequence
atgcccaggaggaagagaaatgccggcagcagcagtgatggaacagaggacagcgacttcagcacagacctggagcacacagacagcagcgagagtgatggcaccagcagaagaagtgcccgggtgaccaggagcagcgcccggctgagccagagcagccaggacagcagccctgtgaggaacctgcagagctttggaacagaggagcccgcctacagcaccaggagagtgaccaggagccagcagcagcccacccctgtgacccccaagaagtaccccctgcggcagaccaggagcagcggcagcgagacagagcaggtggtggacttcagtgaccggggccacctgaccgggaagcatgagcggcacttcagcatcagcggctgccccctgtaccacaacctgtctgcagatgagtgcaaggcccccacagagcggcagctgcgctacaaggagaaggtggccgagctgaggaagaagagaaattctggcctgagcaaggagcagaaggagaagtacatggagcaccggcagacctacggcaacacccgggagcccctgctggagaacctgaccagtgaatatgacctggacctcttcagaagagcccaggcccgggccagcgaggacctggagaagctgcggctgcagggccagatcacagagggcagcaacatgatcaagaccatcgccttcggccgctatgagctggacacctggtaccacagcccctacccagaggagtatgcccggctgggccgcctgtacatgtgtgagttctgcctgaagtacatgaagagccagaccatcctgcggcggcacatggccaagtgtgtgtggaagcaccccccaggagatgagatctacaggaagggcagcatctctgtgtttgaggtggatggcaagaagaacaagatctactgccagaacctgtgcctgctggccaagctgttcctggaccacaagaccctgtactatgatgtggagcccttcctgttctacgtgatgacagaagctgacaacacaggctgccacctgattggctacttcagcaaggagaagaacagcttcctgaactacaacgtgtcctgcatcctgaccatgccccagtacatgaggcagggctacggcaagatgctgattgacttctcctacctgctgagcaaggtggaggagaaggtgggcagccctgagcggcccctgagtgacctgggcctcatctcctaccgcagctactggaaggaggtgctgctgcgctacctgcacaacttccagggcaaggagatcagcatcaaggagatcagccaggagacagctgtgaaccctgtggacatcgtgtccaccctgcaggccctgcagatgctgaagtactggaagggcaagcacctggtgctgaagaggcaggacctgattgatgagtggatcgccaaggaggccaagaggagcaacagcaacaagaccatggaccccagctgcctgaagtggaccccacccaagggcacctag

SEQ ID NO: 77082 - DNA, 1506 bp, Artificial Sequence
  derived and/or modified sequence
atgccccggcggaagcggaacgccggcagcagcagcgacggcaccgaggattcagatttcagcacagatctcgagcataccgactcctcagaatctgatgggacttccaggaggagtgcccgtgtgaccagaagctctgcccggcttagtcaaagttcacaggattcatcccctgtccggaatttgcaatccttcgggaccgaggagcctgcctattctacgaggagggtgacgcggagtcagcaacagccaacccccgtcactcctaaaaagtaccccttgcgacagactaggtcatccgggtccgaaacagagcaggtggtggattttagcgatcgtggacatctgaccggtaaacacgaacgacacttttccatcagtggctgcccactctaccacaacttgagcgcagacgagtgtaaagcccccacggagcgacagctgcgttacaaggaaaaggtcgctgaattgaggaagaagcggaattcaggcctgtctaaagaacagaaggagaagtatatggaacatcggcagacctatggcaacactcgagaaccactgctggagaaccttaccagtgagtacgacctagacctgttccggcgagctcaggcccgggcctcggaggacctggaaaagctccggttgcaaggacagatcactgaaggatcaaacatgatcaaaactattgcctttggacggtatgaactggacacatggtaccactctccctaccctgaagaatacgcgagactgggccggctttacatgtgtgaattttgcctgaaatatatgaagagccagacaatcctcagaaggcacatggctaagtgtgtctggaaacacccacctggggacgagatctatagaaagggctctatctctgtgtttgaggtggacggaaaaaagaataagatttattgtcaaaacctctgtctcctcgcaaagctgttcctggaccacaagacactatactatgatgtggaaccatttctcttttacgtgatgacagaagccgacaatacaggctgccatctaattggttattttagtaaagaaaaaaactctttcttaaattacaatgtctcttgtattctgacaatgccgcaatatatgaggcagggctatggaaagatgctgatcgacttctcgtaccttctgtctaaggtagaagagaaggtgggctcacccgaacgcccactctcagatctgggtctgatctcctaccggagctattggaaggaggtactccttcggtatctacataacttccagggaaaggagattagtatcaaagaaatctcacaggaaaccgcggtgaaccccgtcgatattgtctcaactttacaagctctccagatgctcaagtattggaagggcaaacatctagtattaaagcggcaggatctcatcgatgagtggattgccaaggaggcgaagagaagcaactctaacaagaccatggacccttcgtgcctcaagtggacaccccctaaaggaacatag

SEQ ID NO: 77083 - DNA, 1506 bp, Artificial Sequence
  derived and/or modified sequence
atgcctagaagaaagagaaacgctggctcatccagtgacggaaccgaggacagtgacttctccaccgatttggagcacaccgactcgagcgaaagcgacgggacctctcgtcggtctgcccgagttaccaggtccagtgctcgtctgtctcagtccagtcaggatagctctcccgtgcgaaacctacagtcttttgggaccgaagagcccgcatactcaacgaggcgcgtcacacgcagccagcagcagccgactcctgtgacgcctaagaagtacccgcttcgacagactaggtccagtgggagcgagacggagcaagtcgtggacttcagcgaccgagggcacctcaccggtaaacatgagagacacttttcaattagtggatgccctctgtatcacaacctttcagcggacgaatgcaaggccccaaccgagagacagttgcgctacaaagaaaaagtcgccgaactgcggaaaaaacgaaattctggactttcgaaggaacagaaagaaaagtacatggaacataggcagacgtacgggaacactcgcgagcccctactggagaacctgactagcgagtacgaccttgatttgttccgccgagcacaggcacgtgccagtgaagatctcgagaagttgaggcttcaggggcaaatcactgaaggttccaatatgatcaaaaccatagccttcggacgctatgaactcgatacctggtatcacagcccatatccagaagaatatgcccgacttggccgtctgtacatgtgcgaattttgtctgaagtatatgaaatcccagactattttgcgacggcatatggcaaaatgtgtatggaagcatccacctggcgacgagatctaccgtaaaggttcaatatctgtgtttgaggtcgatgggaagaagaacaagatctactgtcagaatctatgcctcttggccaagctgtttctggaccataagaccttatactatgacgtagaaccattcctgttttacgtgatgacagaggcagataataccggatgtcacctgattgggtacttcagtaaagaaaaaaattccttcctgaactataacgttagctgcatccttaccatgccccagtacatgaggcagggatacggcaagatgttgattgattttagctaccttctgtccaaggtcgaagagaaagtaggctcccctgagcggccactgtctgatctgggcctgattagctatagaagctattggaaggaagtgctcttaagatatctgcataactttcagggtaaagaaatctcgataaaggagatctcacaggagaccgccgttaacccagtggacattgtatcgacactgcaagcattacaaatgttaaaatactggaaaggaaaacaccttgtgctaaaacgacaagacttgatagacgagtggatcgcaaaggaggccaagcgttcgaactcaaacaaaactatggatccttcatgtctgaaatggacaccgcctaaaggtacctag

SEQ ID NO: 77084 - DNA, 1506 bp, Artificial Sequence
  derived and/or modified sequence
atgcccagaagaaagagaaacgccggcagcagcagcgacggcaccgaggacagcgacttcagcaccgacctggagcacaccgacagcagcgagagcgacggcaccagcagaagaagcgccagagtgaccagaagcagcgccagactgagccagagcagccaggacagcagccccgtgagaaacctgcagagcttcggcaccgaggagcccgcctacagcaccagaagagtgaccagaagccagcagcagcccacccccgtgacccccaagaagtaccccctgagacagaccagaagcagcggcagcgagaccgagcaggtggtggacttcagcgacagaggccacctgaccggcaagcacgagagacacttcagcatcagcggctgccccctgtaccacaacctgagcgccgacgagtgcaaggcccccaccgagagacagctgagatacaaggagaaggtggccgagctgagaaagaagagaaacagcggcctgagcaaggagcagaaggagaagtacatggagcacagacagacctacggcaacaccagagagcccctgctggagaacctgaccagcgagtacgacctggacctgttcagaagagcccaggccagagccagcgaggacctggagaagctgagactgcagggccagatcaccgagggcagcaacatgatcaagaccatcgccttcggcagatacgagctggacacctggtaccacagcccctaccccgaggagtacgccagactgggcagactgtacatgtgcgagttctgcctgaagtacatgaagagccagaccatcctgagaagacacatggccaagtgcgtgtggaagcacccccccggcgacgagatctacagaaagggcagcatcagcgtgttcgaggtggacggcaagaagaacaagatctactgccagaacctgtgcctgctggccaagctgttcctggaccacaagaccctgtactacgacgtggagcccttcctgttctacgtgatgaccgaggccgacaacaccggctgccacctgatcggctacttcagcaaggagaagaacagcttcctgaactacaacgtgagctgcatcctgaccatgccccagtacatgagacagggctacggcaagatgctgatcgacttcagctacctgctgagcaaggtggaggagaaggtgggcagccccgagagacccctgagcgacctgggcctgatcagctacagaagctactggaaggaggtgctgctgagatacctgcacaacttccagggcaaggagatcagcatcaaggagatcagccaggagaccgccgtgaaccccgtggacatcgtgagcaccctgcaggccctgcagatgctgaagtactggaagggcaagcacctggtgctgaagagacaggacctgatcgacgagtggatcgccaaggaggccaagagaagcaacagcaacaagaccatggaccccagctgcctgaagtggaccccccccaagggcacctag

SEQ ID NO: 77085 - protein, 442 aa, Artificial Sequence
  derived and/or modified sequence
MPRRKRNAGSSSDGTEDSDFSTDLEHTDSSESDGTSRRSARVTRSSARLSQSSQGHLTGKHERHFSISGCPLYHNLSADECKAPTERQLRYKEKVAELRKKRNSGLSKEQKEKYMEHRQTYGNTREPLLENLTSEYDLDLFRRAQARASEDLEKLRLQGQITEGSNMIKTIAFGRYELDTWYHSPYPEEYARLGRLYMCEFCLKYMKSQTILRRHMAKCVWKHPPGDEIYRKGSISVFEVDGKKNKIYCQNLCLLAKLFLDHKTLYYDVEPFLFYVMTEADNTGCHLIGYFSKEKNSFLNYNVSCILTMPQYMRQGYGKMLIDFSYLLSKVEEKVGSPERPLSDLGLISYRSYWKEVLLRYLHNFQGKEISIKEISQETAVNPVDIVSTLQALQMLKYWKGKHLVLKRQDLIDEWIAKEAKRSNSNKTMDPSCLKWTPPKGT

SEQ ID NO: 77086 - DNA, 1769 bp, Artificial Sequence
  derived and/or modified sequence
agacgctgagaggcaggaggcactagggatcgtccgcaggattgggactgatacagaggccgccacggagcccgccggagccaccgttcctgctgctgccgccgctgcccgaatcggaaccgtcgggccgcagccgccggcaatgccgcgaaggaagaggaatgcaggcagtagttcagatggaaccgaagattccgatttttctacagatctcgagcacacagacagttcagaaagtgatggcacatcccgacgatctgctcgagtcacccgctcctcagccaggctaagccagagttctcaaggacaccttacaggaaaacatgagagacatttctccatctcaggatgcccactgtatcataacctctcagctgacgaatgcaaggcaccaacggagagacagcttcgatataaggaaaaagtggctgaactcaggaagaaaagaaattctggactgagcaaagaacagaaagagaaatatatggaacacagacagacctatgggaacacacgggaacctcttttagaaaacctgacaagcgagtatgacttggatcttttccgaagagcacaagcccgggcttcagaggatttggagaagttaaggctgcaaggccaaatcacagagggaagcaacatgattaaaacaattgcttttggccgctatgagcttgatacctggtatcattctccatatcctgaagaatatgcacggctgggacgtctctatatgtgtgaattctgtttaaaatatatgaagagccaaacgatactccgccggcacatggccaaatgtgtgtggaaacacccacctggtgatgagatatatcgcaaaggttcaatctctgtgtttgaagtggatggcaagaaaaacaagatctactgccaaaacctgtgcctgttggccaaactttttctggaccacaagacattatattatgatgtggagcccttcctgttctatgttatgacagaggcggacaacactggctgtcacctgattggatatttttctaaggaaaagaattcattcctcaactacaacgtctcctgtatccttactatgcctcagtacatgagacagggctatggcaagatgcttattgatttcagttatttgctttccaaagtcgaagaaaaagttggctccccagaacgtccactctcagatctggggcttataagctatcgcagttactggaaagaagtacttctccgctacctgcataattttcaaggcaaagagatttctatcaaagaaatcagtcaggagacggctgtgaatcctgtggacattgtcagcactctgcaagcccttcagatgctcaaatactggaagggaaaacacctagttttaaagagacaggacctgattgatgagtggatagccaaagaggccaaaaggtccaactccaataaaaccatggatcccagctgcttaaaatggacccctcccaagggcacttaaagtgacctgtcattccgagccagcgaaccccagcagtaggaatccgtaccctagggatctgtctgtcatttctctgttgctcttgtgattggcaagtacagtatcctttgggaaggccatccccctcaggactgtcctggctccgacctttgtgtacactgcagacgctggttctgaggaactgttgtttcggcctcagtgaggttgcctggatgggatctgtattagacttgagtgcaggtctctcagcactgacccaaggagttctgttatggtactgtacctgtccagtcactgg

SEQ ID NO: 77087 - DNA, 1329 bp, Artificial Sequence
  derived and/or modified sequence
atgccccgcagaaaacggaatgctggttcttcttccgacgggacggaggactccgacttctcaaccgatctggagcacactgactcttcagagtctgacggaacttcaagacggtccgctcgggttactcggtcctcagccaggctcagtcaaagtagtcaaggccatctgacgggaaagcacgagaggcatttcagcatctcgggatgccccctatatcataatctctcggccgacgagtgcaaggcacccactgagaggcagctgcgctacaaagagaaagtggccgagttgagaaaaaaacggaactccggcctgtcaaaggagcagaaggaaaaatatatggagcacagacagacctacggcaataccagagaacctctgttagaaaatcttacctccgagtacgacttggacctcttccggcgtgcgcaggctcgagcttctgaagacctggagaagctacgtcttcaggggcagataactgaaggcagcaacatgattaagacaatagcgtttggccgctatgaactcgatacttggtatcatagcccctatcctgaagagtatgcccgtctaggcaggctgtacatgtgcgagttctgtctgaagtacatgaaatcccagaccattttgcggcgccacatggccaaatgtgtctggaagcatcctcccggagacgagatttatcggaagggatccatttctgtctttgaggtggatgggaagaaaaacaagatttattgccaaaatctctgcttgctagccaagctcttccttgaccataagaccctctattacgatgttgaacccttcttattttacgtgatgaccgaggctgacaataccggatgccacctcatagggtatttttcaaaagagaagaactccttcctgaactataacgttagctgtattttgacaatgcctcagtatatgaggcaaggttacggaaaaatgttgatcgatttttcctatctgctcagcaaagtcgaggagaaagttggcagcccagagaggcctctgtcagacctcggcctgatttcatatcgatcctattggaaagaggtcctactccggtatctacataacttccaaggtaaggagatctctatcaaggagattagccaagagacagccgtcaatcccgtggacatcgttagcactttgcaagcattgcagatgctgaagtactggaaaggtaagcatctggtgttaaagcggcaggatctgatagacgaatggatcgccaaggaggctaagcggtctaactcaaacaagacgatggaccccagctgtctcaagtggacccccccaaaagggacttag

SEQ ID NO: 77088 - DNA, 1329 bp, Artificial Sequence
  derived and/or modified sequence
atgcccaggaggaagagaaatgccggcagcagcagtgatggaacagaggacagcgacttcagcacagacctggagcacacagacagcagcgagagtgatggcaccagcagaagaagtgcccgggtgaccaggagcagcgcccggctgagccagagcagccagggccacctgaccgggaagcatgagcggcacttcagcatcagcggctgccccctgtaccacaacctgtctgcagatgagtgcaaggcccccacagagcggcagctgcgctacaaggagaaggtggccgagctgaggaagaagaggaacagcggcctgagcaaggagcagaaggagaagtacatggagcaccggcagacctacggcaacacccgggagcccctgctggagaacctgaccagtgaatatgacctggacctcttccggcgggcccaggcccgggccagcgaggacctggagaagctgcggctgcagggccagatcacagagggcagcaacatgatcaagaccatcgccttcggccgctatgagctggacacctggtaccacagcccctacccagaggagtatgcccggctgggccgcctgtacatgtgtgagttctgcctgaagtacatgaagagccagaccatcctgcggcggcacatggccaagtgtgtgtggaagcaccccccaggagatgagatctacaggaagggcagcatctctgtgtttgaggtggatggcaagaagaacaagatctactgccagaacctgtgcctgctggccaagctgttcctggaccacaagaccctgtactatgatgtggagcccttcctgttctacgtgatgacagaggccgacaacacaggctgccacctgattggctacttcagcaaggagaagaacagcttcctgaactacaacgtgtcctgcatcctgaccatgccccagtacatgaggcagggctacggcaagatgctgattgacttctcctacctgctgagcaaggtggaggagaaggtgggcagccctgagcggcccctgagtgacctgggcctcatctcctaccgcagctactggaaggaggtgctgctgcgctacctgcacaacttccagggcaaggagatcagcatcaaggagatcagccaggagacagctgtgaaccctgtggacatcgtgtccaccctgcaggccctgcagatgctgaagtactggaagggcaagcacctggtgctgaagaggcaggacctgattgatgagtggatcgccaaggaggccaagaggagcaacagcaacaagaccatggaccccagctgcctgaagtggaccccacccaagggcacctag

SEQ ID NO: 77089 - DNA, 1329 bp, Artificial Sequence
  derived and/or modified sequence
atgccccggcggaagcggaacgccggcagcagcagcgacggcaccgaggactctgatttcagtacagacctggaacacactgattcttccgagagtgacggtactagccgccggtccgctcgagtgacaaggagctccgctagactcagtcagagtagccagggacacttgacaggcaaacatgaacggcacttttcaattagtggctgccccctttaccacaatctcagtgcagatgagtgcaaagccccaacggagcgccagttgcgatacaaagagaaagtggctgaactccggaaaaagaggaacagcgggctatccaaagaacaaaaagaaaagtacatggaacacagacagacatatggcaatactagggaaccgctgctggagaacctgacctccgaatatgatctggacttgttccgccgggcgcaggcaagggctagcgaggatttggagaagctgcgccttcagggacagatcacggaggggtccaacatgataaagaccattgcattcggcaggtacgaattggatacctggtatcacagcccttatcctgaagagtacgcccggctgggccgcctgtacatgtgcgagttttgtctgaagtatatgaagtcccaaaccatcctcagacggcatatggcgaagtgcgtgtggaagcacccacctggggacgagatttaccgaaaaggcagtatatccgtcttcgaggtagacggcaagaagaacaagatttactgccagaatttgtgtcttcttgctaagttatttctagaccacaaaacactttattatgacgtagaaccctttctcttttatgtgatgactgaagctgataacactggatgccatttgataggctacttcagcaaagagaaaaactcctttcttaactacaacgtgagctgcatccttacgatgccccagtacatgcgccagggctatggtaagatgctcatagatttctcatatctgttgagcaaagtcgaagagaaagtcggctcgccagagcggccccttagcgacctgggcctcatctcctaccgctcctattggaaagaagtgctgctgcggtacctgcataactttcagggtaaagaaatctccattaaggaaatctctcaagagacagccgtaaaccccgtagatatcgtgagtacactgcaggccttgcagatgttgaaatattggaaaggaaagcacctggttctgaaaagacaggatctgattgatgaatggatcgctaaggaagccaaacgctccaactccaataagaccatggatcctagttgtctcaagtggactcctccaaagggaacctag

SEQ ID NO: 77090 - DNA, 1329 bp, Artificial Sequence
  derived and/or modified sequence
atgcctcggagaaagaggaacgccggatccagcagtgacgggacagaagatagcgatttttccacagatctcgagcataccgactcaagtgagtctgatggcacttcccgccgatctgcgcgtgtcactcgctcctccgccagattatcccagagctcgcaggggcatctgacagggaagcacgagaggcattttagcatatccggatgccctctctaccataacctgtccgccgatgagtgcaaggccccaacagaacggcagctgcgctataaggaaaaggtggccgagctgcgcaagaaaagaaattccggattatcaaaggagcagaaagagaagtacatggaacaccggcagacgtacggaaatacccgggagcctctgttagagaacctgacttcagagtacgaccttgacttgttcaggcgtgcccaggcaagagcctcagaagacctcgaaaagctgcgcttgcagggccagatcaccgaaggtagcaacatgattaaaacaattgctttcggtagatacgaactcgacacctggtatcatagcccttatcccgaggaatacgcacggctggggaggctgtacatgtgtgagttctgtttgaaatacatgaagagccagactatcttgcgaagacacatggccaagtgcgtttggaaacacccccctggagatgaaatttatcgaaagggcagcattagtgttttcgaggttgatggaaagaaaaataagatttactgccagaacctctgtctcttggccaaactgttcttagatcataagacgctgtactacgacgtggaaccctttttgttctatgtgatgactgaggccgacaacaccggatgccatctgatcgggtatttttccaaagaaaaaaacagctttttgaattacaatgtttcctgcatcctaacaatgcctcaatacatgagacagggatacgggaagatgctgatcgatttttcataccttctgtctaaggtagaagaaaaagtagggtcccctgaaaggcccctttctgatctagggctgatttcatatcgatcatattggaaggaggtgctcctgcggtacctgcacaactttcaaggcaaagaaatttccattaaggagattagccaagaaactgcggtaaacccagttgacattgtatctaccctgcaagcactccagatgcttaaatattggaagggtaaacacctcgttctgaaaaggcaggatttaatcgacgagtggattgccaaagaggccaagagatccaattccaataagaccatggatccatcctgcctaaaatggacccctcctaaggggacttag

SEQ ID NO: 77091 - DNA, 1329 bp, Artificial Sequence
  derived and/or modified sequence
atgcccagaagaaagagaaacgccggcagcagcagcgacggcaccgaggacagcgacttcagcaccgacctggagcacaccgacagcagcgagagcgacggcaccagcagaagaagcgccagagtgaccagaagcagcgccagactgagccagagcagccagggccacctgaccggcaagcacgagagacacttcagcatcagcggctgccccctgtaccacaacctgagcgccgacgagtgcaaggcccccaccgagagacagctgagatacaaggagaaggtggccgagctgagaaagaagagaaacagcggcctgagcaaggagcagaaggagaagtacatggagcacagacagacctacggcaacaccagagagcccctgctggagaacctgaccagcgagtacgacctggacctgttcagaagagcccaggccagagccagcgaggacctggagaagctgagactgcagggccagatcaccgagggcagcaacatgatcaagaccatcgccttcggcagatacgagctggacacctggtaccacagcccctaccccgaggagtacgccagactgggcagactgtacatgtgcgagttctgcctgaagtacatgaagagccagaccatcctgagaagacacatggccaagtgcgtgtggaagcacccccccggcgacgagatctacagaaagggcagcatcagcgtgttcgaggtggacggcaagaagaacaagatctactgccagaacctgtgcctgctggccaagctgttcctggaccacaagaccctgtactacgacgtggagcccttcctgttctacgtgatgaccgaggccgacaacaccggctgccacctgatcggctacttcagcaaggagaagaacagcttcctgaactacaacgtgagctgcatcctgaccatgccccagtacatgagacagggctacggcaagatgctgatcgacttcagctacctgctgagcaaggtggaggagaaggtgggcagccccgagagacccctgagcgacctgggcctgatcagctacagaagctactggaaggaggtgctgctgagatacctgcacaacttccagggcaaggagatcagcatcaaggagatcagccaggagaccgccgtgaaccccgtggacatcgtgagcaccctgcaggccctgcagatgctgaagtactggaagggcaagcacctggtgctgaagagacaggacctgatcgacgagtggatcgccaaggaggccaagagaagcaacagcaacaagaccatggaccccagctgcctgaagtggaccccccccaagggcacctag

SEQ ID NO: 77092 - protein, 135 aa, Artificial Sequence
  derived and/or modified sequence
QNSPQDYLAVHNDARAQVGVGPMSWDANLASRAQNYANSRAGDCNLIHSGAGENLAKGGGDFTGRAAVQLWVSERPSYNYATNQCVGGKKCRHYTQVVWRNSVRLGCGRARCNNGWWFISCNYDPVGNWIGQRPY

SEQ ID NO: 77093 - protein, 463 aa, Artificial Sequence
  derived and/or modified sequence
MHGSCSFLMLLLPLLLLLVATTGPVGALTDEEKRLMVELHNLYRAQVSPTASDMLHMRWDEELAAFAKAYARQCVWGHNKERGRRGENLFAITDEGMDVPLAMEEWHHEREHYNLSAATCSPGQMCGHYTQVVWAKTERIGCGSHFCEKLQGVEETNIELLVCNYEPPGNVKGKRPYQEGTPCSQCPSGYHCKNSLCEPIGSPEDAQDLPYLVTEAPSFRATEASDSRKMGTPSSLATGIPAFLVTEVSGSLATKALPAVETQAPTSLATKDPPSMATEAPPCVTTEVPSILAAHSLPSLDEEPVTFPKSTHVPIPKSADKVTDKTKVPSRSPENSLDPKMSLTGARELLPHAQEEAEAEAELPPSSEVLASVFPAQDKPGELQATLDHTGHTSSKSLPNFPNTSATANATGGRALALQSSLPGAEGPDKPSVVSGLNSGPGHVWGPLLGLLLLPPLVLAGIF

SEQ ID NO: 77094 - protein, 315 aa, Artificial Sequence [sequence omitted]

SEQ ID NO: 77095 - DNA, 948 bp, Artificial Sequence
  derived and/or modified sequence
atgggccaggaccgggaggagaccaacatcgagctgctggtgtgcaattacgagcctccagggaatgtgaagggcaaacggccctaccaggaagggactccatgtagccagtgtccttctggctaccattgtaaaaattcgctctgcgaacctattggcagtcccgaggatgcgcaagacctgccatacctggtcacggaagccccaagcttcagggccactgaggcctccgattccagaaagatggggacacccagctctctcgcaacggggattccagcctttctagtgacggaagtctccggatcgttagcaacaaaggcccttcccgcagtagagacacaggccccaacctctttagccacaaaggacccgccttcgatggccacagaagctcccccttgcgtcaccacagaggtgccgtctatacttgctgcacactctctcccaagcctggacgaggaaccagtgacattcccaaaaagcactcatgtgcccattcctaagtcggcagataaggtaaccgacaaaactaaggttccttcgaggagtccagaaaattctttggatccaaagatgagcctcaccggtgcacgagagctgcttccccacgcacaggaagaagctgaggctgaggcagaactgccaccgtccagcgaggtgctggcgagcgttttccctgcacaggacaagccaggagaactgcaggctacactggatcatactggccacacttccagcaagtctttgccaaactttcctaacacttctgccaccgccaacgccaccggaggacgcgcgcttgccttacagagcagtcttcctggagccgagggccccgacaaaccaagcgtcgtgtcagggttgaattccgggcctggacacgtttggggacccctgctgggattgcttcttctccccccacttgtgttggccggcatcttttag

SEQ ID NO: 77096 - DNA, 1392 bp, Artificial Sequence
  derived and/or modified sequence
atgcatggttcctgtagcttcttgatgctacttctgcctttattgctgctactcgtggccactacaggtcctgtcggagccctgacagatgaggaaaagcgattgatggttgagctgcataatctgtatcgtgcccaggtcagtccgaccgccagcgatatgctgcacatgcgctgggatgaggagcttgccgcattcgctaaagcctatgctcgtcagtgtgtctggggtcataataaggagcgtggcaggagaggggaaaacctgtttgcaatcacagatgagggtatggatgtccctctggccatggaggagtggcaccacgagcgagagcactacaatttgtctgccgctacatgcagtccaggacagatgtgcgggcattatactcaggtcgtgtgggcaaagacagagcggatcggatgcgggtcacacttttgtgaaaagctgcagggcgtggaggaaacgaatattgagctgcttgtttgtaattacgagcctccaggaaacgttaaaggtaagcgaccctatcaagagggaaccccctgtagccagtgtcccagcggttaccattgcaaaaactccctgtgtgagcctattggatctcctgaggatgctcaagatctgccataccttgtgaccgaggctccttcttttcgggctactgaggcatctgactccagaaaaatgggcaccccaagtagcctggccaccgggatccccgctttcttggtgacagaggttagtggatcactggctactaaggcccttccagcggtcgagacccaggctccaaccagccttgccaccaaggatccaccatccatggccaccgaggcgccaccctgtgtgacaaccgaagtccctagcatcctggcggctcattctctgcctagtcttgatgaagagccagtaacttttcccaagagcacacatgtgcccatccccaaaagtgccgataaggtcacagataaaaccaaagtgccgtctcgttcacccgaaaacagtctggaccccaaaatgtcattgaccggcgctagggagcttctgccccatgcacaggaggaggcggaagcagaggctgagctgcccccttcatctgaggtgctggcttcggtgttcccggctcaggacaaaccaggcgagttgcaggcaaccctggatcacacaggccacacctcaagcaaaagccttcccaatttcccaaataccagtgcaacggcaaatgctacaggcggtagggctctagccctgcagagtagtcttcctggggctgagggcccagacaaaccatcagtggtgtcaggtctcaactcagggccaggccacgtgtggggcccactgctcggacttttactactgcccccattggtcctggctggaattttctag

SEQ ID NO: 77097 - DNA, 948 bp, Artificial Sequence
  derived and/or modified sequence
atggggcaagacagagaagaaactaatatcgagctgctcgtgtgcaactacgaacctcccggaaatgtgaaaggtaaacgcccataccaagagggcacaccctgctctcagtgtccctcagggtatcattgtaaaaactcactttgcgagcccatagggagtccagaagacgcacaggacctaccttatctggtgactgaggcgccttcctttcgggcaacagaagcttcggacagcagaaagatggggacaccatcgagtctggccacgggaattccggctttccttgtgacagaggtatccggaagcttagccaccaaggccctgccggcagttgaaactcaagcacctactagtctcgccacaaaagatcctccttctatggccaccgaggcaccaccctgtgttacaactgaagttcctagcattctcgcagcacactctctaccgagcttagacgaagagccagttacgttcccaaaaagcacgcatgtccctataccaaagtctgcagataaggtcacagacaagactaaagttccgagtcgaagcccagagaactctctggacccgaagatgtctcttacaggggcaagagaattactgccccatgcgcaagaggaagctgaggccgaagctgagttgccaccatcgtccgaggtactagcttctgtgttccctgctcaggacaagcccggagaacttcaagccaccttggaccacactggacatacctccagtaagtctctgcccaacttcccaaatacaagcgcaaccgcaaacgccactggaggccgtgccctggccctgcagtcgtctctaccgggagccgaaggaccagataagcccagcgtcgtgtccggtctcaattctggccctggccacgtgtggggcccactgctgggactcctgcttcttccacctctcgttctagccggtatattttag

SEQ ID NO: 77098 - DNA, 1392 bp, Artificial Sequence
  derived and/or modified sequence
atgcacggctcatgtagcttcttaatgctcctgctgccattgctgctcctgctggtagctactaccggccctgtcggtgccttaaccgatgaggaaaagcgcctcatggtagaactgcacaatctctatcgagcacaggtttcccccacagcaagcgatatgcttcacatgcgatgggatgaagagctggccgcttttgccaaggcctatgcccgtcagtgcgtgtggggtcacaacaaggaacggggaaggaggggggaaaatctgttcgctattactgatgagggaatggacgtgccattggctatggaggaatggcaccatgagcgtgaacactacaatctgtctgccgctacctgcagtcccggacaaatgtgtggccattacacacaagtcgtgtgggcgaaaacggagcggatcggctgcggtagtcatttctgcgaaaagctgcagggtgtagaggaaactaatatcgaactgctagtatgcaactacgagcctccaggcaacgttaagggcaagcgaccctaccaagaaggaactccctgctcccaatgcccttctgggtaccactgcaagaactcattatgcgaacccattgggagtccagaggacgcccaggacctgccctaccttgtgacagaggccccgagttttcgggctactgaggcctctgattcaagaaagatgggtacaccttcatctttagccaccggcattccagcattcctcgtcactgaagtctctggttcactggccaccaaagcgttgccagccgtcgagacccaggctccaacttctcttgcaacgaaggaccctccatccatggctaccgaggccccaccctgcgtcaccaccgaggtgccttcaatccttgctgctcacagtctgcccagcctggacgaggagccagtcacatttcccaagagtacacacgtccctataccaaaaagcgccgacaaggtcacagacaagacaaaagtacctagccgcagtcccgagaattcactggatcctaaaatgagcctgacaggggcacgggagcttctgccacatgctcaggaggaggcagaggccgaggccgaactccccccttcttccgaagtactggcctccgtctttccagcgcaggataaacctggcgaacttcaggccacactagatcacacaggacatacttcatctaaaagcctcccgaatttccccaatactagtgcaactgcgaacgcaactggaggtagggctctggccctgcagagtagtttgcccggtgcagaagggcctgacaaaccatctgtggtgagcggactgaactcaggacccggacacgtgtgggggccccttttaggactgctcttgctgccccccctcgtcctggccgggatattttag

SEQ ID NO: 77099 - DNA, 948 bp, Artificial Sequence
  derived and/or modified sequence
atgggccaggatagagaggaaacaaatattgaattacttgtctgcaattacgagccccccgggaatgttaaaggaaaacgtccatatcaagaaggcactccatgtagtcaatgtccttctggttaccactgcaagaactcactttgcgaaccgattggcagtcccgaagacgctcaggacctaccttacctggtgactgaggcacctagctttagagcaacggaggcatctgatagccgcaaaatgggaacaccatcatctctggccacaggcatacctgcctttctggtgaccgaagtgtcgggctctcttgccacaaaagcgctcccagctgtcgaaacacaggccccgacgtctctggcaaccaaggacccaccttctatggctacagaagcacccccttgtgtgaccacagaggtgcccagcatcctcgccgcccattccctgccctcgttggacgaagagcccgttacgttccctaagtcgacacatgtgcctatcccgaaatccgctgacaaggtaacagataaaaccaaggttccatctcggagccctgagaactcactagatcctaagatgagccttaccggcgcacgggagctgttgccacacgcgcaggaggaagctgaagcggaggcggagctccctccaagcagtgaggtgctcgcatcagtctttccggcacaggataagcccggcgaactgcaggcaacgctagatcatacaggtcacactagctccaagagtttaccaaatttccctaacacttcagctaccgcaaacgcaacaggcggcagagcccttgcattacagtcctcacttcctggggcagaaggtccagataaacctagcgtggtaagcggcctgaactccggacctggacatgtttggggcccactgctcggtctactcctgctcccccctctggtgttggctgggattttctag

SEQ ID NO: 77100 - DNA, 1392 bp, Artificial Sequence
  derived and/or modified sequence
atgcacgggtcatgcagcttcctgatgcttcttctgcccttactgctgttactggtggctacgacgggcccagttggcgccttgactgatgaggagaaaaggctcatggtggaactacacaatctgtaccgcgcccaagtttctcccactgcatccgatatgctgcacatgagatgggatgaggaactggccgcctttgctaaagcctacgcccgacagtgtgtttggggacacaacaaggaaagaggtaggcggggagagaatctgtttgctatcaccgatgaaggaatggatgtgcccctagccatggaggagtggcaccatgaacgtgaacattacaatctgtccgccgctacctgttcacctggacagatgtgtggtcattatacccaggtcgtgtgggccaagacagagagaatcggatgtggcagtcatttttgcgagaaacttcagggagtagaagagaccaatatcgaactgctggtctgtaactacgaaccaccgggaaacgtgaaaggcaaacggccttatcaggagggaacaccttgcagccagtgcccgagcggctaccactgcaaaaacagtctgtgtgagccaataggcagcccagaggatgcacaagacctcccttatttagtgactgaagctccctcctttagggccaccgaagcgtctgatagtagaaaaatgggtactccctcatctttggccacgggtatccccgctttccttgttaccgaagtttctggctcactggcaactaaagctctgcccgcagtggagactcaagcgcccacttcccttgcgactaaagaccccccctccatggccactgaggccccaccgtgtgtgacaaccgaagtgccctccatcctcgccgcgcactctctcccgagccttgacgaggaacctgttacgtttcctaaatctacccatgttccaattcccaaatctgccgacaaggtgactgacaagaccaaggtgccaagcagaagcccggaaaactctctcgatcccaaaatgtctctgaccggtgcacgagagctgcttccgcatgcccaggaagaggccgaagcagaagctgagctgcctccatcttctgaagtgctcgctagcgtcttcccggcacaggacaaaccaggggagctgcaggccactctagatcatactggtcacacaagttccaaatctcttccgaactttcccaacacatccgcgacggctaatgcaaccggaggcagagcacttgcactgcaaagttcactcccgggtgctgagggtccagataaaccaagtgtagtgtccggcctgaattctgggccaggccatgtctgggggccactgctgggcttgctcctgctcccaccacttgtcctggcaggtatcttctag

SEQ ID NO: 77101 - DNA, 948 bp, Artificial Sequence
  derived and/or modified sequence
atggggcaagaccgagaagaaacaaatatagaacttttagtgtgcaattacgagcccccaggaaacgtgaaaggtaaaagaccctaccaagagggaactccctgttctcaatgcccaagcggataccattgtaaaaatagcttatgcgagcctatcggctcccctgaggacgcccaggatctgccatatcttgtcacagaagccccatcatttagagcaaccgaggcctccgattctcgcaagatgggaacaccctcctccttggcaaccggcattccagcatttctcgtcacagaggtgtccggatctcttgccactaaagctctgcccgctgtcgaaacccaggccccgacgtccttagccaccaaagaccctccatccatggctaccgaggccccaccatgtgtaacaaccgaggtcccctctattctggccgctcactctctaccatcattagacgaagaaccagttaccttccctaagagtacccacgtccctatcccaaaaagcgcagataaagtcactgacaagaccaaggtcccgtccaggtcccctgaaaactcgctggacccgaagatgtccttgactggagctcgcgagctgttgccacacgcgcaggaggaagctgaagcggaggcggagctccctccaagcagtgaggtgctcgcatcagtctttccggcacaggataagcccggcgaactgcaggcaacgctagatcatacaggtcacactagctccaagagtttaccaaatttccctaacacttcagctaccgcaaacgcaacaggcggcagagcccttgcattacagtcctcacttcctggggcagaaggtccagataaacctagcgtggtaagcggcctgaactccggacctggacatgtttggggcccactgttgggactgttgctccttcctcctctcgtcctcgccggcatattttag

SEQ ID NO: 77102 - DNA, 1788 bp, Artificial Sequence
  derived and/or modified sequence
agaaggagagacggctggccaccatgcacggctcctgcagtttcctgatgcttctgctgccgctactgctactgctggtggccaccacaggccccgttggagccctcacagatgaggagaaacgtttgatggtggagctgcacaacctctaccgggcccaggtatccccgacggcctcagacatgctgcacatgagatgggacgaggagctggccgccttcgccaaggcctacgcacggcagtgcgtgtggggccacaacaaggagcgcgggcgccgcggcgagaatctgttcgccatcacagacgagggcatggacgtgccgctggccatggaggagtggcaccacgagcgtgagcactacaacctcagcgccgccacctgcagcccaggccagatgtgcggccactacacgcaggtggtatgggccaagacagagaggagaccaacatcgaattactggtgtgcaactatgagcctccggggaacgtgaaggggaaacggccctaccaggaggggactccgtgctcccaatgtccctctggctaccactgcaagaactccctctgtgaacccatcggaagcccggaagatgctcaggatttgccttacctggtaactgaggccccatccttccgggcgactgaagcatcagactctaggaaaatgggtactccttcttccctagcaacggggattccggctttcttggtaacagaggtctcaggctccctggcaaccaaggctctgcctgctgtggaaacccaggccccaacttccttagcaacgaaagacccgccctccatggcaacagaggctccaccttgcgtaacaactgaggtcccttccattttggcagctcacagcctgccctccttggatgaggagccagttaccttccccaaatcgacccatgttcctatcccaaaatcagcagacaaagtgacagacaaaacaaaagtgccctctaggagcccagagaactctctggaccccaagatgtccctgacaggggcaagggaactcctaccccatgcccaggaggaggctgaggctgaggctgagttgcctccttccagtgaggtcttggcctcagtttttccagcccaggacaagccaggtgagctgcaggccacactggaccacacggggcacacctcctccaagtccctgcccaatttccccaatacctctgccaccgctaatgccacgggtgggcgtgccctggctctgcagtcgtccttgccaggtgcagagggccctgacaagcctagcgtcgtgtcagggctgaactcgggccctggtcatgtgtggggccctctcctgggactactgctcctgcctcctctggtgttggctggaatcttctgaaggggataccactcaaaggcaaggcctggtgaggggggccctggcctcatacccacctggattgtcttcctccaagtgagagaccacagcttcctgggcaggtcctgctctgtggcccagcagccccccttcaccccaacttctggccagattccaggccagcactcttgtcctcctgggaggcgtctacagggccagcccctggcactgccccaggagtgccttggctctgggtaggcccatccttcagctggctgcagactgttctgagcggtatttacatgtgcccactctcaggttgtcctgtggccatcagcttctctcccagacagaggatctcaggcttcccaggaacccccgggcccctcccagtcccctggcctcttccttgagccatctgagtccaggactgttcccca

SEQ ID NO: 77103 - DNA, 1392 bp, Artificial Sequence
  derived and/or modified sequence
atgcacggcagctgcagcttcctgatgctgctgctgcccctgctgctgctgctggtggccaccaccggccccgtgggcgccctgaccgacgaggagaagagactgatggtggagctgcacaacctgtacagagcccaggtgagccccaccgccagcgacatgctgcacatgagatgggacgaggagctggccgccttcgccaaggcctacgccagacagtgcgtgtggggccacaacaaggagagaggcagaagaggcgagaacctgttcgccatcaccgacgagggcatggacgtgcccctggccatggaggagtggcaccacgagagagagcactacaacctgagcgccgccacctgcagccccggccagatgtgcggccactacacccaggtggtgtgggccaagaccgagagaatcggctgcggcagccacttctgcgagaagctgcagggcgtggaggagaccaacatcgagctgctggtgtgcaactacgagccccccggcaacgtgaagggcaagagaccctaccaggagggcaccccctgcagccagtgccccagcggctaccactgcaagaacagcctgtgcgagcccatcggcagccccgaggacgcccaggacctgccctacctggtgaccgaggcccccagcttcagagccaccgaggccagcgacagcagaaagatgggcacccccagcagcctggccaccggcatccccgccttcctggtgaccgaggtgagcggcagcctggccaccaaggccctgcccgccgtggagacccaggcccccaccagcctggccaccaaggacccccccagcatggccaccgaggcccccccctgcgtgaccaccgaggtgcccagcatcctggccgcccacagcctgcccagcctggacgaggagcccgtgaccttccccaagagcacccacgtgcccatccccaagagcgccgacaaggtgaccgacaagaccaaggtgcccagcagaagccccgagaacagcctggaccccaagatgagcctgaccggcgccagagagctgctgccccacgcccaggaggaggccgaggccgaggccgagctgccccccagcagcgaggtgctggccagcgtgttccccgcccaggacaagcccggcgagctgcaggccaccctggaccacaccggccacaccagcagcaagagcctgcccaacttccccaacaccagcgccaccgccaacgccaccggcggcagagccctggccctgcagagcagcctgcccggcgccgagggccccgacaagcccagcgtggtgagcggcctgaacagcggccccggccacgtgtggggccccctgctgggcctgctgctgctgccccccctggtgctggccggcatcttctag

SEQ ID NO: 77104 - DNA, 948 bp, Artificial Sequence
  derived and/or modified sequence
atgggccaggacagagaggagaccaacatcgagctgctggtgtgcaactacgagccccccggcaacgtgaagggcaagagaccctaccaggagggcaccccctgcagccagtgccccagcggctaccactgcaagaacagcctgtgcgagcccatcggcagccccgaggacgcccaggacctgccctacctggtgaccgaggcccccagcttcagagccaccgaggccagcgacagcagaaagatgggcacccccagcagcctggccaccggcatccccgccttcctggtgaccgaggtgagcggcagcctggccaccaaggccctgcccgccgtggagacccaggcccccaccagcctggccaccaaggacccccccagcatggccaccgaggcccccccctgcgtgaccaccgaggtgcccagcatcctggccgcccacagcctgcccagcctggacgaggagcccgtgaccttccccaagagcacccacgtgcccatccccaagagcgccgacaaggtgaccgacaagaccaaggtgcccagcagaagccccgagaacagcctggaccccaagatgagcctgaccggcgccagagagctgctgccccacgcccaggaggaggccgaggccgaggccgagctgccccccagcagcgaggtgctggccagcgtgttccccgcccaggacaagcccggcgagctgcaggccaccctggaccacaccggccacaccagcagcaagagcctgcccaacttccccaacaccagcgccaccgccaacgccaccggcggcagagccctggccctgcagagcagcctgcccggcgccgagggccccgacaagcccagcgtggtgagcggcctgaacagcggccccggccacgtgtggggccccctgctgggcctgctgctgctgccccccctggtgctggccggcatcttctag

SEQ ID NO: 77105 - DNA, 1392 bp, Artificial Sequence
  derived and/or modified sequence
atgcatggttcttgctccttcctgatgctgctcttacctctcctattactgctggtggcaactaccggccccgtgggcgcgctgacagatgaagagaaaagacttatggttgagctgcataatttataccgggcacaggtctcacctactgcctcagacatgctgcacatgcggtgggatgaggagttggccgccttcgcaaaagcttatgcccgccagtgcgtgtgggggcacaacaaggaacggggcagacgcggtgaaaatctatttgctatcacagatgaggggatggacgtgcccctggccatggaggagtggcatcacgagcgggaacattacaatttgagcgcagcaacctgctcacctgggcagatgtgcgggcactacacacaagtggtctgggccaagaccgagaggattggctgcggcagtcacttctgtgagaaattgcagggtgtggaagaaaccaatattgagctgcttgtttgcaattatgagcctccaggtaatgttaaagggaaacgcccgtaccaggagggcactccctgcagccagtgtccaagtgggtaccattgcaagaattctctgtgcgagccgatcggctcccccgaggacgcacaggatctgccatatctcgtgaccgaggctcccagcttcagagcgaccgaagcgtcggactctaggaaaatggggacaccatcttctctggcgactggcattcccgcattcctggtgactgaggtttctgggagcctggcaaccaaagctctacccgctgtggaaacccaggctcctaccagccttgctactaaggatcctccttccatggctacagaagcccccccctgtgttacaaccgaggttccatcaattctggcagcgcacagcctgccttcactggacgaggaaccagtaacgttcccaaagagtacccacgttccaattcccaaaagcgctgacaaggttacagataaaacaaaggtacctagccggtctcctgaaaattcactagatccaaaaatgtctctcaccggagccagggaattgcttccccacgcccaagaggaggccgaagcagaggccgagctgcccccgtctagcgaagtcctagcttctgtctttcctgcacaggacaagcccggcgagctgcaggccactctggaccatacaggccacacatccagcaaatcacttccaaacttcccgaatactagtgccactgcgaatgccactggtggaagggcccttgccctgcagtcctcgctgccaggggcagaaggcccagataagccatcagtagtttccggactgaattccggcccaggacatgtgtgggggccattgctgggtctgctgctattgccaccactggtgctggcaggtatcttctag

SEQ ID NO: 77106 - DNA, 948 bp, Artificial Sequence
  derived and/or modified sequence
atggggcaggatcgcgaggagaccaacatcgagctcctggtgtgcaattatgaacctccgggtaacgtgaagggcaagcggccgtaccaggaggggacaccctgcagtcagtgtccctctggttaccactgtaagaacagcctctgtgagcccatcggttcaccagaagacgcccaggacctgccttatcttgtaaccgaagccccttccttccgggctaccgaggcttccgactctcggaagatgggcacgcctagttccctggctaccgggataccggccttcttggtgacagaagtttcaggatccttggcgaccaaagccctgccagccgtggagacccaggcgccaacctctctggccacgaaagatcctcccagcatggctactgaggccccaccttgtgtcactaccgaagtgccctccatcctggcagcccatagtctgccctcactcgacgaagaacctgttacgtttcccaagtctacacatgtgcctattcctaagagcgcggataaggtgaccgataaaacgaaggtgcccagtaggtcccccgagaattccctggacccaaaaatgtcgctgactggggcccgtgaacttcttcctcacgcccaggaggaagcagaggccgaagcggaactccccccctctagcgaagttctggcctctgtatttccagcacaggataagccaggcgagctgcaggccactctggaccatacaggacacacctctagtaaaagcctcccaaacttccccaatacgagcgctacagctaacgcaacaggtgggagagcacttgccctgcagtcttcactgcctggcgccgagggccctgataagccatcagtcgtgagcgggcttaactcaggcccaggacatgtctggggacccttactgggccttttacttctccctcccctcgtgcttgcaggcatcttctag

SEQ ID NO: 77107 - DNA, 1392 bp, Artificial Sequence
  derived and/or modified sequence
atgcacggcagctgcagcttcctgatgctgctgctgcccctgctgctgctgctggtggccaccaccggccctgtgggcgccctgacagatgaggagaagaggctgatggtggagctgcacaacctgtaccgggcccaggtgagccccacagccagtgacatgctgcacatgcgctgggatgaggagctggccgcctttgccaaggcctatgcccggcagtgtgtgtggggccacaacaaggagcggggcagaagaggagagaacctgtttgccatcacagatgagggcatggatgtgcccctggccatggaggagtggcaccacgagcgggagcactacaacctgtctgctgccacctgcagccctggccagatgtgtggccactacacccaggtggtgtgggccaagacagagcgcatcggctgcggcagccacttctgtgagaagctgcagggcgtggaggagaccaacatcgagctgctggtgtgcaactatgagcccccaggaaatgtgaagggcaagaggccctaccaggagggcaccccctgcagccagtgccccagcggctaccactgcaagaacagcctgtgtgagcccatcggcagcccagaagatgcccaggacctgccctacctggtgacagaggcccccagcttccgggccacagaggccagtgacagcaggaagatgggcacccccagcagcctggccaccggcatcccagccttcctggtgacagaggtgtctggcagcctggccaccaaggccctgcctgctgtggagacccaggcccccaccagcctggccaccaaggaccccccatccatggccacagaggccccaccctgtgtgaccacagaggtgcccagcatcctggccgcccacagcctgcccagcctggatgaggagcctgtgaccttccccaagagcacccacgtgcccatccccaagtctgctgacaaggtgacagacaagaccaaggtgcccagccgcagccctgagaacagcctggaccccaagatgagcctgaccggggcccgggagctgctgccccacgcccaggaggaggccgaggccgaggccgagctgccccccagcagcgaggtgctggccagcgtcttccctgcccaggacaagccaggagagctgcaggccaccctggaccacacaggccacaccagcagcaagagcctgcccaacttccccaacaccagcgccacagccaatgccactggaggccgggccctggccctgcagagcagcctgcctggagctgagggccctgacaagcccagcgtggtgtctggcctgaacagcggccctggccacgtgtggggccccctgctgggcctgctgctgctgccccccctggtgctggccggcatcttctag

SEQ ID NO: 77108 - DNA, 2190 bp, Artificial Sequence
  derived and/or modified sequence
cctgggtgcaaccagtcacagctctgcagaggttactgtgattttgcccctgaaggatctgtccacaacttaggaactcacacagcttttggcctgagcccccgttaccaagagaaaggaggtttttgccaaggactccaaggggagtgcacttgatgctggtcgggacccaaagcgcccagccctccctgagacattgtgtgagtcgggctgggcctcaaacacggcccccactgccccaccccagccagggtggtgcttgtgtgggaaggactttaaatccagctgccagacccctggacgggagaaggagagacggctggccaccatgcacggctcctgcagtttcctgatgcttctgctgccgctactgctactgctggtggccaccacaggccccgttggagccctcacagatgaggagaaacgtttgatggtggagctgcacaacctctaccgggcccaggtatccccgacggcctcagacatgctgcacatgagatgggacgaggagctggccgccttcgccaaggcctacgcacggcagtgcgtgtggggccacaacaaggagcgcgggcgccgcggcgagaatctgttcgccatcacagacgagggcatggacgtgccgctggccatggaggagtggcaccacgagcgtgagcactacaacctcagcgccgccacctgcagcccaggccagatgtgcggccactacacgcaggtggtatgggccaagacagagaggatcggctgtggttcccacttctgtgagaagctccagggtgttgaggagaccaacatcgaattactggtgtgcaactatgagcctccggggaacgtgaaggggaaacggccctaccaggaggggactccgtgctcccaatgtccctctggctaccactgcaagaactccctctgtgaacccatcggaagcccggaagatgctcaggatttgccttacctggtaactgaggccccatccttccgggcgactgaagcatcagactctaggaaaatgggtactccttcttccctagcaacggggattccggctttcttggtaacagaggtctcaggctccctggcaaccaaggctctgcctgctgtggaaacccaggccccaacttccttagcaacgaaagacccgccctccatggcaacagaggctccaccttgcgtaacaactgaggtcccttccattttggcagctcacagcctgccctccttggatgaggagccagttaccttccccaaatcgacccatgttcctatcccaaaatcagcagacaaagtgacagacaaaacaaaagtgccctctaggagcccagagaactctctggaccccaagatgtccctgacaggggcaagggaactcctaccccatgcccaggaggaggctgaggctgaggctgagttgcctccttccagtgaggtcttggcctcagtttttccagcccaggacaagccaggtgagctgcaggccacactggaccacacggggcacacctcctccaagtccctgcccaatttccccaatacctctgccaccgctaatgccacgggtgggcgtgccctggctctgcagtcgtccttgccaggtgcagagggccctgacaagcctagcgtcgtgtcagggctgaactcgggccctggtcatgtgtggggccctctcctgggactactgctcctgcctcctctggtgttggctggaatcttctgaaggggataccactcaaagggtgaagaggtcagctgtcctcctgtcatcttccccaccctgtccccagcccctaaacaagatacttcttggttaaggccctccggaagggaaaggctacggggcatgtgcctcatcacaccatccatcctggaggcacaaggcctggctggctgcgagctcaggaggccgcctgaggactgcacaccgggcccacacctctcctgcccctccctcctgagtcctgggggtgggaggatttgagggagctcactgcctacctggcctggggctgtctgcccacacagcatgtgcgctctccctgagtgcctgtgtagctggggatggggattcctaggggcagatgaaggacaagccccactggagtggggttctttgagtgggggaggcagggacgagggaaggaaagtaactcctgactctccaataaaaacctgtccaacctgtggcaa

SEQ ID NO: 77109 - DNA, 948 bp, Artificial Sequence
  derived and/or modified sequence
atgggccaggaccgggaggagaccaacatcgagctgctggtgtgcaactatgagcccccaggaaatgtgaagggcaagaggccctaccaggagggcaccccctgcagccagtgccccagcggctaccactgcaagaacagcctgtgtgagcccatcggcagcccagaagatgcccaggacctgccctacctggtgacagaggcccccagcttccgggccacagaggccagtgacagcaggaagatgggcacccccagcagcctggccaccggcatcccagccttcctggtgacagaggtgtctggcagcctggccaccaaggccctgcctgctgtggagacccaggcccccaccagcctggccaccaaggaccccccatccatggccacagaggccccaccctgtgtgaccacagaggtgcccagcatcctggccgcccacagcctgcccagcctggatgaggagcctgtgaccttccccaagagcacccacgtgcccatccccaagtctgctgacaaggtgacagacaagaccaaggtgcccagccgcagccctgagaacagcctggaccccaagatgagcctgaccggggcccgggagctgctgccccacgcccaggaggaggccgaggccgaggccgagctgccccccagcagcgaggtgctggccagcgtcttccctgcccaggacaagccaggagagctgcaggccaccctggaccacacaggccacaccagcagcaagagcctgcccaacttccccaacaccagcgccacagccaatgccactggaggccgggccctggccctgcagagcagcctgcctggagctgagggccctgacaagcccagcgtggtgtctggcctgaacagcggccctggccacgtgtggggccccctgctgggcctgctgctgctgccccccctggtgctggccggcatcttctag

SEQ ID NO: 77110 - DNA, 1392 bp, Artificial Sequence
  derived and/or modified sequence
atgcacggcagctgcagcttcctgatgctgctgctgcccctgctgctactgctggtagctaccacaggccccgtcggggcactgactgacgaggagaaacggctaatggtggagctccataatctttatcgtgctcaagtatccccaaccgcaagcgacatgctccacatgcggtgggacgaagagctcgccgcttttgccaaggcgtatgctaggcagtgtgtctggggtcacaataaggagagagggaggaggggcgagaatttgttcgcgataaccgacgaaggtatggacgtcccattagccatggaagaatggcaccatgagagggagcattacaatcttagcgcagcaacttgcagcccgggacagatgtgcggacactacacacaggttgtctgggctaagactgaacggattgggtgtgggtctcacttctgcgagaagctgcaaggcgtggaagaaacgaacattgaactgctggtttgcaactatgagcctccggggaacgtcaagggcaaacggccttaccaggaaggcaccccttgttcacagtgtcccagcggataccattgcaaaaactctctgtgcgaacctattggtagcccggaagatgctcaggatttgccttatctcgttacggaggcgccttctttcagggccacggaagcaagtgattctcgcaaaatgggaacacccagttccctcgctaccgggataccagcattcttagttacagaggttagcgggagcctggcaactaaagcacttcccgctgtggagacccaggccccaactagcctcgccaccaaggaccctccctctatggccacggaagctcccccgtgtgtaaccactgaggtgcccagcatcttggcggctcacagcctgccttcgctggacgaggaacctgtgacatttcctaagtctacccatgtgcctattcccaagtctgccgacaaagtcactgacaaaactaaggtgccaagccgtagccctgaaaatagtcttgatcctaagatgagtctgacgggggcccgggagctcctgcctcacgctcaggaagaggcagaagctgaggctgaactacctccatcatctgaagtgctggcatcggtatttccggcgcaggacaagcctggcgagttgcaggctaccctagaccacactggacataccagctccaagagcctgccaaatttccctaatacctcagccacagccaatgctactggcggccgtgccttagccctgcagtcctccctaccgggcgccgagggaccagacaaaccatctgttgtctctgggctgaattctggccccgggcacgtctgggggcccctactgggcctgctgctgctgcctcctctggtcctcgctggaattttctag

SEQ ID NO: 77111 - RNA, 1392 nt, Artificial Sequence
  derived and/or modified sequence
augcacggcucauguagcuucuuaaugcuccugcugccauugcugcuccugcugguagcuacuaccggcccugucggugccuuaaccgaugaggaaaagcgccucaugguagaacugcacaaucucuaucgagcacagguuucccccacagcaagcgauaugcuucacaugcgaugggaugaagagcuggccgcuuuugccaaggccuaugcccgucagugcguguggggucacaacaaggaacggggaaggaggggggaaaaucuguucgcuauuacugaugagggaauggacgugccauuggcuauggaggaauggcaccaugagcgugaacacuacaaucugucugccgcuaccugcagucccggacaaauguguggccauuacacacaagucgugugggcgaaaacggagcggaucggcugcgguagucauuucugcgaaaagcugcaggguguagaggaaacuaauaucgaacugcuaguaugcaacuacgagccuccaggcaacguuaagggcaagcgacccuaccaagaaggaacucccugcucccaaugcccuucuggguaccacugcaagaacucauuaugcgaacccauugggaguccagaggacgcccaggaccugcccuaccuugugacagaggccccgaguuuucgggcuacugaggccucugauucaagaaagauggguacaccuucaucuuuagccaccggcauuccagcauuccucgucacugaagucucugguucacuggccaccaaagcguugccagccgucgagacccaggcuccaacuucucuugcaacgaaggacccuccauccauggcuaccgaggccccacccugcgucaccaccgaggugccuucaauccuugcugcucacagucugcccagccuggacgaggagccagucacauuucccaagaguacacacgucccuauaccaaaaagcgccgacaaggucacagacaagacaaaaguaccuagccgcagucccgagaauucacuggauccuaaaaugagccugacaggggcacgggagcuucugccacaugcucaggaggaggcagaggccgaggccgaacuccccccuucuuccgaaguacuggccuccgucuuuccagcgcaggauaaaccuggcgaacuucaggccacacuagaucacacaggacauacuucaucuaaaagccucccgaauuuccccaauacuagugcaacugcgaacgcaacuggagguagggcucuggcccugcagaguaguuugcccggugcagaagggccugacaaaccaucuguggugagcggacugaacucaggacccggacacgugugggggccccuuuuaggacugcucuugcugcccccccucguccuggccgggauauuuuag

SEQ ID NO: 77112 - RNA, 948 nt, Artificial Sequence
  derived and/or modified sequence
augggccaggauagagaggaaacaaauauugaauuacuugucugcaauuacgagccccccgggaauguuaaaggaaaacguccauaucaagaaggcacuccauguagucaauguccuucugguuaccacugcaagaacucacuuugcgaaccgauuggcagucccgaagacgcucaggaccuaccuuaccuggugacugaggcaccuagcuuuagagcaacggaggcaucugauagccgcaaaaugggaacaccaucaucucuggccacaggcauaccugccuuucuggugaccgaagugucgggcucucuugccacaaaagcgcucccagcugucgaaacacaggccccgacgucucuggcaaccaaggacccaccuucuauggcuacagaagcacccccuugugugaccacagaggugcccagcauccucgccgcccauucccugcccucguuggacgaagagcccguuacguucccuaagucgacacaugugccuaucccgaaauccgcugacaagguaacagauaaaaccaagguuccaucucggagcccugagaacucacuagauccuaagaugagccuuaccggcgcacgggagcuguugccacacgcgcaggaggaagcugaagcggaggcggagcucccuccaagcagugaggugcucgcaucagucuuuccggcacaggauaagcccggcgaacugcaggcaacgcuagaucauacaggucacacuagcuccaagaguuuaccaaauuucccuaacacuucagcuaccgcaaacgcaacaggcggcagagcccuugcauuacaguccucacuuccuggggcagaagguccagauaaaccuagcgugguaagcggccugaacuccggaccuggacauguuuggggcccacugcucggucuacuccugcuccccccucugguguuggcugggauuuucuag

SEQ ID NO: 77113 - RNA, 1392 nt, Artificial Sequence
  derived and/or modified sequence
augcacgggucaugcagcuuccugaugcuucuucugcccuuacugcuguuacugguggcuacgacgggcccaguuggcgccuugacugaugaggagaaaaggcucaugguggaacuacacaaucuguaccgcgcccaaguuucucccacugcauccgauaugcugcacaugagaugggaugaggaacuggccgccuuugcuaaagccuacgcccgacaguguguuuggggacacaacaaggaaagagguaggcggggagagaaucuguuugcuaucaccgaugaaggaauggaugugccccuagccauggaggaguggcaccaugaacgugaacauuacaaucuguccgccgcuaccuguucaccuggacagauguguggucauuauacccaggucgugugggccaagacagagagaaucggauguggcagucauuuuugcgagaaacuucagggaguagaagagaccaauaucgaacugcuggucuguaacuacgaaccaccgggaaacgugaaaggcaaacggccuuaucaggagggaacaccuugcagccagugcccgagcggcuaccacugcaaaaacagucugugugagccaauaggcagcccagaggaugcacaagaccucccuuauuuagugacugaagcucccuccuuuagggccaccgaagcgucugauaguagaaaaauggguacucccucaucuuuggccacggguauccccgcuuuccuuguuaccgaaguuucuggcucacuggcaacuaaagcucugcccgcaguggagacucaagcgcccacuucccuugcgacuaaagacccccccuccauggccacugaggccccaccgugugugacaaccgaagugcccuccauccucgccgcgcacucucucccgagccuugacgaggaaccuguuacguuuccuaaaucuacccauguuccaauucccaaaucugccgacaaggugacugacaagaccaaggugccaagcagaagcccggaaaacucucucgaucccaaaaugucucugaccggugcacgagagcugcuuccgcaugcccaggaagaggccgaagcagaagcugagcugccuccaucuucugaagugcucgcuagcgucuucccggcacaggacaaaccaggggagcugcaggccacucuagaucauacuggucacacaaguuccaaaucucuuccgaacuuucccaacacauccgcgacggcuaaugcaaccggaggcagagcacuugcacugcaaaguucacucccgggugcugaggguccagauaaaccaaguguaguguccggccugaauucugggccaggccaugucugggggccacugcugggcuugcuccugcucccaccacuuguccuggcagguaucuucuag

SEQ ID NO: 77114 - RNA, 948 nt, Artificial Sequence
  derived and/or modified sequence
auggggcaagaccgagaagaaacaaauauagaacuuuuagugugcaauuacgagcccccaggaaacgugaaagguaaaagacccuaccaagagggaacucccuguucucaaugcccaagcggauaccauuguaaaaauagcuuaugcgagccuaucggcuccccugaggacgcccaggaucugccauaucuugucacagaagccccaucauuuagagcaaccgaggccuccgauucucgcaagaugggaacacccuccuccuuggcaaccggcauuccagcauuucucgucacagagguguccggaucucuugccacuaaagcucugcccgcugucgaaacccaggccccgacguccuuagccaccaaagacccuccauccauggcuaccgaggccccaccauguguaacaaccgagguccccucuauucuggccgcucacucucuaccaucauuagacgaagaaccaguuaccuucccuaagaguacccacgucccuaucccaaaaagcgcagauaaagucacugacaagaccaaggucccguccagguccccugaaaacucgcuggacccgaagauguccuugacuggagcucgcgagcuguugccacacgcgcaggaggaagcugaagcggaggcggagcucccuccaagcagugaggugcucgcaucagucuuuccggcacaggauaagcccggcgaacugcaggcaacgcuagaucauacaggucacacuagcuccaagaguuuaccaaauuucccuaacacuucagcuaccgcaaacgcaacaggcggcagagcccuugcauuacaguccucacuuccuggggcagaagguccagauaaaccuagcgugguaagcggccugaacuccggaccuggacauguuuggggcccacuguugggacuguugcuccuuccuccucucguccucgccggcauauuuuag

SEQ ID NO: 77115 - DNA, 1197 bp, Artificial Sequence
  derived and/or modified sequence
atggagttggaggagggcaaggccgggtcagggctgaggcagtattacctgtccaagattgaagagttacagctaatagttaatgacaaaagtcaaaatcttcgtcgcctgcaagcgcagcgtaatgaactgaatgccaaggttaggttgcttagggaggagctccagctgttgcaagagcagggctcctacgtgggcgaggtggtgcgagcgatggataaaaagaaagttctcgtaaaagtgcaccccgaggggaaattcgtcgtggatgtggacaagaacattgacatcaatgacgtcaccccgaattgccgggtggccctgcgcaacgatagctacaccctacacaaaatactgcctaataaggttgaccctttggtcagtttgatgatggttgaaaaggtgccagacagcacctacgagatgattggcggcttagataaacaaataaaggaaattaaggaggttatagagctccccgttaagcaccccgagctgtttgaggccttaggtattgcacaacccaaaggagttctgctttacggcccaccaggcaccgggaagaccctccttgcaagggccgttgcacatcacaccgattgtaccttcatccgggtgtctggcagcgagctggtccagaagttcattggcgaaggagcgaggatggtccgtgagctgtttgttatggcacgggaacacgccccaagcattattttcatggacgagatagatagcataggctccagtcgtctggagggcggatctggcggggacagcgaggtccagcggacaatgctagagctgctgaaccagctcgacggtttcgaagccacaaagaatatcaaagttattatggccactaacaggatagatatcctcgattcagcgctgctgcgcccaggcagaattgaccgaaaaattgagttccccccccctaatgaagaagcccggctcgatatcttaaaaatccatagcaggaagatgaatctgacccggggaatcaacttaaggaaaatagccgagctgatgccgggcgcctcaggtgccgaggtgaaaggggtctgtactgaagctgggatgtatgccctcagggaaagacgagtgcacgtcactcaagaagactttgaaatggctgtagctaaagtcatgcagaaagacagcgagaagaatatgagcatcaaaaaactttggaaatag

SEQ ID NO: 77116 - DNA, 1197 bp, Artificial Sequence
  derived and/or modified sequence
atggaactggaggaaggaaaggcagggagcggactgagacaatattacctgtccaaaatcgaagaactgcaactgatagtgaacgataaatctcaaaatttgaggcggctgcaggcccagcgcaatgagctcaacgcaaaggtgaggctgctgagggaagaactgcagctgcttcaggaacaggggagttacgtcggcgaggtagtcagggcgatggacaaaaagaaagtcctggtcaaggtgcaccctgagggcaagttcgtggtggacgtcgacaagaatattgacattaacgatgtgactcctaactgtagagtagcgttacgcaacgactcttatactttgcataaaattcttcccaataaggtggaccccctcgtgtccctcatgatggtggagaaagtgcctgattccacatacgagatgattggtggcctagataaacaaatcaaggagatcaaagaggtgatcgaacttcctgtgaagcatccggagctgttcgaagccctcggtatagcacaaccgaagggcgtccttttgtatggtccgccaggcacaggcaagacattgctcgccagggcggtggcacaccatacggactgtacttttattcgggtctctggctccgaacttgtccagaaattcatcggcgaaggggccaggatggtgcgcgaactcttcgtgatggcaagggagcatgcaccgagcattatcttcatggacgagatcgactctatcggttcctcacgcttggaaggtgggtctggcggcgacagcgaagttcagcgcacgatgctcgagctcttaaaccaactcgacgggttcgaggccaccaagaacatcaaagtcatcatggccaccaaccgcattgacatactcgatagcgctttactcaggccgggccggattgaccgaaagatcgaatttccacctcccaatgaggaggccaggctcgacattctcaagattcactccaggaaaatgaatcttacacgcggcattaatctgcgtaaaatcgcagaattgatgcctggcgcatcaggagcagaagtaaaaggagtttgtactgaagccggcatgtacgccctaagagagcggcgtgtgcatgttactcaggaagacttcgagatggccgttgccaaagtgatgcagaaggattcagagaaaaatatgagtattaaaaaactctggaaatag

SEQ ID NO: 77117 - DNA, 1197 bp, Artificial Sequence
  derived and/or modified sequence
atggagctggaggagggcaaggccggcagcggcctgcggcagtactacctgagcaagattgaggagctgcagctgattgtgaatgacaagagccagaacctgcggcggctgcaggcccagagaaatgagctgaatgccaaggtgcggctgctgcgggaggagctgcagctgctgcaggagcagggcagctatgtgggggaggtggtgcgggccatggacaagaagaaggtgctggtgaaggtgcaccctgagggcaagtttgtggtggatgtggacaagaacatcgacatcaatgatgtgacccccaactgccgggtggccctgagaaatgacagctacaccctgcacaagatcctgcccaacaaggtggaccccctggtgtccctgatgatggtggagaaggtgcctgacagcacctatgagatgattggaggcctggacaagcagatcaaggagatcaaggaggtgattgagctgcctgtgaagcaccctgagctgtttgaggccctgggcatcgcccagcccaagggcgtgctgctgtatggccccccaggcaccgggaagaccctgctggcccgggctgtggcccaccacacagactgcaccttcatccgggtgtctggcagcgagctggtgcagaagttcatcggggagggcgccaggatggtgcgggagctgtttgtgatggcccgggagcacgcccccagcatcatcttcatggatgaaattgacagcatcggcagcagccggctggagggcggcagcggcggggacagcgaggtgcagaggaccatgctggagctgctgaaccagctggatggctttgaggccaccaagaacatcaaggtgatcatggccaccaacagaattgacatcctggacagcgccctgctgcggcccggcagaattgacaggaagattgagttccccccaccaaatgaggaggcccggctggacatcctgaagatccacagcaggaagatgaacctgacccggggcatcaacctgaggaagattgctgagctgatgcctggggccagcggggctgaggtgaagggcgtgtgcacagaggccggcatgtatgccctgcgggagcggcgggtgcacgtgacccaggaggactttgagatggctgtggccaaggtgatgcagaaggacagcgagaagaacatgagcatcaagaagctgtggaagtag

SEQ ID NO: 77118 - DNA, 1197 bp, Artificial Sequence
  derived and/or modified sequence
atggagctggaggagggcaaggccggcagcggcctgcggcagtactatctaagcaaaatcgaggaactccagctcatcgttaacgataaatcacagaaccttcggcgactgcaggctcagaggaacgagcttaatgctaaagtgaggttgctccgcgaggagcttcagctccttcaggaacagggatcctatgtcggcgaagtcgttagagccatggataaaaagaaagtcctggtgaaggtgcatcctgagggaaagtttgttgtcgacgtggacaaaaacattgatattaatgacgtcacacccaattgcagagttgctttgaggaatgactcatataccctacacaaaatcctgccaaataaggttgaccccttggtctcactgatgatggtagaaaaggtccctgactctacctacgagatgatcggcgggctcgataagcaaattaaagagataaaagaggtaattgagctcccagtcaaacacccagaactttttgaggccctaggtatcgcacagccaaaaggcgttctcctttacgggcctcccggcacaggaaaaaccctcctggcacgcgctgtggcccaccacaccgattgtacgtttatacgcgtctcaggcagcgagctggtgcagaagtttatcggggagggggcccggatggtccgagagctgtttgtgatggctcgcgagcacgcaccgtcgattattttcatggacgaaattgacagcataggtagcagcaggttagagggaggctccggcggagatagcgaggtacagcggaccatgttagaactcttaaaccagttggatgggtttgaggccactaagaacattaaagtgatcatggcaaccaaccggattgacattctggacagtgcactgctaaggccaggtcgcatcgacagaaagatcgaattcccacctcccaatgaggaggctcggttggacatcctcaaaattcactctcgaaagatgaacctcacacgagggattaatctacgcaaaattgcggagttgatgcctggagcatcaggcgcagaagtgaagggcgtgtgcacagaagcgggcatgtacgccctgagggaacggagagtccacgtgacacaggaggacttcgagatggcggtcgccaaggtgatgcagaaggacagcgaaaaaaacatgtcgatcaaaaagctatggaaatag

SEQ ID NO: 77119 - DNA, 1197 bp, Artificial Sequence
  derived and/or modified sequence
atggagctggaggagggcaaggccggcagcggcctgcggcagtactacttgtcaaaaattgaggagctgcagctgatcgtcaacgacaagagccagaacctccggagactacaagcacagaggaacgagcttaatgcgaaagtgcggttgctcagagaagagttgcagctgctgcaggagcagggttcctatgtcggagaggttgttagagcgatggataagaaaaaagtgctggtgaaggttcacccagagggtaagttcgtggtggatgtcgataagaacattgacattaacgacgtgacgcctaactgccgcgttgctctgagaaatgacagctatactctgcataagattctccctaataaagtggacccgctggtgagcctcatgatggtcgagaaggtaccagatagcacgtatgagatgatcggcggcctggacaagcagattaaggaaatcaaggaggtgatcgaattgccagttaagcaccccgagctattcgaagcccttggcatagcacagcctaaaggagtactcctctacgggccgcctggcactggcaaaactctgttggcccgagccgtggcgcatcacaccgactgcaccttcattcgtgtgtccggctctgagctggtacagaaatttattggcgaaggcgctcgcatggttcgcgagctcttcgttatggctagagagcacgctccgtctatcatcttcatggacgagatagactctatcggtagcagccgtctggagggaggaagtgggggcgactctgaagttcaaaggacaatgctcgagctccttaatcaactggacgggtttgaagccacaaagaacattaaagtgataatggccacaaaccgcattgacatcttagactccgccctgctaagacccggtcgcatcgacaggaagatcgaatttccgccacccaacgaggaggcacgcctggatatccttaagatccactctcgtaagatgaacctcacgagggggattaaccttcgaaagattgccgagctgatgccgggtgcgtctggcgctgaagtgaaaggggtctgcacggaggctggaatgtatgcattgcgcgagagacgtgttcacgtaactcaagaggactttgagatggccgtggccaaggtaatgcagaaagattctgaaaagaacatgtccatcaagaagctatggaaatag

SEQ ID NO: 77120 - DNA, 1197 bp, Artificial Sequence
  derived and/or modified sequence
atggagctggaagagggtaaagcaggctcaggcttaaggcagtactatctgagtaagattgaagagttgcagctcatagttaacgacaaatctcagaatctccggaggctccaggcccagaggaatgaacttaatgccaaagttagactcttgcgggaggaactgcaactgttgcaggagcaaggctcgtacgtcggggaggtcgtgagagccatggacaagaagaaagtgctggtgaaggttcatccggaaggcaagtttgttgtggacgttgataaaaacattgatattaacgatgttaccccaaactgccgcgtcgctctgcgcaacgattcgtacaccctgcataagatcctgcctaataaggtggacccactggtgagtctgatgatggtggaaaaagtgcctgacagtacctacgaaatgattggcggacttgacaagcagattaaggagatcaaggaagtgattgagctgccggtcaaacaccctgaactgttcgaagccctgggaatcgctcaaccgaaaggggtgttgctgtatggaccacctggcacaggcaagacattgttggcaagggcagtagcccatcatactgattgcacattcatccgggtgtccgggagtgagctggtacaaaagttcatcggtgaaggggctagaatggtccgcgaactgtttgtcatggctcgagagcacgccccttcaattatctttatggatgaaattgacagtatcggtagttcacgtctcgaggggggatctggcggagacagtgaagtgcagcggaccatgctcgagttgctcaatcaactggacggattcgaagccacaaaaaacataaaggtgatcatggcaactaacagaatcgatatcctagatagtgcacttctaagacccggtaggattgatcgtaaaattgaatttcccccacccaatgaggaggctagactggatatcctcaagatccactcacgcaaaatgaacctgacaagggggataaacctgcggaagattgccgagttaatgcctggcgctagcggagccgaggttaagggcgtgtgtaccgaggcaggaatgtatgccctccgggaaaggagggtgcacgtgacacaagaggattttgagatggcggtggctaaggtgatgcagaaagatagtgagaaaaacatgtctatcaagaaactatggaagtag

SEQ ID NO: 77121 - DNA, 1197 bp, Artificial Sequence
  derived and/or modified sequence
atggagttggaggagggtaaggctggttccggcctgcgacagtactatctcagtaagattgaggagcttcagttgattgtgaatgataaatcacagaacctgcggagactgcaggctcagaggaatgaactcaatgctaaagtccggcttctgcgggaagaacttcaactcctacaggagcaggggtcctacgttggagaggtggtcagagccatggataagaagaaagtgctggttaaagttcatcctgagggtaaattcgtagtggatgtagacaaaaacatcgacattaatgacgtgacgcctaattgcagagtagccctgcgcaacgacagttatacgctgcataagattctccccaacaaagttgatcctctggtcagtctgatgatggtggagaaagtcccggattctacttacgaaatgataggtgggctcgataagcagatcaaggagataaaggaagtcattgagctgcctgtcaaacaccccgagctttttgaggcgcttggaatcgctcaaccgaagggcgtactgctatacggaccccctggcacagggaaaacactgcttgcccgtgcagtagcccatcacacagactgcacgtttataagggtgtcgggttccgagctggtgcaaaaatttattggcgagggggcaagaatggttcgcgaactatttgtcatggctcgggagcatgccccatcgataatctttatggacgagattgactctatcgggagctctcggttagagggaggcagtggcggtgactcggaggtacagcgcacaatgttggaacttctgaaccagctcgacggatttgaggctacaaaaaatatcaaagtgattatggcaaccaacagaatcgatatcttggatagcgccctcctccgcccaggacggattgaccgcaaaatcgagtttcctccaccaaacgaggaggctcggttggatattttgaaaatccactcgaggaagatgaacctgacaagagggatcaacctcaggaagattgcagagcttatgcctggcgcttccggagccgaggtcaagggggtatgtactgaggcagggatgtatgccctacgtgagaggcgtgtgcatgtgactcaggaagacttcgaaatggctgtagcaaaggtgatgcagaaggatagcgaaaaaaacatgagcattaagaagctttggaagtag

SEQ ID NO: 77122 - DNA, 1197 bp, Artificial Sequence
  derived and/or modified sequence
atggagctggaggagggcaaggccggcagcggcctgagacagtactacctgagcaagatcgaggagctgcagctgatcgtgaacgacaagagccagaacctgagaagactgcaggcccagagaaacgagctgaacgccaaggtgagactgctgagagaggagctgcagctgctgcaggagcagggcagctacgtgggcgaggtggtgagagccatggacaagaagaaggtgctggtgaaggtgcaccccgagggcaagttcgtggtggacgtggacaagaacatcgacatcaacgacgtgacccccaactgcagagtggccctgagaaacgacagctacaccctgcacaagatcctgcccaacaaggtggaccccctggtgagcctgatgatggtggagaaggtgcccgacagcacctacgagatgatcggcggcctggacaagcagatcaaggagatcaaggaggtgatcgagctgcccgtgaagcaccccgagctgttcgaggccctgggcatcgcccagcccaagggcgtgctgctgtacggcccccccggcaccggcaagaccctgctggccagagccgtggcccaccacaccgactgcaccttcatcagagtgagcggcagcgagctggtgcagaagttcatcggcgagggcgccagaatggtgagagagctgttcgtgatggccagagagcacgcccccagcatcatcttcatggacgagatcgacagcatcggcagcagcagactggagggcggcagcggcggcgacagcgaggtgcagagaaccatgctggagctgctgaaccagctggacggcttcgaggccaccaagaacatcaaggtgatcatggccaccaacagaatcgacatcctggacagcgccctgctgagacccggcagaatcgacagaaagatcgagttccccccccccaacgaggaggccagactggacatcctgaagatccacagcagaaagatgaacctgaccagaggcatcaacctgagaaagatcgccgagctgatgcccggcgccagcggcgccgaggtgaagggcgtgtgcaccgaggccggcatgtacgccctgagagagagaagagtgcacgtgacccaggaggacttcgagatggccgtggccaaggtgatgcagaaggacagcgagaagaacatgagcatcaagaagctgtggaagtag

SEQ ID NO: 77123 - protein, 792 aa, Artificial Sequence
  derived and/or modified sequence
MITVNPDGKIMVRRCLVTLRPFRLFVLGIGFFTLCFLMTSLGGQFSARRLGDSPFTIRTEVMGGPESRGVLRKMSDLLELMVKRMDALARLENSSELHRAGGDLHFPADRMPPGAGLMERIQAIAQNVSDIAVKVDQILRHSLLLHSKVSEGRRDQCEAPSDPKFPDCSGKVEWMRARWTSDPCYAFFGVDGTECSFLIYLSEVEWFCPPLPWRNQTAAQRAPKPLPKVQAVFRSNLSHLLDLMGSGKESLIFMKKRTKRLTAQWALAAQRLAQKLGATQRDQKQILVHIGFLTEESGDVFSPRVLKGGPLGEMVQWADILTALYVLGHGLRVTVSLKELQSNLGVPPGRGSCPLTMPLPFDLIYTDYHGLQQMKRHMGLSFKKYRCRIRVIDTFGTEPAYNHEEYATLHGYRTNWGYWNLNPKQFMTMFPHTPDNSFMGFVSEELNETEKRLIKGGKASNMAVVYGKEASIWKLQGKEKFLGILNKYMEIHGTVYYESQRPPEVPAFVKNHGLLPQPEFQQLLRKAKLFIGFGFPYEGPAPLEAIANGCIFLQSRFSPPHSSLNHEFFRGKPTSREVFSQHPYAENFIGKPHVWTVDYNNSEEFEAAIKAIMRTQVDPYLPYEYTCEGMLERIHAYIQHQDFCRAPDPALPEAHAPQSPFVLAPNATHLEWARNTSLAPGAWPPAHALRAWLAVPGRACTDTCLDHGLICEPSFFPFLNSQDAFLKLQVPCDSTESEMNHLYPAFAQPGQECYLQKEPLLFSCAGSNTKYRRLCPCRDFRKGQVALCQGCL

SEQ ID NO: 77124 - DNA, 2379 bp, Artificial Sequence
  derived and/or modified sequence
atgatcacagttaaccccgacggcaaaatcatggttcggcgctgtcttgtgaccttgaggccattccgtcttttcgtactggggattggcttttttactttgtgctttctgatgacatccctcgggggccaattttccgctcggagacttggagatagtccctttactatccgcactgaggtgatgggcgggcctgaaagtagaggcgtgctcaggaagatgtctgatctcctggagttaatggtgaaacgcatggacgccctggctcgccttgagaattctagcgaactccacagggcaggtggcgacctgcactttcctgccgacagaatgcccccaggtgcggggctaatggagcgaattcaggcaattgctcagaacgtgagcgatatagccgtgaaggtggaccagatcctgaggcatagtcttttgctccacagtaaggtatccgagggacgtcgagatcagtgcgaagcccccagtgaccccaagttccctgattgcagtggaaaagtggaatggatgcgcgcacgatggacttctgacccgtgttacgctttcttcggggtggacggaaccgagtgtagcttccttatctacttatccgaggttgaatggttctgccctcccctcccctggagaaatcaaacagcggcccagagagctcccaaacctctgcctaaggtgcaggccgttttccgctctaacctgagtcacctgttggatttgatgggctctggcaaagagagcctcatcttcatgaagaagcgcaccaagaggctgacggcgcagtgggcccttgctgcacaacgcctagcgcagaaattgggtgccacccagagggatcagaagcagatcttggtccacatcgggttccttactgaggagtcgggggacgtgttctctccccgcgtgctgaaagggggccctctgggcgagatggtccaatgggccgatatactaaccgccttatacgtgctaggacacggtctccgcgtgacagtgtccttaaaggagcttcaaagtaacctgggggtgcccccaggacgagggtcctgcccgctcaccatgcctctgccgtttgatctgatttataccgactaccacgggctgcagcagatgaaacgccacatgggcttatccttcaaaaaatacagatgtagaatccgagtgattgacacctttggaaccgaacccgcgtataatcacgaggagtacgccaccctgcatggatacagaacgaactggggttattggaatctcaaccccaaacagttcatgacaatgttccctcatactcccgataacagcttcatgggttttgtttccgaagagctgaacgagactgagaaaagactcatcaaaggggggaaagccagcaacatggctgtggtgtatggcaaagaagcatccatttggaaattgcagggaaaagaaaaatttctaggcatcctgaataagtatatggagatccacggaaccgtatactacgaatctcagcggcctccggaggtacctgccttcgtgaagaaccatggccttctgccccagccggagtttcaacagctgctacgaaaggctaagctgtttatcgggtttggattcccttatgaaggcccagctcccctcgaggcgatagccaatgggtgtatattcctccaatcccgattctcacctccccacagctccttaaaccacgagtttttccgaggaaaaccgacctcacgggaagttttctctcagcatccatacgcagaaaactttattggaaaaccacatgtttggactgtggactacaataatagcgaggagttcgaggccgccattaaagccattatgcgaacccaagtggacccttatctcccgtatgagtacacttgtgagggaatgctggaaagaatccatgcctacatccaacatcaggacttctgtagggctcctgaccccgctcttccggaagcccacgcaccacagagcccatttgtacttgcccctaacgctacccatttagagtgggcgagaaacactagcttggccccgggcgcgtggccacccgctcatgcactgcgggcttggctggcggtccctgggcgcgcctgtactgatacatgtctcgaccatggccttatttgcgagcctagcttctttccatttctaaatagccaggacgcctttctcaagctgcaagtcccctgtgattccaccgaatctgagatgaatcacctgtaccctgccttcgctcagcccgggcaagaatgttacttacagaaggagccgctgttgttcagttgcgccgggtcaaacacaaaatatagacgactttgcccctgcagggactttaggaaaggtcaggtcgcgctgtgtcaaggatgtctgtag

SEQ ID NO: 77125 - DNA, 2379 bp, Artificial Sequence
  derived and/or modified sequence
atgatcaccgtgaacccagatggcaagatcatggtgcggcgctgcctggtgaccctgcggcccttccggctgtttgtgctgggcatcggcttcttcaccctgtgcttcctgatgaccagcctgggcggccagttcagcgcccggcggctgggggacagccccttcaccatcagaacagaggtgatgggcggccctgagagcagaggagtgctgaggaagatgtctgacctgctggagctgatggtgaagaggatggatgccctggcccggctggagaacagcagcgagctgcaccgggccggcggggacctgcacttccctgctgacaggatgcctcctggagctggcctgatggagcgcatccaggccatcgcccagaatgtgtctgacattgctgtgaaggtggaccagatcctgcggcacagcctgctgctgcacagcaaggtgtctgagggcagaagagaccagtgtgaggcccccagcgaccccaagttcccagactgcagcggcaaggtggagtggatgagggcccgctggaccagtgacccctgctacgccttcttcggcgtggatggaacagagtgcagcttcctgatctacctgtctgaggtggagtggttctgcccccccctgccctggaggaaccagacagctgcccagagggcccccaagcccctgcccaaggtgcaggccgtgttccgcagcaacctgagccacctgctggacctgatgggcagcggcaaggagagcctcatcttcatgaagaagaggaccaagaggctgacagcccagtgggccctggccgcccagaggctggcccagaagctgggcgccacccagagggaccagaagcagatcctggtgcacatcggcttcctgacagaggagagcggagatgtgttcagcccccgggtgctgaagggcggccccctgggggagatggtgcagtgggccgacatcctgacagccctgtatgtgctgggccacggcctgcgggtgacagtgtccctgaaggagctgcagagcaacctgggcgtgcccccaggccggggcagctgccccctgaccatgcccctgccctttgacctgatctacacagactaccacggcctgcagcagatgaagaggcacatgggcctgtccttcaagaagtaccgctgccgcatccgggtcatcgacacctttggaacagagcccgcctacaaccacgaggagtatgccaccctgcacggctaccgcaccaactggggctactggaacctgaaccccaagcagttcatgaccatgttcccccacaccccagacaacagcttcatgggctttgtgtctgaggagctgaatgaaacagagaagaggctcatcaagggcggcaaggccagcaacatggctgtggtgtatggcaaggaggccagcatctggaagctgcagggcaaggagaagttcctgggcatcctgaacaagtacatggagatccacggcaccgtgtactatgagagccagaggcctcctgaggtgcctgcctttgtgaagaaccacggcctgctgccccagcctgagttccagcagctgctgaggaaggccaagctgttcatcggcttcggcttcccctatgagggccctgcccccctggaggccatcgccaacggctgcatcttcctgcagagccgcttcagccccccccacagcagcctgaaccacgagttcttccggggcaagcccaccagccgggaggtgttcagccagcacccctatgcagagaacttcatcggcaagccccacgtgtggacagtggactacaacaacagcgaggagtttgaagctgccatcaaggccatcatgaggacccaggtggacccctacctgccctatgagtacacctgtgagggcatgctggagcgcatccacgcctacatccagcaccaggacttctgccgggccccagaccctgccctgcctgaggcccacgccccccagagcccctttgtgctggccccaaatgccacccacctggagtgggccaggaacaccagcctggcccctggggcctggcccccagcccacgccctgcgggcctggctggccgtgcccggccgggcctgcacagacacctgcctggaccacggcctcatctgtgagcccagcttcttccccttcctgaacagccaggatgccttcctgaagctgcaggtgccctgtgacagcacagaaagtgagatgaaccacctgtacccagcctttgcccagcccggccaggagtgctacctgcagaaggagcccctgctcttcagctgtgccggcagcaacaccaagtaccgccgcctgtgcccctgccgggacttcaggaagggccaggtggccctgtgccagggctgcctgtag

SEQ ID NO: 77126 - DNA, 4492 bp, Artificial Sequence
  derived and/or modified sequence
gcggggccggacgccggacaccagagcgcgggcggcggagccagcgggcgagagagcgcgcggcgggcgcgggttgccctcgtcgagagccatgggcgcggcgcggcgcggggctgaggatcggcgcggcccggaggcgctggggaccggggcgcgggcccggggccgcctttagccggcaccgagggcgcggggccggggatgagggcgcccgccgcggggagcccgtctgcgcgccgcggcaccttcccgcccagcgagcgagcccgagcaggcagacgcgcggccggcggtctgggggcgcgccgcctcccggtccccaaaatgtgaagcggggagggcggagacgcagagacggcccggccgggcgccctcgccgccctccggcagccgcgccgctccctccgctgcacgcccaggcctgagcagcgaggccaccgggccgcgcgctcccagcttcgctcggacgcggcttcggcccgcagagggttcgtggcccggacgcggcgagagctgggcccaggacggtgcgtccggcctcgcccgcggctgctcgcaccaacaagtttgaacaatgatcaccgtcaaccccgatgggaagataatggtcagaagatgcctggtcaccctgagaccctttcggctttttgtcctgggcatcggcttcttcactctctgcttcctgatgacgtctctgggaggccagttctcggcccggcgcctgggggactcgccattcaccatccgcacagaagtgatggggggccccgagtcccgcggcgtcctgcgcaagatgagcgacctgctggagctgatggtgaagcgcatggacgcactggccaggctggagaacagcagtgagctgcaccgggccggcggcgacctgcactttcccgcagacaggatgccccctggggccggcctcatggagcggatccaggctattgcccagaacgtctccgacatcgctgtgaaggtggaccagatcctgcgccacagtctgctcctgcacagcaaggtgtcagaaggccggcgggaccagtgtgaggcacccagtgaccccaagttccctgactgctcagggaaggtggagtggatgcgtgcccgctggacctctgacccctgctacgccttctttggggtggacggcaccgagtgctccttcctcatctacctcagtgaggtcgagtggttctgccccccgctgccctggaggaaccagacggctgcccagagggcacccaagcccctccccaaagtccaggcagttttccgaagcaacctgtcccaccttctggacctgatgggcagcgggaaggagtccctgatcttcatgaagaagcggaccaagaggctcacagcccagtgggcgctggctgcccagcgcctggcacagaagctgggggccacccagagggaccagaagcagatcctggtccacatcggcttcctgacggaggagtccggggacgtgttcagccctcgggtcctgaagggcgggcccctaggggagatggtgcagtgggcggacattctgactgcactctatgtcctgggccatggcctgcgggtcacagtctccctgaaggagctgcagagtaacttaggggtaccgccaggccggggaagctgcccgctcaccatgcccctgcccttcgacctcatctacaccgactaccacggcctgcagcagatgaagcggcacatgggactctccttcaagaagtaccggtgccgaatcagggtcatcgacaccttcgggacggaacctgcgtacaaccacgaggagtacgccacgctgcacggctaccggaccaactggggctactggaacctcaaccccaagcagttcatgaccatgtttcctcatacccccgacaactccttcatgggcttcgtgtccgaggagctcaacgagacggagaagcggctcatcaaaggcggcaaggccagcaacatggccgtggtgtacggcaaggaggcgagcatctggaagctccaggggaaggagaagttcctgggcatcctgaacaaatacatggagatccatggcaccgtgtactacgagagccagcggccccccgaggtgccagcctttgtgaagaaccacggcctcttaccgcagcctgagtttcagcagctgctgcgcaaggccaaactcttcatcgggtttggcttcccctacgagggccccgcccccctggaggccatcgccaatggttgcatcttcctgcagtcccgcttcagcccgccccacagctccctcaaccacgagttcttccgaggcaagcccacctccagagaggtgttctcccagcatccctacgcggagaacttcatcggcaagccccacgtgtggacagtcgactacaacaactcagaggagtttgaagcagccatcaaggccattatgagaactcaggtagacccctacctaccctacgagtacacctgcgaggggatgctggagcggatccacgcctacatccagcaccaggacttctgcagagctccagaccctgccctaccagaggcccacgccccgcagagcccctttgtcctggcccccaatgccacccacctcgagtgggctcggaacaccagcttggctcctggggcctggccccccgcgcacgccctgcgggcctggctggccgtgcctgggagggcctgcaccgacacctgcctggaccacgggctaatctgtgagccctccttcttccccttcctgaacagccaggacgccttcctcaagctgcaggtgccctgtgacagcaccgagtcggagatgaaccacctgtacccggcgttcgcccagcctggccaggagtgctacctgcagaaggagcctctgctcttcagctgcgccggctccaacaccaagtaccgccggctctgcccctgccgcgacttccgcaagggccaggtggccttgtgccagggctgtctgtgaatccgcctctgccgccctgcctggcacccacgctggctctctcctgccgcgggagaaagcaccagcaggttctgagccctggctgcttgtcctcctcgcaacccccccaggccggagcttccttccttagccgggaagctggcagaggagagccgtgcccgggaataggaggaggcagcatgccgagcccctgggacctcccaggcaggctccggttctctcctggggactcacagaagcatcgtggccaagcaggtgtcggactgctcagagtccgcatggcccaggagcaggtggtcggaggcccctggctttgtgcaaggccggatctgggccaggtggcgaaaggggcccagtcgttcttgggcccaggatggggcctctagacttgcaagggagaggaacagggaccaggctgccccacggtccctgaagggtccaaggaggggccctccccatggccctggagagtgggcctgggtggtacctgctccaggcagggaaactgggggctcgcccttctcctgtgaggggagccaggcacacagggcccattggtgtttgggatgtggacagaggggcagggggctgggagaaggctaagccgaggggtcctgtttgtgcctccccttagtcccttccctcccgatttcccgattcccccaccctccctctacacttgaggaccacagttgggggtgtagggaccacccagaccctggttgaattgtttctctctcctgcttgttccaacccttttcactctgggcttctcccaaaacccatcctggcatgacctgcaactccaggtggtggatttgttccaaagcctcaatccctaccccctccaaggggcaggtttccagtccagcctcagagatcaggctctgggacccctgcctggggggtggccttcatgcactagccacttccgcaggtgctgactcccgcactccctggcattttttgcagacaagggcttgggatggaccctcagccccatggtacgccctgcccagtttccagttgccctgtccacttaccctaggtagccccccaccccatcagtgccgagtccttgtccctacctccagcttcctccagcctcaaaccgcctctggatctagctgtccttctccgagtggcacgcctgccccaggatgccccctttccctcccccccatgcccagagccccgcctgcctcagcgggtcaggccttcagaacactgccacccacccagttttataatcccgctccctctccaggcaaccccacccaccagcctaggcctgctcctccacccttcccgggaggcagccccgggatgctgagagttggtggaggggccaggctggacgcttcctgtgggagtcccctccagacctggctggcccctgcagccacagaaaccacgatggcaaaaaatctcattggttctcaaggactaacctgtgggggaaagcaatagagacactctttttctctcttttttttaaagatttatttcttgaaataataaatattttattgggatgtg

SEQ ID NO: 77127 - DNA, 2379 bp, Artificial Sequence
  derived and/or modified sequence
atgatcaccgtgaaccccgacggcaagatcatggtgcggcggtgcctcgtaacactgagaccgtttagactcttcgttctaggtattggcttctttactctatgcttcctgatgacctcgttaggcggccaattctcagcgcgccgactgggagactcgcctttcaccattcgaacggaggtgatgggcgggcccgagagtagaggagtgctccgcaagatgagcgatctgcttgagctgatggtaaaacgtatggacgccctcgctagactcgagaatagctctgaactccatcgggccggaggcgatcttcattttcctgccgacaggatgccccccggggccggtctcatggaaaggattcaagccatcgcacagaatgtttccgacattgcggtgaaggttgatcaaatattgcgccattctctcctgttacatagcaaggtcagcgagggccgacgggatcagtgcgaagccccctcggatccaaaattccctgactgttccggaaaagtggagtggatgagggcccgatggacttcggacccctgttatgctttctttggagtggacggtaccgaatgctcattcctcatttatctgtccgaggtggagtggttttgccctcctctgccctggcgaaaccagaccgctgcacagcgcgcacccaagcccctgcccaaagtgcaggccgtatttagatccaacctttctcacctcttggacttgatggggtctggtaaagagagcttgattttcatgaagaagaggaccaagcggctgacagcgcagtgggcactggctgcccagaggctggcccaaaagctgggggctacccagagggaccagaagcagatattggtccacataggtttcttgacagaggaatctggggacgtgttctccccaagagtcctaaaaggcggccctctcggcgagatggtgcagtgggctgatatcctgaccgcactctacgtgctgggccatggccttagagttacagtgtccctaaaggagctccagagtaacctgggtgtgcctcccggcaggggaagctgcccactgacaatgcccctgccttttgacttgatctacactgactaccatgggctgcagcagatgaaacggcacatgggattatctttcaagaagtaccggtgcaggattcgcgtgatcgatacgttcggaaccgaacctgcatacaaccatgaggaatacgcaacacttcacggctatcgaaccaattggggatactggaatctcaaccccaagcagtttatgactatgttcccacatacgcctgacaactcatttatgggattcgtgagtgaggaactgaacgagactgaaaagaggctcatcaagggtgggaaagcttccaatatggccgtggtttatggcaaggaagcatccatttggaaactgcagggaaaggaaaaatttctggggatccttaataaatatatggaaattcatggaacagtatactatgagtcacagcggccccctgaagtgccagcatttgtgaagaaccatggcctgctaccccagcctgagtttcagcagctgttacggaaggccaagctcttcatcgggttcggctttccgtatgaaggcccagctcctttagaggctattgctaacggatgcatattcctgcagagcaggttctcaccaccgcactcaagtttgaaccacgagtttttccgggggaaacccacctcacgagaggtattttctcaacacccttatgccgagaactttatagggaagcctcacgtttggacagtggattataataactcagaggaatttgaggccgccatcaaggccatcatgcgtacacaagttgatccttacctcccttatgaatacacctgtgaagggatgcttgagaggatccacgcctacatccaacaccaggatttttgtagggctcccgaccctgctttacccgaggctcacgcccctcaatctccattcgtcctcgcccccaacgcaacacatctggagtgggctaggaacaccagcctcgctcccggagcctggcccccagcccacgctcttcgggcctggctggccgtgccaggtagggcttgcactgacacctgtcttgatcatggtctgatctgtgagccatcttttttcccattccttaacagtcaagacgccttccttaaacttcaggtgccttgcgatagcaccgagtcagagatgaaccatctgtaccctgcgttcgctcagcctggccaggaatgctacctgcagaaggaacctctgctgttcagttgcgccggcagcaacacgaagtatcgcagactatgcccttgtcgggactttcggaagggccaggtagcactgtgccaggggtgtctttag

SEQ ID NO: 77128 - DNA, 2379 bp, Artificial Sequence
  derived and/or modified sequence
atgatcacagtcaacccggacgggaaaataatggtccgaaggtgcctggtcacactcaggcccttcaggctatttgtgttgggaataggcttctttactctgtgctttctgatgactagtctgggaggacaatttagcgcgcgacggctgggcgattcaccatttaccatcagaactgaggtgatggggggtccagaatctcgcggagtactccgaaagatgagcgatctgctggagctcatggtcaagcgcatggatgcactggccagattagaaaacagttctgaactgcacagggccggtggagatctgcattttcccgctgacaggatgcccccaggtgcgggactcatggagcgtattcaggccatagctcagaacgtctctgatatcgccgttaaggtcgaccagattctgagacattcgctgctcctccacagcaaagttagcgagggacggagggaccaatgtgaggcaccaagcgatccgaaattcccagattgcagcggaaaggtggaatggatgcgagcacgctggacttctgatccttgctacgccttttttggcgtggatggaaccgagtgctcattcttaatttacctatctgaggtagagtggttctgcccaccgctgccttggagaaaccagactgccgctcaacgcgcaccgaaacctctgcctaaggtacaagccgtcttcaggagcaatttgtcacatctgttagatcttatgggatctggaaaagaaagcctcatattcatgaagaagagaactaaaagactgaccgcacagtgggccctggccgctcaacgccttgcacagaagctgggcgcaactcagagggatcagaagcagatcctggtgcacattggctttctaactgaagagtccggcgacgttttcagcccaagggtgctgaaaggaggcccactgggcgagatggtgcagtgggccgacattctaaccgctttgtacgtgttgggccacgggctgcgggtcactgtgtccctgaaggaactccagtccaatctcggagttccgcctggcagaggcagctgcccgctgacaatgccactgccttttgatcttatctataccgactatcacggcttacagcagatgaaacggcacatgggcttgtccttcaagaaatacaggtgcaggattcgcgtaattgatacatttggcactgagcctgcctataatcacgaagagtacgccactttgcatggttatagaaccaactggggatactggaaccttaatccaaagcagttcatgacaatgtttccacacactcccgataacagctttatgggcttcgtgtccgaagagctgaatgaaactgaaaaacggctgatcaaggggggtaaagcctccaacatggcagtagtgtacggcaaggaggcctcgatctggaaactgcagggcaaggaaaagttcttgggcatcttgaacaagtatatggaaatccacggcaccgtgtattatgagtctcagcgccctcctgaagtgccagcctttgtcaagaatcacggactactgcctcaaccagagttccagcaactgctgaggaaggccaaactctttatcggcttcgggtttccgtacgaaggtcccgctcccctcgaggccatagccaacggctgtatctttcttcaaagtcggttcagccccccacacagttcacttaaccatgaatttttccgcggaaagcctaccagccgggaagtgttttcgcaacacccctacgcagagaactttatagggaagcctcacgtatggacggtggattacaataattctgaggaattcgaagcagccataaaggccattatgagaacccaggtcgacccatacctgccctacgagtatacctgcgagggaatgcttgagaggattcacgcctacatacagcaccaagacttttgtagggccccagaccccgctttgccagaggcccacgccccacagtcacctttcgtgttggcgcctaacgcaacccacctggaatgggcccgtaacactagtctcgctccaggcgcttggcccccagcccacgcccttcgagcctggctggcagtgcctggacgggcttgtaccgatacatgcctcgaccacggcctgatttgtgaaccaagcttctttcctttcctcaacagtcaggatgccttccttaaactccaagttccatgcgactccaccgagtcagagatgaaccacctctatcccgcatttgcccaaccagggcaggaatgctatctccagaaggagcccctgctcttctcatgtgccggatcaaacacaaagtacaggcgactctgtccttgtagagacttcagaaagggacaggtggccctctgtcaaggatgtctgtag

SEQ ID NO: 77129 - DNA, 2379 bp, Artificial Sequence
  derived and/or modified sequence
atgatcaccgtgaaccccgacggcaagatcatggtgagaagatgcctggtgaccctgagacccttcagactgttcgtgctgggcatcggcttcttcaccctgtgcttcctgatgaccagcctgggcggccagttcagcgccagaagactgggcgacagccccttcaccatcagaaccgaggtgatgggcggccccgagagcagaggcgtgctgagaaagatgagcgacctgctggagctgatggtgaagagaatggacgccctggccagactggagaacagcagcgagctgcacagagccggcggcgacctgcacttccccgccgacagaatgccccccggcgccggcctgatggagagaatccaggccatcgcccagaacgtgagcgacatcgccgtgaaggtggaccagatcctgagacacagcctgctgctgcacagcaaggtgagcgagggcagaagagaccagtgcgaggcccccagcgaccccaagttccccgactgcagcggcaaggtggagtggatgagagccagatggaccagcgacccctgctacgccttcttcggcgtggacggcaccgagtgcagcttcctgatctacctgagcgaggtggagtggttctgcccccccctgccctggagaaaccagaccgccgcccagagagcccccaagcccctgcccaaggtgcaggccgtgttcagaagcaacctgagccacctgctggacctgatgggcagcggcaaggagagcctgatcttcatgaagaagagaaccaagagactgaccgcccagtgggccctggccgcccagagactggcccagaagctgggcgccacccagagagaccagaagcagatcctggtgcacatcggcttcctgaccgaggagagcggcgacgtgttcagccccagagtgctgaagggcggccccctgggcgagatggtgcagtgggccgacatcctgaccgccctgtacgtgctgggccacggcctgagagtgaccgtgagcctgaaggagctgcagagcaacctgggcgtgccccccggcagaggcagctgccccctgaccatgcccctgcccttcgacctgatctacaccgactaccacggcctgcagcagatgaagagacacatgggcctgagcttcaagaagtacagatgcagaatcagagtgatcgacaccttcggcaccgagcccgcctacaaccacgaggagtacgccaccctgcacggctacagaaccaactggggctactggaacctgaaccccaagcagttcatgaccatgttcccccacacccccgacaacagcttcatgggcttcgtgagcgaggagctgaacgagaccgagaagagactgatcaagggcggcaaggccagcaacatggccgtggtgtacggcaaggaggccagcatctggaagctgcagggcaaggagaagttcctgggcatcctgaacaagtacatggagatccacggcaccgtgtactacgagagccagagaccccccgaggtgcccgccttcgtgaagaaccacggcctgctgccccagcccgagttccagcagctgctgagaaaggccaagctgttcatcggcttcggcttcccctacgagggccccgcccccctggaggccatcgccaacggctgcatcttcctgcagagcagattcagccccccccacagcagcctgaaccacgagttcttcagaggcaagcccaccagcagagaggtgttcagccagcacccctacgccgagaacttcatcggcaagccccacgtgtggaccgtggactacaacaacagcgaggagttcgaggccgccatcaaggccatcatgagaacccaggtggacccctacctgccctacgagtacacctgcgagggcatgctggagagaatccacgcctacatccagcaccaggacttctgcagagcccccgaccccgccctgcccgaggcccacgccccccagagccccttcgtgctggcccccaacgccacccacctggagtgggccagaaacaccagcctggcccccggcgcctggccccccgcccacgccctgagagcctggctggccgtgcccggcagagcctgcaccgacacctgcctggaccacggcctgatctgcgagcccagcttcttccccttcctgaacagccaggacgccttcctgaagctgcaggtgccctgcgacagcaccgagagcgagatgaaccacctgtaccccgccttcgcccagcccggccaggagtgctacctgcagaaggagcccctgctgttcagctgcgccggcagcaacaccaagtacagaagactgtgcccctgcagagacttcagaaagggccaggtggccctgtgccagggctgcctgtag

SEQ ID NO: 77130 - protein, 326 aa, Artificial Sequence
  derived and/or modified sequence
MNTSPGTVGSDPVILATAGYDHTVRFWQAHSGICTRTVQHQDSQVNALEVTPDRSMIAAAGYQHIRMYDLNSNNPNPIISYDGVNKNIASVGFHEDGRWMYTGGEDCTARIWDLRSRNLQCQRIFQVNAPINCVCLHPNQAELIVGDQSGAIHIWDLKTDHNEQLIPEPEVSITSAHIDPDASYMAAVNSTGNCYVWNLTGGIGDEVTQLIPKTKIPAHTRYALQCRFSPDSTLLATCSADQTCKIWRTSNFSLMTELSIKSGNPGESSRGWMWGCAFSGDSQYIVTASSDNLARLWCVETGEIKREYGGHQKAVVCLAFNDSVLG

SEQ ID NO: 77131 - protein, 327 aa, Artificial Sequence
  derived and/or modified sequence
MNTSPGTVGSDPVILATAGYDHTVRFWQAHSGICTRTVQHQDSQVNALEVTPDRSMIAAAGYQHIRMYDLNSNNPNPIISYDGVNKNIASVGFHEDGRWMYTGGEDCTARIWDLRSRNLQCQRIFQVNAPINCVCLHPNQAELIVGDQSGAIHIWDLKTDHNEQLIPEPEVSITSAHIDPDASYMAAVNSTGNCYVWNLTGGIGDEVTQLIPKTKIPAHTRYALQCRFSPDSTLLATCSADQTCKIWRTSNFSLMTELSIKSGNPGESSRGWMWGCAFSGDSQYIVTGEPRPGLPHPWPPALASRASPPRLQLPLCWGRLLGLHLRS

SEQ ID NO: 77132 - DNA, 981 bp, Artificial Sequence
  derived and/or modified sequence
atgaacacatcaccggggacagtaggctcggacccggtgattttagccacggccggctacgatcacaccgtgaggttttggcaggcccattccgggatctgcactaggaccgtccagcatcaagattcccaggtgaacgcactcgaagttacaccagatcgaagcatgattgcggcagccgggtatcagcatattcgcatgtacgacttgaatagtaataatcctaaccccatcatctcatacgatggcgtgaataaaaatattgcctccgtgggcttccacgaagacggaagatggatgtacactggtggagaagattgcactgcaagaatctgggacctgcggtctaggaatctacaatgtcagagaattttccaggttaacgctcccattaactgcgtctgcctgcaccccaaccaggcagagctgatcgtcggggaccagagcggagcaatccatatctgggacctgaagactgatcataacgaacagttgattccagagcctgaagtgtcaataacgagtgcccacatcgatcccgacgcgagctatatggccgccgtgaattcgacaggaaattgttacgtgtggaatctcacgggaggcatcggagacgaagtgactcagctgatccctaagaccaagatccccgcacacacccgctacgctctgcagtgtagattttcgccagattcaaccctcctggccacatgctccgcggaccagacttgtaagatctggagaacctcaaatttcagcctcatgactgagctttccatcaagagcgggaatcccggggaatctagccgtggctggatgtggggatgcgcttttagcggtgacagccagtacatagttactgcctcttccgataacctggctcgtctctggtgtgtggagaccggggagattaagcgcgaatacggcggtcatcagaaggccgtggtctgtctggcctttaatgactccgttctggggtag

SEQ ID NO: 77133 - DNA, 981 bp, Artificial Sequence
  derived and/or modified sequence
atgaacacttcccccggaaccgtgggtagcgaccccgtgattctggccaccgcgggctacgatcatactgtgcggttctggcaggcccacagcggcatctgtactaggactgtgcagcaccaggactcccaagtgaacgccttggaagtgacccccgaccgctcaatgattgccgccgccggatatcaacatatcagaatgtacgacctgaattccaataaccccaaccccatcatcagttatgatggtgtgaataagaacattgcatctgtcggcttccatgaggatggccgctggatgtacacaggcggtgaggattgcaccgctagaatctgggacctgcgttctagaaacctgcaatgccaacggattttccaggttaatgcccccatcaactgcgtttgcctgcacccgaatcaggcagaactcatagtcggcgaccagtcgggtgctattcacatttgggatttgaagacggatcataatgaacaactaatccccgagcctgaggtgagcattaccagtgcccacatcgatcccgacgcctcttacatggctgccgtgaactccactggcaactgttacgtctggaacctgaccggtggcatcggcgatgaggttacccagctgatccccaaaaccaaaattcccgcccacactaggtatgctctacaatgtcgtttttcacctgacagtaccctccttgccacttgtagtgccgatcagacttgcaaaatctggagaactagtaatttcagtctgatgactgaactgagcataaagtccggcaatccaggagagagttcccgaggctggatgtggggatgcgcctttagtggagactctcaatatatcgtgaccgcttcttctgacaacctcgccaggttgtggtgcgtggagactggcgaaatcaagagggaatacggaggccatcagaaggcagtggtgtgtcttgccttcaatgattcagtgctcggatag

SEQ ID NO: 77134 - DNA, 984 bp, Artificial Sequence
  derived and/or modified sequence
atgaacacaagccccggaactgtaggctcggacccagtaatcctcgccaccgccggctatgaccatacagtgcgcttttggcaggcccattcaggcatatgcacacgcacggttcagcaccaggatagtcaggtgaacgcccttgaggtgacccccgatagatcaatgattgcagctgcaggataccagcatattcgcatgtacgatctgaactcaaataatccaaaccccattatatcctatgatggggtcaacaaaaacatcgccagtgtaggttttcatgaggacggtcggtggatgtacacaggcggggaggactgtacagcgagaatttgggatctgcggtctaggaatctgcaatgccagaggatcttccaagtgaacgcaccgatcaattgtgtgtgcctgcatccaaatcaggccgagctgattgtgggggatcagagcggagccatacatatttgggacctgaaaactgaccataatgagcaattgatcccagagccggaggtatcgattacatcggcccacatcgatcctgatgctagctatatggctgctgtgaattccaccggcaattgctatgtctggaacttaactgggggtatcggagatgaggttacgcagctgattccaaagacaaagatccctgcgcacaccaggtatgcacttcaatgccgattctctccagattccactttgctggccacgtgcagcgctgaccagacttgtaaaatttggcggaccagtaacttcagtctcatgactgaactgtctattaagagcggcaatccaggcgagtcgtcgagagggtggatgtggggttgtgcatttagcggggacagccaatatattgtgaccggggaacccaggccagggctgccgcacccgtggccacccgcactcgcttcaagggctagtcctccacgactgcaacttcccctgtgctggggccgactgttggggctccatctgaggtcctag

SEQ ID NO: 77135 - DNA, 981 bp, Artificial Sequence
  derived and/or modified sequence
atgaacacctcaccagggacggtgggctctgatcctgtgatcctggccactgccgggtacgaccacactgtgagattctggcaggctcacagcggaatatgtacacgtaccgttcagcaccaggactcgcaggtcaacgcactggaggtgacccctgatagatcaatgattgccgccgcggggtatcagcacatacgtatgtacgatctgaactccaataatcccaaccccatcattagctacgatggagttaacaagaacattgctagtgttgggttccatgaggatggccgctggatgtacacagggggggaggattgtactgcaagaatctgggacctcaggtccaggaatcttcagtgccagcggatttttcaggtaaatgctcccatcaactgcgtttgcctgcatcctaatcaagcagaattaattgtgggcgaccagtccggggctatacacatctgggatctcaaaacagaccacaacgagcaactgattcccgagccagaggtgagtatcaccagcgcccacatcgaccccgatgcctcttacatggctgctgtcaatagcactggaaactgctacgtctggaaccttactggtgggattggagacgaagttacccagctgatacctaagactaagattccagcccatacccggtacgccctgcagtgtaggttttctcctgatagtaccctcctggccacttgctcagccgaccagacatgcaagatctggagaaccagcaacttcagcctgatgacagagctttccattaaaagcggtaacccgggagaatcctctagagggtggatgtggggatgcgctttttccggggactcccagtatatcgttaccgcttcctcagataatctcgcccgattatggtgcgtggagacaggggagatcaagagggagtatgggggtcaccaaaaagccgtagtgtgcctggcctttaacgacagtgtcctagggtag

SEQ ID NO: 77136 - DNA, 981 bp, Artificial Sequence
  derived and/or modified sequence
atgaatacgagccccggtaccgttgggagtgaccccgtgattcttgctacagctggatacgaccacactgtgagattctggcaggcacatagtgggatttgcacccgaacggtccagcatcaggactcacaagtaaacgccctcgaagtgaccccggacaggtcaatgatcgccgccgccggctaccagcacattcgaatgtatgacctcaactccaacaatccgaatccgatcatttcctatgacggggtcaataagaatatcgctagcgtgggctttcacgaggacggccgttggatgtacacaggcggcgaggactgtaccgcccggatttgggatctacggtcacgcaacctgcagtgccagagaatttttcaggttaacgctcccatcaattgcgtttgcctccaccccaaccaagctgagcttatagtgggggaccaaagcggagccatccacatctgggatctgaagaccgatcacaatgagcaattgatacccgaaccagaggtcagtatcacatccgcacacattgatccggatgcttcttacatggccgctgtgaactcaaccggcaactgctatgtctggaatctaactgggggaattggggacgaagtaacccagctcatcccaaaaacgaagatcccagcccacacaagatatgctctccagtgtcgcttttcgccagattccacgctccttgccacttgctccgcggaccaaacatgcaaaatctggagaacgtctaacttttcgttgatgactgagcttagcatcaagtcgggtaatcctggagaatcatcgcgtggctggatgtggggatgcgccttttcaggggacagtcaatacatagttactgcatctagtgataatctggctagactctggtgcgtggagacaggagagatcaaacgggagtacggcggacatcagaaggcggtggtgtgtctagcgttcaatgattccgtgctggggtag

SEQ ID NO: 77137 - DNA, 981 bp, Artificial Sequence
  derived and/or modified sequence
atgaacaccagccctggcaccgtgggcagtgaccccgtcatcctggccacagctggctatgaccacacagtgcgcttctggcaggcccacagcggcatctgcaccaggacagtgcagcaccaggacagccaggtgaatgccctggaggtgaccccagaccgctccatgattgctgctgctggctaccagcacatccgcatgtatgacctgaacagcaacaaccccaaccccatcatctcctatgatggagtgaacaagaacatcgcctctgtgggcttccatgaagatggccgctggatgtacacaggaggagaggactgcacagcccgcatctgggacctgcggagcaggaacctgcagtgccagaggatcttccaggtgaatgcccccatcaactgtgtgtgcctgcaccccaaccaggccgagctgattgtgggggaccagagcggggccatccacatctgggacctgaagacagaccacaatgagcagctgatccctgagcctgaggtgtccatcaccagcgcccacatcgaccctgatgccagctacatggctgctgtgaacagcactggaaactgctacgtgtggaacctgaccggcggcattggagatgaggtgacccagctgatccccaagaccaagatcccagcccacaccaggtatgccctgcagtgccgcttctccccagacagcaccctgctggccacctgcagcgctgaccagacctgcaagatctggaggaccagcaacttcagcctgatgacagagctgagcatcaagagcggcaaccctggagagagcagccggggctggatgtggggctgtgccttcagcggggacagccagtacatcgtgacagccagcagtgacaacctggcccggctgtggtgtgtggagactggagagatcaagcgggagtatggaggccaccagaaggctgtggtgtgcctggccttcaatgattctgtgctgggctag

SEQ ID NO: 77138 - DNA, 984 bp, Artificial Sequence
  derived and/or modified sequence
atgaacaccagccctggcaccgtgggcagtgaccccgtcatcctggccacagctggctatgaccacacagtgcgcttctggcaggcccacagcggcatctgcaccaggacagtgcagcaccaggacagccaggtgaatgccctggaggtgaccccagaccgctccatgattgctgctgctggctaccagcacatccgcatgtatgacctgaacagcaacaaccccaaccccatcatctcctatgatggagtgaacaagaacatcgcctctgtgggcttccatgaagatggccgctggatgtacacaggaggagaggactgcacagcccgcatctgggacctgcggagcaggaacctgcagtgccagaggatcttccaggtgaatgcccccatcaactgtgtgtgcctgcaccccaaccaggccgagctgattgtgggggaccagagcggggccatccacatctgggacctgaagacagaccacaatgagcagctgatccctgagcctgaggtgtccatcaccagcgcccacatcgaccctgatgccagctacatggctgctgtgaacagcactggaaactgctacgtgtggaacctgaccggcggcattggagatgaggtgacccagctgatccccaagaccaagatcccagcccacaccaggtatgccctgcagtgccgcttctccccagacagcaccctgctggccacctgcagcgctgaccagacctgcaagatctggaggaccagcaacttcagcctgatgacagagctgagcatcaagagcggcaaccctggagagagcagccggggctggatgtggggctgtgccttcagcggggacagccagtacatcgtgactggagagccccggcccggcctgccccacccctggcccccagccctggccagccgggccagccccccccggctgcagctgcccctgtgctggggccgcctgctgggcctgcacctgcggagctag

SEQ ID NO: 77139 - DNA, 981 bp, Artificial Sequence
  derived and/or modified sequence
atgaacaccagccccggcaccgtgggcagcgaccccgtgatcctggccacagcgggctatgatcacaccgtgagattctggcaggcacatagcgggatctgcacaagaaccgtgcagcatcaggacagtcaggtcaacgctctagaggttaccccagaccggagtatgatcgccgctgccggctaccagcacataagaatgtatgatctgaatagcaataatcccaaccccataatttcatacgacggcgtcaacaagaacattgctagcgtcggattccacgaagatggaagatggatgtacaccggcggagaagactgcaccgcaagaatatgggatttgcgaagtcggaatctccaatgtcaacgaatcttccaggtgaatgcgcctatcaactgcgtgtgtctgcaccctaaccaggccgaactaatagtcggcgatcagtctggcgcaatccatatttgggatctcaaaacagaccataatgaacaactcattccagaacccgaggtatctatcacaagtgctcatatagatcctgacgcaagctatatggctgcagtgaattctaccgggaactgctatgtgtggaacctaacagggggaattggagatgaagttactcagcttattcctaagactaagatccccgcgcacacccgatatgcccttcagtgcagattttctccggacagtactctgctggctacctgttctgccgatcaaacctgtaagatctggcggacctctaattttagcctgatgacagagctcagcattaaatccggcaacccgggggaatcgagcagggggtggatgtggggttgtgcgttctccggtgactctcagtacatagtgacggcctcgtcagacaacctggctaggctctggtgtgtcgagaccggagagattaaacgcgagtatggggggcaccaaaaagccgtggtgtgcctggctttcaacgactccgtcctgggttag

SEQ ID NO: 77140 - DNA, 981 bp, Artificial Sequence
  derived and/or modified sequence
atgaacaccagccccggcaccgtgggcagcgaccccgtgatcctggccactgccgggtatgatcatacagtgcgattctggcaggcacacagtggcatatgcacacggactgtgcaacatcaggatagccaagttaatgctctggaggttactcctgatcgctcgatgatcgctgcagcgggttaccaacatattcgtatgtacgacttgaatagtaacaacccaaatcccattatctcctacgacggtgtcaataaaaacatagcctccgtgggcttccatgaagacggtcggtggatgtacacgggtggggaggactgcacggctagaatctgggacttgaggtcaaggaacctccagtgccagcggattttccaggtgaacgcgcctatcaactgcgtttgcctgcaccctaatcaggcggaattgatcgtcggtgaccaatccggagcaattcacatatgggatcttaagacagatcataatgagcaattaatccccgagccggaagtcagcatcaccagtgctcatattgacccagacgccagctatatggccgccgttaattctaccggaaactgctacgtgtggaatctaacaggaggcattggcgacgaagtgacacagttgattcccaaaaccaaaattcctgctcatactcggtatgctctgcaatgtagatttagcccagattcaactctgctagccacctgttcagccgaccaaacatgtaaaatctggcgaaccagtaactttagcctcatgaccgagctgagcattaagtccggaaatcctggagagagctccagaggttggatgtggggatgtgcctttagcggtgacagccaatacattgtgactgcaagctccgataacctcgccaggctttggtgcgtcgagactggtgagatcaagcgcgagtacgggggtcaccagaaagcagtggtgtgtctggcttttaacgatagcgtcctgggatag

SEQ ID NO: 77141 - DNA, 984 bp, Artificial Sequence
  derived and/or modified sequence
atgaacaccagccccggcaccgtgggcagcgaccccgtgatcctggcaacggccgggtatgatcacacagtcaggttttggcaagcccattccggcatctgtaccagaaccgtgcagcaccaagattctcaggtcaatgcattggaagttactcctgacagatcaatgatcgccgccgccggatatcaacatattcgcatgtacgaccttaatagcaataatccgaaccccatcatctcttacgacggagtaaacaaaaacatagcctcagtgggttttcacgaggacggccggtggatgtacactgggggggaagactgcacagcccgaatctgggatttgcgctctcgcaacttgcagtgccagagaatcttccaggttaatgcccccatcaattgtgtgtgcttgcaccctaaccaggccgaactgattgtcggcgaccagagtggtgctatacacatctgggacttaaagaccgatcacaacgaacagctgatacccgagcctgaggtctcaataacaagcgctcatatcgatcccgatgctagttacatggcagctgtaaatagcacagggaattgctacgtttggaatctaactggagggatcggagatgaggtcacgcagctcatccccaaaaccaaaatccctgcacacacgcggtatgccctccagtgcagattcagccctgatagcaccctacttgccacatgttccgccgaccagacgtgcaagatctggagaacttcgaattttagtttgatgacagaactgtccatcaaatcaggcaacccaggagaatcatcccgcgggtggatgtggggatgcgccttttcaggtgattctcagtacattgtaaccggcgagccgaggccaggactgcctcacccctggccacctgctcttgcttctcgcgcatcaccacccagactgcaattgccgctctgttggggccgcttgttagggttgcatctccgatcttag

SEQ ID NO: 77142 - DNA, 981 bp, Artificial Sequence
  derived and/or modified sequence
atgaacaccagccccggcaccgtgggcagcgaccccgtgatcctggccacagcagggtacgatcataccgtgcggttttggcaagcgcacagcggcatatgtactaggacagttcagcatcaggatagccaagtgaacgctttagaggtgaccccagaccgcagcatgattgccgcggcaggatatcaacatattcggatgtacgatcttaactctaacaatccgaatcccattatctcatatgacggggtcaacaagaatatagcttcagtgggcttccatgaagatgggcgctggatgtacacaggaggtgaggactgcaccgccagaatctgggatcttcgctctagaaacctgcagtgtcaacgaatttttcaagtcaatgccccgattaattgcgtgtgcctgcacccaaaccaggcagaattaatcgtgggtgatcaaagtggggctatccatatatgggacctaaagaccgaccataatgaacagcttatcccggaacctgaggttagcatcacctcagcccacattgaccccgatgcctcttatatggcagctgtgaattctacaggcaactgctatgtgtggaacttgactgggggcataggagacgaggttacccagctcattcccaaaactaagattcctgcacacactcgatacgcgctgcagtgtcgcttttcccccgactctacccttctcgcaacttgtagcgctgatcagacatgcaagatctggaggaccagcaatttcagcctcatgacagaactctctatcaagtctggtaacccaggcgaaagcagccgtgggtggatgtggggttgtgccttttcaggggacagccagtatatcgtgacagcgtcaagcgacaacctggctaggttgtggtgtgtggaaacaggggagatcaagagagagtacgggggacatcagaaagcagttgtatgcttagcattcaatgactccgttctgggatag

SEQ ID NO: 77143 - DNA, 981 bp, Artificial Sequence
  derived and/or modified sequence
atgaacaccagccccggcaccgtgggcagcgaccccgtgatcctggcaaccgcgggctatgaccacactgtgcgtttttggcaggcccactccgggatatgcacccgcactgttcagcaccaagattctcaggtcaacgccctcgaggtgaccccggatcgctctatgatcgctgcggcgggatatcagcatatcaggatgtatgaccttaactcaaacaaccccaacccaattatatcctatgacggcgtgaataaaaatatcgcgagtgttgggtttcacgaggatggccgctggatgtacaccggcggagaggattgtaccgctaggatatgggatctgcgctctagaaacctccagtgccagcgaattttccaggtcaatgccccaataaactgtgtgtgcctccatcccaatcaggctgaactgatcgtgggtgaccagtcaggcgcaattcacatctgggacctgaagacagatcacaacgagcagctaatcccggagcccgaggtgagcatcacttccgctcacatagacccggacgcctcttacatggccgccgtgaatagcaccggcaactgctacgtttggaatttgacggggggcattggtgatgaggtgacacagctaattcccaagacaaagattccagcccatacccgctacgcccttcagtgccgcttctcacccgatagcactttactggcgacttgtagcgcagaccagacttgtaaaatttggcgaacgtcaaactttagtctgatgacggaactctccatcaaatcgggcaatcccggagaaagcagccgcgggtggatgtgggggtgcgccttctcgggagattctcagtacatcgtcactgcctcaagtgacaacttggccaggttgtggtgcgtggagacgggggaaatcaagagagagtacgggggacaccagaaagcggtagtgtgcctggcctttaatgacagcgtgctgggatag

SEQ ID NO: 77144 - DNA, 981 bp, Artificial Sequence
  derived and/or modified sequence
atgaacacctccccgggaacagtgggtagtgatcccgttatcttggccaccgccggttacgatcataccgtccggttctggcaggcgcacagcggcatctgtacacgcacagtgcagcaccaagattcccaagtgaatgcattggaggtcactcccgaccgatctatgattgcagccgctggctaccagcatatccgcatgtatgaccttaatagtaacaaccccaacccaataatctcctacgacggagtgaataagaatatcgcctcagttgggttccacgaggatgggagatggatgtatacaggtggcgaggactgtactgcacgcatctgggacctcagatctcggaatctgcagtgccagcgaatttttcaggtgaatgcccctatcaattgcgtgtgtctacatcccaatcaggctgagttaatcgtcggtgaccagtccggggcaattcatatttgggatctgaagactgaccacaatgaacaattgattccggagcccgaagtaagcattactagcgcccatattgacccggacgcatcttacatggctgctgtgaacagtaccggcaattgttacgtatggaatctgaccggaggaatcggggacgaggtaacccaactgatccctaagacgaagattcccgctcacactcgctacgccctgcagtgtcgcttcagccctgactctactctgttagctacatgctccgctgaccagacctgtaaaatttggaggacgagcaatttttccctgatgaccgagctgagcatcaaatccggaaaccctggcgaaagttcccgtgggtggatgtggggatgtgcctttagcggcgactcccagtacatagtcacagcaagcagcgacaacttggcacggttatggtgtgtggaaacaggggagattaaacgcgagtacggcggacaccagaaggccgtagtgtgtcttgctttcaacgacagtgtcttagggtag

SEQ ID NO: 77145 - DNA, 981 bp, Artificial Sequence
  derived and/or modified sequence
atgaatacctcgccaggcaccgtcggcagcgaccccgtgattctggcgacagctgggtacgaccacacagtacgcttctggcaggctcacagcggaatctgtactagaacagttcagcaccaggacagccaagtgaacgcgctggaagtgacaccagaccggagcatgattgcagctgctggttatcagcacatccggatgtacgacctcaacagcaacaaccctaacccaattatctcctatgacggcgtcaacaagaatattgccagcgttgggtttcacgaagacggcagatggatgtacaccggcggagaagattgtaccgcacggatatgggacctcagatcccggaacttgcagtgccagcggattttccaggttaatgcacctatcaactgcgtgtgtctccatccaaatcaggcagagctcattgttggggatcagagcggggcaattcacatttgggatttaaaaacagaccataatgaacaactgatccccgagccggaggtgagcattacaagtgcacacattgacccagatgcctcgtacatggccgctgtgaattcaacagggaattgttatgtatggaacttaaccggaggaataggagatgaggtgactcagctgattcctaagacaaagattcctgcccacacacggtatgctcttcagtgtcggttctccccggactctacgttattagctacatgtagtgctgaccagacttgcaagatctggagaacttctaatttcagtctcatgacagaactctccattaagagcgggaatcctggtgaaagtagccggggatggatgtggggctgtgcttttagcggagactcgcagtacattgttaccgcatcttccgacaacctggcccgactgtggtgcgtcgaaaccggcgagattaaaagggagtacggaggtcaccagaaggcggtggtctgtttggccttcaatgattccgttctcggttag

SEQ ID NO: 77146 - DNA, 984 bp, Artificial Sequence
  derived and/or modified sequence
atgaataccagcccaggaaccgtcggcagcgaccctgttatactcgctactgccggttatgatcacacagtacgattttggcaggcgcattctggcatatgcacccgtactgtacagcaccaggactcccaagtgaacgctctggaggtgacccctgaccggtcgatgattgccgcagctgggtatcagcacattcgaatgtatgatttaaacagcaataatccaaaccccatcatctcatatgacggggtgaacaagaacattgccagcgttgggttccacgaggacggccgttggatgtacactggcggtgaggattgcaccgccaggatctgggacctgcgctctcgcaacctgcaatgccagcggatattccaggtcaatgcccctatcaactgcgtatgcttacacccgaaccaggcagagctcatcgttggagaccagagcggagcaattcacatctgggacttgaagaccgaccacaatgagcagttaataccagagccggaagtcagcatcacatcagctcatatcgaccctgatgctagctacatggccgcagttaactctaccgggaactgttacgtgtggaacctgacgggcggaatcggagacgaagtgactcagctgatccctaagacaaaaatacccgcacacacccgttacgccctccagtgtcggtttagccctgacagtaccctcctggccacttgttctgccgaccagacatgtaaaatctggagaacaagcaacttttcccttatgacagagttgtctatcaagagtggcaatcccggagagtccagtagaggttggatgtggggctgtgcattctccggagatagccaatatatcgtcactggcgaaccccgtccaggcctgccccatccgtggccacccgctttggcatctagggcttctcctccaaggctgcaactcccgctctgttgggggaggctcctaggactccacctgcgcagttag

SEQ ID NO: 77147 - DNA, 981 bp, Artificial Sequence
  derived and/or modified sequence
atgaacacgtccccaggaacagtagggtcggaccccgttattctcgctaccgcgggttatgatcacacggttcggttttggcaggctcacagtgggatctgcacaaggaccgtccaacaccaggatagccaggtgaatgcgctggaggtgacccccgaccggtccatgattgctgcagccggttaccagcatattcgcatgtacgacctgaatagtaacaaccctaatccaatcatttcttacgacggcgtcaacaagaacattgcctcagttggctttcatgaggacggacggtggatgtacacgggcggagaggattgtactgccaggatttgggatctccgatcccgaaaccttcaatgtcagcgcatttttcaggtgaacgcgcctatcaactgcgtgtgtctccaccccaatcaggccgaactcatagtcggtgatcaatccggcgcaatccacatctgggatctcaaaactgatcacaacgaacagctgatcccagaacccgaagtaagcatcacatcagcacacatcgatccagatgccagctacatggccgcagtcaacagcaccggtaattgttatgtgtggaacctgacaggcggtattggagacgaagttactcagctcatcccaaaaacaaaaataccggcacatactcgatacgccctccaatgtcgtttcagccccgactctacccttctagccacctgtagtgccgatcagacgtgcaagatatggcggactagcaatttctctctgatgactgaactatcaattaagtctgggaaccctggcgagtctagccgcggttggatgtgggggtgtgccttcagcggcgattcgcagtatattgtgacagcctcatcagacaacctagcaaggttgtggtgcgtagagaccggcgaaatcaagcgcgaatacgggggtcaccagaaagccgtggtttgcttggcattcaatgactcggttctcgggtag

SEQ ID NO: 77148 - DNA, 981 bp, Artificial Sequence
  derived and/or modified sequence
atgaacactagtccgggaacagtgggtagtgatcctgtcattctggcgaccgccggatacgaccacactgtacggttttggcaggcccacagtggaatttgcaccagaacggttcaacatcaggattcccaggtaaacgcactggaggtcacccctgatcggtcaatgattgcagccgcagggtaccaacacatccggatgtacgacctgaatagtaataatcccaatccaatcattagctacgatggggtcaataagaatattgcttcggtgggctttcatgaggacggcagatggatgtacacaggaggcgaagactgcaccgcccgaatctgggacctccgctctcggaatctgcagtgccagcgcattttccaagtgaacgcacctatcaactgcgtttgtttacaccccaaccaggccgagttgatagtgggggatcaaagcggcgcaatccacatttgggacctgaagaccgaccacaatgagcagctcatacctgagcccgaagtttcaataacgtcagcccatatcgatcccgatgcatcctatatggcagctgttaacagtaccggaaactgctacgtgtggaatctgactgggggtattggcgacgaggtgactcagctcattcccaagaccaaaattcccgctcatactcggtacgccctgcagtgccggttctctcccgactcaactttgctcgccacctgtagtgctgatcagacttgtaaaatatggagaaccagcaactttagtctgatgactgagctgtcaattaagtccgggaatcccggagagagctctcgaggctggatgtgggggtgcgcattcagtggagatagccagtacatcgtgacggcgtcaagcgacaacctggcacgcctgtggtgtgtagagaccggagaaatcaaaagagagtacggaggacaccagaaggcagtggtgtgcttggcctttaatgactctgtgctcgggtag

SEQ ID NO: 77149 - DNA, 981 bp, Artificial Sequence
  derived and/or modified sequence
atgaacaccagccccggcaccgtgggcagcgaccccgtgatcctggccaccgccggctacgaccacaccgtgagattctggcaggcccacagcggcatctgcaccagaaccgtgcagcaccaggacagccaggtgaacgccctggaggtgacccccgacagaagcatgatcgccgccgccggctaccagcacatcagaatgtacgacctgaacagcaacaaccccaaccccatcatcagctacgacggcgtgaacaagaacatcgccagcgtgggcttccacgaggacggcagatggatgtacaccggcggcgaggactgcaccgccagaatctgggacctgagaagcagaaacctgcagtgccagagaatcttccaggtgaacgcccccatcaactgcgtgtgcctgcaccccaaccaggccgagctgatcgtgggcgaccagagcggcgccatccacatctgggacctgaagaccgaccacaacgagcagctgatccccgagcccgaggtgagcatcaccagcgcccacatcgaccccgacgccagctacatggccgccgtgaacagcaccggcaactgctacgtgtggaacctgaccggcggcatcggcgacgaggtgacccagctgatccccaagaccaagatccccgcccacaccagatacgccctgcagtgcagattcagccccgacagcaccctgctggccacctgcagcgccgaccagacctgcaagatctggagaaccagcaacttcagcctgatgaccgagctgagcatcaagagcggcaaccccggcgagagcagcagaggctggatgtggggctgcgccttcagcggcgacagccagtacatcgtgaccgccagcagcgacaacctggccagactgtggtgcgtggagaccggcgagatcaagagagagtacggcggccaccagaaggccgtggtgtgcctggccttcaacgacagcgtgctgggctag

SEQ ID NO: 77150 - DNA, 984 bp, Artificial Sequence
  derived and/or modified sequence
atgaacaccagccccggcaccgtgggcagcgaccccgtgatcctggccaccgccggctacgaccacaccgtgagattctggcaggcccacagcggcatctgcaccagaaccgtgcagcaccaggacagccaggtgaacgccctggaggtgacccccgacagaagcatgatcgccgccgccggctaccagcacatcagaatgtacgacctgaacagcaacaaccccaaccccatcatcagctacgacggcgtgaacaagaacatcgccagcgtgggcttccacgaggacggcagatggatgtacaccggcggcgaggactgcaccgccagaatctgggacctgagaagcagaaacctgcagtgccagagaatcttccaggtgaacgcccccatcaactgcgtgtgcctgcaccccaaccaggccgagctgatcgtgggcgaccagagcggcgccatccacatctgggacctgaagaccgaccacaacgagcagctgatccccgagcccgaggtgagcatcaccagcgcccacatcgaccccgacgccagctacatggccgccgtgaacagcaccggcaactgctacgtgtggaacctgaccggcggcatcggcgacgaggtgacccagctgatccccaagaccaagatccccgcccacaccagatacgccctgcagtgcagattcagccccgacagcaccctgctggccacctgcagcgccgaccagacctgcaagatctggagaaccagcaacttcagcctgatgaccgagctgagcatcaagagcggcaaccccggcgagagcagcagaggctggatgtggggctgcgccttcagcggcgacagccagtacatcgtgaccggcgagcccagacccggcctgccccacccctggccccccgccctggccagcagagccagcccccccagactgcagctgcccctgtgctggggcagactgctgggcctgcacctgagaagctag

SEQ ID NO: 77151 - protein, 973 aa, Artificial Sequence
  derived and/or modified sequence
MDSLLPPSRFSYFKKYPLHAIRRYLSTLRNQRAEEQVARFQKIPNGENETMIPVLTSKKASELPVSEVASILQADLQNGLNKCEVSHRRAFHGWNEFDISEDEPLWKKYISQFKNPLIMLLLASAVISVLMHQFDDAVSITVAILIVVTVAFVQEYRSEKSLEELSKLVPPECHCVREGKLEHTLARDLVPGDTVCLSVGDRVPADLRLFEAVDLSIDESSLTGETTPCSKVTAPQPAATNGDLASRSNIAFMGTLVRCGKAKGVVIGTGENSEFGEVFKMMQAEEAPKTPLQKSMDLLGKQLSFYSFGIIGIIMLVGWLLGKDILEMFTISVSLAVAAIPEGLPIVVTVTLALGVMRMVKKRAIVKKLPIVETLGCCNVICSDKTGTLTKNEMTVTHIFTSDGLHAEVTGVGYNQFGEVIVDGDVVHGFYNPAVSRIVEAGCVCNDAVIRNNTLMGKPTEGALIALAMKMGLDGLQQDYIRKAEYPFSSEQKWMAVKCVHRTQQDRPEICFMKGAYEQVIKYCTTYQSKGQTLTLTQQQRDVYQQEKARMGSAGLRVLALASGPELGQLTFLGLVGIIDPPRTGVKEAVTTLIASGVSIKMITGDSQETAVAIASRLGLYSKTSQSVSGEEIDAMDVQQLSQIVPKVAVFYRASPRHKMKIIKSLQKNGSVVAMTGDGVNDAVALKAADIGVAMGQTGTDVCKEAADMILVDDDFQTIMSAIEEGKGIYNNIKNFVRFQLSTSIAALTLISLATLMNFPNPLNAMQILWINIIMDGPPAQSLGVEPVDKDVIRKPPRNWKDSILTKNLILKILVSSIIIVCGTLFVFWRELRDNVITPRDTTMTFTCFVFFDMFNALSSRSQTKSVFEIGLCSNRMFCYAVLGSIMGQLLVIYFPPLQKVFQTESLSILDLLFLLGLTSSVCIVAEIIKKVERSREKIQKHVWLWERSGQQLVEIHPHLETGLPLTEDVSCV

SEQ ID NO: 77152 - DNA, 2922 bp, Artificial Sequence
  derived and/or modified sequence
atggacagtctcctgccaccatcaagatttagttatttcaaaaagtaccccttgcatgcgatacgcagatatctcagcacacttcggaatcaacgagccgaagaacaggtcgctcggttccagaaaatccccaacggggagaatgagactatgatccccgtgctaacatccaaaaaagccagcgaactccccgtctctgaagttgccagcatcctccaggccgaccttcaaaatggattgaataagtgtgaggtcagccatagacgtgcctttcacgggtggaatgaattcgatatttctgaagatgaacccttgtggaagaaatacatctctcagttcaagaatccactcatcatgctactattagcaagtgcagtgatttccgtccttatgcatcagttcgacgacgccgtttctataactgtggcaatccttatagtggtaacggttgcttttgtgcaagagtacaggagcgagaaaagcctcgaggaactgtctaagcttgtaccaccagaatgccactgcgtgcgcgagggtaagcttgagcacaccttagcaagggacctcgtgccaggtgacaccgtctgcctcagcgtgggagatagagtccccgcagacttgcggctgttcgaggccgtggatctttctatagatgagagttctttaactggtgaaacaactccttgcagcaaagtgaccgccccccaacctgctgccactaatggcgacctcgcctcaagatcgaacattgctttcatgggcacactggtgcgttgcggcaaagcaaagggagttgtaatcggaacgggggaaaattctgagtttggggaggtgttcaagatgatgcaggccgaagaagcccccaaaacccccctccagaaaagcatggacctactggggaagcagcttagcttctatagcttcgggatcattgggatcattatgctagtgggatggctgttgggcaaggacatactagagatgttcaccatctccgtgagcttagccgtcgcagccattcccgaaggactgcccatcgtggtgacggtgacgctggccttaggcgtaatgcggatggtgaaaaaacgggctatcgtgaaaaaacttcccattgtggagaccctaggctgctgcaatgtcatttgcagcgacaagacgggcacactgacaaagaatgagatgacagtgactcacattttcacctcagatggtctgcatgcagaggttacaggcgtcggctacaatcagttcggggaagtgattgtagacggcgatgtggttcatggtttctacaaccccgcagttagtagaatcgtggaagccggctgtgtttgcaatgatgcagttatccgcaataatactttgatggggaaacctaccgagggcgccttaatcgctttggctatgaagatggggcttgacggcctgcagcaggactatattcgcaaggcagagtatcctttttctagcgagcagaagtggatggcagtcaagtgcgtgcaccgaacgcagcaggaccgccctgagatttgctttatgaaaggcgcctacgaacaagtgatcaagtattgtactacctaccaaagcaagggccaaactctgactctgacacaacagcagcgggacgtgtaccagcaggagaaagcacggatgggctccgctggattaagggtcctcgccctcgcttcaggccctgagctaggccagctcaccttccttggcctggtcggcatcatcgaccccccacggaccggtgttaaggaagcggttactactcttatcgctagtggtgtgagtattaaaatgattacgggcgatagccaggagacagcagttgctattgcatcacggctggggctgtacagcaaaacctcacagagcgtgtctggcgaggaaattgacgccatggatgtgcagcagcttagtcagatcgtgcccaaagttgccgtgttttatcgagcttcaccccggcacaaaatgaaaatcattaagtctctgcagaaaaacggcagcgtcgtggccatgaccggagatggcgtgaacgacgccgtggccctcaaggcagcagacatcggagtcgcaatgggccaaactggcaccgacgtgtgtaaagaggctgctgatatgattttagttgacgatgactttcaaaccattatgagcgcgatagaggaaggtaaaggcatatacaataatatcaaaaactttgttcgctttcaactgtctacctctatagcagccctgacgctcatttctctggcgaccctaatgaactttcctaacccactgaacgcaatgcagattctgtggattaatatcatcatggacggcccgcctgctcagtccctgggagtggagccagtggataaagacgtgatcagaaaaccccctaggaattggaaagattcaatcttaacgaagaatttaatcctaaaaatcctagtatcttccatcatcatagtctgcggcaccctattcgtcttctggcgtgagctgcgagataatgtgatcacccctagagatacaacgatgacattcacgtgctttgttttctttgatatgttcaacgccctgtccagcaggagtcagactaagtctgtcttcgagatcggcctgtgttccaaccgtatgttctgctatgccgtgttagggtctattatgggacaactgctcgttatctacttccctcctctgcaaaaagtcttccagactgaatccctctctattctggatcttttgtttctcttaggcctgaccagtagtgtatgcatcgtggccgaaattattaaaaaggttgagaggtcacgggagaagattcaaaagcatgtgtggctctgggagcgaagtggtcagcagctggtggagatccatcctcacctggagacgggtctacccctgactgaggacgtatcttgtgtgtag

SEQ ID NO: 77153 - DNA, 2922 bp, Artificial Sequence
  derived and/or modified sequence
atggacagcctgctgccccccagccgcttctcctacttcaagaagtaccccctgcacgccatccgccgctacctgagcaccctgaggaaccagagagctgaggagcaggtggcccgcttccagaagatccccaatggagaaaatgagaccatgatccctgtgctgaccagcaagaaggccagcgagctgcctgtgtctgaggtggccagcatcctgcaggccgacctgcagaatggcctgaacaagtgtgaggtgagccaccggcgggccttccacggctggaatgaatttgacatcagtgaagatgagcccctgtggaagaagtacatcagccagttcaagaaccccctcatcatgctgctgctggccagcgctgtgatctctgtgctgatgcaccagtttgatgatgctgtgtccatcaccgtggccatcctgattgtggtgacagtggcctttgtgcaggagtacagaagtgagaagagcctggaggagctgagcaagctggtgcccccagagtgccactgtgtgcgggagggcaagctggagcacaccctggcccgggacctggtgcctggggacacagtgtgcctgtctgtgggggacagagtgcctgctgacctgcggctgtttgaggccgtggacctgagcattgatgagagcagcctgactggagagaccaccccctgcagcaaggtgacagccccccagcctgctgccaccaatggagacctggccagccgcagcaacatcgccttcatgggcaccctggtgcgctgtgggaaggccaagggcgtggtgattggaactggagaaaattctgaatttggagaggtgttcaagatgatgcaggccgaggaggcccccaagacccccctgcagaagtccatggacctgctgggcaagcagctgtccttctacagctttggcatcatcggcatcatcatgctggtgggctggctgctgggcaaggacatcctggagatgttcaccatctctgtgtccctggccgtggccgccatccctgagggcctgcccatcgtggtgacagtgaccctggccctgggcgtgatgaggatggtgaagaagagggccatcgtgaagaagctgcccatcgtggagaccctgggctgctgcaacgtcatctgcagcgacaagacaggcaccctgaccaagaatgagatgacagtgacccacatcttcaccagtgatggcctgcatgctgaggtgactggagtgggctacaaccagtttggagaggtgattgtggatggagatgtggtgcacggcttctacaacccagctgtgagccgcatcgtggaggccggctgtgtgtgcaatgatgctgtgatccggaacaacaccctgatgggcaagcccacagagggcgccctgattgccctggccatgaagatgggcctggatggcctgcagcaggactacatcaggaaggccgagtaccccttcagcagcgagcagaagtggatggctgtgaagtgtgtgcacaggacccagcaggacaggcctgagatctgcttcatgaagggggcctatgagcaggtgatcaagtactgcaccacctaccagagcaagggccagaccctgaccctgacccagcagcagagagatgtgtaccagcaggagaaggccaggatgggcagcgctggcctgcgggtgctggccctggccagcggccctgagctgggccagctgaccttcctgggcctggtgggcatcattgatcctcccaggactggagtgaaggaggccgtgaccaccctcatcgccagcggcgtgtccatcaagatgatcaccggggacagccaggagacagctgtggccatcgccagccggctgggcctgtacagcaagaccagccagagcgtgtctggagaggagattgatgccatggatgtgcagcagctgagccagatcgtgcccaaggtggccgtgttctaccgggccagccccaggcacaagatgaagatcatcaagagcctgcagaagaatggatctgtggtggccatgactggagatggagtgaatgatgctgtggccctgaaggctgctgacattggagtggccatgggccagacaggaacagatgtgtgcaaggaggccgctgacatgatcctggtggatgatgacttccagaccatcatgtctgccatcgaggagggcaagggcatctacaacaacatcaagaactttgtgcgcttccagctgagcaccagcattgctgccctgaccctcatcagcctggccaccctgatgaacttccccaaccccctgaatgccatgcagatcctgtggatcaacatcatcatggatggccccccagcccagagcctgggcgtggagcctgtggacaaggatgtgatcaggaagccacccaggaactggaaggacagcatcctgaccaagaacctgatcctgaagatcctggtgagcagcatcatcatcgtgtgtggcaccctgtttgtgttctggagggagctgcgggacaacgtcatcaccccccgggacaccaccatgaccttcacctgctttgtgttctttgacatgtttaatgccctgagcagccgcagccagaccaagtctgtgtttgagatcggcctgtgcagcaacaggatgttctgctatgctgtgctgggcagcatcatgggccagctgctggtgatctacttcccccccctgcagaaggtgttccagacagagagcctgagcatcctggacctgctcttcctgctgggcctgaccagctctgtgtgcatcgtggccgagatcatcaagaaggtggagaggagccgggagaagatccagaagcacgtgtggctgtgggagaggagcggccagcagctggtggagatccacccccacctggagaccggcctgcccctgacagaagatgtgtcctgtgtgtag

SEQ ID NO: 77154 - DNA, 2922 bp, Artificial Sequence
  derived and/or modified sequence
atggacagcctgctgccccccagccggttcagctacttcaagaagtatcctctccatgctattcggcgctacctcagtacactgagaaaccaacgagccgaggagcaagtagctcggttccaaaagatcccaaacggggaaaacgagaccatgatccccgtactgacttcgaagaaagcgtcggaactgccagtttctgaggtcgccagtatacttcaagcggacctgcagaatgggcttaataaatgtgaagtgagccaccgccgggcattccacggatggaacgaattcgatatctccgaagatgagccattgtggaaaaagtacatttcacagttcaaaaatcccctcatcatgcttctcctcgcctctgccgtgattagcgtgctgatgcaccagtttgatgacgctgtgagcatcacggtggctatcctcatcgttgtcactgtggctttcgtgcaagaataccggtcagaaaagtctctcgaggagttgagtaaactggtgcctccggagtgtcactgtgtccgcgaaggaaagttggagcacaccttggcacgtgatcttgtgccaggagataccgtgtgcctgtcggtgggggacagagtgccagccgacctcaggctgttcgaggcggtcgatctgtccatcgacgagtcttccctgacaggcgagaccaccccttgttcaaaagtgaccgccccacagccggctgccaccaatggagacctggcttctaggtcgaatatcgccttcatgggcaccttagttaggtgcggtaaagctaaaggcgtcgtcatcggaaccggagagaactcagagtttggagaagtctttaagatgatgcaggccgaagaggcccccaaaactcctttacaaaagtcgatggatctgctgggcaagcaactgagcttttatagtttcggtattattggaatcattatgctggtgggttggctattggggaaagatatactggaaatgttcactataagcgtaagcctggccgtcgccgccattcccgaaggtttgcctatcgtagtcaccgtgaccctggcattgggcgtaatgaggatggtgaagaagagagccatcgttaagaaattgccaattgttgaaacattgggctgctgtaacgtgatttgttctgacaagacaggtactttgaccaagaacgaaatgaccgttacacacattttcacttcagacggtctgcacgccgaggttactggcgtcggctacaaccagttcggcgaggtcatcgtagatggggatgtggtgcacggattctataaccccgccgtttctcgcattgtcgaagctgggtgcgtgtgcaatgacgctgtgatcagaaataatacactgatggggaagccgactgaaggagccctgatcgctctggccatgaaaatggggctggatggcctgcagcaggactacatcaggaaagcagagtaccctttctcctccgaacagaagtggatggcggtaaagtgcgtgcatagaactcagcaggaccgtcccgagatctgttttatgaaaggcgcttacgagcaggtgatcaagtactgtactacgtaccagagtaaaggccagaccctgacattgacacaacagcagagggatgtgtaccagcaagagaaggcaagaatgggatctgccgggctccgagtgctggcacttgcctctgggcctgaactcggtcagcttaccttcttaggtctggtgggaattatagacccaccaaggaccggcgtgaaggaagctgttacaactctaattgcaagcggcgtttctataaagatgattacaggcgattcccaggaaactgctgtcgctatagcctctagactgggactgtactcaaaaacatctcagtccgtctccggggaagagatagacgcgatggacgtgcaacagttgagtcagatcgtccctaaagtggcggttttctatcgcgcaagtcctcggcataaaatgaagataattaagtcactgcagaagaacggatcggtggtggctatgactggcgatggtgtgaatgatgccgtcgctctgaaggcagccgatatcggtgtggccatgggacagaccggtaccgacgtgtgtaaggaggcagctgatatgatactcgttgatgacgacttccaaaccataatgagcgccatagaagagggaaagggtatatataacaacattaagaacttcgtcagattccagctgagtacaagtattgcagccctgaccctgatcagcctagccactttaatgaacttcccgaaccccctgaacgctatgcaaatactatggatcaacatcatcatggacggcccaccagcgcagtccctcggggtggaacctgtagacaaggatgtcatcaggaagccaccacgcaattggaaagactccattctgactaaaaacctgatactcaagatattggtgagctcaatcattatagtctgcggcaccctcttcgttttctggcgcgagctaagagacaatgtcattacccctcgggatacaacaatgactttcacatgttttgtgttctttgacatgtttaatgccctcagcagtaggagtcagactaaatctgtgtttgagattggtttgtgctctaatagaatgttttgttatgccgtgctgggcagcataatgggacagctcctggtgatctatttccctcccttgcagaaggtctttcagactgagtctctgtccatccttgatctcctgtttctcctgggcctcacatcatccgtgtgtattgtcgcggagataatcaaaaaagtcgaaaggagccgggagaaaattcagaaacatgtgtggttgtgggagcgctcaggtcaacagctggtggaaattcacccccacctggagacagggctacccctgacggaggacgtgtcatgcgtatag

SEQ ID NO: 77155 - DNA, 2922 bp, Artificial Sequence
  derived and/or modified sequence
atggactctctgctgcctccctcaagattctcttattttaaaaaatacccattacacgcgatacgccgatacttgtcgaccctacggaatcagcgcgctgaggaacaagtggccagattccagaaaattccaaatggtgaaaacgagacaatgatccccgttttgacctcaaaaaaggcctccgagctgcccgtctctgaggtagcgagcattctgcaggcagacctgcagaatggactaaataagtgcgaggtttctcatcgcagggctttccacggatggaatgaattcgacatcagcgaagacgagcccctttggaagaagtacattagtcaatttaaaaaccccctcattatgctgctgctcgctagcgctgtcatctcggtacttatgcatcaattcgatgatgcagtttccataaccgtcgccatcctaatcgtcgtaactgttgccttcgtgcaggagtatcgatctgagaaatcactggaggaactctcaaaactggtaccgcctgaatgccactgcgttcgggaaggtaagctggaacatacattggctcgcgatctggtcccaggcgatactgtgtgtttatccgtcggagatagagtgcccgcagacttgcgactgttcgaagccgtggacctctctatcgatgagtcttcactgactggagaaaccacgccttgcagcaaagttaccgcaccacaaccggctgctaccaacggggatctggctagcaggagcaatattgcgtttatgggaactttggttcggtgtgggaaggcaaagggcgtggtgatcggaaccggtgaaaattcggagttcggcgaagtgttcaaaatgatgcaggccgaggaagccccaaagacaccactgcaaaagtctatggatctgctcggcaagcagctgtcattttactcattcggaatcatcggaatcatcatgttagttgggtggctcctggggaaagacattttggaaatgtttactatatctgtgagcctcgcggtagcggcaattcccgaaggccttcccattgttgttacagtgacacttgctttgggagtgatgaggatggtcaaaaaaagagctattgtgaagaagctacccatcgtagaaactctgggctgctgcaatgtgatatgcagcgacaaaactgggaccctaaccaagaacgaaatgacggtgactcatatattcacatctgacggcctgcacgcggaggtgacaggggtcgggtataatcagttcggcgaagtgattgttgacggagatgtggtgcatggattttacaatccggcagtatcgcggattgtagaggccggatgtgtgtgcaacgacgctgtgattcggaataacactctcatggggaagccaactgagggtgcacttatcgccctggccatgaagatgggtctggatggactgcaacaggactatatcagaaaagcagagtatcccttctcctcagaacagaagtggatggcagtaaaatgcgtgcacaggacacaacaggatagaccagagatctgtttcatgaaaggcgcttacgagcaggttatcaaatactgtaccacttaccagtcaaagggtcagactctgactttaacccagcagcagagagacgtgtaccagcaggaaaaggctaggatggggtcagccggtctacgcgtactggccttagcgtctggacccgaacttggacagctgacattccttggcctcgtcggaatcatcgatccacctagaaccggtgttaaggaagccgtaaccactttgatcgcatccggcgtgagcatcaagatgatcacaggcgattcccaggaaaccgccgtggctatcgcttcccgcttgggcttgtattccaaaactagtcaaagtgtgtccggggaagaaatcgacgccatggatgtgcaacagctctcacagattgtgccaaaagtcgccgtcttctaccgggcatctccaagacacaagatgaagatcatcaaaagtttacaaaagaacggctctgtcgttgctatgactggggatggagtgaatgacgccgttgccctgaaggcagccgacatcggagtggcaatgggccagactggaaccgacgtatgcaaagaggccgctgatatgatcctggtcgatgacgattttcaaactattatgagcgctatcgaggagggcaaaggtatctacaacaacatcaaaaactttgtccggttccagttatccaccagtattgctgctctgaccctgatctcactggcaacactaatgaacttccctaatcccctaaatgctatgcagatcctgtggattaacatcataatggacggcccacctgcccaatctctgggcgtcgagcccgtagataaagacgtcatacgaaaacccccacgcaactggaaggactctatcctgacgaaaaatctgatcctaaaaattttggtgtcttcaatcataattgtgtgcggcacgctcttcgtcttttggcgggagcttcgtgacaatgtgattacacccagagatacaactatgacattcacctgctttgtcttctttgacatgttcaatgcgctgtctagccgaagccaaactaaatctgtatttgagatcgggctttgcagcaaccgcatgttctgctatgcagtcttgggatctattatgggacagctgttagtcatttatttcccaccgcttcaaaaagtgttccagactgaaagtttgagtatcctcgacctcctgttcctcttgggcctgactagttctgtttgcatcgtggccgaaattattaaaaaggtggagcggtccagagagaagatccagaaacacgtgtggctctgggagcggagcgggcaacagttagtggagatccatccccacctggaaaccggtctgccacttaccgaggacgtgtcgtgcgtgtag

SEQ ID NO: 77156 - DNA, 3446 bp, Artificial Sequence
  derived and/or modified sequence
ggacgcttctagacagtgttcatacttggctgtctggtttcaccaggaactctacccaaaagaggaaacagcaaggagaacatttgctttgtttgtaggagggaagttgtcgagctacaaacaaatctttaggcatctgaggaattgctaagtttctaatttcatatggttgctgacaaggaggtgcagacaaggaccctcttgctttcctcactatggatagtctgttgcctccatctagattctcttatttcaaaaaatatcctctccatgcaattaggagatatttatcgacgctgagaaaccaaagagccgaagaacaggttgcacgttttcaaaaaatacctaatggtgaaaatgagacaatgattcctgtattgacatcaaaaaaagcaagtgaattaccagtcagtgaagttgcaagcattctccaagctgatcttcagaatggtctaaacaaatgtgaagttagtcataggcgagcctttcatggctggaatgagtttgatattagtgaagatgagccactgtggaagaagtatatttctcagtttaaaaatccccttattatgctgcttctggcttctgcagtcatcagtgttttaatgcatcagtttgatgatgccgtcagtatcactgtggcaatacttatcgttgttacagttgcctttgttcaggaatatcgttcagaaaaatctcttgaagaattgagtaaacttgtgccaccagaatgccattgtgtgcgtgaaggaaaattggagcatacacttgcccgagacttggttccaggtgatacagtttgcctttctgttggggatagagttcctgctgacttacgcttgtttgaggctgtggatctttccattgatgagtccagcttgacaggtgagacaacgccttgttctaaggtgacagctcctcagccagctgcaactaatggagatcttgcatcgagaagtaacattgcctttatgggaacactggtcagatgtggcaaagcaaagggtgttgtcattggaacaggagaaaattctgaatttggggaggtttttaaaatgatgcaagcagaagaggcaccaaaaacccctctgcagaagagcatggacctcttaggaaaacaactttccttttactcctttggtataataggaatcatcatgttggttggctggttactgggaaaagatatcctggaaatgtttactattagtgtaagtttggctgtagcagcaattcctgaaggtctccccattgtggtcacagtgacgctagctcttggtgttatgagaatggtgaagaaaagggccattgtgaaaaagctgcctattgttgaaactctgggctgctgtaatgtgatttgttcagataaaactggaacactgacgaagaatgaaatgactgttactcacatatttacttcagatggtctgcatgctgaggttactggagttggctataatcaatttggggaagtgattgttgatggtgatgttgttcatggattctataacccagctgttagcagaattgttgaggcgggctgtgtgtgcaatgatgctgtaattagaaacaatactctaatggggaagccaacagaaggggccttaattgctcttgcaatgaagatgggtcttgatggacttcaacaagactacatcagaaaagctgaatacccttttagctctgagcaaaagtggatggctgttaagtgtgtacaccgaacacagcaggacagaccagagatttgttttatgaaaggtgcttacgaacaagtaattaagtactgtactacataccagagcaaagggcagaccttgacacttactcagcagcagagagatgtgtaccaacaagagaaggcacgcatgggctcagcgggactcagagttcttgctttggcttctggtcctgaactgggacagctgacatttcttggcttggtgggaatcattgatccacctagaactggtgtgaaagaagctgttacaacactcattgcctcaggagtatcaataaaaatgattactggagattcacaggagactgcagttgcaatcgccagtcgtctgggattgtattccaaaacttcccagtcagtctcaggagaagaaatagatgcaatggatgttcagcagctttcacaaatagtaccaaaggttgcagtattttacagagctagcccaaggcacaagatgaaaattattaagtcgctacagaagaacggttcagttgtagccatgacaggagatggagtaaatgatgcagttgctctgaaggctgcagacattggagttgcgatgggccagactggtacagatgtttgcaaagaggcagcagacatgatcctagtggatgatgattttcaaaccataatgtctgcaatcgaagagggtaaagggatttataataacattaaaaatttcgttagattccagctgagcacgagtatagcagcattaactttaatctcattggctacattaatgaactttcctaatcctctcaatgccatgcagattttgtggatcaatattattatggatggacccccagctcagagccttggagtagaaccagtggataaagatgtcattcgtaaacctcctcgcaactggaaagacagcattttgactaaaaacttgatacttaaaatacttgtttcatcaataatcattgtttgtgggactttgtttgtcttctggcgtgagctacgagacaatgtgattacacctcgagacacaacaatgaccttcacatgctttgtgttttttgacatgttcaatgcactaagttccagatcccagaccaagtctgtgtttgagattggactctgcagtaatagaatgttttgctatgcagttcttggatccatcatgggacaattactagttatttactttcctccgcttcagaaggtttttcagactgagagcctaagcatactggatctgttgtttcttttgggtctcacctcatcagtgtgcatagtggcagaaattataaagaaggttgaaaggagcagggaaaagatccagaagcatgtctggctctgggagaggagtggacagcagctggttgagatacatccccatctggagacaggactgccactgacagaagatgtgagctgtgtctaagtccagtcttgtgcccagccgtgtctgcgccttcactctttggaactctgcatacaacatcttagcaccatcttcctgcagctcttccttacctaaataaagaaacagcccaagggcagtatttctaaaagcactgtaacagcttttcattttctccacatatactacaaattctataaagaaagaaattaatttaaaaaaactaagatgtttttctcttctggcttcataaatgccttgctgtataaattgaaatattgatactgaactgtctttttaatgatgacctaactttattcaacccatcgg

SEQ ID NO: 77157 - DNA, 3579 bp, Artificial Sequence
  derived and/or modified sequence
tttctggacgcttctagacagtgttcatacttggctgtctggtttcaccaggaactctacccaaaagaggaaacagcaaggagaacatttgctttgtttgtaggagggaagttgtcgagctacaaacaaatctttaggcatctgaggaattgctaagtttctaatttcatatggttgctgacaaggaggtgcagacaaggaccctcttgctttcctcactatggatagtctgttgcctccatctagattctcttatttcaaaaaatatcctctccatgcaattaggagatatttatcgacgctgagaaaccaaagagccgaagaacaggttgcacgttttcaaaaaatacctaatggtgaaaatgagacaatgattcctgtattgacatcaaaaaaagcaagtgaattaccagtcagtgaagttgcaagcattctccaagctgatcttcagaatggtctaaacaaatgtgaagttagtcataggcgagcctttcatggctggaatgagtttgatattagtgaagatgagccactgtggaagaagtatatttctcagtttaaaaatccccttattatgctgcttctggcttctgcagtcatcagtgttttaatgcatcagtttgatgatgccgtcagtatcactgtggcaatacttatcgttgttacagttgcctttgttcaggaatatcgttcagaaaaatctcttgaagaattgagtaaacttgtgccaccagaatgccattgtgtgcgtgaaggaaaattggagcatacacttgcccgagacttggttccaggtgatacagtttgcctttctgttggggatagagttcctgctgacttacgcttgtttgaggctgtggatctttccattgatgagtccagcttgacaggtgagacaacgccttgttctaaggtgacagctcctcagccagctgcaactaatggagatcttgcatcgagaagtaacattgcctttatgggaacactggtcagatgtggcaaagcaaagggtgttgtcattggaacaggagaaaattctgaatttggggaggtttttaaaatgatgcaagcagaagaggcaccaaaaacccctctgcagaagagcatggacctcttaggaaaacaactttccttttactcctttggtataataggaatcatcatgttggttggctggttactgggaaaagatatcctggaaatgtttactattagtgtaagtttggctgtagcagcaattcctgaaggtctccccattgtggtcacagtgacgctagctcttggtgttatgagaatggtgaagaaaagggccattgtgaaaaagctgcctattgttgaaactctgggctgctgtaatgtgatttgttcagataaaactggaacactgacgaagaatgaaatgactgttactcacatatttacttcagatggtctgcatgctgaggttactggagttggctataatcaatttggggaagtgattgttgatggtgatgttgttcatggattctataacccagctgttagcagaattgttgaggcgggctgtgtgtgcaatgatgctgtaattagaaacaatactctaatggggaagccaacagaaggggccttaattgctcttgcaatgaagatgggtcttgatggacttcaacaagactacatcagaaaagctgaatacccttttagctctgagcaaaagtggatggctgttaagtgtgtacaccgaacacagcaggacagaccagagatttgttttatgaaaggtgcttacgaacaagtaattaagtactgtactacataccagagcaaagggcagaccttgacacttactcagcagcagagagatgtgtaccaacaagagaaggcacgcatgggctcagcgggactcagagttcttgctttggcttctggtcctgaactgggacagctgacatttcttggcttggtgggaatcattgatccacctagaactggtgtgaaagaagctgttacaacactcattgcctcaggagtatcaataaaaatgattactggagattcacaggagactgcagttgcaatcgccagtcgtctgggattgtattccaaaacttcccagtcagtctcaggagaagaaatagatgcaatggatgttcagcagctttcacaaatagtaccaaaggttgcagtattttacagagctagcccaaggcacaagatgaaaattattaagtcgctacagaagaacggttcagttgtagccatgacaggagatggagtaaatgatgcagttgctctgaaggctgcagacattggagttgcgatgggccagactggtacagatgtttgcaaagaggcagcagacatgatcctagtggatgatgattttcaaaccataatgtctgcaatcgaagagggtaaagggatttataataacattaaaaatttcgttagattccagctgagcacgagtatagcagcattaactttaatctcattggctacattaatgaactttcctaatcctctcaatgccatgcagattttgtggatcaatattattatggatggacccccagctcagagccttggagtagaaccagtggataaagatgtcattcgtaaacctcctcgcaactggaaagacagcattttgactaaaaacttgatacttaaaatacttgtttcatcaataatcattgtttgtgggactttgtttgtcttctggcgtgagctacgagacaatgtgattacacctcgagacacaacaatgaccttcacatgctttgtgttttttgacatgttcaatgcactaagttccagatcccagaccaagtctgtgtttgagattggactctgcagtaatagaatgttttgctatgcagttcttggatccatcatgggacaattactagttatttactttcctccgcttcagaaggtttttcagactgagagcctaagcatactggatctgttgtttcttttgggtctcacctcatcagtgtgcatagtggcagaaattataaagaaggttgaaaggagcagggaaaagatccagaagcatgtctggctctgggagaggagtggacagcagctggttgagatacatccccatctggagacaggactgccactgacagaagatgtgagctgtgtctaagtccagtcttgtgcccagccgtgtctgcgccttcactctttggaactctgcatacaacatcttagcaccatcttcctgcagctcttccttacctaaataaagaaacagcccaagggcagtatttctaaaagcactgtaacagcttttcattttctccacatatactacaaattctataaagaaagaaattaatttaaaaaaactaagatgtttttctcttctggcttcataaatgccttgctgtataaattgaaatattgatactgaactgtctttttaatgatgacctaactttattcaacccatcggaatttactttttccctgaaataagatcttttccactggtctactacctgaccataaacatgtctgcatttgaattctctaaaccctaaatctgtgtctatgaaaaatacaaatgactattaaatatta

SEQ ID NO: 77158 - DNA, 3439 bp, Artificial Sequence
  derived and/or modified sequence
cttcctccctcccgctcgcttcttctcacgccgggagcaggctcccgcctcgcaccgctgccccgcgagcagctcctcttctcccgaggcgcgcggggcgcccccgcgagccccgcggctgagaccccgcagcctggaggagggctgtccggggctttgggttgcacgttttcaaaaaatacctaatggtgaaaatgagacaatgattcctgtattgacatcaaaaaaagcaagtgaattaccagtcagtgaagttgcaagcattctccaagctgatcttcagaatggtctaaacaaatgtgaagttagtcataggcgagcctttcatggctggaatgagtttgatattagtgaagatgagccactgtggaagaagtatatttctcagtttaaaaatccccttattatgctgcttctggcttctgcagtcatcagtgttttaatgcatcagtttgatgatgccgtcagtatcactgtggcaatacttatcgttgttacagttgcctttgttcaggaatatcgttcagaaaaatctcttgaagaattgagtaaacttgtgccaccagaatgccattgtgtgcgtgaaggaaaattggagcatacacttgcccgagacttggttccaggtgatacagtttgcctttctgttggggatagagttcctgctgacttacgcttgtttgaggctgtggatctttccattgatgagtccagcttgacaggtgagacaacgccttgttctaaggtgacagctcctcagccagctgcaactaatggagatcttgcatcgagaagtaacattgcctttatgggaacactggtcagatgtggcaaagcaaagggtgttgtcattggaacaggagaaaattctgaatttggggaggtttttaaaatgatgcaagcagaagaggcaccaaaaacccctctgcagaagagcatggacctcttaggaaaacaactttccttttactcctttggtataataggaatcatcatgttggttggctggttactgggaaaagatatcctggaaatgtttactattagtgtaagtttggctgtagcagcaattcctgaaggtctccccattgtggtcacagtgacgctagctcttggtgttatgagaatggtgaagaaaagggccattgtgaaaaagctgcctattgttgaaactctgggctgctgtaatgtgatttgttcagataaaactggaacactgacgaagaatgaaatgactgttactcacatatttacttcagatggtctgcatgctgaggttactggagttggctataatcaatttggggaagtgattgttgatggtgatgttgttcatggattctataacccagctgttagcagaattgttgaggcgggctgtgtgtgcaatgatgctgtaattagaaacaatactctaatggggaagccaacagaaggggccttaattgctcttgcaatgaagatgggtcttgatggacttcaacaagactacatcagaaaagctgaatacccttttagctctgagcaaaagtggatggctgttaagtgtgtacaccgaacacagcaggacagaccagagatttgttttatgaaaggtgcttacgaacaagtaattaagtactgtactacataccagagcaaagggcagaccttgacacttactcagcagcagagagatgtgtaccaacaagagaaggcacgcatgggctcagcgggactcagagttcttgctttggcttctggtcctgaactgggacagctgacatttcttggcttggtgggaatcattgatccacctagaactggtgtgaaagaagctgttacaacactcattgcctcaggagtatcaataaaaatgattactggagattcacaggagactgcagttgcaatcgccagtcgtctgggattgtattccaaaacttcccagtcagtctcaggagaagaaatagatgcaatggatgttcagcagctttcacaaatagtaccaaaggttgcagtattttacagagctagcccaaggcacaagatgaaaattattaagtcgctacagaagaacggttcagttgtagccatgacaggagatggagtaaatgatgcagttgctctgaaggctgcagacattggagttgcgatgggccagactggtacagatgtttgcaaagaggcagcagacatgatcctagtggatgatgattttcaaaccataatgtctgcaatcgaagagggtaaagggatttataataacattaaaaatttcgttagattccagctgagcacgagtatagcagcattaactttaatctcattggctacattaatgaactttcctaatcctctcaatgccatgcagattttgtggatcaatattattatggatggacccccagctcagagccttggagtagaaccagtggataaagatgtcattcgtaaacctcctcgcaactggaaagacagcattttgactaaaaacttgatacttaaaatacttgtttcatcaataatcattgtttgtgggactttgtttgtcttctggcgtgagctacgagacaatgtgattacacctcgagacacaacaatgaccttcacatgctttgtgttttttgacatgttcaatgcactaagttccagatcccagaccaagtctgtgtttgagattggactctgcagtaatagaatgttttgctatgcagttcttggatccatcatgggacaattactagttatttactttcctccgcttcagaaggtttttcagactgagagcctaagcatactggatctgttgtttcttttgggtctcacctcatcagtgtgcatagtggcagaaattataaagaaggttgaaaggagcagggaaaagatccagaagcatgtctggctctgggagaggagtggacagcagctggttgagatacatccccatctggagacaggactgccactgacagaagatgtgagctgtgtctaagtccagtcttgtgcccagccgtgtctgcgccttcactctttggaactctgcatacaacatcttagcaccatcttcctgcagctcttccttacctaaataaagaaacagcccaagggcagtatttctaaaagcactgtaacagcttttcattttctccacatatactacaaattctataaagaaagaaattaatttaaaaaaactaagatgtttttctcttctggcttcataaatgccttgctgtataaattgaaatattgatactgaactgtctttttaatgatgacctaactttattcaacccatcggaatttactttttccctgaaataagatcttttccactggtctactacctgaccataaacatgtctgcatttgaattctctaaaccctaaatctgtgtctatgaaaaatacaaatgactattaaatattattctctttactgttctctttcaccgaaa

SEQ ID NO: 77159 - DNA, 2922 bp, Artificial Sequence
  derived and/or modified sequence
atggacagcctgctgccccccagcagattcagctacttcaagaagtaccccctgcacgccatcagaagatacctgagcaccctgagaaaccagagagccgaggagcaggtggccagattccagaagatccccaacggcgagaacgagaccatgatccccgtgctgaccagcaagaaggccagcgagctgcccgtgagcgaggtggccagcatcctgcaggccgacctgcagaacggcctgaacaagtgcgaggtgagccacagaagagccttccacggctggaacgagttcgacatcagcgaggacgagcccctgtggaagaagtacatcagccagttcaagaaccccctgatcatgctgctgctggccagcgccgtgatcagcgtgctgatgcaccagttcgacgacgccgtgagcatcaccgtggccatcctgatcgtggtgaccgtggccttcgtgcaggagtacagaagcgagaagagcctggaggagctgagcaagctggtgccccccgagtgccactgcgtgagagagggcaagctggagcacaccctggccagagacctggtgcccggcgacaccgtgtgcctgagcgtgggcgacagagtgcccgccgacctgagactgttcgaggccgtggacctgagcatcgacgagagcagcctgaccggcgagaccaccccctgcagcaaggtgaccgccccccagcccgccgccaccaacggcgacctggccagcagaagcaacatcgccttcatgggcaccctggtgagatgcggcaaggccaagggcgtggtgatcggcaccggcgagaacagcgagttcggcgaggtgttcaagatgatgcaggccgaggaggcccccaagacccccctgcagaagagcatggacctgctgggcaagcagctgagcttctacagcttcggcatcatcggcatcatcatgctggtgggctggctgctgggcaaggacatcctggagatgttcaccatcagcgtgagcctggccgtggccgccatccccgagggcctgcccatcgtggtgaccgtgaccctggccctgggcgtgatgagaatggtgaagaagagagccatcgtgaagaagctgcccatcgtggagaccctgggctgctgcaacgtgatctgcagcgacaagaccggcaccctgaccaagaacgagatgaccgtgacccacatcttcaccagcgacggcctgcacgccgaggtgaccggcgtgggctacaaccagttcggcgaggtgatcgtggacggcgacgtggtgcacggcttctacaaccccgccgtgagcagaatcgtggaggccggctgcgtgtgcaacgacgccgtgatcagaaacaacaccctgatgggcaagcccaccgagggcgccctgatcgccctggccatgaagatgggcctggacggcctgcagcaggactacatcagaaaggccgagtaccccttcagcagcgagcagaagtggatggccgtgaagtgcgtgcacagaacccagcaggacagacccgagatctgcttcatgaagggcgcctacgagcaggtgatcaagtactgcaccacctaccagagcaagggccagaccctgaccctgacccagcagcagagagacgtgtaccagcaggagaaggccagaatgggcagcgccggcctgagagtgctggccctggccagcggccccgagctgggccagctgaccttcctgggcctggtgggcatcatcgacccccccagaaccggcgtgaaggaggccgtgaccaccctgatcgccagcggcgtgagcatcaagatgatcaccggcgacagccaggagaccgccgtggccatcgccagcagactgggcctgtacagcaagaccagccagagcgtgagcggcgaggagatcgacgccatggacgtgcagcagctgagccagatcgtgcccaaggtggccgtgttctacagagccagccccagacacaagatgaagatcatcaagagcctgcagaagaacggcagcgtggtggccatgaccggcgacggcgtgaacgacgccgtggccctgaaggccgccgacatcggcgtggccatgggccagaccggcaccgacgtgtgcaaggaggccgccgacatgatcctggtggacgacgacttccagaccatcatgagcgccatcgaggagggcaagggcatctacaacaacatcaagaacttcgtgagattccagctgagcaccagcatcgccgccctgaccctgatcagcctggccaccctgatgaacttccccaaccccctgaacgccatgcagatcctgtggatcaacatcatcatggacggcccccccgcccagagcctgggcgtggagcccgtggacaaggacgtgatcagaaagccccccagaaactggaaggacagcatcctgaccaagaacctgatcctgaagatcctggtgagcagcatcatcatcgtgtgcggcaccctgttcgtgttctggagagagctgagagacaacgtgatcacccccagagacaccaccatgaccttcacctgcttcgtgttcttcgacatgttcaacgccctgagcagcagaagccagaccaagagcgtgttcgagatcggcctgtgcagcaacagaatgttctgctacgccgtgctgggcagcatcatgggccagctgctggtgatctacttcccccccctgcagaaggtgttccagaccgagagcctgagcatcctggacctgctgttcctgctgggcctgaccagcagcgtgtgcatcgtggccgagatcatcaagaaggtggagagaagcagagagaagatccagaagcacgtgtggctgtgggagagaagcggccagcagctggtggagatccacccccacctggagaccggcctgcccctgaccgaggacgtgagctgcgtgtag

SEQ ID NO: 77160 - DNA, 4888 bp, Artificial Sequence
  derived and/or modified sequence
attgcatttctggacgcttctagacagtgttcatacttggctgtctggtttcaccaggaactctacccaaaagaggaaacagcaaggagaacatttgctttgtttgtaggagggaagttgtcgagctacaaacaaatctttaggcatctgaggaattgctaagtttctaatttcatatggttgctgacaaggaggtgcagacaaggaccctcttgctttcctcactatggatagtctgttgcctccatctagattctcttatttcaaaaaatatcctctccatgcaattaggagatatttatcgacgctgagaaaccaaagagccgaagaacaggttgcacgttttcaaaaaatacctaatggtgaaaatgagacaatgattcctgtattgacatcaaaaaaagcaagtgaattaccagtcagtgaagttgcaagcattctccaagctgatcttcagaatggtctaaacaaatgtgaagttagtcataggcgagcctttcatggctggaatgagtttgatattagtgaagatgagccactgtggaagaagtatatttctcagtttaaaaatccccttattatgctgcttctggcttctgcagtcatcagtgttttaatgcatcagtttgatgatgccgtcagtatcactgtggcaatacttatcgttgttacagttgcctttgttcaggaatatcgttcagaaaaatctcttgaagaattgagtaaacttgtgccaccagaatgccattgtgtgcgtgaaggaaaattggagcatacacttgcccgagacttggttccaggtgatacagtttgcctttctgttggggatagagttcctgctgacttacgcttgtttgaggctgtggatctttccattgatgagtccagcttgacaggtgagacaacgccttgttctaaggtgacagctcctcagccagctgcaactaatggagatcttgcatcgagaagtaacattgcctttatgggaacactggtcagatgtggcaaagcaaagggtgttgtcattggaacaggagaaaattctgaatttggggaggtttttaaaatgatgcaagcagaagaggcaccaaaaacccctctgcagaagagcatggacctcttaggaaaacaactttccttttactcctttggtataataggaatcatcatgttggttggctggttactgggaaaagatatcctggaaatgtttactattagtgtaagtttggctgtagcagcaattcctgaaggtctccccattgtggtcacagtgacgctagctcttggtgttatgagaatggtgaagaaaagggccattgtgaaaaagctgcctattgttgaaactctgggctgctgtaatgtgatttgttcagataaaactggaacactgacgaagaatgaaatgactgttactcacatatttacttcagatggtctgcatgctgaggttactggagttggctataatcaatttggggaagtgattgttgatggtgatgttgttcatggattctataacccagctgttagcagaattgttgaggcgggctgtgtgtgcaatgatgctgtaattagaaacaatactctaatggggaagccaacagaaggggccttaattgctcttgcaatgaagatgggtcttgatggacttcaacaagactacatcagaaaagctgaatacccttttagctctgagcaaaagtggatggctgttaagtgtgtacaccgaacacagcaggacagaccagagatttgttttatgaaaggtgcttacgaacaagtaattaagtactgtactacataccagagcaaagggcagaccttgacacttactcagcagcagagagatgtgtaccaacaagagaaggcacgcatgggctcagcgggactcagagttcttgctttggcttctggtcctgaactgggacagctgacatttcttggcttggtgggaatcattgatccacctagaactggtgtgaaagaagctgttacaacactcattgcctcaggagtatcaataaaaatgattactggagattcacaggagactgcagttgcaatcgccagtcgtctgggattgtattccaaaacttcccagtcagtctcaggagaagaaatagatgcaatggatgttcagcagctttcacaaatagtaccaaaggttgcagtattttacagagctagcccaaggcacaagatgaaaattattaagtcgctacagaagaacggttcagttgtagccatgacaggagatggagtaaatgatgcagttgctctgaaggctgcagacattggagttgcgatgggccagactggtacagatgtttgcaaagaggcagcagacatgatcctagtggatgatgattttcaaaccataatgtctgcaatcgaagagggtaaagggatttataataacattaaaaatttcgttagattccagctgagcacgagtatagcagcattaactttaatctcattggctacattaatgaactttcctaatcctctcaatgccatgcagattttgtggatcaatattattatggatggacccccagctcagagccttggagtagaaccagtggataaagatgtcattcgtaaacctcctcgcaactggaaagacagcattttgactaaaaacttgatacttaaaatacttgtttcatcaataatcattgtttgtgggactttgtttgtcttctggcgtgagctacgagacaatgtgattacacctcgagacacaacaatgaccttcacatgctttgtgttttttgacatgttcaatgcactaagttccagatcccagaccaagtctgtgtttgagattggactctgcagtaatagaatgttttgctatgcagttcttggatccatcatgggacaattactagttatttactttcctccgcttcagaaggtttttcagactgagagcctaagcatactggatctgttgtttcttttgggtctcacctcatcagtgtgcatagtggcagaaattataaagaaggttgaaaggagcagggaaaagatccagaagcatgttagttcgacatcatcatcttttcttgaagtatgatgcatattgcattattttatttgcaaactaggaattgcagtctgaggatcatttagaagggcaagttcaagaggatatgaagatttgagaactttttaactattcattgactaaaaatgaacattaatgttaaagacttaagactttaacctgctggcagtcccaaatgaaattatgcaactttgatatcatattccttgatttaaattggcttttgtgattgagtgaaactttataaagcatatggtcagttatttaattaaaaaggcaaaacctgaaccaccttctgcacttaaagaagtctaacagtacaaatacactatctatcttagatagatatatttttttttatttttaaatattgtactatttatggtggtggggctttcttactaatacacaaataaatttaatcatttcaaaggcattctatttggtttagaagttgattcccaggagtgccatatttcagctactgtatttcctttttcttgtaatgtaagcagctcagataccatgtgctatcatttttgtatcaagttttttgcacaggatgtgaccactgtcagatcactgttcttttctttctttttgtgattgaaaagcctatactacaatttgaagtaaatttttgtttttcttagtaagtgtaaatggttgctttatttttattttaaaaaggtatgtctttggtttggcagaattcatgcagggctatcaagtggtgttctagggtaacagtgtccataattaacgcttagtcatagagtcaaaaacatttaagactgattgggttgaagtttataataaattatattaacatgtcttcctttttgaggtaaagatatatactttgtcaaatatcattttgtcatcctctaaatataaatccaaatacctcagctaagtaattctattttattatttttactgttatgtatgtttttaatcatatttcttaggaagtataggctactggacttagaataaaaagtccccaaacccaaacaaatggtttatgaaccagagtatatgtggaagattctttgctggtcttgctctgtgtgcatctgaagcttctttggcctagattttagcacaaacctgagtatatctcttctactttcatcatgtgttctgtaccttctttttgtttcattgggcatgctagggaaataggtggattttgtgtgtaatgccatcagtttttatgaaagcttgatgaggtataggtcatttgttttgagtatgtgggccagaaatttaaaattagaaatttgtttttctgttgagtatataaacaaaaattggtcccaattctaacaggtttaatccttcttgaagccaataagttttatcttttataatctgtcaggatgaaccactccttagcttttatccaatattaaactgcaagtgttagcactgaaatattgtcattgatagggaaaatatctattctttgagtcattgttactgaggcagttgagtgtaaggagctggctgcagtttattctacttaaccctttaaggctgaattgtcaaatgtacattgttccatgtcgttagatggaacatggaagccattgtctaatcaactctatcattagtgacttgatgtctcataccttaattttgtaatgatttttattctctgttacaaagacttgaaatacgtattaaatgcacgttaatgttttgctttgcattttaggttcagattatgacttgattgaaataaatgtgcctatacattcatttgctttgtactataaaaataaaaatgatttcttaagttaa

SEQ ID NO: 77161 - protein, 944 aa, Artificial Sequence
  derived and/or modified sequence
MDSLLPPSRFSYFKKYPLHAIRRYLSTLRNQRAEEQVARFQKIPNGENETMIPVLTSKKASELPVSEVASILQFKNPLIMLLLASAVISVLMHQFDDAVSITVAILIVVTVAFVQEYRSEKSLEELSKLVPPECHCVREGKLEHTLARDLVPGDTVCLSVGDRVPADLRLFEAVDLSIDESSLTGETTPCSKVTAPQPAATNGDLASRSNIAFMGTLVRCGKAKGVVIGTGENSEFGEVFKMMQAEEAPKTPLQKSMDLLGKQLSFYSFGIIGIIMLVGWLLGKDILEMFTISVSLAVAAIPEGLPIVVTVTLALGVMRMVKKRAIVKKLPIVETLGCCNVICSDKTGTLTKNEMTVTHIFTSDGLHAEVTGVGYNQFGEVIVDGDVVHGFYNPAVSRIVEAGCVCNDAVIRNNTLMGKPTEGALIALAMKMGLDGLQQDYIRKAEYPFSSEQKWMAVKCVHRTQQDRPEICFMKGAYEQVIKYCTTYQSKGQTLTLTQQQRDVYQQEKARMGSAGLRVLALASGPELGQLTFLGLVGIIDPPRTGVKEAVTTLIASGVSIKMITGDSQETAVAIASRLGLYSKTSQSVSGEEIDAMDVQQLSQIVPKVAVFYRASPRHKMKIIKSLQKNGSVVAMTGDGVNDAVALKAADIGVAMGQTGTDVCKEAADMILVDDDFQTIMSAIEEGKGIYNNIKNFVRFQLSTSIAALTLISLATLMNFPNPLNAMQILWINIIMDGPPAQSLGVEPVDKDVIRKPPRNWKDSILTKNLILKILVSSIIIVCGTLFVFWRELRDNVITPRDTTMTFTCFVFFDMFNALSSRSQTKSVFEIGLCSNRMFCYAVLGSIMGQLLVIYFPPLQKVFQTESLSILDLLFLLGLTSSVCIVAEIIKKVERSREKIQKHVSSTSSSFLEVWLWERSGQQLVEIHPHLETGLPLTEDVSCV

SEQ ID NO: 77162 - DNA, 2835 bp, Artificial Sequence
  derived and/or modified sequence
atggactctcttctgcctccaagcagattcagttacttcaagaagtatccgttgcacgccattcggcgctacctaagcactctgaggaaccagagggcagaagagcaggtggctcggttccagaaaatccctaatggggaaaacgaaacgatgatcccagtgctgaccagcaagaaggcctctgaactcccggtgtctgaggtggccagtattctgcaattcaaaaatcctctcattatgctgcttctcgcttctgctgttatcagtgtgctgatgcaccagtttgatgacgctgtgtcaattacagtcgccattctgattgtcgttactgtcgcatttgttcaggaatatcgctctgagaagtcccttgaggaactcagcaagctagtgcctcctgaatgtcattgtgtgcgtgaagggaagctagagcacacactcgcgcgtgacctggtaccaggagacacagtgtgtctgagcgttggagaccgggtacctgccgacttgagattattcgaggccgtcgacctgagtatcgatgaatcaagcctcaccggagaaacgactccgtgtagcaaggtgaccgccccacaacccgccgccactaatggggatcttgcctcccgctccaatattgcatttatgggaaccctcgtgcggtgtggtaaagccaaaggggtagtcattggaacgggcgaaaattctgaattcggggaggtatttaagatgatgcaggccgaagaggcacctaagaccccactgcaaaaaagcatggacctgcttggaaaacagctctctttctattcttttggtatcattggaattatcatgcttgtaggatggctgcttggcaaagacatcttggagatgttcacaattagcgtttctttagcagtggcagctattcccgagggactgccaatcgtggtaaccgttactctggccctgggagtaatgcggatggtaaaaaagcgagctatcgtgaagaagctcccaatcgtggagaccctcggctgctgtaacgtcatctgttccgataagactggaacactgacaaagaatgaaatgactgtgacacatatctttacgtccgatggtctccatgccgaagttacgggtgtgggatacaaccagttcggggaggtgatcgtcgacggcgacgtggtgcacggattctacaatccagcagtatcaagaatcgtcgaagcggggtgtgtgtgcaacgatgcagtgatcagaaataacacgctgatggggaagccaaccgaaggtgctctgattgcactcgcaatgaaaatgggcctggatgggctccagcaggactacatccgcaaagctgagtaccccttctccagtgagcagaagtggatggctgttaagtgcgtccaccgcacacaacaagatagaccagaaatttgcttcatgaaaggagcctatgagcaagtgatcaagtactgcacaacataccagtcaaaaggccagactttgacattgacccagcaacagcgagatgtatatcagcaagagaaggcaaggatgggttctgcaggtctcagagtcctggcactggcttcgggacctgaactaggacagttgaccttcctgggcctagttggcataatcgacccccctagaactggagttaaagaggcagtgacaacccttattgccagcggcgtgtccattaagatgataaccggagattcccaagaaactgccgtggccattgcaagcagacttgggttgtattcaaaaacgtcacagtcagtgagcggcgaagaaattgacgctatggatgtccagcaactcagccaaatagtgccgaaagtcgctgtgttctatcgagcatctcctagacacaaaatgaagatcatcaagtcccttcaaaagaatggaagtgtagtggccatgacgggcgacggcgtaaatgatgctgtggcactgaaagccgcagacataggcgtggcgatgggacagactggaaccgacgtctgtaaagaggccgctgacatgatcttggtcgatgacgattttcagactataatgtctgctattgaagaaggcaaggggatctataacaatatcaaaaacttcgtacgctttcagctctccacgagcatagccgccctcacactgataagcctggctactctgatgaatttcccgaatccattgaatgctatgcagattttgtggattaatatcatcatggacgggccacctgcacagtcactgggtgtggaacccgttgataaggatgtgatacggaagccacctcggaactggaaggactctattctaactaagaacctgatcctgaaaatcttagtatcttcaattataatcgtttgcggaacactgtttgtgttttggcgagagctgagagacaatgttattacgcctcgtgacaccacaatgaccttcacttgttttgtgttcttcgacatgttcaacgctctctcttctagatcacagaccaaaagcgtgtttgagattggattgtgctccaatcgaatgttctgctacgctgtactcggatctatcatgggtcagcttcttgtgatctactttcctcctctgcagaaagtcttccagacagagagcctgagtattctagatttactgttccttcttggcctgacaagtagtgtgtgtatcgtcgccgaaattattaagaaggtggaacgatcccgggagaaaatacagaaacacgtgagttcgacatctagcagcttcctcgaggtttggctgtgggagcggtctggccagcagttggtggaaatccacccccacctggaaactggactaccgctcaccgaagatgtgtcttgcgtgtag

SEQ ID NO: 77163 - DNA, 2835 bp, Artificial Sequence
  derived and/or modified sequence
atggacagcctgctgccccccagccgcttctcctacttcaagaagtaccccctgcacgccatccgccgctacctgagcaccctgaggaaccagagagctgaggagcaggtggcccgcttccagaagatccccaatggagaaaatgagaccatgatccctgtgctgaccagcaagaaggccagcgagctgcctgtgtctgaggtggccagcatcctgcagttcaagaaccccctcatcatgctgctgctggccagcgctgtgatctctgtgctgatgcaccagtttgatgatgctgtgtccatcaccgtggccatcctgattgtggtgacagtggcctttgtgcaggagtacagaagtgagaagagcctggaggagctgagcaagctggtgcccccagagtgccactgtgtgcgggagggcaagctggagcacaccctggcccgggacctggtgcctggggacacagtgtgcctgtctgtgggggacagagtgcctgctgacctgcggctgtttgaagctgtggacctgagcattgatgagagcagcctgaccggggagaccaccccctgcagcaaggtgacagccccccagcctgctgccaccaacggggacctggccagccgcagcaacatcgccttcatgggcaccctggtgcgctgtgggaaggccaagggcgtggtgattggcaccggggagaacagcgagtttggagaggtgttcaagatgatgcaggccgaggaggcccccaagacccccctgcagaagtccatggacctgctgggcaagcagctgtccttctacagctttggcatcatcggcatcatcatgctggtgggctggctgctgggcaaggacatcctggagatgttcaccatctctgtgtccctggccgtggccgccatccctgagggcctgcccatcgtggtgacagtgaccctggccctgggcgtgatgaggatggtgaagaagagggccatcgtgaagaagctgcccatcgtggagaccctgggctgctgcaacgtcatctgcagcgacaagacaggcaccctgaccaagaatgagatgacagtgacccacatcttcaccagtgatggcctgcacgccgaggtgactggagtgggctacaaccagtttggagaggtgattgtggatggagatgtggtgcacggcttctacaacccagctgtgtccagaattgtggaggccggctgtgtgtgcaatgatgctgtgatccggaacaacaccctgatgggcaagcccacagaaggagccctgattgccctggccatgaagatgggcctggatggcctgcagcaggactacatcaggaaggccgagtaccccttcagcagcgagcagaagtggatggctgtgaagtgtgtgcacaggacccagcaggacaggcctgagatctgcttcatgaagggggcctatgagcaggtgatcaagtactgcaccacctaccagagcaagggccagaccctgaccctgacccagcagcagagagatgtgtaccagcaggagaaggccaggatgggcagcgctggcctgcgggtgctggccctggccagcggccctgagctgggccagctgaccttcctgggcctggtgggcatcatcgacccccccaggactggagtgaaggaggccgtgaccaccctgattgccagcggcgtgtccatcaagatgatcactggagacagccaggagacagctgtggccatcgccagccggctgggcctgtacagcaagaccagccagagcgtgtctggagaggagattgatgccatggatgtgcagcagctgagccagatcgtgcccaaggtggccgtgttctaccgggccagccccaggcacaagatgaagatcatcaagagcctgcagaagaatggatctgtggtggccatgactggagatggagtgaatgatgctgtggccctgaaggctgctgacatcggcgtggccatgggccagacaggaacagatgtgtgcaaggaggccgctgacatgatcctggtggatgatgacttccagaccatcatgtctgccatcgaggagggcaagggcatctacaacaacatcaagaactttgtgcgcttccagctgagcaccagcattgctgccctgaccctcatcagcctggccaccctgatgaacttccccaaccccctgaatgccatgcagatcctgtggatcaacatcatcatggatggccccccagcccagagcctgggcgtggagcctgtggacaaggatgtgatcaggaagcccccaagaaactggaaggacagcatcctgaccaagaacctgatcctgaagatcctggtgagcagcatcatcatcgtgtgtggcaccctgtttgtgttctggagggagctgcgggacaacgtcatcaccccccgggacaccaccatgaccttcacctgctttgtgttctttgacatgtttaatgccctgagcagccgcagccagaccaagtctgtgtttgaaattggcctgtgcagcaacaggatgttctgctatgctgtgctgggcagcatcatgggccagctgctggtgatctacttcccccccctgcagaaggtgttccagacagagagcctgagcatcctggacctgctcttcctgctgggcctgaccagctctgtgtgcatcgtggccgagatcatcaagaaggtggagaggagccgggagaagatccagaagcacgtgagcagcaccagcagcagcttcctggaggtgtggctgtgggagaggagcggccagcagctggtggagatccacccccacctggagaccggcctgcccctgacagaagatgtgtcctgtgtgtag

SEQ ID NO: 77164 - DNA, 2835 bp, Artificial Sequence
  derived and/or modified sequence
atggacagcctgctgccccccagccggttcagctacttcaagaagtaccccctgcacgcaattcgcagatatcttagcacattaagaaaccagagagcggaagagcaggtggctaggttccaaaagatccctaatggtgagaatgagaccatgatcccggtgttgacatctaagaaagcatccgagctaccagtttcagaagtggctagcattctccagtttaagaatccactaatcatgctactgcttgccagtgccgttatctccgtcttaatgcatcagttcgatgatgctgtgtccatcacagtcgccatcctgatcgtcgtaacagtcgcctttgtgcaggaataccggtctgagaagtccctcgaagaactgtcaaaattagtccccccagagtgtcattgtgtgcgagagggaaagttagagcatacgctggcaagggacttggtgcctggtgacacagtttgtctctccgtaggggaccgggttcccgcggatctgcgcttgttcgaggccgtagacctttccattgatgagagcagcctcactggcgagacaaccccatgctctaaagtcaccgcaccgcagccagccgccaccaatggcgatctggcatctaggtctaacattgcttttatggggacattggtgcgctgcggcaaagccaagggagttgttataggcactggcgaaaattcggaattcggggaagtgttcaaaatgatgcaggcagaggaagcaccgaaaacaccactacaaaagagcatggatctacttggaaaacagttgagtttttatagcttcggaatcatcgggataataatgcttgtgggctggctgctcgggaaagatattctcgagatgtttaccatttccgtgtctctggctgtcgcagctatccccgagggccttcccatcgtagtgaccgtgacgctagctctgggggtgatgagaatggtgaagaagagagccattgtgaaaaagcttcctattgtagaaaccctgggatgctgtaacgtcatctgctccgacaagaccgggactttaactaaaaatgagatgactgtgactcatatatttacatccgatgggctccatgctgaagttacaggtgtcggatacaaccagttcggggaagtcattgtggatggtgacgttgttcatggcttctataacccggccgttagtcgcatagtggaggcagggtgtgtgtgcaacgatgctgtgattagaaacaacacacttatgggcaagcctaccgagggagcgctgattgccctggccatgaaaatggggctggatggcctgcagcaagactacattcgcaaggcagaatatccattctcgagcgaacagaagtggatggccgtcaaatgtgttcacagaacccaacaagatcgaccagagatctgttttatgaagggggcctatgaacaggtaatcaagtactgtaccacgtaccagtccaaaggtcaaaccctgacgctgacccaacagcagcgcgacgtgtaccagcaggagaaagcaagaatgggatccgcaggccttcgggtgctggctcttgcctccggccccgagctcggccaactcacttttctcggcctggtcggcatcattgacccacctaggaccggggtgaaagaagcagtgactactctcatcgccagtggcgtgagcatcaagatgatcacaggggacagccaggaaaccgccgtcgctatcgcctctcgactgggactctactctaaaactagtcagtccgtgtcaggagaagagattgacgccatggatgtgcaacagttgtcacagatcgtacccaaggtggccgtgttctacagggcctcccctcggcacaagatgaaaattattaagtctcttcagaagaacggaagtgtggtggctatgaccggcgatggggtgaatgacgcggtggcacttaaggccgccgatattggagtcgctatgggacagactggaaccgatgtatgtaaggaggccgccgatatgatcctggtggatgacgactttcaaacaattatgtccgctatcgaagagggaaagggtatatacaacaacatcaaaaatttcgtgaggttccagctgagtacctccatcgcagctctgacccttatctccctcgctaccctgatgaacttcccaaatccgctaaacgcgatgcagattttgtggattaatatcatcatggatggcccccccgcccagtcactcggggtcgaacccgtggataaggatgtgataaggaagccaccccggaactggaaggatagcattttgaccaaaaacctcatcctcaagatcctggtgagttcaatcattatcgtgtgcgggaccttatttgtgttttggagagagctgcgtgataacgtcatcaccccccgggataccacaatgacattcacatgcttcgtctttttcgacatgttcaatgcccttagttctcgctcccaaactaaaagcgtttttgagattggactctgtagcaatcgcatgttttgctatgccgtgttgggttccatcatgggtcagctgttggtcatctattttccccccctgcaaaaagtatttcagacggagagcttgtcgatactcgacttgctcttcttactgggcttgacctctagcgtctgcattgtggctgagattattaagaaagtagagcgcagtagggaaaagattcaaaagcatgtgagctctacatccagtagcttcctcgaggtgtggctgtgggaaagatcaggacagcaactggtcgagatacatccgcacttggagaccgggctgccattgacagaggacgtctcctgtgtctag

SEQ ID NO: 77165 - DNA, 2835 bp, Artificial Sequence
  derived and/or modified sequence
atggatagtctgcttccacctagtaggttttcgtacttcaaaaagtaccctcttcatgcaataaggaggtacttaagcacactgagaaaccagagagcggaagagcaagttgccagatttcagaagattcccaatggcgaaaacgagacaatgatcccagtattgacttccaagaaggcttccgagttaccagtgtctgaagtcgcctcaatcctgcagtttaaaaatcccctgattatgcttctgctggccagtgccgtcatctctgttctcatgcatcaatttgacgatgcggtttcgatcacagtggcaattcttatcgttgttactgtggcattcgtgcaggaatataggagcgaaaagtccctggaggagctttccaagctcgttcctccagagtgtcattgcgtacgggaaggcaaactggagcacactctggccagggatttagtgcctggagacaccgtgtgtctctcagtgggcgacagggtgccagctgacctgcggttatttgaggcggtcgatcttagtatcgacgagagttcgctcaccggcgagaccacaccctgtagcaaggtaacagccccacagccagccgcaaccaacggcgacctggcctctagatctaacatcgctttcatggggaccttggttcggtgcggtaaagctaaaggagtcgttatcgggaccggcgaaaattcagaatttggcgaggtattcaaaatgatgcaggcggaagaagccccaaagacacctctgcagaaaagcatggatcttctagggaagcagctatcattctactctttcggcattataggcatcattatgctcgtcgggtggctgctgggcaaggatatcctggagatgtttacaatctccgtgtcactggccgtcgccgcaatccccgaaggcctccccatcgtcgttaccgtgacactagcattgggcgttatgcggatggtgaaaaaacgagcaattgtcaaaaaactgccaattgtggagactctgggatgctgcaacgtgatctgttctgataagaccggcaccctcactaaaaatgagatgactgtgactcacatcttcacctctgacggactgcacgctgaagttaccggcgtcggctacaatcagttcggagaagtcattgtggatggggatgtcgtgcatggattctacaacccagcagtatcacgcatcgtcgaggctggttgtgtgtgcaatgacgccgtgatcagaaacaatacactcatgggtaaaccaacagaaggtgctctgattgccctcgctatgaagatgggcctggatggtctgcaacaggactatattagaaaggccgaatacccttttagcagtgagcaaaaatggatggcagttaagtgtgtgcataggactcagcaggacaggcctgagatctgttttatgaagggggcatacgaacaggtaattaaatattgtactacataccaaagtaaaggacagactctcacactcacccagcaacagagagacgtgtatcagcaggagaaggcgaggatgggatcagcgggtcttcgggtcctggctttagcatcgggacctgagttaggccagcttacctttctgggcctggtgggtattatcgacccgccacggacgggggtgaaagaggctgtcacaacgcttatcgctagtggggtttccattaaaatgattaccggcgatagccaggagacagcagtcgctattgcatctcggctgggcctgtattccaagacctcacagtccgtctctggtgaagagatagatgccatggacgttcaacagctgtctcagattgtgccgaaggtggccgtcttttaccgcgcatccccaaggcacaagatgaaaataataaagtccttacagaagaacggatctgtcgtagctatgacaggcgatggcgtgaatgacgctgttgctttgaaagctgccgacatcggagtcgcaatggggcaaacaggcaccgatgtttgcaaagaggccgctgatatgatccttgtggacgacgatttccagaccatcatgtctgccattgaagaaggcaaagggatctacaacaatatcaaaaactttgtgcgctttcaactctctacttcaatcgcagccctcaccctcatttctctggccacactgatgaactttccaaacccccttaacgcaatgcagatcctgtggatcaacatcattatggacgggcctccagctcagagcctgggggtcgagcccgtcgataaagatgtgattcgcaagcctcctaggaattggaaggactctattttaacgaagaatctcatcctgaagattctagtttcttcaatcattatcgtctgcggcaccttatttgtattttggagagagctccgcgacaacgtcatcacccccagagacactactatgacttttacttgctttgtcttcttcgacatgttcaacgccctctccagtaggtcccagaccaaaagcgtgtttgagatcggactgtgttccaaccggatgttttgttacgccgtccttggtagtatcatgggacagctgctcgtcatctacttccctccactccagaaagtattccagaccgagtctttatccatactagacctgctgtttctgctcggtctcacttcatcggtgtgcatcgtggctgaaattatcaagaaagtcgagcgttctcgggagaaaattcagaagcacgttagcagtaccagttccagttttctggaagtgtggctctgggaacggagcgggcaacaactggtggagattcacccacatctggaaaccggcctccctttaacagaagacgttagttgtgtgtag

SEQ ID NO: 77166 - DNA, 3277 bp, Artificial Sequence
  derived and/or modified sequence
atatggttgctgacaaggaggtgcagacaaggaccctcttgctttcctcactatggatagtctgttgcctccatctagattctcttatttcaaaaaatatcctctccatgcaattaggagatatttatcgacgctgagaaaccaaagagccgaagaacaggttgcacgttttcaaaaaatacctaatggtgaaaatgagacaatgattcctgtattgacatcaaaaaaagcaagtgaattaccagtcagtgaagttgcaagcattctccaatttaaaaatccccttattatgctgcttctggcttctgcagtcatcagtgttttaatgcatcagtttgatgatgccgtcagtatcactgtggcaatacttatcgttgttacagttgcctttgttcaggaatatcgttcagaaaaatctcttgaagaattgagtaaacttgtgccaccagaatgccattgtgtgcgtgaaggaaaattggagcatacacttgcccgagacttggttccaggtgatacagtttgcctttctgttggggatagagttcctgctgacttacgcttgtttgaggctgtggatctttccattgatgagtccagcttgacaggtgagacaacgccttgttctaaggtgacagctcctcagccagctgcaactaatggagatcttgcatcgagaagtaacattgcctttatgggaacactggtcagatgtggcaaagcaaagggtgttgtcattggaacaggagaaaattctgaatttggggaggtttttaaaatgatgcaagcagaagaggcaccaaaaacccctctgcagaagagcatggacctcttaggaaaacaactttccttttactcctttggtataataggaatcatcatgttggttggctggttactgggaaaagatatcctggaaatgtttactattagtgtaagtttggctgtagcagcaattcctgaaggtctccccattgtggtcacagtgacgctagctcttggtgttatgagaatggtgaagaaaagggccattgtgaaaaagctgcctattgttgaaactctgggctgctgtaatgtgatttgttcagataaaactggaacactgacgaagaatgaaatgactgttactcacatatttacttcagatggtctgcatgctgaggttactggagttggctataatcaatttggggaagtgattgttgatggtgatgttgttcatggattctataacccagctgttagcagaattgttgaggcgggctgtgtgtgcaatgatgctgtaattagaaacaatactctaatggggaagccaacagaaggggccttaattgctcttgcaatgaagatgggtcttgatggacttcaacaagactacatcagaaaagctgaatacccttttagctctgagcaaaagtggatggctgttaagtgtgtacaccgaacacagcaggacagaccagagatttgttttatgaaaggtgcttacgaacaagtaattaagtactgtactacataccagagcaaagggcagaccttgacacttactcagcagcagagagatgtgtaccaacaagagaaggcacgcatgggctcagcgggactcagagttcttgctttggcttctggtcctgaactgggacagctgacatttcttggcttggtgggaatcattgatccacctagaactggtgtgaaagaagctgttacaacactcattgcctcaggagtatcaataaaaatgattactggagattcacaggagactgcagttgcaatcgccagtcgtctgggattgtattccaaaacttcccagtcagtctcaggagaagaaatagatgcaatggatgttcagcagctttcacaaatagtaccaaaggttgcagtattttacagagctagcccaaggcacaagatgaaaattattaagtcgctacagaagaacggttcagttgtagccatgacaggagatggagtaaatgatgcagttgctctgaaggctgcagacattggagttgcgatgggccagactggtacagatgtttgcaaagaggcagcagacatgatcctagtggatgatgattttcaaaccataatgtctgcaatcgaagagggtaaagggatttataataacattaaaaatttcgttagattccagctgagcacgagtatagcagcattaactttaatctcattggctacattaatgaactttcctaatcctctcaatgccatgcagattttgtggatcaatattattatggatggacccccagctcagagccttggagtagaaccagtggataaagatgtcattcgtaaacctcctcgcaactggaaagacagcattttgactaaaaacttgatacttaaaatacttgtttcatcaataatcattgtttgtgggactttgtttgtcttctggcgtgagctacgagacaatgtgattacacctcgagacacaacaatgaccttcacatgctttgtgttttttgacatgttcaatgcactaagttccagatcccagaccaagtctgtgtttgagattggactctgcagtaatagaatgttttgctatgcagttcttggatccatcatgggacaattactagttatttactttcctccgcttcagaaggtttttcagactgagagcctaagcatactggatctgttgtttcttttgggtctcacctcatcagtgtgcatagtggcagaaattataaagaaggttgaaaggagcagggaaaagatccagaagcatgttagttcgacatcatcatcttttcttgaagtctggctctgggagaggagtggacagcagctggttgagatacatccccatctggagacaggactgccactgacagaagatgtgagctgtgtctaagtccagtcttgtgcccagccgtgtctgcgccttcactctttggaactctgcatacaacatcttagcaccatcttcctgcagctcttccttacctaaataaagaaacagcccaagggcagtatttctaaaagcactgtaacagcttttcattttctccacatatactacaaattctataaagaaagaaattaatttaaaaaaactaagatgtttttctcttctggcttcataaatgccttgctgtataaattgaaatattgatactgaactgtctttttaatgatgacctaactttattcaacccatcggaatttactttttccctgaaataagatcttttccactggtctactacctgaccataaacatgtctgcatttgaattctctaa

SEQ ID NO: 77167 - DNA, 2835 bp, Artificial Sequence
  derived and/or modified sequence
atggacagcctgctgccccccagcagattcagctacttcaagaagtaccccctgcacgccatcagaagatacctgagcaccctgagaaaccagagagccgaggagcaggtggccagattccagaagatccccaacggcgagaacgagaccatgatccccgtgctgaccagcaagaaggccagcgagctgcccgtgagcgaggtggccagcatcctgcagttcaagaaccccctgatcatgctgctgctggccagcgccgtgatcagcgtgctgatgcaccagttcgacgacgccgtgagcatcaccgtggccatcctgatcgtggtgaccgtggccttcgtgcaggagtacagaagcgagaagagcctggaggagctgagcaagctggtgccccccgagtgccactgcgtgagagagggcaagctggagcacaccctggccagagacctggtgcccggcgacaccgtgtgcctgagcgtgggcgacagagtgcccgccgacctgagactgttcgaggccgtggacctgagcatcgacgagagcagcctgaccggcgagaccaccccctgcagcaaggtgaccgccccccagcccgccgccaccaacggcgacctggccagcagaagcaacatcgccttcatgggcaccctggtgagatgcggcaaggccaagggcgtggtgatcggcaccggcgagaacagcgagttcggcgaggtgttcaagatgatgcaggccgaggaggcccccaagacccccctgcagaagagcatggacctgctgggcaagcagctgagcttctacagcttcggcatcatcggcatcatcatgctggtgggctggctgctgggcaaggacatcctggagatgttcaccatcagcgtgagcctggccgtggccgccatccccgagggcctgcccatcgtggtgaccgtgaccctggccctgggcgtgatgagaatggtgaagaagagagccatcgtgaagaagctgcccatcgtggagaccctgggctgctgcaacgtgatctgcagcgacaagaccggcaccctgaccaagaacgagatgaccgtgacccacatcttcaccagcgacggcctgcacgccgaggtgaccggcgtgggctacaaccagttcggcgaggtgatcgtggacggcgacgtggtgcacggcttctacaaccccgccgtgagcagaatcgtggaggccggctgcgtgtgcaacgacgccgtgatcagaaacaacaccctgatgggcaagcccaccgagggcgccctgatcgccctggccatgaagatgggcctggacggcctgcagcaggactacatcagaaaggccgagtaccccttcagcagcgagcagaagtggatggccgtgaagtgcgtgcacagaacccagcaggacagacccgagatctgcttcatgaagggcgcctacgagcaggtgatcaagtactgcaccacctaccagagcaagggccagaccctgaccctgacccagcagcagagagacgtgtaccagcaggagaaggccagaatgggcagcgccggcctgagagtgctggccctggccagcggccccgagctgggccagctgaccttcctgggcctggtgggcatcatcgacccccccagaaccggcgtgaaggaggccgtgaccaccctgatcgccagcggcgtgagcatcaagatgatcaccggcgacagccaggagaccgccgtggccatcgccagcagactgggcctgtacagcaagaccagccagagcgtgagcggcgaggagatcgacgccatggacgtgcagcagctgagccagatcgtgcccaaggtggccgtgttctacagagccagccccagacacaagatgaagatcatcaagagcctgcagaagaacggcagcgtggtggccatgaccggcgacggcgtgaacgacgccgtggccctgaaggccgccgacatcggcgtggccatgggccagaccggcaccgacgtgtgcaaggaggccgccgacatgatcctggtggacgacgacttccagaccatcatgagcgccatcgaggagggcaagggcatctacaacaacatcaagaacttcgtgagattccagctgagcaccagcatcgccgccctgaccctgatcagcctggccaccctgatgaacttccccaaccccctgaacgccatgcagatcctgtggatcaacatcatcatggacggcccccccgcccagagcctgggcgtggagcccgtggacaaggacgtgatcagaaagccccccagaaactggaaggacagcatcctgaccaagaacctgatcctgaagatcctggtgagcagcatcatcatcgtgtgcggcaccctgttcgtgttctggagagagctgagagacaacgtgatcacccccagagacaccaccatgaccttcacctgcttcgtgttcttcgacatgttcaacgccctgagcagcagaagccagaccaagagcgtgttcgagatcggcctgtgcagcaacagaatgttctgctacgccgtgctgggcagcatcatgggccagctgctggtgatctacttcccccccctgcagaaggtgttccagaccgagagcctgagcatcctggacctgctgttcctgctgggcctgaccagcagcgtgtgcatcgtggccgagatcatcaagaaggtggagagaagcagagagaagatccagaagcacgtgagcagcaccagcagcagcttcctggaggtgtggctgtgggagagaagcggccagcagctggtggagatccacccccacctggagaccggcctgcccctgaccgaggacgtgagctgcgtgtag

SEQ ID NO: 77168 - protein, 923 aa, Artificial Sequence
  derived and/or modified sequence
MIPVLTSKKASELPVSEVASILQADLQNGLNKCEVSHRRAFHGWNEFDISEDEPLWKKYISQFKNPLIMLLLASAVISVLMHQFDDAVSITVAILIVVTVAFVQEYRSEKSLEELSKLVPPECHCVREGKLEHTLARDLVPGDTVCLSVGDRVPADLRLFEAVDLSIDESSLTGETTPCSKVTAPQPAATNGDLASRSNIAFMGTLVRCGKAKGVVIGTGENSEFGEVFKMMQAEEAPKTPLQKSMDLLGKQLSFYSFGIIGIIMLVGWLLGKDILEMFTISVSLAVAAIPEGLPIVVTVTLALGVMRMVKKRAIVKKLPIVETLGCCNVICSDKTGTLTKNEMTVTHIFTSDGLHAEVTGVGYNQFGEVIVDGDVVHGFYNPAVSRIVEAGCVCNDAVIRNNTLMGKPTEGALIALAMKMGLDGLQQDYIRKAEYPFSSEQKWMAVKCVHRTQQDRPEICFMKGAYEQVIKYCTTYQSKGQTLTLTQQQRDVYQQEKARMGSAGLRVLALASGPELGQLTFLGLVGIIDPPRTGVKEAVTTLIASGVSIKMITGDSQETAVAIASRLGLYSKTSQSVSGEEIDAMDVQQLSQIVPKVAVFYRASPRHKMKIIKSLQKNGSVVAMTGDGVNDAVALKAADIGVAMGQTGTDVCKEAADMILVDDDFQTIMSAIEEGKGIYNNIKNFVRFQLSTSIAALTLISLATLMNFPNPLNAMQILWINIIMDGPPAQSLGVEPVDKDVIRKPPRNWKDSILTKNLILKILVSSIIIVCGTLFVFWRELRDNVITPRDTTMTFTCFVFFDMFNALSSRSQTKSVFEIGLCSNRMFCYAVLGSIMGQLLVIYFPPLQKVFQTESLSILDLLFLLGLTSSVCIVAEIIKKVERSREKIQKHVWLWERSGQQLVEIHPHLETGLPLTEDVSCV

SEQ ID NO: 77169 - DNA, 2772 bp, Artificial Sequence
  derived and/or modified sequence
atgatccctgtgctgacttcaaagaaggcctcggagctcccggttagcgaggtagctagcatactgcaggccgacctccagaacggattaaacaagtgcgaggtgtcacatcgacgtgcctttcacgggtggaatgaatttgacatttccgaagatgagcctttatggaaaaaatatatcagtcagttcaagaacccactgatcatgctgctgcttgcatccgccgtgatctcagtactgatgcaccaatttgatgatgcggtcagtatcacagtggcaatacttatcgtggtgacagtggcttttgtgcaggagtataggtctgagaagagtctggaggagctgtccaaactggtgccccccgagtgtcactgcgtgcgggaaggcaagctggagcacaccctggcacgtgatctagtgccgggtgacactgtgtgtttgtcagtgggagacagggtgcccgccgatctgaggctgttcgaggctgtggatctgtctatcgatgagagtagcctcactggcgagaccaccccctgtagcaaggtgactgcaccccagccagccgcaacaaacggcgaccttgccagcaggtcaaacattgcatttatggggacgctcgtcaggtgcggaaaggctaaaggggtggtgatcggaaccggcgagaattctgagttcggagaggtttttaaaatgatgcaggccgaagaggcaccaaaaacgcccctgcagaagtcaatggacctccttgggaaacagctgtccttttacagtttcgggattattggaatcattatgttagtgggctggctgttgggcaaagatatcctggagatgtttaccattagtgtatcccttgctgttgccgccattccagaaggcctgccgatcgtggtgaccgtgactctcgccctgggcgttatgcgcatggtaaaaaagcgggcaatcgtcaagaaactcccgatagtagaaaccctgggctgttgcaacgtgatctgtagcgacaagaccggaaccctgacaaaaaatgagatgaccgtcactcatatatttacctctgacggactgcacgctgaggtaaccggggtcggctataaccagttcggagaagttatcgtggatggcgatgtggtgcacggattttacaaccctgctgtttctcggatcgtcgaggccggctgcgtttgcaatgacgccgtgattagaaacaacacattgatgggaaaaccaactgaaggagcactgatcgccttagccatgaaaatggggctggacggccttcagcaagactatattaggaaagctgagtatccgttttcatccgagcaaaagtggatggcagtgaaatgcgtgcatcgcacccagcaggatcgtcccgagatctgtttcatgaagggggcctatgaacaggttataaaatactgcaccacgtatcaaagtaaaggtcagaccctcaccctcacacagcaacagcgcgatgtatatcaacaggaaaaggccagaatgggatcagcaggtttgcgcgtgctggcacttgcctctggcccagagctcgggcagctgacctttcttggactggttggaattatcgatcccccccgcacgggagtgaaggaggcggtgaccacactcattgcctcaggagtgagcatcaaaatgatcactggggattcccaggagacagctgtcgccattgcgagtcgcctggggctgtattctaagacgtcccagtccgtatctggcgaagaaatcgacgctatggatgttcaacagctgtcacagatcgtgcccaaggtggctgtgttttaccgtgcgtcgcctcgccataagatgaagatcatcaagagccttcagaaaaacgggagtgtggtcgccatgaccggagatggggttaacgatgctgtagctctcaaggccgcagacatcggtgtggcaatgggtcagaccggtactgacgtgtgcaaggaagcagccgatatgatcttagtcgatgacgatttccaaacaatcatgagcgccatagaagaaggcaagggcatctacaataatattaagaatttcgttagatttcagctatctacgagtattgccgccctgacattaattagcctcgcaaccctcatgaacttcccaaatcccctcaatgccatgcaaatcctctggatcaacattatcatggatggccctcctgcacagagtctgggagtggaacccgttgacaaggatgtaattagaaagcctcccagaaattggaaggactccatcttaaccaagaatcttatcttgaagatactggttagttccattatcattgtgtgcgggactcttttcgtgttctggagagaattgagagataatgtaattacgccgcgggataccaccatgacgttcacgtgctttgtgttcttcgacatgttcaacgcgctgagcagccgaagtcaaaccaagagcgttttcgaaatcggcctgtgttcaaatcgcatgttttgctacgccgtcctgggctctatcatgggtcagttgttagtgatttacttccctcctttacagaaagttttccagactgagtccctgtctattctggacttactgttccttctcggcctgacctcaagcgtctgtattgttgccgaaattatcaaaaaggtcgagcgctcgcgagagaagatccagaagcatgtgtggttgtgggaacgcagtggacagcagctggtagagatccacccccatctcgaaactggtctccctctgactgaagacgtgagttgcgtatag

SEQ ID NO: 77170 - DNA, 2772 bp, Artificial Sequence
  derived and/or modified sequence
atgattccagtgctgactagcaaaaaggcctcagaactgccagtctcagaggtcgccagcattctgcaggccgacctccagaatggcctcaataagtgcgaggtgtctcacaggcgcgcattccatggctggaatgagttcgatatctcagaggatgagccactctggaaaaagtacatctcacagtttaagaatcccctgattatgctgctccttgcgtctgccgtcatttcagtcttgatgcatcagtttgacgacgcagtcagtatcacagtggccattttgatcgtggttaccgtcgcgttcgtgcaagagtaccggagcgaaaagagcctggaggaattgtccaagctggtaccgccagagtgccattgcgtacgggaaggcaagctggagcacacactcgccagagacctcgtacctggcgacacagtgtgcctgagcgttggcgaccgcgttcccgcagatctccgcttgttcgaagccgtggacctttccatcgatgagagctcactgactggagaaaccacaccctgtagcaaggtgacagcacctcaacctgcggcaactaatggagatctagctagccgttctaatatcgcattcatgggaacgctcgtgcgctgcgggaaggccaagggagtagtgatcggcaccggcgagaactctgagttcggtgaggtgtttaagatgatgcaggccgaagaggcgcccaaaactcctctgcagaaatccatggatttacttggaaaacaactcagtttctattcatttggaatcattgggatcatcatgttggtcggatggctcttggggaaagacattctggaaatgttcactatttcagtgagcctggcagtggccgcgatcccagagggattgcctatcgtcgtgaccgttactcttgctctgggagtaatgaggatggtgaaaaaaagagctatcgtgaagaaattacccatcgtggaaacactgggctgttgtaacgtgatctgctctgacaagactggtacattaacgaagaatgagatgactgtgacacacatttttacctccgatggtttgcacgcagaggtcacgggagtcggatataatcagttcggcgaagtgatagttgacggagacgttgtgcacggtttctacaaccctgcagtgtcaagaatcgtggaagccggctgcgtgtgtaatgacgcagtcattaggaataacacgctgatgggcaaacccactgaaggtgctctgatcgcactggctatgaaaatgggtttagacggtttgcagcaggactacattcgaaaggccgaatatccattctccagcgagcagaaatggatggctgtgaaatgtgtccaccggacacagcaggatcgacctgagatctgcttcatgaagggcgcatacgaacaggtcattaaatactgtaccacctatcagtctaaaggccagactcttaccctaactcagcagcagcgggatgtgtaccagcaagaaaaagcaagaatggggtcagccgggctgagggttttggccttagcctcaggaccagaactcggccagctcacctttttgggcctcgtagggattatcgatccccctaggacgggcgttaaagaggcggttacaaccctgatcgcaagtggggtttccattaagatgatcactggggacagccaggaaacagccgtggctatcgccagcaggctcggactctatagcaaaacatctcagagcgttagtggtgaagagatcgatgcaatggacgtgcagcagctgtcgcagatagtccctaaggtcgccgttttctacagggcgtcgccacggcataagatgaaaatcattaagtctctccagaagaatggcagcgtggtcgccatgacaggagatggggtgaatgatgcagtggctctcaaggctgccgatatcggtgtggcgatggggcagaccgggacagacgtttgtaaagaagcagccgatatgatactggtcgatgacgatttccagactatcatgtctgctattgaggaggggaaagggatctataataacattaagaactttgttaggttccaactgtcaacgtctatcgccgcgcttacactcatcagcctcgcgaccctgatgaattttcctaaccccctcaacgcaatgcagatcttgtggattaacattatcatggacggccctccagcccagagcctgggggtggagccggtagacaaagatgtgattcggaagccccctcggaactggaaagactcaattctgaccaaaaatttgatactgaaaatcctggtctcctcaattatcatagtgtgcggaactctgttcgtgttctggagagagctgagagataacgttattactcctagagacaccacaatgaccttcacttgttttgtattttttgatatgttcaatgccctgagcagtaggagtcagacaaagtcagtgtttgagattggcctttgctctaacaggatgttctgctatgccgttctgggctctattatggggcagcttctggtgatctattttccccctcttcaaaaggtgttccaaactgagagcctgtccatcctcgatctgctgttccttttgggactgacgtcgtctgtgtgtatagtggccgaaattatcaagaaagtggaacggtcccgggagaagattcaaaaacacgtgtggctgtgggagaggtccggacaacagctggtggagatccacccccacctggagacaggcctgccacttactgaagacgtgagttgtgtgtag

SEQ ID NO: 77171 - DNA, 2772 bp, Artificial Sequence
  derived and/or modified sequence
atgatccctgtgctgaccagcaagaaggccagcgagctgcctgtgtctgaggtggccagcatcctgcaggccgacctgcagaatggcctgaacaagtgtgaggtgagccaccggcgggccttccacggctggaatgaatttgacatcagtgaagatgagcccctgtggaagaagtacatcagccagttcaagaaccccctcatcatgctgctgctggccagcgctgtgatctctgtgctgatgcaccagtttgatgatgctgtgtccatcaccgtggccatcctgattgtggtgacagtggcctttgtgcaggagtacagaagtgagaagagcctggaggagctgagcaagctggtgcccccagagtgccactgtgtgcgggagggcaagctggagcacaccctggcccgggacctggtgcctggggacacagtgtgcctgtctgtgggggacagagtgcctgctgacctgcggctgtttgaggccgtggacctgagcattgatgagagcagcctgactggagagaccaccccctgcagcaaggtgacagccccccagcctgctgccaccaatggagacctggccagccgcagcaacatcgccttcatgggcaccctggtgcgctgtgggaaggccaagggcgtggtgattggaactggagaaaattctgaatttggagaggtgttcaagatgatgcaggccgaggaggcccccaagacccccctgcagaagtccatggacctgctgggcaagcagctgtccttctacagctttggcatcatcggcatcatcatgctggtgggctggctgctgggcaaggacatcctggagatgttcaccatctctgtgtccctggccgtggccgccatccctgagggcctgcccatcgtggtgacagtgaccctggccctgggcgtgatgaggatggtgaagaagagggccatcgtgaagaagctgcccatcgtggagaccctgggctgctgcaacgtcatctgcagcgacaagacaggcaccctgaccaagaatgagatgacagtgacccacatcttcaccagtgatggcctgcatgctgaggtgactggagtgggctacaaccagtttggagaggtgattgtggatggagatgtggtgcacggcttctacaacccagctgtgagccgcatcgtggaggccggctgtgtgtgcaatgatgctgtgatccggaacaacaccctgatgggcaagcccacagagggcgccctgattgccctggccatgaagatgggcctggatggcctgcagcaggactacatcaggaaggccgagtaccccttcagcagcgagcagaagtggatggctgtgaagtgtgtgcacaggacccagcaggacaggcctgagatctgcttcatgaagggggcctatgagcaggtgatcaagtactgcaccacctaccagagcaagggccagaccctgaccctgacccagcagcagagagatgtgtaccagcaggagaaggccaggatgggcagcgctggcctgcgggtgctggccctggccagcggccctgagctgggccagctgaccttcctgggcctggtgggcatcattgatcctcccaggactggagtgaaggaggccgtgaccaccctcatcgccagcggcgtgtccatcaagatgatcaccggggacagccaggagacagctgtggccatcgccagccggctgggcctgtacagcaagaccagccagagcgtgtctggagaggagattgatgccatggatgtgcagcagctgagccagatcgtgcccaaggtggccgtgttctaccgggccagccccaggcacaagatgaagatcatcaagagcctgcagaagaatggatctgtggtggccatgactggagatggagtgaatgatgctgtggccctgaaggctgctgacattggagtggccatgggccagacaggaacagatgtgtgcaaggaggccgctgacatgatcctggtggatgatgacttccagaccatcatgtctgccatcgaggagggcaagggcatctacaacaacatcaagaactttgtgcgcttccagctgagcaccagcattgctgccctgaccctcatcagcctggccaccctgatgaacttccccaaccccctgaatgccatgcagatcctgtggatcaacatcatcatggatggccccccagcccagagcctgggcgtggagcctgtggacaaggatgtgatcaggaagccacccaggaactggaaggacagcatcctgaccaagaacctgatcctgaagatcctggtgagcagcatcatcatcgtgtgtggcaccctgtttgtgttctggagggagctgcgggacaacgtcatcaccccccgggacaccaccatgaccttcacctgctttgtgttctttgacatgtttaatgccctgagcagccgcagccagaccaagtctgtgtttgagatcggcctgtgcagcaacaggatgttctgctatgctgtgctgggcagcatcatgggccagctgctggtgatctacttcccccccctgcagaaggtgttccagacagagagcctgagcatcctggacctgctcttcctgctgggcctgaccagctctgtgtgcatcgtggccgagatcatcaagaaggtggagaggagccgggagaagatccagaagcacgtgtggctgtgggagaggagcggccagcagctggtggagatccacccccacctggagaccggcctgcccctgacagaagatgtgtcctgtgtgtag

SEQ ID NO: 77172 - DNA, 2772 bp, Artificial Sequence
  derived and/or modified sequence
atgatccccgtgctgaccagcaagaaggccagcgagctgcccgtgagcgaggtggcttccatccttcaagccgacctgcagaacggtctgaacaagtgcgaggtatcccaccggagggcattccacggctggaatgagtttgatatcagtgaggacgaacccctgtggaaaaagtatatctcccagttcaagaaccctctgattatgctgctcctcgccagcgccgtgatctcagtgttgatgcatcagtttgacgacgctgtaagtattaccgttgccatccttattgtcgtgaccgtggcgttcgttcaagagtatcgcagcgagaaatccttggaagaactcagtaagttggtgcctcccgaatgccactgcgtcagagagggtaagctggagcatacgctggcgagggacctggtacctggcgatacagtctgcctcagtgtaggcgaccgagttcctgctgacttaaggcttttcgaagctgtggacctgagcatcgacgaaagtagtcttacaggcgagacaacaccttgttcgaaagtgactgctccccaaccagccgccactaatggtgatttggcgtcccggagtaatattgctttcatgggcacactggtgcggtgtgggaaggccaagggcgtggtcataggcaccggcgagaactcggagttcggggaggttttcaaaatgatgcaagcagaggaggctcccaaaactcccttgcagaagtcaatggaccttcttgggaagcagctcagcttttacagctttggcataatcggtattattatgctggtgggctggctactggggaaagacatccttgagatgttcacaatttcagtcagccttgcagttgccgccattccagagggcctgccaattgtggtgacggtgacactcgccctgggtgtgatgagaatggtaaaaaagcgcgcaatcgtgaaaaagttaccaattgttgagacattggggtgctgcaacgtgatctgctccgacaagacaggtaccctgacgaagaacgagatgacagtcacccatatttttacctctgacggactacatgccgaggtgaccggagtgggctacaatcaatttggtgaggtgattgtggacggagatgttgtgcacggattttacaatccggccgtctccagaatcgtcgaagcaggatgcgtgtgtaatgacgccgtgattcgtaacaacaccctaatgggaaaaccaaccgagggcgccttgattgctttagcgatgaaaatgggattggatggacttcaacaagactatatcagaaaggcggagtacccattctccagcgagcagaagtggatggcagtcaaatgtgtgcatagaacacagcaggacagacccgagatctgctttatgaaaggcgcatacgagcaagttatcaagtattgtaccacgtatcaaagcaaaggacagactctgaccctgacccagcagcagagggacgtctaccagcaggagaaggcccgaatgggatctgccggcctcagggtacttgccctggccagtggtcccgagctggggcagctcaccttcctcggactagttgggatcatcgatccacctcggactggggttaaggaggctgtgacaacattaatagcttccggagtctccatcaaaatgatcacaggtgactctcaggaaaccgccgtggcgatcgctagtagattgggtctctactccaaaacatcccaatctgtgtccggcgaagagatcgacgccatggacgtgcaacagctttcgcaaatcgtgccaaaagttgctgtgttttaccgggcctcccccaggcacaaaatgaagattattaaatccctccagaagaatgggagcgtggtcgccatgaccggggacggcgtgaatgatgcagtggcactcaaggcggccgatatcggtgtggctatggggcaaaccggaaccgacgtgtgcaaggaggccgcagatatgatactggtggatgatgacttccagaccatcatgagcgccatcgaggaggggaaggggatttacaataacatcaagaactttgttagattccagctgtccacttcgattgctgctctcacccttatcagcctggccacattaatgaacttcccgaatccactgaatgccatgcagattctgtggattaacatcatcatggatggacccccagctcagtccctcggcgttgaaccagtggacaaggatgtcattaggaaaccacctcgaaactggaaggactcaatactaacaaaaaatttgatcctgaaaattctggtctcttccatcatcattgtgtgtggtaccttatttgtcttttggagagagctacgcgataacgtgatcactcctcgggatacaacaatgaccttcacctgttttgtgtttttcgacatgtttaatgccctttcgagcagatctcaaaccaagagcgtgttcgagatcggtctttgttccaatcgcatgttttgttatgccgtgctcggatctatcatggggcagctgctcgtcatctactttccccctttgcagaaagtgttccaaacagaatccttgtcaatcctcgatttgctttttctcctcggccttaccagtagtgtgtgcatcgtcgcagagattataaagaaagtggagaggagccgcgaaaaaatacagaaacatgtatggctgtgggaaaggagcgggcagcagctggtagagatccacccccacctggagaccgggttgcctctgacagaagatgtttcatgcgtgtag

SEQ ID NO: 77173 - DNA, 2772 bp, Artificial Sequence
  derived and/or modified sequence
atgatccccgtgctgaccagcaagaaggccagcgagctgcccgtgagcgaggtggcttcgatcctccaggcagatctgcagaacggccttaataaatgtgaagtatcacatcgccgggcatttcacggatggaacgagttcgatatttcagaggacgaacccctgtggaaaaagtacatttcccagttcaaaaatcctcttattatgttgttattggcctctgcagtcatttcagtattgatgcaccagttcgatgacgccgtgtcgattactgtggccatccttatagtggtaacggtggccttcgtccaggagtacagaagtgagaagagtctggaggagttatccaagctcgtccctcctgaatgccactgcgtgcgggagggtaagctggagcatactctggctcgtgacttggtgccaggggatacagtttgtttaagcgtcggtgatcgggtgcccgccgatctaagattattcgaggctgtggatctgtcaatcgacgaatccagcctgacgggtgagactaccccttgttccaaggttacagcaccccagccggctgctactaatggagacctggcgtcacgaagcaatatcgcatttatgggaacccttgtgaggtgcggaaaggctaagggtgtagtgataggtacaggggaaaatagcgagtttggggaggtctttaagatgatgcaagccgaggaggctcctaagacacctttgcagaaatccatggaccttcttggcaaacagctctctttttacagttttggaatcatcggaattattatgctggtcggctggcttctggggaaagacatcctggagatgttcactattagcgtgagtttagctgtagcagccattcctgaggggctgccaatcgtggtgactgttacattagctctcggagttatgcggatggtcaagaaacgtgccattgtaaaaaagctcccaattgttgaaaccctgggatgctgtaacgtgatctgcagtgacaagactggaacccttaccaagaacgaaatgacagtcacccatattttcaccagcgatggactacatgcggaggtcacaggagtcgggtacaaccaattcggagaggtcatcgttgatggcgatgtcgtgcacgggttttacaacccagccgtgagcagaatcgttgaggccggctgcgtgtgtaatgatgctgtgatcagaaacaataccctgatgggtaagcctaccgagggcgcactaattgccctggctatgaagatgggactggacggcctgcagcaggactatattaggaaagcagagtatcctttctccagtgaacagaaatggatggcagtcaaatgcgtccacaggacacagcaggatagaccggagatctgcttcatgaaaggcgcttatgagcaggttattaagtattgtaccacatatcaatccaaggggcagacacttacactcactcagcagcagcgggacgtgtaccagcaagaaaaggcacgtatgggctccgccggcttgcgagtgcttgctctagcctcgggtccggagcttggacaattaacttttctcgggctggtggggatcattgaccctccccggactggcgtaaaggaggccgttactactctgatcgcaagcggcgttagcatcaaaatgattaccggcgatagtcaggagaccgccgtggccatagctagtcgcttgggactgtattccaaaaccagccagagtgtgtccggagaagagatcgatgcaatggatgtgcagcagttgtcccagatagtgcccaaggtagctgtgttttatcgcgcttccccacggcacaaaatgaagataatcaagagtctgcagaaaaatggaagtgtcgttgcaatgaccggggacggggttaatgacgccgtggcactcaaggccgccgatataggagtggccatgggccaaactggcactgatgtgtgtaaggaggccgctgacatgatactggtcgatgacgactttcagaccatcatgagcgcaatcgaagaggggaaagggatttataataatatcaagaatttcgtcagatttcagctcagcacatcaattgctgctctgaccctgatcagccttgccaccctgatgaacttccccaatccactcaatgctatgcaaatcttgtggatcaacatcatcatggacggaccccctgctcagagtctgggggtggagcccgtcgacaaggacgtaattagaaaaccacctagaaactggaaggattctatattaactaagaacctgatacttaagatactggtctcttctattatcatcgtgtgcggaaccttgtttgtgttttggcgggagctccgagacaacgttatcactccacgggacacgacaatgacctttacatgcttcgtgtttttcgatatgttcaatgctcttagtagccgcagccagaccaagtccgtcttcgaaattgggctgtgctccaacagaatgttctgctatgccgtgctcggttcaataatgggacagttgcttgtgatctacttccctccactccaaaaggtcttccagactgaatccttgagcatactggacctgcttttccttcttggcttgacttcctccgtgtgcatcgtggcagaaattatcaagaaagttgagcgtagtagagagaaaatccagaaacatgtttggttatgggaaaggtcaggccagcagttggttgaaatacaccctcacctggagacggggctgccattaacggaggacgtgtcatgtgtctag

SEQ ID NO: 77174 - DNA, 2772 bp, Artificial Sequence
  derived and/or modified sequence
atgatccccgtgctgacctccaaaaaggcttcagagcttcccgtgtccgaggtagcctcaatcctccaggccgatctgcagaacggactcaacaaatgtgaggtctctcatcggcgtgccttccatggctggaatgagttcgacatttccgaggacgaaccactctggaagaagtacattagtcagtttaagaatccattgataatgctcctcctcgccagcgcggtgataagcgtcctgatgcaccaattcgacgatgctgtgagcatcacggtcgccattttgatcgttgttaccgtagccttcgtgcaagagtacagatctgagaagagcctcgaggaattgtccaagttagtgcctccagaatgtcattgtgtacgcgagggtaagctggagcacacactcgccagagacctggtgccaggtgataccgtgtgtcttagcgtaggggatagggtgcctgcagatctgaggcttttcgaagctgtcgacctgagcattgatgaaagttccctcacaggagaaactaccccttgttccaaagttacagctccccagcctgctgccacgaatggcgaccttgcttcccggtccaacatcgctttcatgggcacccttgtccggtgcggcaaagcaaagggcgtcgtcataggtacaggtgaaaacagcgaattcggcgaagttttcaaaatgatgcaggccgaggaggctcccaaaacgcctctgcaaaagtctatggatctactgggaaagcagctgagcttttattctttcggtatcatcgggataattatgctagtcggttggcttctgggtaaagacattctggagatgtttacgatcagtgttagcctcgctgtggcggctatccccgagggcctacccatagttgtaactgtcactctggctctcggggtgatgagaatggtcaagaaacgggcaattgtaaagaagctcccaatcgtcgagacgctgggctgttgcaatgtaatatgttctgataaaaccgggaccctcacaaaaaatgagatgacagtcacacatatctttacttctgatggactccatgccgaagtcacaggcgtagggtacaatcagtttggggaggtgatcgtggatggcgacgtagtgcacggtttttacaaccccgctgtgtctcggattgttgaagctggctgtgtgtgcaacgatgccgtgatccggaacaatacattgatgggtaaacccaccgaaggcgcactgattgctctcgcaatgaaaatggggttggacggtctgcagcaggactatatccgaaaggccgagtatccctttagctcagagcaaaagtggatggccgtgaagtgtgttcatagaactcagcaggatagacctgagatctgtttcatgaagggagcctacgagcaggtgattaagtactgcactacttatcagtcaaagggccagaccctgactctcacccagcagcaaagagacgtttatcagcaggaaaaggccaggatgggcagcgcgggacttcgagtcctggctctggcctcgggtcctgagttgggccagttgactttcctgggacttgtgggtataatcgatccccctagaaccggcgtgaaagaagccgtgaccaccctcatcgctagtggtgtcagcattaagatgatcacaggggactctcaggagaccgctgtcgccatcgcctcaagacttggcctctattcgaaaacttctcagtcagtgtcgggagaggaaattgatgctatggatgtacagcaactgagccagattgttcccaaggtagcagtgttttaccgcgcaagtccaaggcacaaaatgaagatcattaaatcactgcagaagaatggctctgttgtagctatgacgggggatggggttaacgatgcggtcgccctgaaagcagccgacatcggagtggccatgggccagaccggcactgatgtgtgtaaggaggccgctgatatgattttggtggatgatgatttccagactattatgtctgctatcgaagagggtaaaggaatctataataacatcaagaatttcgtaagattccagctgtcaacatcaattgcggctttaaccctgattagtctggccaccctgatgaattttcctaatccattgaacgccatgcagatactctggattaacattatcatggacggaccacccgctcagtcactaggcgtggagcctgtcgataaggatgtcatccgcaagccgcctagaaattggaaagactccatcttaaccaaaaacctgatcctcaagattctggtgtcgagcattattatcgtttgcgggacgctatttgttttctggagagaacttcgggataacgtgattacgcccagggatactacgatgacttttacctgtttcgtctttttcgatatgtttaacgctctttcctccagatcccagaccaaaagcgtgtttgagatcggcctgtgctccaaccgcatgttctgttacgccgtccttgggtccattatgggccagttactggttatatattttcccccactgcagaaagtctttcagaccgaaagcctgtcaatcctggatttgctgttcttgttggggttgacgtcatccgtgtgcattgtagcggagattattaagaaagtagagcgttctcgcgagaaaatccagaagcacgtgtggctgtgggaaagaagtggacaacagttggtggagatccatcctcacctcgaaaccggactcccactgactgaagatgttagttgcgtgtag

SEQ ID NO: 77175 - DNA, 2772 bp, Artificial Sequence
  derived and/or modified sequence
atgataccagtgctcactagtaaaaaagcatcagaactgccagtgtctgaagtggcctctatcctacaggcagatctgcaaaatggcctcaataaatgcgaggtaagtcaccgcagagcttttcacgggtggaatgaattcgacattagcgaagatgaaccactctggaagaagtacattagccaatttaaaaatcccctgatcatgctcctgctggcttctgctgtcattagcgtgctgatgcaccaattcgatgacgctgtctccatcacagtggccatcctgatcgttgtgacggttgcattcgtgcaggagtaccgctccgaaaaaagccttgaagaactatccaaactcgtccctccggaatgccactgcgtcagggagggaaagttggagcacaccctcgctagagatttagttcctggcgatactgtttgtttatcagttggcgacagagtcccagctgacctgcgcctttttgaggcagtagatctgtctattgacgaaagttctctcacaggcgaaacaaccccttgtagtaaggtgacagctccacagcccgctgctaccaatggggatctggcctcgcgatcaaatatcgccttcatgggaaccctggtgcgatgtggcaaagccaaaggcgtcgttattgggacaggcgagaatagcgaatttggcgaggtcttcaagatgatgcaggccgaagaagcaccaaagactccgctacagaaaagtatggatctgttgggtaagcagctgtccttctactccttcggaattatcggcataattatgctggttgggtggctgctgggtaaggatattctggagatgtttactatcagcgtgagcctcgccgtcgcagcaatccccgaggggctgcccatcgtggtgacagtgacgctcgcactgggcgtcatgcgcatggtaaaaaaacgcgctattgttaaaaagctgccaatcgtggagaccctgggatgttgcaacgtgatatgctccgataagactggtactttaaccaaaaacgaaatgacagtcactcatatcttcacttctgacggcctgcacgctgaggtgacgggggtcgggtacaaccagttcggcgaagtgattgtggatggggatgtggtgcacggattctacaatcctgctgtgtcccgaatcgtggaggcaggttgcgtgtgtaatgatgctgtgattcgcaacaacactctgatggggaagccaactgaaggtgccctcattgcccttgctatgaagatgggattggacggcttgcaacaagattatattcggaaagctgagtatccctttagttcggagcagaagtggatggccgtgaagtgcgtgcataggacccagcaggaccgtccagaaatctgttttatgaaaggcgcttacgaacaagtgattaaatactgcactacgtatcagtccaaggggcagaccctcacactcacgcaacaacagcgagacgtgtatcagcaggagaaggccaggatgggctcagctgggctgagagtgcttgccctagcaagcgggcctgaattggggcaacttaccttcctcggattggtcggcattattgacccaccgagaacaggcgtgaaagaggcagtgacaactttgattgcatctggagtatcgattaagatgattaccggtgactcccaggagaccgccgtggcgattgcctctcgattaggattgtactctaagacgtctcagtcagtctcaggggaagaaatagatgctatggatgtgcaacagctcagtcagatcgtgccgaaggtggccgtgttttatcgggcttctcctaggcacaagatgaaaatcattaagtccctgcagaaaaacgggtctgtggtggccatgactggggatggagtcaacgatgctgtagccctgaaagctgccgacataggcgtggccatggggcaaacaggcactgacgtttgtaaagaggcagcagatatgatcctcgtcgacgatgacttccagaccattatgtcggctattgaggagggtaagggcatctataacaacattaagaattttgtgcgctttcagctctccacaagcattgccgcacttaccttaatcagtctggcgaccttgatgaatttccccaatccactgaacgcaatgcagattctgtggatcaacatcatcatggacggccctccagcacagtcactgggagtggagccagtcgacaaggatgtcatccgcaaaccgccacgcaactggaaggacagcatcctgaccaagaacttgatcctgaaaatacttgtgtcctccatcatcatcgtgtgcggtaccctgtttgtgttctggagagagttacgagacaatgtcattactcctcgagacactacaatgaccttcacatgcttcgttttcttcgatatgtttaacgctcttagctccaggtcgcaaacaaagagcgtgttcgagatcggtctctgcagcaacagaatgttctgctatgcggttctaggaagcattatgggtcaactgctcgtaatttactttccccctctgcagaaggtcttccaaacagaatccttatctatcttggatctccttttcctcttgggtctgacgagctcagtctgcatagtcgccgagattatcaagaaagtggagcggagcagagagaagatccagaaacatgtatggctgtgggagcgcagcgggcagcaactggtagaaattcatcctcatctcgaaacggggctgcccctcactgaggacgtgtcctgcgtatag

SEQ ID NO: 77176 - DNA, 2772 bp, Artificial Sequence
  derived and/or modified sequence
atgatccccgtgctgaccagcaagaaggccagcgagctgcccgtgagcgaggtggccagcatcctgcaggccgacctgcagaacggcctgaacaagtgcgaggtgagccacagaagagccttccacggctggaacgagttcgacatcagcgaggacgagcccctgtggaagaagtacatcagccagttcaagaaccccctgatcatgctgctgctggccagcgccgtgatcagcgtgctgatgcaccagttcgacgacgccgtgagcatcaccgtggccatcctgatcgtggtgaccgtggccttcgtgcaggagtacagaagcgagaagagcctggaggagctgagcaagctggtgccccccgagtgccactgcgtgagagagggcaagctggagcacaccctggccagagacctggtgcccggcgacaccgtgtgcctgagcgtgggcgacagagtgcccgccgacctgagactgttcgaggccgtggacctgagcatcgacgagagcagcctgaccggcgagaccaccccctgcagcaaggtgaccgccccccagcccgccgccaccaacggcgacctggccagcagaagcaacatcgccttcatgggcaccctggtgagatgcggcaaggccaagggcgtggtgatcggcaccggcgagaacagcgagttcggcgaggtgttcaagatgatgcaggccgaggaggcccccaagacccccctgcagaagagcatggacctgctgggcaagcagctgagcttctacagcttcggcatcatcggcatcatcatgctggtgggctggctgctgggcaaggacatcctggagatgttcaccatcagcgtgagcctggccgtggccgccatccccgagggcctgcccatcgtggtgaccgtgaccctggccctgggcgtgatgagaatggtgaagaagagagccatcgtgaagaagctgcccatcgtggagaccctgggctgctgcaacgtgatctgcagcgacaagaccggcaccctgaccaagaacgagatgaccgtgacccacatcttcaccagcgacggcctgcacgccgaggtgaccggcgtgggctacaaccagttcggcgaggtgatcgtggacggcgacgtggtgcacggcttctacaaccccgccgtgagcagaatcgtggaggccggctgcgtgtgcaacgacgccgtgatcagaaacaacaccctgatgggcaagcccaccgagggcgccctgatcgccctggccatgaagatgggcctggacggcctgcagcaggactacatcagaaaggccgagtaccccttcagcagcgagcagaagtggatggccgtgaagtgcgtgcacagaacccagcaggacagacccgagatctgcttcatgaagggcgcctacgagcaggtgatcaagtactgcaccacctaccagagcaagggccagaccctgaccctgacccagcagcagagagacgtgtaccagcaggagaaggccagaatgggcagcgccggcctgagagtgctggccctggccagcggccccgagctgggccagctgaccttcctgggcctggtgggcatcatcgacccccccagaaccggcgtgaaggaggccgtgaccaccctgatcgccagcggcgtgagcatcaagatgatcaccggcgacagccaggagaccgccgtggccatcgccagcagactgggcctgtacagcaagaccagccagagcgtgagcggcgaggagatcgacgccatggacgtgcagcagctgagccagatcgtgcccaaggtggccgtgttctacagagccagccccagacacaagatgaagatcatcaagagcctgcagaagaacggcagcgtggtggccatgaccggcgacggcgtgaacgacgccgtggccctgaaggccgccgacatcggcgtggccatgggccagaccggcaccgacgtgtgcaaggaggccgccgacatgatcctggtggacgacgacttccagaccatcatgagcgccatcgaggagggcaagggcatctacaacaacatcaagaacttcgtgagattccagctgagcaccagcatcgccgccctgaccctgatcagcctggccaccctgatgaacttccccaaccccctgaacgccatgcagatcctgtggatcaacatcatcatggacggcccccccgcccagagcctgggcgtggagcccgtggacaaggacgtgatcagaaagccccccagaaactggaaggacagcatcctgaccaagaacctgatcctgaagatcctggtgagcagcatcatcatcgtgtgcggcaccctgttcgtgttctggagagagctgagagacaacgtgatcacccccagagacaccaccatgaccttcacctgcttcgtgttcttcgacatgttcaacgccctgagcagcagaagccagaccaagagcgtgttcgagatcggcctgtgcagcaacagaatgttctgctacgccgtgctgggcagcatcatgggccagctgctggtgatctacttcccccccctgcagaaggtgttccagaccgagagcctgagcatcctggacctgctgttcctgctgggcctgaccagcagcgtgtgcatcgtggccgagatcatcaagaaggtggagagaagcagagagaagatccagaagcacgtgtggctgtgggagagaagcggccagcagctggtggagatccacccccacctggagaccggcctgcccctgaccgaggacgtgagctgcgtgtag

SEQ ID NO: 77177 - protein, 888 aa, Artificial Sequence
  derived and/or modified sequence
MKVARFQKIPNGENETMIPVLTSKKASELPVSEVASILQADLQNGLNKCEVSHRRAFHGWNEFDISEDEPLWKKYISQFKNPLIMLLLASAVISVLMHQFDDAVSITVAILIVVTVAFVQEYRSEKSLEELSKLVPPECHCVREGKLEHTLARDLVPGDTVCLSVGDRVPADLRLFEAVDLSIDESSLTGETTPCSKVTAPQPAATNGDLASRSNIAFMGTLVRCGKAKGVVIGTGENSEFGEVFKMMQAEEAPKTPLQKSMDLLGKQLSFYSFGIIGIIMLVGWLLGKDILEMFTISVSLAVAAIPEGLPIVVTVTLALGVMRMVKKRAIVKKLPIVETLGCCNVICSDKTGTLTKNEMTVTHIFTSDGLHAEVTGVGYNQFGEVIVDGDVVHGFYNPAVSRIVEAGCVCNDAVIRNNTLMGKPTEGALIALAMKMGLDGLQQDYIRKAEYPFSSEQKWMAVKCVHRTQQDRPEICFMKGAYEQVIKYCTTYQSKGQTLTLTQQQRDVYQQEKARMGSAGLRVLALASGPELGQLTFLGLVGIIDPPRTGVKEAVTTLIASGVSIKMITGDSQETAVAIASRLGLYSKTSQSVSGEEIDAMDVQQLSQIVPKVAVFYRASPRHKMKIIKSLQKNGSVVAMTGDGVNDAVALKAADIGVAMGQTGTDVCKEAADMILVDDDFQTIMSAIEEGKGIYNNIKNFVRFQLSTSIAALTLISLATLMNFPNPLNAMQILWINIIMDGPPAQSLGVEPVDKDVIRKPPRNWKDSILTKNLILKILVSSIIIVCGTLFVFWRELRDNVITPRDTTMTFTCFVFFDMFNALSSRSQTKSVFEIGLCSNRMFCYAVLGSIMGQLLVIYFPPLQKVFQTESLSILGLALGEEWTAAG

SEQ ID NO: 77178 - DNA, 2667 bp, Artificial Sequence
  derived and/or modified sequence
atgaaggttgccaggtttcagaagatccccaacggagaaaacgagaccatgatcccagtgctcacctctaagaaagcttctgagttacctgtttcagaggtggcgagcatcctgcaggctgatctgcagaatggcctgaataaatgcgaagtgagtcaccgtagggctttccatgggtggaacgaattcgacatcagcgaggatgaacctctgtggaagaagtatatcagccagttcaagaatccactcatcatgctccttctggcttccgcagtcatctctgtcctaatgcaccagttcgacgacgccgtgtcaattactgttgccatcctcatcgtggtgaccgttgcattcgtgcaagagtacaggagtgagaagagtcttgaagaactgtccaaattggtgccacccgagtgtcactgcgtacgagaagggaagctggagcatacactcgcccgtgaccttgtcccaggcgacactgtatgcctatctgtcggagatcgcgttcctgctgatctgaggctcttcgaggccgtggatttaagcatcgatgagtcttcacttacaggcgagacaaccccctgcagtaaggttaccgcccctcaaccggcagctacgaacggcgacctagcatctagaagcaatatcgcgttcatgggcaccctcgttcgctgcgggaaggctaagggcgtggtgataggcactggcgagaactcagaattcggggaagttttcaagatgatgcaggcagaggaggcccccaaaaccccactgcagaagtcaatggatttattgggaaaacagctctccttttattccttcgggataattggaatcatcatgctcgtggggtggctacttggaaaagatattttggaaatgtttaccatatctgtgtcattggccgttgctgccattcccgagggtctgcccatagtagtgactgtaacactggccctgggggtgatgcgcatggtgaagaagcgggccatagtgaagaaattacccatcgtggaaacactcggatgttgtaatgtgatttgttctgacaaaactggaacactcaccaagaacgaaatgacggtcacccacattttcaccagcgacggattacacgcagaagtcactggggttgggtacaaccaattcggcgaggtgattgtggacggcgatgtagtccacggcttttataaccccgcagtgagtagaattgtcgaggccggatgcgtttgcaatgacgcagtgatccggaataataccctaatgggtaagccaactgagggagcgctgattgctctggcgatgaaaatggggcttgacggcttacagcaggattacatcagaaaagccgaatacccgttcagtagtgaacagaaatggatggctgtgaagtgcgtgcataggactcagcaggatagacccgagatatgcttcatgaaaggcgcctacgaacaggtgatcaagtactgtaccacgtaccagtccaaagggcagacgctcacgctgacgcaacagcagcgggatgtgtaccagcaggagaaggctcggatgggcagcgctggcctacgcgtgctggcgcttgcctcagggcccgagttgggacagcttaccttccttgggcttgtgggaatcatcgatccacccagaaccggcgtaaaggaggccgtgacaactctgatcgccagcggagtgagcataaaaatgattactggggattcccaggaaacagcggttgccatagcctcccgactggggctgtattccaaaacctctcaatccgtgagcggcgaagaaattgacgcaatggacgttcagcagctctctcagatcgtgccaaaagtagccgtattctatagagcatcccctagacataagatgaagattatcaaatcgctgcaaaagaacgggagtgtggttgccatgaccggggacggcgtcaatgacgccgtcgctctcaaggccgccgacatcggagtggccatgggccagacgggtaccgacgtatgtaaggaagccgccgatatgatacttgtggatgacgatttccagaccatcatgagcgcgatagaagagggcaagggcatctacaacaacatcaaaaacttcgtgaggtttcagctgtcgacttccattgccgctctgaccctcatcagtttggcaactcttatgaattttcctaatcctcttaatgctatgcaaatactgtggattaacatcattatggatggacccccggcgcagtctcttggggtggaacccgtggataaagacgtcattcggaaacctcctaggaactggaaagatagcatcctaaccaagaatcttatactgaagatattagtgtcgtcaattattattgtgtgcggtaccctgtttgtgttctggagggagcttcgtgataacgtcattacgcccagggacacaaccatgacctttacatgcttcgtcttcttcgacatgttcaatgccttgtctagtcggtcccagaccaagagtgtatttgaaatcggcctgtgttctaatcgcatgttctgttatgcagtattggggtcaatcatgggccaattgctcgtgatatactttccccctctacagaaagttttccagaccgagagcctttctatcttgggcctggccctgggcgaagagtggactgccgcaggatag

SEQ ID NO: 77179 - DNA, 2667 bp, Artificial Sequence
  derived and/or modified sequence
atgaaggtggcccgcttccagaagatccccaatggagaaaatgagaccatgatccctgtgctgaccagcaagaaggccagcgagctgcctgtgtctgaggtggccagcatcctgcaggccgacctgcagaatggcctgaacaagtgtgaggtgagccaccggcgggccttccacggctggaatgaatttgacatcagtgaagatgagcccctgtggaagaagtacatcagccagttcaagaaccccctcatcatgctgctgctggccagcgctgtgatctctgtgctgatgcaccagtttgatgatgctgtgtccatcaccgtggccatcctgattgtggtgacagtggcctttgtgcaggagtacagaagtgagaagagcctggaggagctgagcaagctggtgcccccagagtgccactgtgtgcgggagggcaagctggagcacaccctggcccgggacctggtgcctggggacacagtgtgcctgtctgtgggggacagagtgcctgctgacctgcggctgtttgaggccgtggacctgagcattgatgagagcagcctgactggagagaccaccccctgcagcaaggtgacagccccccagcctgctgccaccaatggagacctggccagccgcagcaacatcgccttcatgggcaccctggtgcgctgtgggaaggccaagggcgtggtgattggaactggagaaaattctgaatttggagaggtgttcaagatgatgcaggccgaggaggcccccaagacccccctgcagaagtccatggacctgctgggcaagcagctgtccttctacagctttggcatcatcggcatcatcatgctggtgggctggctgctgggcaaggacatcctggagatgttcaccatctctgtgtccctggccgtggccgccatccctgagggcctgcccatcgtggtgacagtgaccctggccctgggcgtgatgaggatggtgaagaagagggccatcgtgaagaagctgcccatcgtggagaccctgggctgctgcaacgtcatctgcagcgacaagacaggcaccctgaccaagaatgagatgacagtgacccacatcttcaccagtgatggcctgcatgctgaggtgactggagtgggctacaaccagtttggagaggtgattgtggatggagatgtggtgcacggcttctacaacccagctgtgagccgcatcgtggaggccggctgtgtgtgcaatgatgctgtgatccggaacaacaccctgatgggcaagcccacagagggcgccctgattgccctggccatgaagatgggcctggatggcctgcagcaggactacatcaggaaggccgagtaccccttcagcagcgagcagaagtggatggctgtgaagtgtgtgcacaggacccagcaggacaggcctgagatctgcttcatgaagggggcctatgagcaggtgatcaagtactgcaccacctaccagagcaagggccagaccctgaccctgacccagcagcagagagatgtgtaccagcaggagaaggccaggatgggcagcgctggcctgcgggtgctggccctggccagcggccctgagctgggccagctgaccttcctgggcctggtgggcatcattgatcctcccaggactggagtgaaggaggccgtgaccaccctcatcgccagcggcgtgtccatcaagatgatcaccggggacagccaggagacagctgtggccatcgccagccggctgggcctgtacagcaagaccagccagagcgtgtctggagaggagattgatgccatggatgtgcagcagctgagccagatcgtgcccaaggtggccgtgttctaccgggccagccccaggcacaagatgaagatcatcaagagcctgcagaagaatggatctgtggtggccatgactggagatggagtgaatgatgctgtggccctgaaggctgctgacattggagtggccatgggccagacaggaacagatgtgtgcaaggaggccgctgacatgatcctggtggatgatgacttccagaccatcatgtctgccatcgaggagggcaagggcatctacaacaacatcaagaactttgtgcgcttccagctgagcaccagcattgctgccctgaccctcatcagcctggccaccctgatgaacttccccaaccccctgaatgccatgcagatcctgtggatcaacatcatcatggatggccccccagcccagagcctgggcgtggagcctgtggacaaggatgtgatcaggaagccacccaggaactggaaggacagcatcctgaccaagaacctgatcctgaagatcctggtgagcagcatcatcatcgtgtgtggcaccctgtttgtgttctggagggagctgcgggacaacgtcatcaccccccgggacaccaccatgaccttcacctgctttgtgttctttgacatgtttaatgccctgagcagccgcagccagaccaagtctgtgtttgagatcggcctgtgcagcaacaggatgttctgctatgctgtgctgggcagcatcatgggccagctgctggtgatctacttcccccccctgcagaaggtgttccagacagagagcctgagcatcctgggcctggccctgggggaggagtggacagctgctggatag

SEQ ID NO: 77180 - DNA, 2667 bp, Artificial Sequence
  derived and/or modified sequence
atgaaggtggcccggttccagaagatccccaacggcgagaacgagacaatgattccggtattgacgtccaaaaaggccagcgagctgccagtgtccgaggttgcaagcatcttgcaagctgatctccagaacgggctgaacaagtgtgaggtgtctcatcgccgcgctttccacggatggaatgagtttgatatctccgaggacgaaccgctgtggaagaaatatattagccagttcaagaaccctcttatcatgctcttgttggctagtgccgttatcagcgtgctgatgcatcagtttgacgacgccgtgagtattaccgtggctatcctgatcgtggtcaccgtggcctttgttcaagaatacaggagtgagaaatctttagaggagttgagtaagttggtccccccagagtgccactgcgtccgagaaggcaagctagaacatacgttagcaagggatttggttcccggggataccgtctgtctctcggtgggggatagagtccctgctgatctacgactatttgaggccgtcgacctgagcattgatgagtcttctctcaccggagaaaccaccccttgctcaaaggttaccgctcctcaacccgcggcaaccaatggggatttagccagccgctcaaatatagccttcatgggcacactcgttcgatgcgggaaggccaaaggggtggtgatcggtacaggcgaaaacagtgagtttggggaagtgttcaagatgatgcaggccgaagaggccccgaaaactccactacagaagtccatggacctgctaggaaaacagcttagcttttatagcttcggcattattggcataataatgctagtggggtggctgttagggaaagacatactggaaatgttcacaatttccgtttccctcgcagttgctgctatccccgaaggattgcccatcgtggttacggttactcttgcccttggcgtgatgcgcatggtcaagaaaagggccattgtgaagaagctgcctattgtcgagacacttggctgttgcaacgtgatttgcagcgataagaccgggacactgaccaagaacgaaatgactgttactcacatattcacgtcagatggtctgcacgcagaagtaactggtgtggggtataaccagttcggtgaggtcatagtggatggcgacgtggttcatggattctataatccagccgtatcccggatagtagaagcaggatgcgtatgcaacgacgccgtgatccggaataacacacttatgggaaaacccactgagggggcactaatagctctcgcaatgaagatggggctggacgggctccagcaagattatatcagaaaggcagagtaccccttttcctcagaacagaagtggatggcagtcaagtgtgtgcacaggacccaacaagatcgccctgagatctgttttatgaagggcgcctatgagcaggttatcaagtattgcactacttaccagtcaaaggggcagactcttacattgacccagcagcagagagacgtgtaccagcaggagaaagctcggatgggcagcgcggggctgcgggtcttagccctcgcaagcgggcccgagctcggacagctgacttttcttggtttggtgggaattatagacccacccagaacaggagtcaaggaagctgtgaccaccctcatcgctagcggggtctccataaagatgataactggcgattctcaagaaaccgctgtcgccatcgcctctaggttggggctatatagcaaaacttctcagtcagtgagtggcgaggaaattgacgcaatggatgttcagcagttaagtcagattgtgcccaaagtcgccgtgttctaccgggcttccccccgacacaagatgaagataatcaaatctctacaaaaaaacggctctgtcgtcgccatgactggagacggcgttaatgatgctgtcgccctcaaggccgctgatattggcgttgccatggggcagacaggcacagatgtgtgtaaggaagccgccgatatgattctggtagatgatgattttcagaccatcatgagcgcaattgaagagggaaaagggatatacaacaatattaagaattttgtgcgtttccagctgtccacttccattgcagctttgacactcatcagcctggcaactttaatgaacttccccaaccccctaaacgccatgcagatcctgtggataaatattatcatggatggcccgcctgcccagtccctgggcgtcgagccagttgataaggatgttatccgcaaaccacccaggaattggaaggacagtattcttaccaaaaacttgattctgaagatcctggtgtcctccattattatcgtttgtggtacgttgttcgtgttctggcgggagttgagagacaatgtaattaccccccgtgacacaacgatgacttttacatgtttcgtcttttttgacatgtttaacgccctgagttcccggtcgcagacaaaatctgtatttgaaattggattgtgctcaaatagaatgttctgttacgccgttcttggctccataatgggccagcttctcgtgatttactttcctccgctccagaaagtatttcagacagagtcactgagtatcctcggtttggccctgggcgaggaatggaccgctgcaggatag

SEQ ID NO: 77181 - DNA, 2667 bp, Artificial Sequence
  derived and/or modified sequence
atgaaggtggctcggtttcagaagatccccaacggcgaaaacgaaactatgatccccgtgctgacttccaagaaagcctcagagctacccgtgtccgaggtggcctcaattctccaggctgacttacagaatgggcttaacaagtgcgaggtgagtcatagacgcgcatttcacggctggaatgagttcgatatttccgaggacgaacctctctggaaaaaatatatctcccagttcaaaaacccgctcattatgttactgcttgcttccgccgtcatttcagtcttgatgcatcaatttgatgacgccgtgtcaattaccgttgcgattctgatcgttgtgaccgtggcattcgtgcaggaataccgatccgagaagtctctggaagagttgagcaaactcgtgcctcccgagtgccactgcgtcagagaggggaagctcgagcacacgctggctcgtgacctggtccctggagatactgtgtgtctgtctgtgggggatagggtgcctgctgatcttaggttgttcgaggccgtggatctatccatcgatgagagttctcttaccggggaaaccaccccctgctccaaagtgacagccccacaaccagctgcgaccaacggagacctcgcttcccggagcaatattgcgtttatggggactcttgtgcggtgtggcaaagcaaaaggtgtcgtgatcgggaccggggaaaattccgagtttggggaagtcttcaagatgatgcaagccgaggaagccccaaagacccccctgcagaagagtatggacctgctggggaagcagctgtcgttttatagcttcggcatcattggaataatcatgttggtgggttggttactggggaaggacatcctggagatgttcacaattagtgtttctcttgctgtggcagcaatccccgaggggctgcctattgtggttactgtcaccctcgctctcggagtgatgcgcatggtcaagaaacgtgctatagtcaagaagttgccaattgtcgagactctgggatgctgtaacgttatatgcagcgataaaaccggcaccctaactaaaaacgagatgaccgtgacacacatcttcacctccgacgggttacacgctgaagttacaggagttggatataaccagtttggtgaagtgatagtcgacggggacgtggtacacgggttctacaaccccgctgtgtcacgtatcgtcgaagcaggctgtgtctgcaatgatgccgtgataaggaacaacactttgatgggaaagcccacagaaggtgccctgatcgccctggccatgaaaatgggacttgacggtctccagcaggactatattaggaaagccgaataccctttttcctccgaacaaaaatggatggccgtgaagtgcgtccatcgaactcagcaggatcgcccagaaatttgcttcatgaaaggggcatatgagcaggtgattaaatactgtactacctaccagtccaagggacagaccttaacactgactcagcagcagagagacgtttaccaacaggagaaagcacgcatgggcagcgctggtcttcgggtcctcgcccttgcgtctggacctgaattgggtcagctaacctttctgggtttggtgggaattattgatcctccgagaacaggcgtgaaggaagctgttaccacactcattgcctctggcgtgtcaattaaaatgattactggcgactctcaggaaaccgcggtggccatcgcgagccggctggggctttacagcaagacttcccagtccgtgtcaggggaggagatcgatgctatggacgtgcaacagttgtctcaaatagtgcctaaggtcgccgtgttttaccgtgcctcccccagacataaaatgaaaatcatcaagtcccttcagaagaacgggtctgtggtagccatgaccggcgacggggtgaatgacgctgtggctttgaaagccgcagacattggagtggccatggggcagacagggacagacgtatgcaaggaagcggctgacatgatcctggtcgacgatgacttccagacaattatgtctgcaatagaagaaggtaaaggaatatataataatatcaagaactttgtgagatttcagctttcgacgtcgatcgcggctcttaccctgatctcactcgccacccttatgaactttcccaatcctcttaatgccatgcagatcctctggataaatatcattatggacggtccgcctgcacaatcactaggtgtggaaccagtggacaaggacgtgattaggaaaccaccgaggaactggaaagactccattctcacaaaaaaccttatcctgaaaatactggtgagctcaatcatcatcgtatgcgggaccctatttgttttttggagagaacttcgcgacaacgtcattactccacgggacaccacaatgacctttacctgtttcgtttttttcgacatgtttaatgccctaagcagccggtcccagacaaagtcagtcttcgaaatcgggctatgttcgaaccgcatgttctgctatgccgttctaggatcaatcatgggacagttgctggtaatttatttccctcccctacaaaaggtctttcaaacagagagtctgagcatactcgggttagccctgggggaagaatggacagcagccggatag

SEQ ID NO: 77182 - DNA, 3484 bp, Artificial Sequence
  derived and/or modified sequence
gctggcgtgagctggggacgttgcgggcacacgacggggcgggtgcgggatcttggggaggggggctcccgagatagtggctgggcggggaactccttcctcagcctctcgtcagcgccgcttctcctggtttctcttgcagatgctgctgctaggggtggtgggagcagccgtgggacgcgtggccgggagcgggggtgacagcctgggattccgggggcttctcttccttgtcctcctcctctcctctctattcccagtgtggccgtggctgacactaaagactttgtagccatcaacccgagtgcagtttcgatggaaaatgaaggttgcacgttttcaaaaaatacctaatggtgaaaatgagacaatgattcctgtattgacatcaaaaaaagcaagtgaattaccagtcagtgaagttgcaagcattctccaagctgatcttcagaatggtctaaacaaatgtgaagttagtcataggcgagcctttcatggctggaatgagtttgatattagtgaagatgagccactgtggaagaagtatatttctcagtttaaaaatccccttattatgctgcttctggcttctgcagtcatcagtgttttaatgcatcagtttgatgatgccgtcagtatcactgtggcaatacttatcgttgttacagttgcctttgttcaggaatatcgttcagaaaaatctcttgaagaattgagtaaacttgtgccaccagaatgccattgtgtgcgtgaaggaaaattggagcatacacttgcccgagacttggttccaggtgatacagtttgcctttctgttggggatagagttcctgctgacttacgcttgtttgaggctgtggatctttccattgatgagtccagcttgacaggtgagacaacgccttgttctaaggtgacagctcctcagccagctgcaactaatggagatcttgcatcgagaagtaacattgcctttatgggaacactggtcagatgtggcaaagcaaagggtgttgtcattggaacaggagaaaattctgaatttggggaggtttttaaaatgatgcaagcagaagaggcaccaaaaacccctctgcagaagagcatggacctcttaggaaaacaactttccttttactcctttggtataataggaatcatcatgttggttggctggttactgggaaaagatatcctggaaatgtttactattagtgtaagtttggctgtagcagcaattcctgaaggtctccccattgtggtcacagtgacgctagctcttggtgttatgagaatggtgaagaaaagggccattgtgaaaaagctgcctattgttgaaactctgggctgctgtaatgtgatttgttcagataaaactggaacactgacgaagaatgaaatgactgttactcacatatttacttcagatggtctgcatgctgaggttactggagttggctataatcaatttggggaagtgattgttgatggtgatgttgttcatggattctataacccagctgttagcagaattgttgaggcgggctgtgtgtgcaatgatgctgtaattagaaacaatactctaatggggaagccaacagaaggggccttaattgctcttgcaatgaagatgggtcttgatggacttcaacaagactacatcagaaaagctgaatacccttttagctctgagcaaaagtggatggctgttaagtgtgtacaccgaacacagcaggacagaccagagatttgttttatgaaaggtgcttacgaacaagtaattaagtactgtactacataccagagcaaagggcagaccttgacacttactcagcagcagagagatgtgtaccaacaagagaaggcacgcatgggctcagcgggactcagagttcttgctttggcttctggtcctgaactgggacagctgacatttcttggcttggtgggaatcattgatccacctagaactggtgtgaaagaagctgttacaacactcattgcctcaggagtatcaataaaaatgattactggagattcacaggagactgcagttgcaatcgccagtcgtctgggattgtattccaaaacttcccagtcagtctcaggagaagaaatagatgcaatggatgttcagcagctttcacaaatagtaccaaaggttgcagtattttacagagctagcccaaggcacaagatgaaaattattaagtcgctacagaagaacggttcagttgtagccatgacaggagatggagtaaatgatgcagttgctctgaaggctgcagacattggagttgcgatgggccagactggtacagatgtttgcaaagaggcagcagacatgatcctagtggatgatgattttcaaaccataatgtctgcaatcgaagagggtaaagggatttataataacattaaaaatttcgttagattccagctgagcacgagtatagcagcattaactttaatctcattggctacattaatgaactttcctaatcctctcaatgccatgcagattttgtggatcaatattattatggatggacccccagctcagagccttggagtagaaccagtggataaagatgtcattcgtaaacctcctcgcaactggaaagacagcattttgactaaaaacttgatacttaaaatacttgtttcatcaataatcattgtttgtgggactttgtttgtcttctggcgtgagctacgagacaatgtgattacacctcgagacacaacaatgaccttcacatgctttgtgttttttgacatgttcaatgcactaagttccagatcccagaccaagtctgtgtttgagattggactctgcagtaatagaatgttttgctatgcagttcttggatccatcatgggacaattactagttatttactttcctccgcttcagaaggtttttcagactgagagcctaagcatactgggtctggctctgggagaggagtggacagcagctggttgagatacatccccatctggagacaggactgccactgacagaagatgtgagctgtgtctaagtccagtcttgtgcccagccgtgtctgcgccttcactctttggaactctgcatacaacatcttagcaccatcttcctgcagctcttccttacctaaataaagaaacagcccaagggcagtatttctaaaagcactgtaacagcttttcattttctccacatatactacaaattctataaagaaagaaattaatttaaaaaaactaagatgtttttctcttctggcttcataaatgccttgctgtataaattgaaatattgatactgaactgtctttttaatgatgacctaactttattcaacccatcggaatttactttttccctgaaataagatcttttccactggtctactacctgaccataaacatgtctgcatttgaattctctaaaccctaaatctgtgtctatgaaaaatacaaatgactattaaatatta

SEQ ID NO: 77183 - DNA, 2667 bp, Artificial Sequence
  derived and/or modified sequence
atgaaggtggccagattccagaagatccccaacggcgagaacgagaccatgatccccgtgctgaccagcaagaaggccagcgagctgcccgtgagcgaggtggccagcatcctgcaggccgacctgcagaacggcctgaacaagtgcgaggtgagccacagaagagccttccacggctggaacgagttcgacatcagcgaggacgagcccctgtggaagaagtacatcagccagttcaagaaccccctgatcatgctgctgctggccagcgccgtgatcagcgtgctgatgcaccagttcgacgacgccgtgagcatcaccgtggccatcctgatcgtggtgaccgtggccttcgtgcaggagtacagaagcgagaagagcctggaggagctgagcaagctggtgccccccgagtgccactgcgtgagagagggcaagctggagcacaccctggccagagacctggtgcccggcgacaccgtgtgcctgagcgtgggcgacagagtgcccgccgacctgagactgttcgaggccgtggacctgagcatcgacgagagcagcctgaccggcgagaccaccccctgcagcaaggtgaccgccccccagcccgccgccaccaacggcgacctggccagcagaagcaacatcgccttcatgggcaccctggtgagatgcggcaaggccaagggcgtggtgatcggcaccggcgagaacagcgagttcggcgaggtgttcaagatgatgcaggccgaggaggcccccaagacccccctgcagaagagcatggacctgctgggcaagcagctgagcttctacagcttcggcatcatcggcatcatcatgctggtgggctggctgctgggcaaggacatcctggagatgttcaccatcagcgtgagcctggccgtggccgccatccccgagggcctgcccatcgtggtgaccgtgaccctggccctgggcgtgatgagaatggtgaagaagagagccatcgtgaagaagctgcccatcgtggagaccctgggctgctgcaacgtgatctgcagcgacaagaccggcaccctgaccaagaacgagatgaccgtgacccacatcttcaccagcgacggcctgcacgccgaggtgaccggcgtgggctacaaccagttcggcgaggtgatcgtggacggcgacgtggtgcacggcttctacaaccccgccgtgagcagaatcgtggaggccggctgcgtgtgcaacgacgccgtgatcagaaacaacaccctgatgggcaagcccaccgagggcgccctgatcgccctggccatgaagatgggcctggacggcctgcagcaggactacatcagaaaggccgagtaccccttcagcagcgagcagaagtggatggccgtgaagtgcgtgcacagaacccagcaggacagacccgagatctgcttcatgaagggcgcctacgagcaggtgatcaagtactgcaccacctaccagagcaagggccagaccctgaccctgacccagcagcagagagacgtgtaccagcaggagaaggccagaatgggcagcgccggcctgagagtgctggccctggccagcggccccgagctgggccagctgaccttcctgggcctggtgggcatcatcgacccccccagaaccggcgtgaaggaggccgtgaccaccctgatcgccagcggcgtgagcatcaagatgatcaccggcgacagccaggagaccgccgtggccatcgccagcagactgggcctgtacagcaagaccagccagagcgtgagcggcgaggagatcgacgccatggacgtgcagcagctgagccagatcgtgcccaaggtggccgtgttctacagagccagccccagacacaagatgaagatcatcaagagcctgcagaagaacggcagcgtggtggccatgaccggcgacggcgtgaacgacgccgtggccctgaaggccgccgacatcggcgtggccatgggccagaccggcaccgacgtgtgcaaggaggccgccgacatgatcctggtggacgacgacttccagaccatcatgagcgccatcgaggagggcaagggcatctacaacaacatcaagaacttcgtgagattccagctgagcaccagcatcgccgccctgaccctgatcagcctggccaccctgatgaacttccccaaccccctgaacgccatgcagatcctgtggatcaacatcatcatggacggcccccccgcccagagcctgggcgtggagcccgtggacaaggacgtgatcagaaagccccccagaaactggaaggacagcatcctgaccaagaacctgatcctgaagatcctggtgagcagcatcatcatcgtgtgcggcaccctgttcgtgttctggagagagctgagagacaacgtgatcacccccagagacaccaccatgaccttcacctgcttcgtgttcttcgacatgttcaacgccctgagcagcagaagccagaccaagagcgtgttcgagatcggcctgtgcagcaacagaatgttctgctacgccgtgctgggcagcatcatgggccagctgctggtgatctacttcccccccctgcagaaggtgttccagaccgagagcctgagcatcctgggcctggccctgggcgaggagtggaccgccgccggctag

SEQ ID NO: 77184 - protein, 249 aa, Artificial Sequence
  derived and/or modified sequence
MPRSVVGTACMYFKRFYLNNSVMEYHPRIIMLTCAFLACKVDEFNVSSPQFVGNLRESPLGQEKALEQILEYELLLIQQLNFHLIVHNPYRPFEGFLIDLKTRYPILENPEILRKTADDFLNRIALTDAYLLYTPSQIALTAILSSASRAGITMESYLSESLMLKENRTCLSQLLDIMKSMRNLVKKYEPPRSEEVAVLKQKLERCHSAELALNVITKKRKGYEDDDYVSKKSKHEEEEWTDDDLVESL

SEQ ID NO: 77185 - DNA, 750 bp, Artificial Sequence
  derived and/or modified sequence
atgcccagaagcgtggtgggcaccgcctgcatgtacttcaagagattctacctgaacaacagcgtgatggagtaccaccccagaatcatcatgctgacctgcgccttcctggcctgcaaggtggacgagttcaacgtgagcagcccccagttcgtgggcaacctgagagagagccccctgggccaggagaaggccctggagcagatcctggagtacgagctgctgctgatccagcagctgaacttccacctgatcgtgcacaacccctacagacccttcgagggcttcctgatcgacctgaagaccagataccccatcctggagaaccccgagatcctgagaaagaccgccgacgacttcctgaacagaatcgccctgaccgacgcctacctgctgtacacccccagccagatcgccctgaccgccatcctgagcagcgccagcagagccggcatcaccatggagagctacctgagcgagagcctgatgctgaaggagaacagaacctgcctgagccagctgctggacatcatgaagagcatgagaaacctggtgaagaagtacgagccccccagaagcgaggaggtggccgtgctgaagcagaagctggagagatgccacagcgccgagctggccctgaacgtgatcaccaagaagagaaagggctacgaggacgacgactacgtgagcaagaagagcaagcacgaggaggaggagtggaccgacgacgacctggtggagagcctgtag

SEQ ID NO: 77186 - DNA, 750 bp, Artificial Sequence
  derived and/or modified sequence
atgcccaggtccgtggttggaacggcttgtatgtatttcaagcgcttttacttgaacaactctgtaatggagtatcatcccagaattattatgctgacctgtgcctttcttgcttgcaaagttgatgagttcaatgtatctagtccccagtttgtcggcaatctgcgggaatccccactggggcaggagaaggccctcgaacagatccttgagtatgagctcttgttgattcagcaactgaatttccacttaatcgtgcataatccttatcgccccttcgagggctttttaattgacctcaaaacccggtaccccatcctcgaaaaccccgaaatactccgcaaaacagcagatgacttcctgaaccggattgcattgacagatgcatacctcctgtacaccccgagccagatcgctcttacggccatcctgagctccgcatcccgtgcgggaatcaccatggaaagttatttgagtgagagcctgatgctcaaagaaaatcgtacttgtctgtctcagcttctcgatattatgaaatccatgcgcaatttagtcaaaaaatatgagcccccaagatcagaagaggtggctgttttgaaacagaagctggagcgttgccacagcgcagagttggccctcaacgtcattacaaagaagcggaaggggtatgaagatgatgattacgtgtctaagaagagtaagcacgaagaggaggaatggactgacgatgacctggtcgaatcactgtag

SEQ ID NO: 77187 - DNA, 750 bp, Artificial Sequence
  derived and/or modified sequence
atgcccaggtctgtggtgggcacagcctgcatgtacttcaagcgcttctacctgaacaacagcgtgatggagtaccacccccgcatcatcatgctgacctgtgccttcctggcctgcaaggtggatgagttcaacgtgagcagcccccagtttgtgggcaacctgcgggagagccccctgggccaggagaaggccctggagcagatcctggagtatgagctgctgctgatccagcagctgaacttccacctgattgtgcacaacccctaccggccctttgagggcttcctgattgacctgaagacccgctaccccatcctggagaaccctgagatcctgaggaagacagcagatgacttcctgaaccgcatcgccctgacagatgcctacctgctgtacacccccagccagatcgccctgacagccatcctgagcagcgccagccgggccggcatcaccatggagagctacctgtctgagagcctgatgctgaaggagaacagaacctgcctgagccagctgctggacatcatgaagtccatgaggaacctggtgaagaagtatgagccccccaggtctgaggaggtggccgtgctgaagcagaagctggagcgctgccacagcgctgagctggccctgaatgtcatcaccaagaagaggaagggctatgaagatgatgattatgtgtccaagaagagcaagcatgaggaggaggagtggacagatgatgacctggtggagagcctgtag

SEQ ID NO: 77188 - DNA, 750 bp, Artificial Sequence
  derived and/or modified sequence
atgccccggagcgtggtgggcaccgcctgcatgtacttcaagcggttctacctgaacaatagtgtaatggagtaccaccctcgcatcatcatgcttacatgtgctttcctcgcatgcaaggttgatgaattcaacgtctccagcccacagtttgtaggcaacctgagagagagccccctgggacaggaaaaggcccttgaacagatcctggaatacgagctcctgctcattcaacagctcaattttcatctcattgtacacaacccctacaggccgttcgaagggtttttgatcgacctgaaaacgcggtaccctatcctggagaatccagagattttgcggaagaccgccgacgattttctcaaccgcatcgccctgaccgacgcttatctcctttatacacccagccagatcgcactgaccgccattctatcctctgctagtagggccgggatcaccatggaaagttacctgtccgagagtttgatgttgaaagagaaccgcacctgcctgtcccagctcctggatattatgaaatcaatgaggaaccttgtgaagaaatatgaacccccacggtccgaggaggttgcagtgctgaaacagaagctggagcggtgccattccgccgagctggccctcaatgttatcactaaaaagcgaaaaggatatgaggatgacgactatgtgagcaaaaaatcgaaacatgaagaagaggagtggactgacgatgacctcgtggagagcctttag

SEQ ID NO: 77189 - DNA, 750 bp, Artificial Sequence
  derived and/or modified sequence
atgccacggagcgtcgttggaacggcttgcatgtacttcaagcgtttctacctaaacaactcagtgatggaatatcatccccgaatcatcatgctcacctgcgctttcctggcgtgtaaggttgatgaattcaatgtctcatcaccccagttcgttggcaacctacgcgaatcccctctgggacaggagaaggctctggagcaaatcctcgagtacgaattactcttaatacagcagcttaatttccatctcatcgttcacaatccatatcgtcctttcgaaggattcctcatcgaccttaaaacccggtacccgatactcgagaatcccgagattctcaggaaaacggctgatgatttccttaatcgaattgccctgacggatgcttaccttttgtacacccccagccagattgcactaaccgccatattgagcagcgcctcccgcgctggcataactatggagtcttatctatctgagtctcttatgctgaaggaaaatcgtacatgtctttcccaactgctggatatcatgaaatccatgcgcaatctcgtgaaaaagtacgagccacccaggtctgaggaggtggctgtattgaaacaaaaattagagcggtgccactcagccgaactcgccctgaatgttattaccaagaagcgaaaaggatatgaggatgatgattacgtctctaagaaatctaagcacgaggaggaggaatggaccgatgacgatctggtggagtccctgtag

SEQ ID NO: 77190 - protein, 976 aa, Artificial Sequence
  derived and/or modified sequence
MALLGKRCDVPTNGCGPDRWNSAFTRKDEIITSLVSALDSMCSALSKLNAEVACVAVHDESAFVVGTEKGRMFLNARKELQSDFLRFCLSAAQHRAATSQLEGRVVRRVLTVASRALCPTGGPPWKDPEAEHPKKVQRGEGGGRSLPRSSLEHGSDVYLLRKMVEEVFDVLYSEALGRASVVPLPYERLLREPGLLAVQGLPEGLAFRRPAEYDPKALMAILEHSHRIRFKLKRPLEDGGRDSKALVELNGVSLIPKGSRDCGLHGQAPKVPPQDLPPTATSSSMASFLYSTALPNHAIRELKQEAPSCPLAPSDLGLSRPMPEPKATGAQDFSDCCGQKPTGPGGPLIQNVHASKRILFSIVHDKSEKWDAFIKETEDINTLRECVQILFNSRYAEALGLDHMVPVPYRKIACDPEAVEIVGIPDKIPFKRPCTYGVPKLKRILEERHSIHFIIKRMFDERIFTGNKFTKDTTKLEPASPPEDTSAEVSRATVLDLAGNARSDKGSMSEDCGPGTSGELGGLRPIKIEPEDLDIIQVTVPDPSPTSEEMTDSMPGHLPSEDSGYGMEMLTDKGLSEDARPEERPVEDSHGDVIRPLRKQVELLFNTRYAKAIGISEPVKVPYSKFLMHPEELFVVGLPEGISLRRPNCFGIAKLRKILEASNSIQFVIKRPELLTEGVKEPIMDSQERDSGDPLVDESLKRQGFQENYDARLSRIDIANTLREQVQDLFNKKYGEALGIKYPVQVPYKRIKSNPGSVIIEGLPPGIPFRKPCTFGSQNLERILAVADKIKFTVTRPFQGLIPKPDEDDANRLGEKVILREQVKELFNEKYGEALGLNRPVLVPYKLIRDSPDAVEVTGLPDDIPFRNPNTYDIHRLEKILKAREHVRMVIINQLQPFAEICNDAKVPAKDSSIPKRKRKRVSEGNSVSSSSSSSSSSSSNPDSVASANQISLVQWPMYMVDYAGLNVQLPGPLNY

SEQ ID NO: 77191 - DNA, 2931 bp, Artificial Sequence
  derived and/or modified sequence
atggccctcctgggaaaacggtgcgacgtcccaaccaatggctgtggaccagataggtggaacagtgcctttacacggaaggatgagattattacttctttggtctcagcactggacagcatgtgcagcgctctgagcaagctgaatgcagaggtcgcctgcgtggcagtgcatgacgagtccgcctttgttgttggcacagagaaagggaggatgttcttaaatgctagaaaggaacttcaaagtgatttcttacggttttgcttgagcgctgcacagcaccgcgccgcaactagtcagttggaggggagggtagtcagaagggttctgacagtcgcttcccgtgcactgtgccccactggcgggcccccctggaaggaccctgaggccgagcaccccaagaaggtgcagaggggggagggagggggacgctctctgccccggtcatctctagagcatgggtccgacgtttatctcctgcgaaagatggttgaagaggttttcgacgtgttgtattccgaagccctggggagagctagcgtggtcccccttccctatgagcgccttctgagagagcctggcctcctggccgttcagggattaccagaaggcttagcattccggagacccgcggagtatgacccgaaagcgctgatggccatattagagcactcgcatcgcatcagatttaagctcaagcggccccttgaagacggtgggcgggactctaaggccctggtggagctcaacggtgtgagtctaatacctaaaggcagcagagactgtggtttgcacggccaggcacccaaagtccctccacaagatcttcccccaacagccaccagttcctctatggcttcattcctgtacagcactgctctgcccaaccacgctattagagagctaaaacaggaagccccatcttgtcctctagcacccagcgacctgggcctttctcggcctatgcccgaaccaaaagctacgggggcccaggatttttctgactgctgtgggcagaaacctactggtccgggcggacctctaatccaaaatgttcacgcgagcaaacggatcctgttctccatcgtgcatgataaaagcgaaaagtgggacgctttcattaaagaaacggaagacataaatacgctgcgggagtgtgttcagatccttttcaactccagatatgctgaagcacttggccttgatcacatggtgcctgttccgtatcggaagatcgcctgtgatccagaggctgtagaaattgtcggtattccagacaaaattcctttcaaacgcccatgcacctacggtgttcccaaactgaaacgaattctagaggagagacacagcatccactttattattaaaagaatgtttgatgagaggattttcaccggaaacaagtttacaaaggataccactaagctggagccagcttctcccccggaagatactagcgctgaggtttccagggcaacagtgctcgacctcgctggtaatgctcgtagtgataagggatccatgtccgaagattgtggcccaggaacaagcggcgaattgggtggccttaggccaataaagattgaaccagaggatttggatatcattcaggtcacagttcctgacccatcacctacgagcgaggagatgacggactcaatgcccgggcatcttcccagtgaagattccggctatggaatggaaatgctgacagataaagggctatccgaagacgcccggcctgaagagaggcctgtggaggatagtcacggcgatgtaatacgcccgctgaggaagcaagtggagcttctctttaatacgcgttacgccaaggctatcggcatctccgaaccagtcaaagtcccttatagtaaattccttatgcatcctgaagaactgtttgtagtagggctcccggagggaatttcattaagaagaccaaattgtttcggcattgccaaattacggaaaattcttgaagccagcaactccatccaattcgtaattaagcgtcccgagcttctgaccgagggggtaaaggaacccatcatggatagtcaggagcgggatagtggtgatcccctcgtggacgagagtctgaaacgacagggcttccaggagaattatgacgcccgcttgagcaggattgatattgccaacacccttcgcgagcaggttcaagacctgtttaacaaaaagtatggcgaggctttgggaatcaaatatcccgtccaggtcccgtacaagcggataaagtccaacccgggctctgtaatcattgagggcctccctcctggtatccccttcaggaagccgtgcacttttggcagccagaaccttgagcgcattctggcagtggcagataagatcaagtttaccgtgacacgcccttttcagggactgatccccaagcccgacgaggacgacgccaatcggctcggtgagaaagtgattctgcgggagcaggtgaaggagctctttaatgagaagtacggtgaagccctcgggttgaaccgaccagtcctggttccttacaaactaatcagggacagtcccgacgctgtcgaagtgacgggtctgccagatgatatccctttcaggaacccaaacacatatgatatacataggctggagaaaattttaaaagcccgggaacacgtcagaatggtcatcatcaaccaattgcagccctttgccgaaatttgcaatgacgctaaagtgccagccaaagactctagcatccccaagcgcaaacgcaaaagggtgtcagaagggaactccgtctcatcaagttcaagtagcagttcctcttcaagttccaaccccgattccgtagcttcagcgaaccaaatcagtttggtgcagtggccaatgtatatggtggattatgccgggctgaacgtgcagctgcctggtcctttaaattactag

SEQ ID NO: 77192 - DNA, 3315 bp, Artificial Sequence
  derived and/or modified sequence
gccagccccccggccggccgattccccccccgcgccccctccccgcgcctccctccccgccctcgccgcgccgccgtcctcgcctccctctgcctctccttcccccattctcccggattaattaaggaggcagcggcaggaggctgagtcctggccgcgggccggggccggggcgccgctggcaggagcgcttggggatcctccaaggcgaccatggccttgctgggtaagcgctgtgacgtccccaccaacggctgcggacccgaccgctggaactccgcgttcacccgcaaagacgagatcatcaccagcctcgtgtctgccttagactccatgtgctcagcgctgtccaaactgaacgccgaggtggcctgtgtcgccgtgcacgatgagagcgcctttgtggtgggcacagagaaggggagaatgttcctgaatgcccggaaggagctacagtcagacttcctcaggttctgcctctccgcagctcagcacagggcagcgacatcccagctcgaaggccgggtggtgagacgggtgctcactgtggcctcgcgtgctctgtgtcccacaggagggcccccgtggaaggatccggaggcagagcaccccaagaaggtgcagcggggcgagggtggaggccgtagcctccctcggtcctccctggaacatggctcagatgtgtaccttctgcggaagatggtagaggaggtgtttgatgttctttatagcgaggccctgggaagggccagtgtggtgccactgccctatgagaggctgctcagggagccagggctgctggccgtgcaggggctgcccgaaggcctggccttccgaaggccagccgagtatgaccccaaggccctcatggccatcctggaacacagccaccgcatccgcttcaagctcaagaggccacttgaggatggcgggcgggactcgaaggccctggtggagctgaacggtgtctccctgattcccaaggggtcacgggactgtggcctgcatggccaggcccccaaggtgccaccccaggacctgcccccaaccgccacctcctcctccatggccagcttcctgtacagcacggcgctccccaaccacgccatccgagagctcaagcaggaagcaccttcctgcccccttgcccccagcgacctgggcctgagtcggcccatgccagagcccaaggccaccggtgcccaagacttctccgactgttgtggacagaagcccactgggcctggtgggcctctcatccagaacgtccatgcctccaagcgcattctcttctccatcgtccatgacaagtcagagaagtgggacgccttcataaaggaaaccgaggacatcaacacgctccgggagtgtgtgcagatcctgtttaacagcagatatgcggaagccctgggcctggaccacatggtccccgtgccctaccggaagattgcctgtgacccggaggctgtggagatcgtgggcatcccggacaagatccccttcaagcgcccctgcacttatggagtccccaagctgaagcggatcctggaggagcgccatagtatccacttcatcattaagaggatgtttgatgagcgaattttcacagggaacaagtttaccaaagacaccacgaagctggagccagccagcccgccagaggacacctctgcagaggtctctagggccaccgtccttgaccttgctgggaatgctcggtcagacaagggcagcatgtctgaagactgtgggccaggaacctccggggagctgggcgggctgaggccgatcaaaattgagccagaggatctggacatcattcaggtcaccgtcccagacccctcgccaacctctgaggaaatgacagactcgatgcctgggcacctgccatcggaggattctggttatgggatggagatgctgacagacaaaggtctgagtgaggacgcgcggcccgaggagaggcccgtggaggacagccacggtgacgtgatccggcccctgcggaagcaggtggagctgctcttcaacacacgatacgccaaggccattggcatctcggagcccgtcaaggtgccgtactccaagtttctgatgcacccggaggagctgtttgtggtgggactgcctgaaggcatctccctccgcaggcccaactgcttcgggatcgccaagctccggaagattctggaggccagcaacagcatccagtttgtcatcaagaggcccgagctgctcactgagggagtcaaagagcccatcatggatagtcaagagagggattccggggaccctctggtggacgagagcctgaagagacagggctttcaagaaaattatgacgcgaggctctcacggatcgacatcgccaacacactaagggagcaggtccaggaccttttcaataagaaatacggggaagccttgggcatcaagtacccggtccaggtcccctacaagcggatcaagagtaaccccggctccgtgatcatcgaggggctgcccccaggaatcccgttccgaaagccctgtaccttcggctcccagaacctggagaggattcttgctgtggctgacaagatcaagttcacagtcaccaggcctttccaaggactcatcccaaagcctgatgaagatgacgccaacagactcggggagaaggtgatcctgcgggagcaggtgaaggaactcttcaacgagaaatacggtgaggccctgggcctgaaccggccggtgctggtcccttataaactaatccgggacagcccagacgccgtggaggtcacgggtctgcctgatgacatccccttccggaaccccaacacgtacgacatccaccggctggagaagatcctgaaggcccgagagcatgtccgcatggtcatcattaaccagctccaaccctttgcagaaatctgcaatgatgccaaggtgccagccaaagacagcagcattcccaagcgcaagagaaagcgggtctcggaaggaaattccgtctcctcttcctcctcgtcttcctcttcctcgtcctctaacccggattcagtggcatcggccaaccagatctcactcgtgcaatggccaatgtacatggtggactatgccggcctgaacgtgcagctcccgggacctcttaattactagacctcagtactgaatcaggacctcactcagaaagactaaaggaaatgtaatttatgtacaaaatgtatattcggatatgtatcgatgccttttagtttttccaatgatttttacactatattcctgccaccaaggcctttttaaataagtaaaaaaagaaaaaaaaaaaaa

SEQ ID NO: 77193 - DNA, 2931 bp, Artificial Sequence
  derived and/or modified sequence
atggccctgctgggcaagagatgtgatgtgcccaccaacggctgcggccctgaccgctggaacagcgccttcaccaggaaggatgagatcatcaccagcctggtgtctgccctggacagcatgtgcagcgccctgagcaagctgaatgctgaggtggcctgtgtggccgtgcatgatgaaagtgcctttgtggtgggcacagagaagggccgcatgttcctgaatgccaggaaggagctgcagagcgacttcctgcgcttctgcctgtctgctgcccagcaccgggccgccaccagccagctggagggccgggtggtgagaagagtgctgactgtggccagccgggccctgtgccccaccggcggccccccctggaaggaccctgaggccgagcaccccaagaaggtgcagagaggagagggcggcggccgcagcctgcccaggagcagcctggagcacggcagtgatgtgtacctgctgaggaagatggtggaggaggtgtttgatgtgctgtacagcgaggccctgggccgggcctctgtggtgcccctgccctatgaaaggctgctgcgggagcccggcctgctggccgtgcagggcctgcctgagggcctggccttccggcggccagcagaatatgaccccaaggccctgatggccatcctggagcacagccaccgcatccgcttcaagctgaagaggcccctggaggatggcggccgggacagcaaggccctggtggagctgaatggagtgtccctcatccccaagggcagccgggactgtggcctgcacggccaggcccccaaggtgcccccccaggacctgcccccaacagccaccagcagctccatggccagcttcctgtacagcacagccctgcccaaccacgccatccgggagctgaagcaggaggcccccagctgccccctggcccccagcgacctgggcctgagccggcccatgcctgagcccaaggccaccggggcccaggacttcagtgactgctgcggccagaagcccaccggccctgggggccccctcatccagaatgtgcacgccagcaagaggatcctcttcagcatcgtgcatgacaagtctgagaagtgggatgccttcatcaaggagacagaggacatcaacaccctgagagaatgtgtgcagatcctcttcaacagccgctatgcagaggccctgggcctggaccacatggtgcctgtgccctacaggaagatcgcctgtgaccctgaggccgtggagatcgtgggcatcccagacaagatccccttcaagaggccctgcacctacggcgtgcccaagctgaagaggatcctggaggagcggcacagcatccacttcatcatcaagaggatgtttgatgagcgcatcttcaccggcaacaagttcaccaaggacaccaccaagctggagcccgccagccccccagaggacaccagcgctgaggtgtcccgggccaccgtgctggacctggccggaaatgcccggagtgacaagggctccatgtctgaggactgtggccctggcaccagcggggagctgggcggcctgcggcccatcaagattgagcctgaggacctggacatcatccaggtgacagtgcctgaccccagccccaccagcgaggagatgacagacagcatgcctggccacctgcccagtgaagattctggctacggcatggagatgctgacagacaagggcctgtctgaagatgcccggcctgaggagaggcctgtggaggacagccatggagatgtgatccggcccctgaggaagcaggtggagctgctcttcaacaccaggtatgccaaggccatcggcatcagcgagcctgtgaaggtgccctacagcaagttcctgatgcaccctgaggagctgtttgtggtgggcctgcctgagggcatcagcctgcggcggcccaactgcttcggcatcgccaagctgaggaagatcctggaggccagcaacagcatccagtttgtgatcaagaggcctgagctgctgacagagggcgtgaaggagcccatcatggacagccaggagcgggacagcggggaccccctggtggatgagagcctgaagaggcagggcttccaggagaactatgatgcccggctgagcagaattgacatcgccaacaccctgcgggagcaggtgcaggacctcttcaacaagaagtacggggaggccctgggcatcaagtaccctgtgcaggtgccctacaagaggatcaagagcaaccctggcagcgtcatcatcgagggcctgcccccaggcatccccttcaggaagccctgcaccttcggcagccagaacctggagcgcatcctggccgtggccgacaagatcaagttcaccgtgacccggcccttccagggcctcatccccaagccagatgaagatgatgccaaccggctgggggagaaggtgatcctgcgggagcaggtgaaggagctgttcaatgagaagtatggagaggccctgggcctgaacagacctgtgctggtgccctacaagctgatccgggacagcccagatgctgtggaggtgacaggcctgcctgatgacatccccttcaggaaccccaacacctatgacatccaccggctggagaagatcctgaaggcccgggagcacgtgaggatggtgatcatcaaccagctgcagccctttgctgagatctgcaatgatgccaaggtgcctgccaaggacagcagcatccccaagaggaagaggaagagggtgtctgagggcaacagcgtgagcagcagcagcagcagcagcagcagcagcagcagcaacccagacagcgtggccagcgccaaccagatcagcctggtgcagtggcccatgtacatggtggactatgccggcctgaatgtgcagctgcccggccccctgaactactag

SEQ ID NO: 77194 - DNA, 2931 bp, Artificial Sequence
  derived and/or modified sequence
atggccctgctgggcaagcggtgcgacgtgcccaccaacggctgcggacctgatagatggaactcagcttttactaggaaggacgaaatcatcacaagcctggtctcggccttggactcgatgtgctcagcactcagtaagctgaacgcagaggtggcctgcgtggccgtccatgacgagtcagccttcgtggtgggcacagaaaaggggcgcatgtttcttaacgcccggaaagagttgcaatctgacttcctgaggttttgcctttcggcggcccagcacagggccgccacctctcagctggaaggaagagtcgtccggagagttctgacagtggcatccagagccctctgccctaccggcgggcccccttggaaggacccggaggctgaacaccccaaaaaggtgcagagaggcgaagggggtggcaggtcgcttccacgctctagcttggaacatggaagcgatgtgtaccttctgagaaaaatggtagaggaagttttcgacgtactgtatagcgaggccctcggaagggcgagtgttgtgcctttgccctatgaacggcttctccgcgaacccgggttactggcggtccagggcctgccggagggtttagccttccgccgccccgctgaatacgatccaaaggcactcatggccatcctggagcatagtcaccgtattcggttcaagcttaagaggcccctcgaagatggcggccgcgatagcaaagccctcgtggaattgaacggcgtttctctgattcctaaaggcagcagggactgtggacttcatggtcaggcgccaaaagtgccaccgcaggacctccctccaactgccactagtagctcaatggcgtcatttctatattccaccgcattgcctaaccacgctattcgcgagctgaagcaggaagctccatcatgcccactggccccttccgatctgggtctgtcccggccaatgccagagcctaaagccacaggcgcacaagatttttctgattgctgcggtcagaagccaacgggtcctggcggccccctcattcagaacgtgcatgcatccaagagaatcttgttctctatagtccatgacaaatccgagaagtgggatgcctttatcaaggagactgaagatatcaacacactccgggagtgtgttcagattctgttcaacagtaggtatgccgaagccctgggcttggatcatatggtgcctgtcccctatcggaaaattgcttgtgacccggaagccgtggaaatcgtagggattccagacaaaattccatttaaacgtccctgtacatacggtgtgccaaaactaaaaagaatcctggaggagcgccattctattcattttattatcaagcgcatgttcgatgaaaggatatttactggcaataagttcacaaaagatacaaccaaactggagcctgcatcaccccctgaggatacctctgccgaagtctctcgggctacagtcttggacctcgccggcaatgctaggtcagataaggggtctatgtccgaagattgtgggccgggaacaagcggagaactcggcggcctgaggccaataaagatcgaacctgaggacttagacattatccaggttaccgttcccgaccccagcccgacttccgaggaaatgacagactccatgcctgggcacctgcctagtgaggatagtggctacggaatggagatgctgacagataaaggactttctgaggacgcaagacctgaggagcgccccgtcgaagactcccatggcgacgtcataaggcctctcagaaagcaggttgaactcctgttcaacactcggtacgctaaagcgatcggaataagcgaacctgtcaaagtgccctatagcaaatttttgatgcatcccgaagaattgttcgttgtgggtctgcctgaaggcattagtctcaggcgtccaaattgttttggcatagctaagttgagaaagatactggaagcgagtaatagtatccagtttgtcatcaagaggcccgagctcctgactgagggtgttaaggagccgattatggattcccaagaaagggactccggagatcccctagtggacgagtcactgaaacgtcagggcttccaggagaactatgacgcacggttgagcaggatagatattgccaacactctccgagaacaggttcaggacctattcaacaaaaaatatggggaggccttggggatcaagtatccagtgcaggtcccttacaagcggatcaaatctaaccccggatcagtgattatagaaggattgcccccaggcatcccgtttcggaagccttgcacattcggttctcaaaacttagaacgcattctcgctgtcgcagacaaaatcaaatttaccgttacgcgtccattccagggtcttattccaaaacccgatgaagacgatgccaaccgtttgggagagaaagtcattttgagggagcaggtgaaggaactgtttaatgaaaagtacggtgaggccctgggcctgaataggcctgtcctagtcccatacaaacttatcagggacagccccgacgccgtggaggttacagggctgccagatgatatccctttccggaatcctaatacctacgatatacacaggcttgagaagatactgaaggcccgcgaacacgtgagaatggtgatcattaaccagcttcaaccattcgcagagatctgcaatgatgccaaagtaccagcgaaagattcctccatccccaaacgtaagcggaaaagggttagcgaaggcaattcagtgtcttcctcttctagttccagcagctcatcaagctcaaacccggattcagttgccagcgccaatcagatttcgctggtgcaatggcctatgtacatggtcgactacgctggcttgaatgtgcagctacctggacctctcaactactag

SEQ ID NO: 77195 - DNA, 2931 bp, Artificial Sequence
  derived and/or modified sequence
atggcgctgctgggtaaacgctgcgatgtgcctacaaatggatgtggccctgatagatggaactctgctttcacacgcaaggatgagattataacaagcctggtaagtgcgctggattccatgtgttccgcgctatctaaactgaatgctgaagtggcctgcgtggccgtgcacgacgaaagcgcgttcgtggtcggaacagaaaagggtagaatgttcctcaacgcaagaaaggagttacagtcagatttcctgcgattttgtctgtcagctgcacaacaccgggctgcaacgtctcaactggagggcagggtcgtgcgtcgcgtcctgacggtggcttccagagccctgtgtcctaccggcggacctccatggaaagaccctgaggcagaacacccaaagaaggtccaacggggagaggggggaggtcgctcactgccacgatcctccctcgaacacggttcagatgtgtacctgctaagaaaaatggttgaagaggttttcgacgtgctgtactcggaagccctgggcagagcaagcgtggttcccctgccctatgagagactgctccgcgagcccggactgctcgcggtacaggggctgccagagggcctagcgtttaggcgacccgctgaatatgacccaaaggcgctgatggcaatattggagcatagccacaggatcaggttcaaattgaagagacctctggaagacgggggaagagacagcaaggccctcgtggaactcaacggggtcagcctgattcccaagggcagcagagattgcggtctgcacggccaggcacctaaggtgccccctcaggacctccccccaacagccacttcctcctcaatggcctcctttctttactccaccgcgctaccgaaccacgccatacgagaactgaaacaagaagcacccagctgtccattagctcctagtgatctgggactcagccgccctatgcctgaacccaaggctacaggggcacaggatttttccgactgctgtggtcagaaacccaccgggccaggcggaccactgatccagaatgttcacgcgagtaaaaggatcctgttctcaattgtgcatgataaaagtgaaaaatgggacgcattcattaaagaaacagaggatataaataccttgcgggagtgtgtgcagatactgttcaattctaggtacgccgaggcattaggcctggatcatatggtgcccgtgccctaccgcaaaatcgcctgtgaccccgaggccgtggaaattgtgggcattcccgacaaaatcccgtttaagcgcccttgcacttacggggtccccaagctcaaacgaatattagaggagcgacactccatacatttcattatcaagcgcatgtttgacgagcgcatctttacaggcaacaagtttactaaagacacaaccaagctggaaccagcttcaccgccagaggataccagtgccgaagtttcaagggccacggtgctggacctggctgggaacgcgagatcagacaaaggcagtatgagcgaagactgcgggcctgggacctctggggagttgggaggtctccggccaataaagattgaaccagaggacctggacatcattcaagtcacggtgcccgaccccagtcctacctctgaggaaatgactgacagcatgccgggtcatctgccatcagaagacagcggttacggaatggagatgctcacggacaaggggctcagtgaggatgcccgaccagaagaaaggccggtcgaggatagccatggtgacgtgattcgcccactacgcaaacaggtggaactgctgttcaatacacggtatgcaaaggcaattggaatttctgaaccagtcaaggtcccctactctaagtttctcatgcatcctgaagaattattcgtggtgggattgccagagggcatctcgctgcgcaggcctaattgttttgggatcgcgaagcttcggaaaattcttgaagcgagcaattctatacagttcgttattaagagacctgagctgttgactgagggcgtcaaggaacccattatggattctcaggagagagactccggcgaccccttagtggatgagagcctgaagcggcagggcttccaggaaaattatgatgcgcgattgagccggattgatattgctaatactctccgagagcaggtccaggatctgttcaataaaaaatatggggaggctctgggtatcaaataccccgtccaagttccctacaagagaataaagagcaatcccggatccgttatcatagagggattgccccctggtattccattccgcaagccatgcacctttggctcccagaatctcgaacgtatactggcagtcgccgacaagattaaattcaccgtgacacggccttttcaaggccttatccccaagccggacgaagatgatgctaatcggctcggcgaaaaagtgatcttgagggaacaggtaaaagaactttttaatgagaagtatggcgaggccttgggattaaatagacccgttttagtcccatataagctgatcagggattctcccgacgcggtggaggtgacaggtcttcccgacgacatcccttttcgaaacccaaacacttacgatattcatcgcctggagaaaatcctcaaggccagggagcacgtgagaatggtgattatcaatcagctgcagccttttgctgagatctgcaatgacgctaaagtccctgcgaaagactcatcaatccctaagcgaaaacggaaacgcgtgtctgaaggtaactcagtgagctcctcatcctccagcagctccagcagcagctcaaaccctgattctgtcgcttccgccaatcaaatctctctggtgcagtggcctatgtacatggttgattatgctggactaaacgtgcaactgcccggacctctcaactactag

SEQ ID NO: 77196 - DNA, 2931 bp, Artificial Sequence
  derived and/or modified sequence
atggccctgctgggcaagagatgcgacgtgcccaccaacggctgcggccccgacagatggaacagcgccttcaccagaaaggacgagatcatcaccagcctggtgagcgccctggacagcatgtgcagcgccctgagcaagctgaacgccgaggtggcctgcgtggccgtgcacgacgagagcgccttcgtggtgggcaccgagaagggcagaatgttcctgaacgccagaaaggagctgcagagcgacttcctgagattctgcctgagcgccgcccagcacagagccgccaccagccagctggagggcagagtggtgagaagagtgctgaccgtggccagcagagccctgtgccccaccggcggccccccctggaaggaccccgaggccgagcaccccaagaaggtgcagagaggcgagggcggcggcagaagcctgcccagaagcagcctggagcacggcagcgacgtgtacctgctgagaaagatggtggaggaggtgttcgacgtgctgtacagcgaggccctgggcagagccagcgtggtgcccctgccctacgagagactgctgagagagcccggcctgctggccgtgcagggcctgcccgagggcctggccttcagaagacccgccgagtacgaccccaaggccctgatggccatcctggagcacagccacagaatcagattcaagctgaagagacccctggaggacggcggcagagacagcaaggccctggtggagctgaacggcgtgagcctgatccccaagggcagcagagactgcggcctgcacggccaggcccccaaggtgcccccccaggacctgccccccaccgccaccagcagcagcatggccagcttcctgtacagcaccgccctgcccaaccacgccatcagagagctgaagcaggaggcccccagctgccccctggcccccagcgacctgggcctgagcagacccatgcccgagcccaaggccaccggcgcccaggacttcagcgactgctgcggccagaagcccaccggccccggcggccccctgatccagaacgtgcacgccagcaagagaatcctgttcagcatcgtgcacgacaagagcgagaagtgggacgccttcatcaaggagaccgaggacatcaacaccctgagagagtgcgtgcagatcctgttcaacagcagatacgccgaggccctgggcctggaccacatggtgcccgtgccctacagaaagatcgcctgcgaccccgaggccgtggagatcgtgggcatccccgacaagatccccttcaagagaccctgcacctacggcgtgcccaagctgaagagaatcctggaggagagacacagcatccacttcatcatcaagagaatgttcgacgagagaatcttcaccggcaacaagttcaccaaggacaccaccaagctggagcccgccagcccccccgaggacaccagcgccgaggtgagcagagccaccgtgctggacctggccggcaacgccagaagcgacaagggcagcatgagcgaggactgcggccccggcaccagcggcgagctgggcggcctgagacccatcaagatcgagcccgaggacctggacatcatccaggtgaccgtgcccgaccccagccccaccagcgaggagatgaccgacagcatgcccggccacctgcccagcgaggacagcggctacggcatggagatgctgaccgacaagggcctgagcgaggacgccagacccgaggagagacccgtggaggacagccacggcgacgtgatcagacccctgagaaagcaggtggagctgctgttcaacaccagatacgccaaggccatcggcatcagcgagcccgtgaaggtgccctacagcaagttcctgatgcaccccgaggagctgttcgtggtgggcctgcccgagggcatcagcctgagaagacccaactgcttcggcatcgccaagctgagaaagatcctggaggccagcaacagcatccagttcgtgatcaagagacccgagctgctgaccgagggcgtgaaggagcccatcatggacagccaggagagagacagcggcgaccccctggtggacgagagcctgaagagacagggcttccaggagaactacgacgccagactgagcagaatcgacatcgccaacaccctgagagagcaggtgcaggacctgttcaacaagaagtacggcgaggccctgggcatcaagtaccccgtgcaggtgccctacaagagaatcaagagcaaccccggcagcgtgatcatcgagggcctgccccccggcatccccttcagaaagccctgcaccttcggcagccagaacctggagagaatcctggccgtggccgacaagatcaagttcaccgtgaccagacccttccagggcctgatccccaagcccgacgaggacgacgccaacagactgggcgagaaggtgatcctgagagagcaggtgaaggagctgttcaacgagaagtacggcgaggccctgggcctgaacagacccgtgctggtgccctacaagctgatcagagacagccccgacgccgtggaggtgaccggcctgcccgacgacatccccttcagaaaccccaacacctacgacatccacagactggagaagatcctgaaggccagagagcacgtgagaatggtgatcatcaaccagctgcagcccttcgccgagatctgcaacgacgccaaggtgcccgccaaggacagcagcatccccaagagaaagagaaagagagtgagcgagggcaacagcgtgagcagcagcagcagcagcagcagcagcagcagcagcaaccccgacagcgtggccagcgccaaccagatcagcctggtgcagtggcccatgtacatggtggactacgccggcctgaacgtgcagctgcccggccccctgaactactag

SEQ ID NO: 77197 - protein, 520 aa, Artificial Sequence
  derived and/or modified sequence
MPQLSLSSLGLWPMAASPWLLLLLVGASWLLARILAWTYTFYDNCCRLRCFPQPPKRNWFLGHLGLVTPTEQGMRVLTQLVATYPQGFKVWMGPIFPVIRFCHPNIIRSVINASAAIVPKDKVFYSFLKPWLGDGLLLSAGEKWSRHRRMLTPAFHFNILKPYMKIFNESVNIMHAKWQLLASEGSARLDMFEHISLMTLDSLQKCVFSFDSHCQEKPSEYIAAILELSALVTKRHQQILLYIDFLYYLTPDGQRFRRACRLVHDFTDAVIQERRRTLPSQGVDDFLQAKAKSKTLDFIDVLLLSKDEDGKKLSDEDIRAEADTFMFEGHDTTASGLSWVLYHLAKHPEYQERCRQEVQELLKDREPKEIEWDDLAQLPFLTMCIKESLRLHPPVPAVSRCCTQDIVLPDGRVIPKGIICLISVFGTHHNPAVWPDPEVYDPFRFDPKNIKERSPLAFIPFSAGPRNCIGQAFAMAEMKVVLGLTLLRFRVLPDHTEPRRKPELVLRAEGGLWLRVEPLS

SEQ ID NO: 77198 - protein, 447 aa, Artificial Sequence
  derived and/or modified sequence
MRVLTQLVATYPQGFKVWMGPIFPVIRFCHPNIIRSVINASAAIVPKDKVFYSFLKPWLGDGLLLSAGEKWSRHRRMLTPAFHFNILKPYMKIFNESVNIMHAKWQLLASEGSARLDMFEHISLMTLDSLQKCVFSFDSHCQEKPSEYIAAILELSALVTKRHQQILLYIDFLYYLTPDGQRFRRACRLVHDFTDAVIQERRRTLPSQGVDDFLQAKAKSKTLDFIDVLLLSKDEDGKKLSDEDIRAEADTFMFEGHDTTASGLSWVLYHLAKHPEYQERCRQEVQELLKDREPKEIEWDDLAQLPFLTMCIKESLRLHPPVPAVSRCCTQDIVLPDGRVIPKGIICLISVFGTHHNPAVWPDPEVYDPFRFDPKNIKERSPLAFIPFSAGPRNCIGQAFAMAEMKVVLGLTLLRFRVLPDHTEPRRKPELVLRAEGGLWLRVEPLS

SEQ ID NO: 77199 - DNA, 1563 bp, Artificial Sequence
  derived and/or modified sequence
atgccccagctgtccctgagctcactgggcctttggccaatggctgcctccccctggctgctcctgctgttggtcggcgcctcatggcttctagccagaatcttagcctggacctatacattttatgataactgctgccgactgaggtgtttccctcagccgcctaaacggaattggttccttggacatctcggcttggtcacaccaacggagcaaggaatgagagtcctgacccagcttgtcgccacctaccctcagggttttaaggtatggatgggacccatatttcctgtaatccgcttctgtcaccccaatatcatccggagtgttattaatgcaagcgctgcaatagtgcccaaagataaggtattctactccttcctgaagccttggctgggcgacggtctgctcctcagcgcaggtgaaaaatggagccgccaccggcggatgctgacacccgcatttcattttaatatcctgaagccctacatgaagatcttcaatgagagcgtgaacattatgcacgccaagtggcagctgctcgcctccgaaggtagtgctagacttgatatgtttgagcatataagcctgatgacactggacagtctccagaaatgcgtgttcagcttcgatagtcactgtcaagagaaacccagtgagtatattgctgcgattctggagctctccgcgcttgtaacgaagcgacaccagcagatcctgctgtacatcgatttcctgtactacctgactcctgacgggcagaggtttagaagagcatgcagactggtgcacgactttaccgacgccgtgattcaggagcgacggcggactcttccgtcgcaaggagtcgatgacttcctgcaggcaaaagccaaatcaaagaccttagattttatcgatgtgttgttactgagtaaagacgaggacgggaagaaattgtccgacgaggatattagagcagaagccgacacgtttatgtttgaaggacatgacaccacggcatcaggcttatcctgggtcctgtatcacctggccaaacacccggagtaccaagaacgctgcagacaggaggtacaggaactcctcaaggatcgcgagcctaaagagatcgaatgggacgatcttgcccagctgcccttcttaaccatgtgtatcaaagagtccttgcgtttgcacccaccagtccccgcagtgtcgaggtgctgcacacaagacattgtgctgcctgatggcagagttatcccaaagggcataatctgtctgattagtgtgttcgggactcatcacaacccagctgtgtggcccgaccccgaagtatatgatccctttaggtttgatcctaagaacatcaaagagaggtcaccactggcattcatcccgttctctgctggcccgcggaattgcatcggtcaggccttcgctatggccgagatgaaggtggtcctgggtctgacactgctccgatttagggtgcttcctgatcacacagaaccccggcgaaaaccagagctggtgctgcgcgccgaagggggactatggctgcgagtggaacccctgagttag

SEQ ID NO: 77200 - DNA, 1344 bp, Artificial Sequence
  derived and/or modified sequence
atgcgcgtgctcacccaacttgtcgcaacctaccctcagggcttcaaggtctggatgggaccaatcttccccgtgattaggttctgccatcctaatataattaggagtgttataaacgccagtgctgcgatcgtgcccaaggataaggtgttttattcctttctgaaaccttggttaggcgacgggttattgctgtctgcaggtgaaaagtggagccggcacagaagaatgctcaccccagcattccacttcaatattctcaagccttacatgaaaattttcaacgagtcagtgaatatcatgcacgctaaatggcagctgctcgctagtgagggtagtgcccgcctcgacatgttcgagcatatttccctcatgaccctcgatagtctgcagaaatgtgtgttttcattcgattcacactgccaggaaaaaccttccgaatatatagctgccatactggagctgtcggcattggtcaccaaaaggcaccagcaaattcttctgtacatcgatttcctgtactatctcaccccagacggccagcgtttccgcagggcgtgcagactagtgcacgattttacagacgccgttattcaggagcggcggcgcacattacccagtcaaggagtggatgactttcttcaagcaaaggctaaatccaaaacgctagactttatcgacgtgctgctactgtcaaaggacgaggatggaaagaaactgtcggatgaggacatccgcgccgaagccgatacttttatgttcgaggggcacgacacaactgcttcaggtctgtcgtgggtgctctatcacctggccaagcatcctgaataccaagaacgttgccgtcaggaggtgcaagagctgcttaaggatagagagcccaaggagattgaatgggacgatcttgctcagctgcctttcctcacgatgtgcatcaaagagagccttcggctgcacccgccggtgcctgctgtgagtagatgttgtacacaggacatcgttctgcctgacggcagggttattccaaaaggaatcatctgcctgatcagcgtcttcggaacccaccacaaccccgccgtctggcccgatccagaggtctacgatccattccgttttgacccgaaaaacatcaaggagcgtagtccactggcgttcatacccttctctgcggggccgcggaattgcatcgggcaggctttcgctatggccgagatgaaagtcgttctgggcctgacactgctccggttccgcgtgcttcctgaccacaccgagccaaggagaaagccggaactggtattgagggcagaaggtggcctgtggctcagggtagaaccactatcttag

SEQ ID NO: 77201 - DNA, 1563 bp, Artificial Sequence
  derived and/or modified sequence
atgccccagctgagcctgagcagcctgggcctgtggcccatggccgccagcccctggctgctgctgctgctggtgggcgcctcctggctgctggcccgcatcctggcctggacctacaccttctatgacaactgctgccgcctgcgctgcttcccccagccccccaagaggaactggttcctgggccacctgggcctggtgacccccacagagcagggcatgagggtgctgacccagctggtggccacctacccccagggcttcaaggtgtggatgggccccatcttccctgtgatccgcttctgccaccccaacatcatccgcagcgtcatcaatgccagcgctgccatcgtgcccaaggacaaggtgttctacagcttcctgaagccctggctgggagatggcctgctgctgtctgctggggagaagtggagccgccacaggaggatgctgaccccagccttccacttcaacatcctgaagccctacatgaagatcttcaatgaatctgtgaacatcatgcacgccaagtggcagctgctggccagcgagggcagcgcccggctggacatgtttgagcacatcagcctgatgaccctggacagcctgcagaagtgtgtgttctcctttgacagccactgccaggagaagcccagcgagtacatcgccgccatcctggagctgagcgccctggtgaccaagaggcaccagcagatcctgctgtacatcgacttcctgtactacctgaccccagatggccagcgcttcagaagagcctgccgcctggtgcatgacttcacagatgctgtgatccaggagaggaggaggaccctgcccagccagggcgtggatgacttcctgcaggccaaggccaagagcaagaccctggacttcattgatgtgctgctgctgagcaaggatgaagatggcaagaagctgagtgatgaggacatccgggcagaggccgacaccttcatgtttgagggccatgacaccacagccagcggcctgtcctgggtgctgtaccacctggccaagcaccctgagtaccaggagcgctgccggcaggaggtgcaggagctgctgaaggaccgggagcccaaggagattgagtgggatgacctggcccagctgcccttcctgaccatgtgcatcaaggagagcctgcggctgcacccccctgtgcctgctgtgagccgctgctgcacccaggacatcgtgctgcctgatggccgggtcatccccaagggcatcatctgcctgatctctgtgtttggcacccaccacaacccagctgtgtggccagaccctgaggtgtatgaccccttccgctttgaccccaagaacatcaaggagaggagccccctggccttcatccccttctctgctggccccaggaactgcatcggccaggcctttgccatggccgagatgaaggtggtgctgggcctgaccctgctgcgcttccgggtgctgcctgaccacacagagcccaggaggaagccagagctggtgctgcgggcagagggcggcctgtggctgcgggtggagcccctgtcctag

SEQ ID NO: 77202 - DNA, 1344 bp, Artificial Sequence
  derived and/or modified sequence
atgagggtgctgacccagctggtggccacctacccccagggcttcaaggtgtggatgggccccatcttccctgtgatccgcttctgccaccccaacatcatccgcagcgtcatcaatgccagcgctgccatcgtgcccaaggacaaggtgttctacagcttcctgaagccctggctgggagatggcctgctgctgtctgctggggagaagtggagccgccacaggaggatgctgaccccagccttccacttcaacatcctgaagccctacatgaagatcttcaatgaatctgtgaacatcatgcacgccaagtggcagctgctggccagcgagggcagcgcccggctggacatgtttgagcacatcagcctgatgaccctggacagcctgcagaagtgtgtgttctcctttgacagccactgccaggagaagcccagcgagtacatcgccgccatcctggagctgagcgccctggtgaccaagaggcaccagcagatcctgctgtacatcgacttcctgtactacctgaccccagatggccagcgcttccggcgggcctgccgcctggtgcatgacttcacagatgctgtgatccaggagaggaggaggaccctgcccagccagggcgtggatgacttcctgcaggccaaggccaagagcaagaccctggacttcattgatgtgctgctgctgagcaaggatgaagatggcaagaagctgagtgatgaggacatccgggcagaggccgacaccttcatgtttgagggccatgacaccacagccagcggcctgtcctgggtgctgtaccacctggccaagcaccctgagtaccaggagcgctgccggcaggaggtgcaggagctgctgaaggaccgggagcccaaggagattgagtgggatgacctggcccagctgcccttcctgaccatgtgcatcaaggagagcctgcggctgcacccccctgtgcctgctgtgagccgctgctgcacccaggacatcgtgctgcctgatggccgggtcatccccaagggcatcatctgcctgatctctgtgtttggcacccaccacaacccagctgtgtggccagaccctgaggtgtatgaccccttccgctttgaccccaagaacatcaaggagaggagccccctggccttcatccccttctctgctggccccaggaactgcatcggccaggcctttgccatggccgagatgaaggtggtgctgggcctgaccctgctgcgcttccgggtgctgcctgaccacacagagcccaggaggaagccagagctggtgctgcgggcagagggcggcctgtggctgcgggtggagcccctgtcctag

SEQ ID NO: 77203 - DNA, 1563 bp, Artificial Sequence
  derived and/or modified sequence
atgccccagctgagcctgagcagcctgggcctgtggcccatggccgcaagtccatggctattgctcctgctggtgggcgcaagttggctgctggccaggattctggcatggacttatactttttacgacaattgctgccgcctgcgctgctttccacagcctccaaaacggaactggttcttagggcacttggggctggtgacccctacagagcagggaatgcgagtactcacacaactggtggctacctatccccagggattcaaagtatggatgggcccaattttcccggttatccggttctgccatccaaacattatccgaagtgtgatcaacgcctccgctgcaattgtgcccaaggataaggtgttttatagtttcctcaaaccctggctgggagacggtttgctgctgtccgcaggggagaagtggtccaggcatcgccggatgcttaccccagcctttcattttaatattctcaaaccttatatgaaaatcttcaatgaatctgtcaatatcatgcacgccaaatggcaattgctggcatctgagggatcagcccgactggatatgttcgagcacatcagcttgatgaccctggatagtctgcagaaatgcgtgttcagcttcgacagccattgtcaggaaaaaccgtcagagtacattgccgcaatcctcgagctgtcagccctggtgacgaagcggcatcagcagatcctcctgtacattgacttcctttactacctcacaccggacggacagaggtttagacgcgcctgtaggttagtgcacgacttcacagacgcagtaatccaggagagacgcaggaccttacctagccagggggtggatgattttcttcaggctaaagctaagtccaagacgttagattttatagacgtgttactgctttcaaaagacgaagatggtaagaaactgtccgacgaggatatccgcgccgaagcagatacattcatgtttgaaggccacgatacgaccgcatccggactgtcctgggtcttgtatcacttggctaaacaccctgagtaccaggaaagatgcagacaggaggtgcaggagcttctgaaggaccgagagcccaaggaaattgagtgggacgatctcgctcaactcccctttctcactatgtgtatcaaggaatcattaaggctccatccacccgtacccgccgtcagcagatgctgcacccaggatatcgtgctgcctgacgggagggtgatccctaagggtattatctgcctgatttctgtgtttggcactcaccacaacccagccgtttggcccgatcctgaagtctatgatcccttccgcttcgaccccaagaacattaaagaacgctctcctttggcgttcataccctttagcgcggggcctcggaactgcattggccaggcctttgcaatggccgagatgaaggtggtgcttggtctgaccctgctccggttcagagtactgccggaccacaccgaacctcgtagaaaaccagagctagtgcttcgcgctgagggcggtctgtggttgcgtgtggagcctctcagttag

SEQ ID NO: 77204 - DNA, 1344 bp, Artificial Sequence
  derived and/or modified sequence
atgcgggtgctgacccagctggtggccacctacccccagggcttcaaggtttggatggggcccatctttccggtgattaggttttgccacccaaacataataaggagcgtaatcaatgcctcagcagccatcgtgccaaaagataaagtgttttactccttccttaaaccctggctgggcgacggcttgctgctgagcgcgggggaaaaatggagtagacatcgacgaatgctgactccagccttccatttcaacattttgaaaccttacatgaagatttttaacgaatctgtgaatattatgcatgctaaatggcagctgctggccagcgaaggctctgcgcgtctggatatgtttgagcatatctcactaatgaccctcgacagtttgcaaaagtgtgtcttctcctttgactctcattgccaagagaagccatcagaatatatagcagccatattggagttgtccgcgctggttacaaaaagacatcagcagatcctgttgtacatagactttctctactacctaacgccagatgggcaaaggttcaggagggcttgcaggctagtgcacgatttcaccgacgccgtcatccaggagcggaggcgcactcttccatcccagggcgttgacgatttcctccaggccaaagcgaaaagcaaaacattagactttatcgacgtgctcctgttgagcaaggatgaggatgggaagaagctatccgatgaagacatccgggccgaagctgacaccttcatgtttgagggccacgataccacagcctccgggttgtcttgggtgctatatcatcttgccaaacatccagaatatcaggagagatgccgacaagaagtccaggagttactaaaggacagggagcctaaagagattgaatgggacgacctcgctcaattaccattcctaactatgtgtattaaagaatcactgcggctgcacccacccgtgcccgccgtatccaggtgctgtacccaggatatcgttctgcctgatggtagggtgattccaaaaggtatcatttgcctcatttctgttttcgggacccaccacaatccggcagtgtggccagatcctgaggtgtacgacccgttccgcttcgacccaaagaacataaaggagcggtcaccactagcgtttattcctttcagtgccgggccccggaactgtattgggcaggcgtttgcgatggccgagatgaaagttgtcctgggcttaaccctgctgcgattccgagtcctccccgatcatacagaacccagaaggaagcccgagcttgtcctgcgagcggaaggcggcctgtggttacgagtggaacccctgtcatag

SEQ ID NO: 77205 - DNA, 1563 bp, Artificial Sequence
  derived and/or modified sequence
atgcctcagctgtccctgtcaagcctcggtctctggcctatggcggcttccccttggcttctgctgctgttggttggggcttcatggctgctggcaagaatcttggcgtggacatacactttttatgataactgttgccggctcagatgttttccacagcccccaaagcgcaattggttcctgggacacctgggactagtgacgccaacggagcagggaatgagagttttaacccagctagtggcaacatacccacaggggttcaaggtgtggatgggtcctattttccctgtcatccgtttttgccatcccaatattatacgatccgttatcaacgctagcgcggcaatcgtgcccaaggacaaggtcttctattcttttctcaagccgtggttgggcgacgggttgctgctttcggccggagagaagtggagtcgtcaccggaggatgttgacaccagcctttcacttcaatattctaaagccatacatgaagatctttaatgagtccgtcaacatcatgcacgcaaaatggcagctgctggccagtgaggggtcggccaggctcgatatgtttgagcatattagcttgatgacactcgattctctacagaagtgtgtgttctctttcgactcccattgccaagagaagccgagcgagtacatagctgccatcctcgagttgagcgccctcgttaccaagcggcaccagcaaattctgttatacatcgacttcttatattaccttaccccggacggacaacgatttcggcgagcatgtaggctggttcatgattttaccgacgcagtgatccaggagagacgaagaaccctgccatcccagggcgtggatgatttcctgcaggccaaggccaaaagtaagaccctggattttatagacgtgttgctcctgtctaaggacgaagacgggaaaaagctctccgacgaggatatcagggctgaagctgataccttcatgtttgagggacacgacaccaccgcctcaggactgtcctgggtgctgtatcacctcgcaaagcatcctgagtatcaggagcgctgccgccaggaagtccaggagcttctgaaggaccgagagcctaaggaaattgaatgggacgacctggcccagctgcccttcctgacaatgtgcataaaagagtccctgaggctgcatcccccagtccctgccgtctcacgctgttgcacccaagatatcgtgctgcctgatggacgggtgatcccaaaggggatcatttgtctgatatccgtgttcggcacccaccacaaccctgccgtgtggcccgatccagaagtctatgatccttttagattcgaccccaagaacatcaaggagcgttcccccctagcttttattcctttctccgccggaccccgtaattgtatcggacaggcctttgccatggcggagatgaaggtggtgcttggactgactctcctgagattcagagtgcttcctgaccacacagaaccgcgacgaaagccagagctggtgttaagagcagaagggggtctgtggttgcgcgtggaaccgttgtcatag

SEQ ID NO: 77206 - DNA, 1344 bp, Artificial Sequence
  derived and/or modified sequence
atgagagttctgactcaattggtcgcgacctatccacagggctttaaggtatggatggggccaatctttcccgtgatccgcttttgtcatccgaacattattcgcagcgtcattaatgcctccgccgcaatagttcctaaggacaaagttttttacagcttcctgaagccttggctcggagacggactcctgctttccgctggagaaaaatggagccgacacagacgaatgctgacccccgcatttcacttcaacattctgaaaccatatatgaagattttcaatgagagtgtcaatatcatgcatgccaagtggcaactgctggcgagtgaggggtctgcacgtctggacatgtttgaacacatttctctcatgactctggatagcctacaaaagtgcgtctttagtttcgacagccactgccaggaaaaaccctccgaatacatagcagcaatcctggagctatccgccctggtaaccaagcggcatcagcagatacttctctacatcgatttcctctattaccttacccccgacgggcagaggtttcggcgagcatgtcggttggtgcacgattttaccgacgccgtaatccaggagcgacgccgaacactgccaagtcagggagtggacgactttctgcaggctaaagccaaaagtaagacgctggacttcatcgatgtattgcttttgagcaaggacgaagacgggaaaaagttgtcagatgaagacattcgcgcagaggctgacacatttatgttcgaaggtcacgatactactgcctccggtctctcttgggttctgtatcatctcgccaagcatcctgagtatcaggaaagatgcagacaggaggtgcaggagctcttaaaagatagggaacctaaagagatagaatgggacgacctggcacagctgccattcctgacgatgtgcatcaaagaaagtctcaggctgcatccaccagtgccagccgtatccagatgttgtactcaggatatcgtccttccagatggcagggtgattcctaaaggtatcatctgtttgattagcgtgtttggtacgcaccacaatcccgcagtgtggcctgatcctgaagtatacgatcctttccggttcgacccaaaaaacatcaaggagaggtctccactcgcgtttattcccttttccgcgggacctaggaattgcattgggcaggctttcgctatggccgagatgaaggtggttttgggactgacccttctccgcttccgtgtgctcccagatcatactgaaccacgaagaaaacccgaattggtgctgagagccgaaggaggcctttggctgagggtggaaccactatcttag

SEQ ID NO: 77207 - DNA, 2983 bp, Artificial Sequence
  derived and/or modified sequence
agaaggggagaggaggttgtgtgggacaaggtgctcctgacagaaggatgccacagctgagcctgtcctcgctgggcctttggccaatggcagcatccccgtggctgctcctgctgctggttggggcctcctggctcctggcccgcatcctggcctggacctataccttctatgacaactgctgccgcctccggtgtttcccgcaacccccgaaacggaattggttcttgggtcacctgggcctggtcacccccacggagcagggcatgagggtcctgactcagctggtggccacctacccccagggctttaaggtctggatgggccccatcttccccgtcatccgtttttgccaccccaacatcatccggtctgtcatcaacgcctcagctgccattgtaccaaaggacaaggtcttctacagcttcctgaagccctggctgggggatgggctcctgctgagtgctggtgaaaagtggagccgccaccgtcggatgctgacgcctgccttccatttcaacatcctgaagccctatatgaagattttcaatgagagtgtgaacatcatgcatgccaagtggcagctcctggcctcagagggtagtgcccgtctggacatgtttgagcacatcagcctcatgaccttggacagtctgcagaaatgtgtcttcagctttgacagccattgccaggagaagcccagtgaatatattgccgccatcttggagctcagtgcccttgtgacaaaaagacaccagcagatcctcctgtacatagacttcctgtattatctcacccctgatgggcagcgtttccgcagggcctgccgcctggtgcacgacttcacagatgccgtcatccaggagcggcgccgcaccctccctagccagggtgttgatgacttcctccaagccaaggccaaatccaagactttggacttcattgatgtactcctgctgagcaaggatgaagatgggaagaagttgtccgatgaggacataagagcagaagctgacacctttatgtttgagggccatgacaccacagccagtggtctctcctgggtcctgtaccaccttgcaaagcacccggaataccaggagcgctgtcggcaggaggtgcaagagcttctgaaggaccgtgagcctaaagagattgaatgggacgacctggcccagctgcccttcctgaccatgtgcattaaggagagcctgaggctgcatcccccagtccctgccgtctctcgctgctgcacccaagacattgtgctcccagacggccgggtcatccccaaaggcattatctgcctcatcagtgtttttggaacccatcacaacccagccgtgtggccggaccctgaggtctatgacccctttcgctttgacccaaagaacatcaaggagaggtcacctctggcttttattcccttctcagcagggcccaggaactgcatcgggcaggcgttcgcgatggcggagatgaaggtggtcctggggctcacgctgctgcgcttccgcgtcctgcctgaccacaccgagccccgcaggaagccggagctggtcctgcgcgcagagggcggactttggctgcgggtggagcccctgagctgagttctgcagagacccactctgaccccactaaaatgacccctgattcatcaaaagtgaggcctagaattaccctaagaccctgttccacagtcctgtattccatcctagatatctactcaaaataattgagacaagtgttcaaacagaaagacgcttgtgcgtgaatgttcatggcagccctattcacagtagccaaacgatgaaaacaaccccaagctatatattaccagatgaaaggataaacaaaatatggtccatccatacaatggagtattacacagccataaaaaggaatgaagcagtgatccccactacactgtggatgaaccttgaatgcatgatactgaatgaaagacatcagatgcaaaaggtcacatagtgtactgtccttttatatgaaatttccagaacaggccaatctgaagagatgtatagtggattggtggctttcagcagctgtggggaggtgggactgaggagcgactgctaatcaggatggggtttcctcctgggatggtgaaaatgttccggacctagatagtgatgaaggtagcacgacactgtgagtgcactaaatgctattgaattggacactttagaatggttgaaatagtgatttttatgtgaattctacctaaacatgctattacagctcatatatactttttccatctggattcttcacaaaagaatatgttgtgagcatctttccatgatattaaatcatcttaggaaacattattttgtgttcttcaaaatgtgcatgttaagtattcaaatcagtcttaaatttttaaaaatatgtaattttagaaaataatttaaaaggttttgtttcagtttgtaagatttcttttctggcactttaatggcttgaggtatcattatcagttacaaattgagttattcttcatcaaatgacttttggagtagagattttatttttatagcaatagatgcacagatattcctgtaagatacaggtgtggttagacacttttctagaacaggcatgccctgcaaactccacagacactgactgtttttgtcctattaagaagtagaccactgagaagggagaaggtgacattttagctttcccaggtaaaagtggttttcatcctcacaccaattttatggactggacgttaactctcttgctcaaggtcactctgagtggaagagtggggataaatctggttcgtttggcatcagaggccatgacttttcctaccacagaagtaattttcaaagtaagtctctgccctaggcacatcagatcacctggggaccactccagagtgagtagacaagactttgacaggggtgcctaatttttttttttttttgagatggagtctcgctctgttgcc

SEQ ID NO: 77208 - DNA, 1881 bp, Artificial Sequence
  derived and/or modified sequence
aaaaaacctcccagaagaaggggagaggaggttgtgtgggacaaggtgctcctggctcctggcccgcatcctggcctggacctataccttctatgacaactgctgccgcctccggtgtttcccgcaacccccgaaacggaattggttcttgggtcacctgggcctggtcacccccacggagcagggcatgagggtcctgactcagctggtggccacctacccccagggctttaaggtctggatgggccccatcttccccgtcatccgtttttgccaccccaacatcatccggtctgtcatcaacgcctcagctgccattgtaccaaaggacaaggtcttctacagcttcctgaagccctggctgggggatgggctcctgctgagtgctggtgaaaagtggagccgccaccgtcggatgctgacgcctgccttccatttcaacatcctgaagccctatatgaagattttcaatgagagtgtgaacatcatgcatgccaagtggcagctcctggcctcagagggtagtgcccgtctggacatgtttgagcacatcagcctcatgaccttggacagtctgcagaaatgtgtcttcagctttgacagccattgccaggagaagcccagtgaatatattgccgccatcttggagctcagtgcccttgtgacaaaaagacaccagcagatcctcctgtacatagacttcctgtattatctcacccctgatgggcagcgtttccgcagggcctgccgcctggtgcacgacttcacagatgccgtcatccaggagcggcgccgcaccctccctagccagggtgttgatgacttcctccaagccaaggccaaatccaagactttggacttcattgatgtactcctgctgagcaaggatgaagatgggaagaagttgtccgatgaggacataagagcagaagctgacacctttatgtttgagggccatgacaccacagccagtggtctctcctgggtcctgtaccaccttgcaaagcacccggaataccaggagcgctgtcggcaggaggtgcaagagcttctgaaggaccgtgagcctaaagagattgaatgggacgacctggcccagctgcccttcctgaccatgtgcattaaggagagcctgaggctgcatcccccagtccctgccgtctctcgctgctgcacccaagacattgtgctcccagacggccgggtcatccccaaaggcattatctgcctcatcagtgtttttggaacccatcacaacccagccgtgtggccggaccctgaggtctatgacccctttcgctttgacccaaagaacatcaaggagaggtcacctctggcttttattcccttctcagcagggcccaggaactgcatcgggcaggcgttcgcgatggcggagatgaaggtggtcctggggctcacgctgctgcgcttccgcgtcctgcctgaccacaccgagccccgcaggaagccggagctggtcctgcgcgcagagggcggactttggctgcgggtggagcccctgagctgagttctgcagagacccactctgaccccactaaaatgacccctgattcatcaaaagtgaggcctagaattaccctaagaccctgttccacagtcctgtattccatcctagatatctactcaaaataattgagacaagtgttcaaacagaaagacgcttgtgcgtgaatgttcatggcagccctattcacagtagccaaacgatgaaaacaaccccaagctatatattaccagatgaaaggataaacaaaatatggtccatccatacaatggagtattacacagccataaaaaggaatgaagcagtgatccccactacactgtggatgaaccttgaatgcatgatactgaatg

SEQ ID NO: 77209 - DNA, 1563 bp, Artificial Sequence
  derived and/or modified sequence
atgccccagctgagcctgagcagcctgggcctgtggcccatggccgccagcccctggctgctgctgctgctggtgggcgccagctggctgctggccagaatcctggcctggacctacaccttctacgacaactgctgcagactgagatgcttcccccagccccccaagagaaactggttcctgggccacctgggcctggtgacccccaccgagcagggcatgagagtgctgacccagctggtggccacctacccccagggcttcaaggtgtggatgggccccatcttccccgtgatcagattctgccaccccaacatcatcagaagcgtgatcaacgccagcgccgccatcgtgcccaaggacaaggtgttctacagcttcctgaagccctggctgggcgacggcctgctgctgagcgccggcgagaagtggagcagacacagaagaatgctgacccccgccttccacttcaacatcctgaagccctacatgaagatcttcaacgagagcgtgaacatcatgcacgccaagtggcagctgctggccagcgagggcagcgccagactggacatgttcgagcacatcagcctgatgaccctggacagcctgcagaagtgcgtgttcagcttcgacagccactgccaggagaagcccagcgagtacatcgccgccatcctggagctgagcgccctggtgaccaagagacaccagcagatcctgctgtacatcgacttcctgtactacctgacccccgacggccagagattcagaagagcctgcagactggtgcacgacttcaccgacgccgtgatccaggagagaagaagaaccctgcccagccagggcgtggacgacttcctgcaggccaaggccaagagcaagaccctggacttcatcgacgtgctgctgctgagcaaggacgaggacggcaagaagctgagcgacgaggacatcagagccgaggccgacaccttcatgttcgagggccacgacaccaccgccagcggcctgagctgggtgctgtaccacctggccaagcaccccgagtaccaggagagatgcagacaggaggtgcaggagctgctgaaggacagagagcccaaggagatcgagtgggacgacctggcccagctgcccttcctgaccatgtgcatcaaggagagcctgagactgcacccccccgtgcccgccgtgagcagatgctgcacccaggacatcgtgctgcccgacggcagagtgatccccaagggcatcatctgcctgatcagcgtgttcggcacccaccacaaccccgccgtgtggcccgaccccgaggtgtacgaccccttcagattcgaccccaagaacatcaaggagagaagccccctggccttcatccccttcagcgccggccccagaaactgcatcggccaggccttcgccatggccgagatgaaggtggtgctgggcctgaccctgctgagattcagagtgctgcccgaccacaccgagcccagaagaaagcccgagctggtgctgagagccgagggcggcctgtggctgagagtggagcccctgagctag

SEQ ID NO: 77210 - DNA, 1344 bp, Artificial Sequence
  derived and/or modified sequence
atgagagtgctgacccagctggtggccacctacccccagggcttcaaggtgtggatgggccccatcttccccgtgatcagattctgccaccccaacatcatcagaagcgtgatcaacgccagcgccgccatcgtgcccaaggacaaggtgttctacagcttcctgaagccctggctgggcgacggcctgctgctgagcgccggcgagaagtggagcagacacagaagaatgctgacccccgccttccacttcaacatcctgaagccctacatgaagatcttcaacgagagcgtgaacatcatgcacgccaagtggcagctgctggccagcgagggcagcgccagactggacatgttcgagcacatcagcctgatgaccctggacagcctgcagaagtgcgtgttcagcttcgacagccactgccaggagaagcccagcgagtacatcgccgccatcctggagctgagcgccctggtgaccaagagacaccagcagatcctgctgtacatcgacttcctgtactacctgacccccgacggccagagattcagaagagcctgcagactggtgcacgacttcaccgacgccgtgatccaggagagaagaagaaccctgcccagccagggcgtggacgacttcctgcaggccaaggccaagagcaagaccctggacttcatcgacgtgctgctgctgagcaaggacgaggacggcaagaagctgagcgacgaggacatcagagccgaggccgacaccttcatgttcgagggccacgacaccaccgccagcggcctgagctgggtgctgtaccacctggccaagcaccccgagtaccaggagagatgcagacaggaggtgcaggagctgctgaaggacagagagcccaaggagatcgagtgggacgacctggcccagctgcccttcctgaccatgtgcatcaaggagagcctgagactgcacccccccgtgcccgccgtgagcagatgctgcacccaggacatcgtgctgcccgacggcagagtgatccccaagggcatcatctgcctgatcagcgtgttcggcacccaccacaaccccgccgtgtggcccgaccccgaggtgtacgaccccttcagattcgaccccaagaacatcaaggagagaagccccctggccttcatccccttcagcgccggccccagaaactgcatcggccaggccttcgccatggccgagatgaaggtggtgctgggcctgaccctgctgagattcagagtgctgcccgaccacaccgagcccagaagaaagcccgagctggtgctgagagccgagggcggcctgtggctgagagtggagcccctgagctag

SEQ ID NO: 77211 - protein, 187 aa, Artificial Sequence
  derived and/or modified sequence
MAKTAMAYKEKMKELSMLSLICSCFYPEPRNINIYTYDDMEVKQINKRASGQAFELILKPPSPISEAPRTLASPKKKDLSLEEIQKKLEAAEERRKSQEAQVLKQLAEKREHEREVLQKALEENNNFSKMAEEKLILKMEQIKENREANLAAIIERLQEKLVKFISSELKESIESQFLELQREGEKQ

SEQ ID NO: 77212 - DNA, 564 bp, Artificial Sequence
  derived and/or modified sequence
atggccaagaccgccatggcctacaaggagaagatgaaggagctgagcatgctgagcctgatctgcagctgcttctaccccgagcccagaaacatcaacatctacacctacgacgacatggaggtgaagcagatcaacaagagagccagcggccaggccttcgagctgatcctgaagccccccagccccatcagcgaggcccccagaaccctggccagccccaagaagaaggacctgagcctggaggagatccagaagaagctggaggccgccgaggagagaagaaagagccaggaggcccaggtgctgaagcagctggccgagaagagagagcacgagagagaggtgctgcagaaggccctggaggagaacaacaacttcagcaagatggccgaggagaagctgatcctgaagatggagcagatcaaggagaacagagaggccaacctggccgccatcatcgagagactgcaggagaagctggtgaagttcatcagcagcgagctgaaggagagcatcgagagccagttcctggagctgcagagagagggcgagaagcagtag

SEQ ID NO: 77213 - DNA, 564 bp, Artificial Sequence
  derived and/or modified sequence
atggccaaaaccgccatggcctacaaggaaaaaatgaaagagctgagcatgctatccctgatttgtagctgtttctatccggaaccccgaaatataaatatttacacttacgatgatatggaggtcaagcaaatcaataagcgggcgagcggtcaagcttttgaactcatcctgaagccgccatccccaatatccgaggccccaaggactcttgcgagtcccaagaagaaggacttgagtcttgaagagatccagaagaagctcgaggccgctgaagagcggagaaagtctcaggaggcccaggtcctgaaacagctggccgaaaaaagggaacatgagcgagaggttctccagaaagcactggaggaaaacaacaatttttcaaagatggccgaagaaaagcttatcctaaagatggaacaaatcaaagagaaccgagaggctaatttagccgcaatcattgaacgcttacaggagaagctggtcaagtttatctctagtgagctgaaggagagtattgagtcgcagttcctcgaactccagagggagggggagaaacagtag

SEQ ID NO: 77214 - DNA, 564 bp, Artificial Sequence
  derived and/or modified sequence
atggccaagacagccatggcctacaaggagaagatgaaggagctgtccatgctgagcctcatctgcagctgcttctacccagagcccaggaacatcaacatctacacctatgatgacatggaggtgaagcagatcaacaagagggccagcggccaggcctttgagctgatcctgaagccacccagccccatcagcgaggcccccaggaccctggccagccccaagaagaaggacctgagcctggaggagatccagaagaagctggaggccgctgaggagaggaggaagagccaggaggcccaggtgctgaagcagctggccgagaagcgggagcacgagcgggaggtgctgcagaaggccctggaggagaacaacaacttcagcaagatggccgaggagaagctgatcctgaagatggagcagatcaaggagaaccgggaggccaacctggccgccatcatcgagcggctgcaggagaagctggtgaagttcatcagcagcgagctgaaggagagcattgagagccagttcctggagctgcagcgggagggggagaagcagtag

SEQ ID NO: 77215 - DNA, 564 bp, Artificial Sequence
  derived and/or modified sequence
atggccaagaccgccatggcctacaaggagaagatgaaggagctgtccatgctatcactgatctgtagctgtttctaccctgaacctcgaaacattaatatctacacatacgacgatatggaagtcaagcagataaataagagagcaagtgggcaggcttttgagctgatcttgaagcctccctcgcctatctctgaggccccccggactctcgccagtcctaagaaaaaggatcttagccttgaggaaatccagaaaaagctcgaagccgctgaagagcggcggaagtcacaggaagcccaagtccttaagcaactcgccgaaaaacgggaacatgaaagagaggtcctccaaaaagcattagaggaaaacaacaacttttcgaaaatggctgaagaaaaactgattcttaagatggagcagattaaagaaaatagagaggcgaatctggcggctatcattgagagactgcaagagaagctcgtcaagtttatttcgtccgagctgaaagagtcgatagaaagccagttccttgagctgcagagagagggggagaagcagtag

SEQ ID NO: 77216 - DNA, 564 bp, Artificial Sequence
  derived and/or modified sequence
atggcgaagaccgccatggcctacaaagagaaaatgaaagaactgagcatgttatccctgatctgttcatgtttttatcccgaacctaggaacattaatatttacacttacgacgacatggaggtaaagcaaattaataagagggcaagcggccaagcctttgaactgatcctgaagcccccttcccctatttctgaggctccgaggacacttgccagccctaaaaaaaaagatttatctctcgaggaaatccagaagaaattagaagccgctgaagagagacggaagagccaagaggcacaagttctcaagcagctggctgagaagagggaacacgaacgcgaggtccttcagaaggctcttgaggaaaataataacttcagcaagatggcagaggaaaagttgattcttaagatggagcagataaaggaaaatagggaagccaatctggctgccatcatagagcgtctccaagagaaattggttaaatttatttctagtgagctgaaagagagcatcgagagccagtttttggagcttcagcgagaaggggagaagcagtag

SEQ ID NO: 77217 - DNA, 799 bp, Artificial Sequence
  derived and/or modified sequence
gaccctttgccttcgccactgctcagcgtctgcacatccctacaatggctaaaacagcaatggcctacaaggaaaaaatgaaggagctgtccatgctgtcactgatctgctcttgcttttacccggaacctcgcaacatcaacatctatacttacgatgatatggaagtgaagcaaatcaacaaacgtgcctctggccaggcttttgagctgatcttgaagccaccatctcctatctcagaagccccacgaactttagcttctccaaagaagaaagacctgtccctggaggagatccagaagaaactggaggctgcagaggaaagaagaaagtctcaggaggcccaggtgctgaaacaattggcagagaagagggaacacgagcgagaagtccttcagaaggctttggaggagaacaacaacttcagcaagatggcggaggaaaagctgatcctgaaaatggaacaaattaaggaaaaccgtgaggctaatctagctgctattattgaacgtctgcaggaaaagctggtcaagtttatttcttctgaactaaaagaatctatagagtctcaatttctggagcttcagagggaaggagagaagcaatgagaggcatgctgcggaggtgcgcaggaacaaggaactccaggttgaactgtctggctgaagcaagggagggtctggcacgccccaccaatagtaaatccccctgcctatattataatggatcatgcgatatcaggatggggaatgtatgacatggtttaaaaagaactcattataaaaaaaaaaaaacaaaa

SEQ ID NO: 77218 - protein, 601 aa, Artificial Sequence
  derived and/or modified sequence
MPSSISAFEGTCVSIPCRFDFPDELRPAVVHGVWYFNSPYPKNYPPVVFKSRTQVVHESFQGRSRLLGDLGLRNCTLLLSNVSPELGGKYYFRGDLGGYNQYTFSEHSVLDIVNTPNIVVPPEVVAGTEVEVSCMVPDNCPELRPELSWLGHEGLGEPAVLGRLREDEGTWVQVSLLHFVPTREANGHRLGCQASFPNTTLQFEGYASMDVKYPPVIVEMNSSVEAIEGSHVSLLCGADSNPPPLLTWMRDGTVLREAVAESLLLELEEVTPAEDGVYACLAENAYGQDNRTVGLSVMYAPWKPTVNGTMVAVEGETVSILCSTQSNPDPILTIFKEKQILSTVIYESELQLELPAVSPEDDGEYWCVAENQYGQRATAFNLSVEFAPVLLLESHCAAARDTVQCLCVVKSNPEPSVAFELPSRNVTVNESEREFVYSERSGLVLTSILTLRGQAQAPPRVICTARNLYGAKSLELPFQGAHRLMWAKIGPVGAVVAFAILIAIVCYITQTRRKKNVTESPSFSAGDNPPVLFSSDFRISGAPEKYESERRLGSERRLLGLRGEPPELDLSYSHSDLGKRPTKDSYTLTEELAEYAEIRVK

SEQ ID NO: 77219 - DNA, 1806 bp, Artificial Sequence
  derived and/or modified sequence
atgccctccagcatctctgcttttgagggtacatgcgtatccattccatgtaggtttgactttccggatgagctgcgcccagcagtggtgcacggagtgtggtactttaattccccctatccgaagaactatccccccgtcgttttcaagagcagaacacaggttgtccatgaaagcttccagggcagaagccgcttgttaggtgacttggggttgcggaattgtaccctgctgctgtcaaatgtgtctccagagctggggggcaaatactactttaggggagatcttggagggtacaaccaatacacattctcagagcatagcgtgctggatatcgtcaacaccccaaatatagtcgtgccccctgaggtggtggctgggaccgaggtcgaagtgagttgtatggtcccagacaactgccccgaattgagacctgaactcagctggttagggcacgagggcctgggagagcctgcagtcctgggccggctgagggaggacgaaggtacctgggttcaagtgtctttacttcatttcgtgccaactagggaagctaacggacatagactggggtgccaggcttcatttcccaacacaaccttacagttcgaagggtacgcctctatggacgttaagtacccacccgtgatcgtagaaatgaatagcagcgtcgaggccatagagggttctcatgtctctctgttgtgcggcgcggatagcaaccccccacctctgctgacctggatgcgggacggcactgtcctgcgggaagccgtagccgagtcccttctgctggagctcgaggaagttacccccgctgaagacggcgtatacgcctgcttggctgagaacgcctacggtcaggataatcgtacggtaggcctgtccgtgatgtacgccccttggaaacccactgtgaacggcaccatggttgcagtagaaggcgaaaccgtgtcaattttatgtagcacgcagtctaaccctgacccaatactgacaatttttaaagagaaacagatcttaagcaccgtcatctacgaaagcgaacttcagttggaactcccggcagtgtcgccggaagatgacggagaatactggtgcgttgctgagaatcagtatggacagcgcgccacggcctttaatctcagcgttgagttcgcccctgttttgttgctggagtctcattgcgcggctgcccgggataccgtacagtgcctttgcgttgtcaagagtaatcccgagccctcggtggccttcgagttgccaagtcgcaacgttaccgtaaacgaatccgagcgcgagttcgtttattctgaaaggtctgggctggtgttgacgagcattttgactctgagaggtcaggctcaggctccaccccgtgtcatttgcacagctaggaatctatacggagcaaaatctctggaacttccttttcagggcgcacacagacttatgtgggctaaaattggaccagtaggcgccgtggtggcttttgcaattctaatcgctattgtctgctacatcacccaaacacggcggaaaaagaatgtgactgaaagtcccagctttagtgcaggcgacaatcctccagttcttttcagctctgactttcgaatctccggtgctccggagaaatacgagtctgagagaaggctcggatccgaacgcaggttgctcgggctgagaggcgagccacctgagctggatctgtcttactcccacagtgatctcggaaaaagacctacgaaggatagttatacactgaccgaggaattggccgaatacgcagaaattcgcgtgaagtag

SEQ ID NO: 77220 - DNA, 1806 bp, Artificial Sequence
  derived and/or modified sequence
atgcccagcagcatcagcgcctttgagggcacctgtgtgtccatcccctgccgctttgacttcccagatgagctgcggcctgctgtggtgcatggagtgtggtacttcaacagcccctaccccaagaactacccacctgtggtgttcaagagcaggacccaggtggtgcatgagagcttccagggccgcagccggctgctgggggacctgggcctgaggaactgcaccctgctgctgagcaatgtgtccccagagctgggcggcaagtactacttccggggggacctgggcggctacaaccagtacaccttcagcgagcacagcgtgctggacatcgtgaacacccccaacatcgtggtgcccccagaggtggtggccggcacagaggtggaggtgtcctgcatggtgcctgacaactgcccagagctgcggcctgagctgtcctggctgggccacgagggcctgggggagcctgctgtgctgggccgcctgcgggaggatgagggcacctgggtgcaggtgtccctgctgcactttgtgcccacccgggaggccaacggccaccggctgggctgccaggccagcttccccaacaccaccctgcagtttgagggctacgcctccatggatgtgaagtacccacctgtgattgtggagatgaacagctctgtggaggccatcgagggcagccacgtgtccctgctgtgtggggctgacagcaaccccccacccctgctgacctggatgagagatggcaccgtgctgcgggaggccgtggccgagagcctgctgctggagctggaggaggtgaccccagcagaagatggagtgtatgcctgcctggctgaaaatgcctacggccaggacaacagaacagtgggcctgtctgtgatgtatgccccctggaagcccaccgtgaatggcaccatggtggccgtggagggggagaccgtgtccatcctgtgcagcacccagagcaacccagaccccatcctgaccatcttcaaggagaagcagatcctgagcaccgtcatctatgagagcgagctgcagctggagctgcctgctgtgtccccagaagatgatggagagtactggtgtgtggccgagaaccagtatggccagagggccacagccttcaacctgtctgtggagtttgcccctgtgctgctgctggagagccactgtgccgccgcccgggacacagtgcagtgcctgtgtgtggtgaagagcaaccctgagcccagcgtggcctttgagctgcccagcagaaatgtgacagtgaatgaaagtgagcgggagtttgtgtacagcgagaggagcggcctggtgctgaccagcatcctgaccctgcggggccaggcccaggccccacccagggtcatctgcacagccaggaacctgtatggagccaagagcctggagctgcccttccagggcgcccaccggctgatgtgggccaagattggccctgtgggcgctgtggtggcctttgccatcctgattgccatcgtgtgctacatcacccagaccaggaggaagaagaatgtgacagagagccccagcttctctgctggggacaacccccctgtgctcttcagcagtgacttccgcatcagcggggcccctgagaagtatgagagcgagcggcggctgggcagcgagcggcggctgctgggcctgcggggggagcccccagagctggacctgagctacagccacagcgacctgggcaagaggcccaccaaggacagctacaccctgacagaggagctggccgagtatgcagagatccgggtgaagtag

SEQ ID NO: 77221 - DNA, 1806 bp, Artificial Sequence
  derived and/or modified sequence
atgcccagcagcatcagcgccttcgagggcacctgcgtgagcatcccttgtaggtttgattttcctgacgagctccggcccgctgtcgtgcacggcgtctggtattttaacagcccctacccaaaaaattacccccccgtggtctttaaatcaagaactcaggttgtccatgagagcttccaggggcggtccagattattaggcgacctaggcttgcgaaattgcacactgctcctgtctaatgtgagccctgaactcggaggcaaatactactttaggggagatctgggcggttataatcaatataccttctcagagcactctgtactggatatcgtcaatactcccaatatcgtcgtgccgccagaagtcgtggccggcactgaagtcgaagtttcctgcatggtaccagataactgccccgagctgcgaccagaactaagctggctaggccatgaaggattgggtgaacccgccgtgttggggcggctccgagaagatgagggtacgtgggtccaggtcagcctacttcatttcgtgccaacccgagaggcgaacgggcaccgcctaggctgccaggcctcctttcccaatactactctgcagttcgagggttacgcctcaatggacgtgaagtaccccccagtgattgtggagatgaattcttcagtcgaagccattgaggggagccatgtgtctctactctgcggcgctgactctaatcccccacccctactaacctggatgagggatggaacggtcctgagagaagctgtagcagagtctttgttactggagctggaagaggtgaccccagcagaggacggcgtgtatgcctgcctggcggagaacgcctacggacaagacaatcgcacagtcgggctaagtgtgatgtacgctccctggaagcccacagtgaatggcaccatggtagccgtggagggagaaaccgtgagtattctttgcagtactcagtcaaaccccgaccccattctgactatcttcaaagaaaaacagattttgagcaccgtgatctatgagagtgagctacagttagagttgccagccgtcagtcctgaggatgacggcgaatattggtgcgtggctgaaaatcaatatggtcagcgggccaccgcttttaacttgagcgtggaattcgccccagtgctcctgctcgagtctcactgtgctgctgcccgcgacaccgtgcaatgcctatgtgtcgtgaaatcgaatccggaaccctccgtcgccttcgaattaccctcacggaacgtgacggtgaatgaaagtgagcgagaattcgtgtactcagagcggagtggactcgtcctcacgtctatccttaccttgagaggacaggcccaagctccccccagggtcatctgcactgcgcggaacctgtatggcgcgaagagcctggaactcccgtttcaaggcgcacacagacttatgtgggcgaagattggcccggtgggtgcagtggtcgccttcgcaattcttatcgctatcgtgtgctatattacccaaactcgcaggaaaaaaaatgtgactgagagccctagtttttctgctggcgataaccctccggtgctgttttcctcagatttccgtattagtggggcccccgagaagtatgaaagtgagcggcgcctggggtcggagcgcaggttgctgggcttgagaggcgaaccgcctgagttagatctttcctatagccattccgatctgggtaagaggcctaccaaagattcctacaccctgacagaggagctggcggaatacgccgagatcagagtgaaatag

SEQ ID NO: 77222 - DNA, 1806 bp, Artificial Sequence
  derived and/or modified sequence
atgcccagctcgatttctgcctttgagggcacctgcgttagtatcccctgtagattcgatttcccagacgaactgagaccggctgtggtgcacggagtctggtactttaattcgccatacccaaagaactaccccccagtcgtgttcaaatcacgcacacaggtggtccatgagtcctttcagggaaggagtagactgcttggcgatcttggtcttaggaattgcacactcctgctgtcaaacgtttcaccagaactgggcggtaaatactacttcaggggtgatctgggtggatacaatcagtacacttttagcgaacacagcgtactggatatcgtgaatactcctaatatcgtggttccccctgaggtagtggcagggactgaggtggaggtctcctgtatggtgccagacaattgtccggagctgcgccctgaattgtcttggctaggacatgagggtctgggcgagccggctgtactcgggagacttcgggaggatgagggcacatgggtgcaggtgagcctcctgcacttcgttccgaccagagaagctaatggccatcgactcggctgccaggccagctttcctaatactacactgcagttcgaagggtatgccagcatggatgtaaagtatcctcccgtgatcgtcgaaatgaattctagtgtcgaggccatagagggatcccatgtttcccttctgtgcggagctgactctaaccctcccccattgctcacctggatgagagacgggacggtgctacgcgaggctgtggcagagagtctgctgctcgagctagaagaagttacgccagctgaggacggcgtctacgcttgtctggccgagaacgcttatggccaggacaacagaaccgtgggcctcagtgtcatgtacgcaccttggaagcctactgttaacggcaccatggtcgctgtggaaggcgagactgtgagtatcctgtgctcaacacagagcaatccagaccccatccttacaatttttaaggagaagcagatcttatccaccgttatatacgagagtgagctccaactggagctgccagccgtctctcctgaggatgatggagaatattggtgcgttgccgaaaatcagtacggccagagagccaccgcatttaatctgagtgttgaattcgcaccggttttgttactggaatcgcattgcgccgcagctcgtgacactgtccagtgcctctgcgtggtgaaatccaacccagaacctagcgtcgccttcgaacttccttccaggaacgttaccgttaacgagtccgagcgggagtttgtctattccgaacgcagtggactggtactcacatcaattttgacgctacggggtcaagcccaggcaccacctagagttatttgcactgcgaggaacctatacggagccaaatccctggagctgcctttccaaggtgcccacagattaatgtgggcaaaaattggccctgttggggcagtggtggccttcgctatccttattgccattgtgtgttatatcacacagacgagaaggaagaagaacgttacggagagtccaagtttttctgcaggtgacaacccaccagtactgttctcctctgatttccgtatttccggcgcacccgagaagtatgagtcagaaagaagactgggtagcgagcggagacttttgggactgaggggcgaaccccctgagctggacctgagctactcgcatagcgacctcggaaagcggccaactaaggattcgtataccttgactgaagagctggcagagtatgccgaaattagagtgaagtag

SEQ ID NO: 77223 - DNA, 1806 bp, Artificial Sequence
  derived and/or modified sequence
atgcccagcagcatcagcgccttcgagggcacctgcgtgagcatcccctgcagattcgacttccccgacgagctgagacccgccgtggtgcacggcgtgtggtacttcaacagcccctaccccaagaactacccccccgtggtgttcaagagcagaacccaggtggtgcacgagagcttccagggcagaagcagactgctgggcgacctgggcctgagaaactgcaccctgctgctgagcaacgtgagccccgagctgggcggcaagtactacttcagaggcgacctgggcggctacaaccagtacaccttcagcgagcacagcgtgctggacatcgtgaacacccccaacatcgtggtgccccccgaggtggtggccggcaccgaggtggaggtgagctgcatggtgcccgacaactgccccgagctgagacccgagctgagctggctgggccacgagggcctgggcgagcccgccgtgctgggcagactgagagaggacgagggcacctgggtgcaggtgagcctgctgcacttcgtgcccaccagagaggccaacggccacagactgggctgccaggccagcttccccaacaccaccctgcagttcgagggctacgccagcatggacgtgaagtacccccccgtgatcgtggagatgaacagcagcgtggaggccatcgagggcagccacgtgagcctgctgtgcggcgccgacagcaaccccccccccctgctgacctggatgagagacggcaccgtgctgagagaggccgtggccgagagcctgctgctggagctggaggaggtgacccccgccgaggacggcgtgtacgcctgcctggccgagaacgcctacggccaggacaacagaaccgtgggcctgagcgtgatgtacgccccctggaagcccaccgtgaacggcaccatggtggccgtggagggcgagaccgtgagcatcctgtgcagcacccagagcaaccccgaccccatcctgaccatcttcaaggagaagcagatcctgagcaccgtgatctacgagagcgagctgcagctggagctgcccgccgtgagccccgaggacgacggcgagtactggtgcgtggccgagaaccagtacggccagagagccaccgccttcaacctgagcgtggagttcgcccccgtgctgctgctggagagccactgcgccgccgccagagacaccgtgcagtgcctgtgcgtggtgaagagcaaccccgagcccagcgtggccttcgagctgcccagcagaaacgtgaccgtgaacgagagcgagagagagttcgtgtacagcgagagaagcggcctggtgctgaccagcatcctgaccctgagaggccaggcccaggccccccccagagtgatctgcaccgccagaaacctgtacggcgccaagagcctggagctgcccttccagggcgcccacagactgatgtgggccaagatcggccccgtgggcgccgtggtggccttcgccatcctgatcgccatcgtgtgctacatcacccagaccagaagaaagaagaacgtgaccgagagccccagcttcagcgccggcgacaacccccccgtgctgttcagcagcgacttcagaatcagcggcgcccccgagaagtacgagagcgagagaagactgggcagcgagagaagactgctgggcctgagaggcgagccccccgagctggacctgagctacagccacagcgacctgggcaagagacccaccaaggacagctacaccctgaccgaggagctggccgagtacgccgagatcagagtgaagtag

SEQ ID NO: 77224 - protein, 465 aa, Artificial Sequence
  derived and/or modified sequence
MEPSSLELPADTVQRIAAELKCHPTDERVALHLDEEDKLRHFRECFYIPKIQDLPPVDLSLVNKDENAIYFLGNSLGLQPKMVKTYLEEELDKWAKIAAYGHEVGKRPWITGDESIVGLMKDIVGANEKEIALMNALTVNLHLLMLSFFKPTPKRYKILLEAKAFPSDHYAIESQLQLHGLNIEESMRMIKPREGEETLRIEDILEVIEKEGDSIAVILFSGVHFYTGQHFNIPAITKAGQAKGCYVGFDLAHAVGNVELYLHDWGVDFACWCSYKYLNAGAGGIAGAFIHEKHAHTIKPALVGWFGHELSTRFKMDNKLQLIPGVCGFRISNPPILLVCSLHASLEIFKQATMKALRKKSVLLTGYLEYLIKHNYGKDKAATKKPVVNIITPSHVEERGCQLTITFSVPNKDVFQELEKRGVVCDKRNPNGIRVAPVPLYNSFHDVYKFTNLLTSILDSAETKN

SEQ ID NO: 77225 - DNA, 1398 bp, Artificial Sequence
  derived and/or modified sequence
atggagcccagctctctcgagctccctgcagatacagtgcaacggatcgctgctgaactcaaatgccacccaactgatgagcgggtggccttacacctggatgaggaggacaagctccgacactttagggagtgcttctacattccgaagattcaggacttaccccctgtcgacctctctctggtcaacaaagatgaaaacgctatatactttttaggcaatagccttgggctccagcctaagatggtgaaaacatatctcgaggaggaactcgataaatgggccaaaatagccgcatacggccacgaggtggggaaacgcccatggattactggggatgaatccatcgtcggcctgatgaaagatatagtaggagccaacgaaaaagagatcgccttgatgaatgcgctgacagtgaatttgcatctcctgatgctgagcttcttcaaaccaaccccaaagcggtacaagatcttactggaggcaaaggcctttccgagcgatcattacgcaatcgagtcccagctgcagctgcacggcctgaacatcgaggagtccatgaggatgatcaaaccgagagaaggggaggagactctgcggatcgaggacatactcgaggtcatcgaaaaagagggtgatagcattgctgttattttgttcagtggggtgcatttctacaccgggcagcatttcaacatcccagccataaccaaagccggacaggctaaaggatgttacgtgggcttcgatctcgcccacgccgttggaaatgtggaactgtatcttcatgattggggtgtggactttgcctgctggtgctcttataaatacttgaatgctggggccggggggatcgcgggagcatttattcatgaaaaacacgcgcataccattaaacctgcattggtgggatggttcggacacgagttgtctacacggttcaaaatggacaacaagttgcagctaatcccgggcgtgtgtggtttccgcattagcaacccccctattctcctggtgtgctcgttgcacgctagcttggagatctttaaacaggctacaatgaaggcgctccgaaagaaaagcgtcctcctgacaggatacctggagtatcttatcaagcacaactacgggaaagataaagctgccaccaagaaacctgtggtaaatatcatcaccccttcgcatgtggaggaacgcggctgtcaattaaccattaccttctccgttcccaacaaggatgttttccaggagttggagaaacggggcgtcgtctgtgataagagaaatccaaacggaatcagggtggcccccgtccccctttacaacagtttccatgacgtgtataagttcacgaacctgctaacctctatcttggacagtgcagagacaaagaactag

SEQ ID NO: 77226 - DNA, 1398 bp, Artificial Sequence
  derived and/or modified sequence
atggaaccctcttccctggaacttcccgccgataccgtccaaagaatcgcagccgaacttaaatgccacccgactgatgaacgcgtggcgctgcacctggacgaagaagataaactccgccacttccgggagtgtttttacattcccaagattcaagaccttccccctgtggatttgtccttagtgaacaaagacgagaatgccatctattttctaggaaattccctagggcttcaaccaaagatggtgaagacctatctcgaggaagaactggataagtgggccaagattgcagcctacggccatgaagtcggaaaacgcccatggataactggagacgaaagtatcgtgggcctaatgaaagacatcgttggagctaacgaaaaagagattgccttgatgaatgctctgacagtgaacctgcatctactgatgctgagtttctttaagcccacacccaagaggtataaaattctgctggaagccaaggctttccctagtgatcactatgccattgagtcccaactgcaactgcatggtctgaacattgaagaatcaatgcggatgattaagccccgcgaaggagaggaaaccttacgcatagaggatattcttgaggtgattgagaaggagggggattctatcgccgtcatccttttctcaggcgttcatttctatactggccagcatttcaacattcctgctattactaaggctgggcaggccaagggctgctacgtcgggtttgatctcgcacatgccgtgggtaatgtggaactgtacctgcacgattggggcgtagactttgcttgctggtgttcttataaatatctcaatgcaggagcgggcggaatagcaggggctttcattcatgaaaagcacgctcacacaattaagcctgcccttgttgggtggttcggacacgagttgagcacccggtttaagatggataacaaattacagctgatcccaggcgtgtgcggttttcgcatctctaatccccccatactgctagtgtgtagcctgcatgcatcactggaaatttttaaacaggctactatgaaagcactccgtaaaaaatcagtgctgctgacaggctatctggaataccttatcaaacacaattatgggaaagacaaggcagctaccaagaagcctgtggtgaacatcattactcccagccatgtagaggagagggggtgccagctcaccataacgtttagcgtcccgaataaggacgtctttcaggaattagagaagcggggcgtcgtgtgcgacaaacggaaccccaacggcataagggtcgcaccagtgcccctgtacaactcattccatgacgtgtataaatttaccaatttgctcacaagcatactcgatagcgctgaaaccaagaactag

SEQ ID NO: 77227 - DNA, 1398 bp, Artificial Sequence
  derived and/or modified sequence
atggagcccagcagcctggagctgcctgctgacacagtgcagagaattgctgctgagctgaagtgccaccccacagatgagcgggtggccctgcacctggatgaggaggacaagctgcggcacttccgggagtgcttctacatccccaagatccaggacctgccccctgtggacctgagcctggtgaacaaggatgaaaatgccatctacttcctgggcaacagcctgggcctgcagcccaagatggtgaagacctacctggaggaggagctggacaagtgggccaagattgctgcctacggccacgaggtgggcaagaggccctggatcactggagatgagagcatcgtgggcctgatgaaggacatcgtgggcgccaatgagaaggagatcgccctgatgaatgccctgactgtgaacctgcacctgctgatgctgtccttcttcaagcccacccccaagcgctacaagatcctgctggaggccaaggccttccccagcgaccactacgccatcgagagccagctgcagctgcacggcctgaacatcgaggagagcatgaggatgatcaagccccgggagggggaggagaccctgagaattgaggacatcctggaggtgattgagaaggagggggacagcattgctgtgatcctcttctctggagtgcacttctacacaggccagcacttcaacatcccagccatcaccaaggccggccaggccaagggctgctacgtgggctttgacctggcccatgctgtgggcaatgtggagctgtacctgcatgactggggcgtggactttgcctgctggtgcagctacaagtacctgaatgctggggccggcggcattgctggggccttcatccacgagaagcacgcccacaccatcaagccagccctggtgggctggtttggccacgagctgagcacccgcttcaagatggacaacaagctgcagctgatccctggggtgtgtggcttccgcatcagcaacccccccatcctgctggtgtgcagcctgcacgccagcctggagatcttcaagcaggccaccatgaaggccctgaggaagaagtctgtgctgctgaccggctacctggagtacctgatcaagcacaactacggcaaggacaaggccgccaccaagaagcctgtggtgaacatcatcacccccagccacgtggaggagcggggctgccagctgaccatcaccttctctgtgcccaacaaggatgtgttccaggagctggagaagaggggcgtggtgtgtgacaagaggaaccccaacggcatccgggtggcccctgtgcccctgtacaacagcttccatgatgtgtacaagttcaccaacctgctgaccagcatcctggacagcgctgagaccaagaactag

SEQ ID NO: 77228 - DNA, 1398 bp, Artificial Sequence
  derived and/or modified sequence
atggagcccagcagcctggagctgcccgccgacaccgtgcagcggattgctgccgaactgaagtgccatccgaccgatgagcgcgtggcgcttcaccttgatgaagaggacaaattgagacatttccgagagtgtttttatattccaaagatccaggacttgcccccagtggacctctccctcgttaataaggacgagaatgccatctacttcctgggcaatagcttgggcttgcagccaaagatggtgaaaacctatctggaggaggaattggataaatgggcgaaaattgcggcatatggccacgaagttggcaaaagaccgtggatcacgggtgatgagtctattgtgggcttaatgaaagacatagtcggagcgaacgaaaaagaaatcgcactgatgaatgccctgaccgtgaatctccatttgcttatgctgagcttcttcaagcccacaccaaagaggtataagatcctgctggaggctaaggcctttccttcagaccactatgctattgagtcccagctgcagcttcacggactgaatattgaggagtctatgagaatgatcaagccccgggagggcgaggagactctgcggatcgaggacatcctggaggtgatcgagaaagagggagacagtattgcagtaatactgttctccggtgtgcatttttacactggccagcacttcaacatccccgcaattaccaaagctggccaagcaaaggggtgttacgttggattcgatctggcgcatgccgtgggtaacgtggaactgtacctccatgactggggtgtggatttcgcgtgctggtgctcctataagtacttaaacgctggggctggaggtatcgccggcgccttcattcacgaaaagcacgcacacactattaagcccgctctagtcggatggtttggtcatgaactgtcaacaaggtttaagatggacaataaactccagcttatacccggtgtctgtggctttcgaatatctaatcctccgatcctgctcgtctgtagtctgcacgcgtctctagaaattttcaaacaggccactatgaaagctctccggaagaagtccgttttgcttacaggctatctggagtaccttatcaaacacaactatggaaaagataaggcagcaacaaaaaaacccgtagtcaatatcattacgccaagccacgtggaagagagagggtgtcagctgaccataacgttttcggtgccaaataaagacgtgttccaagagctggaaaaacggggggtggtgtgcgacaaaagaaacccaaatggcattagggtggctccagtaccgctgtacaactccttccacgacgtctataaattcaccaacctgcttacctcaatactggatagcgccgagaccaaaaattag

SEQ ID NO: 77229 - DNA, 1398 bp, Artificial Sequence
  derived and/or modified sequence
atggagcccagcagcctggagctgcccgccgacaccgtgcagcggatagcggccgagctgaaatgtcaccccacagatgagagggttgccttgcatctggacgaagaggacaaacttcgccactttcgagaatgtttttatatcccaaaaatacaggatctgccacctgttgacctatcgctggtgaataaagatgagaatgccatttatttccttggcaactcgctggggctgcagcctaagatggtaaagacctatctcgaggaggagcttgataagtgggccaagatcgctgcttacggccatgaggtcgggaagcggccctggatcaccggtgatgagagcatcgtgggtctgatgaaggatatagtgggcgctaacgagaaggaaatcgccctgatgaatgcactgacagtgaacctgcacctactcatgctgagcttctttaaaccaacccccaaacgctacaagatcttgctggaagcgaaagcatttccaagcgatcactacgcaatcgagagtcagcttcagctccatggactcaatatcgaagagtcaatgagaatgataaagccgcgggagggggaggaaacactccgtatcgaagatattctagaagtgatcgagaaggaaggggacagtatagcggtcattctctttagtggcgtccatttttacacaggacaacacttcaatatcccggctatcacaaaagccggtcaggcaaagggctgttacgttggttttgatttagctcacgcggtgggcaatgttgagttatacctgcacgattggggggtagatttcgcttgttggtgctcctacaagtacctcaacgcaggtgctggtggaattgccggggcctttatccatgagaagcacgcccacacaattaaacctgccttagtggggtggttcgggcatgaactcagtacaagattcaagatggacaataaactccaactgattcctggggtctgtggcttccgtatttctaatccccctatccttcttgtatgttccctacacgcatctcttgagattttcaagcaggctaccatgaaagccctacggaagaagtcagtcctgctgactggctacctggagtatctgatcaagcacaattatggcaaagataaggcagcaaccaaaaaacccgttgtgaacattatcaccccatctcatgtcgaagaaaggggctgccaattgaccatcacattcagtgtccccaacaaggatgtgttccaggagttggagaaaagaggcgtggtgtgtgataaacggaacccaaatgggatccgggtggcccccgttcccctgtacaactccttccacgatgtatataagttcacgaacctcttgacctcaatcctggattccgccgaaacaaagaattag

SEQ ID NO: 77230 - DNA, 1576 bp, Artificial Sequence
  derived and/or modified sequence
acattttcaaggaattcttgagaggttcttggagagattctgggagccaaacactccattgggatcctagctggaatataaagaatggcttatcagtggagaccatcgacagttgagaaaagaagaagcccaaaaagtacaagaatgaaaatcgagagtttttagagaacaacttgtaatggagccttcatctcttgagctgccggctgacacagtgcagcgcattgcggctgaactcaaatgccacccaacggatgagagggtggctctccacctagatgaggaagataagctgaggcacttcagggagtgcttttatattcccaaaatacaggatctgcctccagttgatttatcattagtgaataaagatgaaaatgccatctatttcttgggaaattctcttggccttcaaccaaaaatggttaaaacatatcttgaagaagaactagataagtgggccaaaatagcagcctatggtcatgaagtggggaagcgtccttggattacaggagatgagagtattgtaggccttatgaaggacattgtaggagccaatgagaaagaaatagccctaatgaatgctttgactgtaaatttacatcttctaatgttatcattttttaagcctacgccaaaacgatataaaattcttctagaagccaaagccttcccttctgatcattatgctattgagtcacaactacaacttcacggacttaacattgaagaaagtatgcggatgataaagccaagagagggggaagaaaccttaagaatagaggatatccttgaagtaattgagaaggaaggagactcaattgcagtgatcctgttcagtggggtgcatttttacactggacagcactttaatattcctgccatcacaaaagctggacaagcgaagggttgttatgttggctttgatctagcacatgcagttggaaatgttgaactctacttacatgactggggagttgattttgcctgctggtgttcctacaagtatttaaatgcaggagcaggaggaattgctggtgccttcattcatgaaaagcatgcccatacgattaaacctgcattagtgggatggtttggccatgaactcagcaccagatttaagatggataacaaactgcagttaatccctggggtctgtggattccgaatttcaaatcctcccattttgttggtctgttccttgcatgctagtttagagatctttaagcaagcgacaatgaaggcattgcggaaaaaatctgttttgctaactggctatctggaatacctgatcaagcataactatggcaaagataaagcagcaaccaagaaaccagttgtgaacataattactccgtctcatgtagaggagcgggggtgccagctaacaataacattttctgttccaaacaaagatgttttccaagaactagaaaaaagaggagtggtttgtgacaagcggaatccaaatggcattcgagtggctccagttcctctctataattctttccatgatgtttataaatttaccaatctgctcacttctatacttgactctgcagaaacaaaaaattag

SEQ ID NO: 77231 - DNA, 1398 bp, Artificial Sequence
  derived and/or modified sequence
atggaaccctcatccctcgagttacctgcagatacggtccagcgcattgcagcagagctcaagtgccaccctacagatgagagggtagccctgcacctggatgaggaagataagctccggcatttccgcgaatgcttctatatacctaaaattcaggacctgcccccagtggacctctcactggtgaataaagacgagaacgccatctacttcctaggcaactcccttggcctgcaaccgaagatggtgaaaacctacctggaagaggaacttgataaatgggccaagatcgccgcatacggtcacgaggttggcaaaagaccttggattaccggcgatgagtcgattgtaggactgatgaaggatatagtcggggcaaatgagaaggagatagcgcttatgaacgctctgactgtcaatctgcacttactgatgctctccttttttaaacccactccgaagcgttataagatcctcctggaagcgaaagccttcccctctgaccactatgccatagagagtcagctgcagctccatggtctgaatattgaagaaagcatgcggatgatcaagcccagggagggagaggagactcttcggattgaggatatccttgaagtcattgaaaaagagggggatagcatagccgtaatactttttagcggtgttcacttctataccggtcagcacttcaatattccagctataacaaaagccggacaagccaaaggatgctatgtggggtttgatcttgcgcacgctgtgggcaatgtcgaactgtacctgcatgattggggtgtcgattttgcctgttggtgtagttataagtatttgaacgccggagccggtggaattgctggggctttcatccatgagaaacatgctcacacgattaagccagccctggttggctggttcggccatgaactgtccacccgttttaaaatggacaataagctccagctaattcccggtgtctgcggctttcgtatttctaatccgcctattttgctggtgtgtagcctgcacgcgagtctagagatctttaagcaggccactatgaaggcgctgaggaagaaaagcgtactgttaaccggctaccttgaatatctgattaaacataattatggcaaggacaaagctgcaactaagaagcccgttgttaatatcataacacctagtcacgtagaagagagaggctgccagctgacaatcactttctcagtgccaaataaggacgttttccaagagctggaaaaacggggtgtggtgtgcgataaacgcaaccccaatggcattcgcgtcgctcccgtccccctgtacaattccttccacgacgtttataaattcaccaatctcttaacttcgattctggactctgcagaaacgaagaactag

SEQ ID NO: 77232 - DNA, 1398 bp, Artificial Sequence
  derived and/or modified sequence
atggaaccttccagtctggagctcccagcagacaccgtgcagcgcatcgctgctgaattgaaatgtcaccccacagacgagagagtggcccttcatctggacgaggaggacaaactgagacacttccgcgagtgtttttatataccgaaaattcaggatttacctccagtggatctgagcctagttaataaggacgagaacgccatatactttttaggcaattccctaggcctgcaaccaaagatggttaagacttacctcgaagaagagcttgacaaatgggcaaaaatagcagcatatggtcacgaggtcggtaaacgcccttggattacaggtgacgaatcaatcgtgggactcatgaaagatattgtcggagccaatgagaaagaaatcgctctgatgaatgctctcacggtcaacttgcatttgctcatgctgtcattctttaagcccacacctaagagatataagattctgctggaggccaaggccttcccctccgaccattatgcaatcgaaagtcagcttcagttgcacggacttaacattgaagaatccatgcgcatgatcaaaccgagagagggagaagagactcttcgaattgaggatatcctagaagtaatagaaaaagagggcgactcaatcgctgtgatactgttctcgggcgttcatttttacacgggacagcacttcaacattcctgccataactaaagccggacaagcaaagggttgctatgttggtttcgacctggcccatgccgtgggaaatgtcgagctctatctgcatgattggggcgtcgactttgcgtgctggtgttcatacaagtatcttaacgcaggggctggagggattgcgggtgcatttatacacgagaaacatgctcataccatcaagcccgctctagtcggctggtttgggcatgaactttcaacccgatttaaaatggataataaattgcagctgattcccggtgtgtgcgggtttcgaatctcgaatccacctattctgttggtctgctccctccacgcatcactagagatttttaagcaagccactatgaaggcactgagaaagaaatctgtcttactaacaggatacctggaatatctcatcaagcacaactacggaaaggataaagctgctaccaagaaacctgtcgtgaatattatcacaccaagccatgtggaagagcgaggatgccaacttacaatcacgtttagtgttccgaacaaggatgtctttcaggaattagaaaagagaggggtggtgtgtgacaagaggaatcctaacggcatacgggtcgcacccgttccactttataatagctttcatgacgtctataagttcacaaacctcctgacatccatccttgatagtgctgaaacaaagaattag

SEQ ID NO: 77233 - DNA, 1395 bp, Artificial Sequence
  derived and/or modified sequence
atggaaccttcgtcccttgaactccccgctgacacggtgcagcggatagcagcagagctgaagtgtcaccccacggatgaaagagtggcgctccatcttgacgaggaagataagctccgtcatttccgggaatgtttctacattcctaagatccaagatctgcctccagtcgatctgtctcttgtgaacaaggatgaaaacgcgatctattttcttgggaattcgttgggccttcagcctaagatggtcaagacctacctggaggaggaactggataaatgggccaagattgccgcctacggtcatgaagtgggtaagaggccgtggattactggtgacgaatctattgttgggcttatgaaagacattgtgggtgccaacgaaaaggaaatagcgcttatgaatgcattgactgtgaatctgcatctgcttatgctttcatttttcaagcccactcccaaacgctacaaaatcctgctcgaggccaaggcgtttccgtccgatcactacgcaattgagtcccaactgcagctccatggactgaatatagaagagtcgatgcgcatgattaagccccgtgagggagaagaaactcttcgaattgaggacattcttgaggtcatagaaaaagaaggagattccatcgccgtgatcttgttttccggagtgcatttctacaccggacaacacttcaatattccagcgatcaccaaggcaggtcaggctaagggatgttacgtcggttttgacctggcgcatgcagtggggaatgtggaattgtatctgcacgattggggggtggatttcgcatgttggtgttcctacaaataccttaacgccggagcaggcggaatagcaggagcattcattcatgaaaagcatgcacacaccatcaagccagctcttgtgggatggtttggccatgaactctccaccaggtttaagatggataacaagctgcaactgatacctggcgtgtgtggttttcgaatctccaatcctcctattttgctggtgtgttcacttcatgcgtcgttggagattttcaagcaagccacgatgaaagcactcagaaagaagtctgtcctgctgaccgggtacttggagtacctgattaagcacaactacggaaaagataaagcagcgaccaaaaaaccagtggtgaacattatcactccatctcacgttgaagaaagaggatgccaattgactattacctttagcgtccctaacaaggacgtgttccaggaactggaaaagagaggggtggtctgtgacaaaagaaaccccaacggtatccgcgtggcaccagtaccactttacaacagctttcacgacgtctacaagtttactaatctgttgacttcgattctggatagcgcggaaaccaagaac

SEQ ID NO: 77234 - DNA, 1395 bp, Artificial Sequence
  derived and/or modified sequence
atggagccctcaagccttgaactcccagcggacaccgtgcagcgcatcgccgcagaattgaagtgccacccgactgacgaacgggtggccctccacttggatgaggaagacaaattgcgccacttcagggagtgcttttacatccccaagatccaggacctcccgcctgtggacctctccctggtgaacaaggacgagaacgctatctatttcctgggaaattccctcggactgcagccgaagatggtgaagacctacttggaagaagagctcgataagtgggcaaagattgcggcatacggccacgaagtgggaaagcgcccttggattaccggcgacgagtcgatcgtcggtctgatgaaggacatcgtgggcgctaacgaaaaagagatcgctttgatgaacgctctgactgtgaacttgcatttgcttatgctgtcgtttttcaagccaacgcctaagcgatataagatcctgctcgaggcgaaagcgtttccctcggaccactatgccatcgagtcccaactgcaacttcacggactgaacatcgaggagtccatgcggatgattaagccgcgggaaggggaagaaaccctgagaatcgaggatatcctggaggtgatcgaaaaggaaggagactcaatcgcagttattcttttttcgggagtccacttctacactggacagcacttcaatatccccgccatcaccaaggcgggccaagccaagggatgctacgtgggatttgacctcgcgcatgccgtagggaatgtcgaactgtacctccatgattggggcgtcgatttcgcctgctggtgtagctacaaatacctgaacgccggtgcaggaggaatcgccggtgccttcattcacgaaaagcatgctcatacgatcaagccagccctggtgggttggttcgggcacgaactctccactcggttcaagatggacaacaaactgcagttgatcccgggagtgtgtggattcagaatctcaaaccctccaatactgctcgtttgctcgctccacgccagccttgaaatcttcaagcaggctactatgaaggctctgagaaaaaagtcagtgctgctgactgggtacctggagtatttgattaagcataactacgggaaagataaggcggctaccaaaaaaccagtggtcaatatcatcaccccttcccacgtcgaagagcgcggatgtcagctgacgatcaccttctcggtgcccaacaaggatgtgtttcaagaactggaaaaacgcggagtggtatgcgataagaggaacccgaacggaatcagagtcgcgcctgtgccgctctacaacagtttccatgacgtctacaaattcaccaatctgctgacttccattctggatagcgcggagacgaaaaac

SEQ ID NO: 77235 - DNA, 1395 bp, Artificial Sequence
  derived and/or modified sequence
atggagccatcaagccttgagctcccagcagacaccgtgcagcggatcgccgcggaactcaaatgtcatccgactgacgaacgtgtggccttgcaccttgacgaggaagataaacttcgccatttccgggagtgtttttacatacctaagattcaagatctcccacccgtcgacctgtcactggttaacaaagatgagaacgcaatctactttcttggaaacagccttggcctccaacctaagatggtaaaaacttatctcgaggaagaacttgacaagtgggccaaaattgccgcttacgggcacgaagtgggtaagaggccatggattactggtgatgaatccattgtgggtcttatgaaggacatagtgggggccaatgagaaagaaattgcgctgatgaacgcacttacggtgaaccttcatcttctcatgcttagctttttcaagccaactccaaaaagatataagattctccttgaagcgaaggcctttccttccgatcattacgcgattgaatcgcaacttcagcttcatggactgaatatagaggagtcgatgcggatgattaagcctcgcgaaggagaggaaaccctgcgaattgaggacattctggaagtgattgagaaagaaggtgatagcatagccgtcattcttttttcgggtgtgcatttctacaccggccaacatttcaatataccagctattactaaagcaggacaagcaaaaggatgttacgtgggattcgatttggctcatgcagtcggtaatgtcgaactctatttgcatgattggggggttgattttgcgtgctggtgctcgtataagtaccttaatgcaggcgctggtggaatcgcaggggcattcattcacgagaagcacgcgcataccatcaaacctgcgctcgtcggatggtttgggcatgagctttccaccagattcaagatggataacaagctccagcttatccccggagtctgtggtttcagaatctcaaaccctcctatccttctggtgtgttcacttcatgcatcgctcgagatctttaaacaagcgaccatgaaggcacttcgtaaaaagtccgtgcttcttaccggctacctggaataccttatcaagcataactacggcaaggataaagctgcaactaagaagccagtggtcaacatcattactccttcacatgtcgaagaaagaggatgtcagctcaccatcactttctccgtgccaaacaaggacgtgtttcaggagctcgaaaagaggggagttgtgtgcgacaagaggaatcctaacggaattcgggttgcacctgtgcccttgtacaacagctttcatgatgtgtacaaattcaccaatctcctgacttccattctggatagcgcagaaacgaagaat

SEQ ID NO: 77236 - DNA, 1395 bp, Artificial Sequence
  derived and/or modified sequence
atggagccaagctcactggagctaccagccgacacagtacaacgaatcgctgctgaactgaaatgccaccccacagacgaaagggtggcactgcatctggatgaggaagataagctccgacactttcgtgaatgtttttatataccaaagatacaggatttacccccagttgacttgagtctggttaataaggacgaaaacgcaatctattttttaggcaacagcttagggctgcagccaaagatggtcaaaacctacctggaagaagagctggataaatgggccaagatcgcagcatatggacatgaggtggggaaaaggccttggattacaggcgatgaaagcatagttggtctgatgaaagacatagtgggcgccaatgagaaggagatcgccctgatgaatgctctgaccgtgaatctgcatctactgatgctatcttttttcaaacccacccctaagcgctataagatcctgctggaggcaaaagcattcccctctgatcattatgctatagagagtcagctccagttacatggcctcaacatagaggagtcaatgagaatgataaagccccgagagggcgaagagacactgcggatcgaggatatactggaggtgatcgaaaaggagggcgattccatcgcagtaatcttattcagcggagtgcatttttacaccggacagcactttaacatccccgccatcacaaaagctgggcaggccaagggatgctacgtgggctttgacttggcccacgccgtaggcaatgttgagctgtacctgcatgattggggcgtggatttcgcctgctggtgttcttataagtacctcaacgccggcgctggcgggatagccggcgctttcatccacgaaaaacatgcacataccataaagcccgcccttgtggggtggtttgggcacgaactgagtacccggttcaaaatggacaacaaactacagctgattccgggcgtttgtggttttagaataagcaacccacccatattactggtatgttctctccatgcctctctggaaatattcaagcaagccaccatgaaagctctgcgcaaaaaaagcgtgctattaacaggctaccttgagtatctgatcaaacacaattatgggaaagacaaggccgccaccaagaagccagtcgtgaacatcataactcctagccacgtggaagaaagggggtgccagctcacaatcactttttctgtgccaaataaagatgtgttccaagaactcgaaaaacggggcgttgtgtgtgacaaacggaatcccaatggcattcgtgttgctccagtccccctgtataacagttttcacgacgtgtacaaattcaccaacctactaacctcaatactggacagcgccgagacaaaaaac

SEQ ID NO: 77237 - DNA, 1395 bp, Artificial Sequence
  derived and/or modified sequence
atggaaccgagctccctggagttgcccgccgacacagtgcagcgaatcgctgcggagctgaagtgccatccgaccgatgagcgagtggcactccacctggatgaagaagacaaattgcgtcacttcagggagtgtttttacataccgaagatccaggatctcccgcctgtggatctgtctctggtaaataaggatgaaaatgccatctactttctgggtaacagcctgggattacaaccaaagatggtcaagacttacttggaggaggaactcgataagtgggctaagattgctgcttacggtcacgaggtgggcaagcgaccgtggatcacgggtgacgagagtatcgttggcctgatgaaggacatcgtgggcgccaacgagaaagagatcgccctgatgaatgccctgactgtgaatcttcacttgttgatgctgagcttctttaagccaacgcctaagcgctataagattctattagaagcgaaggcgtttccatcggatcactacgcaatcgagtcccagctacaactgcacggtctgaacatcgaagaatcaatgcgtatgattaagccccgagagggcgaggagacactccgaattgaggatatattggaggtaatagaaaaagaaggcgattccattgccgtgattctgttctcgggcgtgcacttttataccggccaacatttcaatatcccggcaataactaaggcaggacaagccaagggttgctacgtgggtttcgatctggcccatgcagttggaaacgtcgagctgtatctgcacgattggggtgtagatttcgcttgttggtgttcctataaatatttgaacgccggcgcaggtggcatcgccggagccttcattcatgagaagcacgcccacaccatcaagccggccttggtgggctggttcggtcatgagctgagcacccgcttcaagatggataataaactacagctaataccaggagtttgcggctttcgcatatcgaatccgcccattttgctggtgtgcagcctgcatgcttccttagagatctttaagcaggcaaccatgaaggctcttcgtaaaaagtctgtactcttaactggctacctcgaatatttgatcaagcacaattatggcaaggataaggcggcgaccaagaagccagttgtgaacatcatcacccccagtcacgttgaggagagaggatgccagttgacaattaccttcagcgtccccaacaaggacgttttccaggaactggaaaagcgcggagtggtgtgcgataagcgtaaccccaatggtattcgcgtggccccggtaccgctgtacaactcgtttcacgatgtgtataagttcacgaatctgctcacttcgatcctggactccgctgagacaaaaaac

SEQ ID NO: 77238 - DNA, 1395 bp, Artificial Sequence
  derived and/or modified sequence
atggaaccctcgagcctggaactgccagcagacaccgtccaacgcatcgctgctgaactgaagtgccatccgactgacgaacgcgtggcgctccacctcgatgaggaggataaactccggcacttccgcgagtgtttctacatcccgaagattcaggacctgccaccggtcgacctctctctggtgaataaagacgagaacgccatttacttcctgggaaactcgctgggcctccagccgaagatggtcaagacctacctggaggaagagttggacaagtgggctaaaatcgccgcgtacggacatgaggttggcaagcgcccgtggatcaccggagacgagtcaattgtcgggctgatgaaggatatcgtgggagctaatgaaaaagaaatcgccttgatgaacgctctgaccgtgaacctccatctgttgatgctgtcattctttaagccaactcctaagcgctacaagatcttgcttgaagcgaaggccttcccatcagaccattacgctatcgaaagccaactccagctccacggtcttaacatcgaagaatcgatgcggatgatcaaaccgagagaaggagaggaaacccttaggatcgaggacatcctcgaagtgatcgaaaaggaaggagactccatcgccgtgatcctgttttccggggtgcacttctacaccggccagcacttcaacatccctgccattactaaagcgggccaggcaaagggatgctatgtgggcttcgacctcgctcatgcagtcggaaatgtggagctgtacttgcatgattggggagtggactttgcttgctggtgttcgtacaaatacctgaacgccggggctggcgggatcgcaggagcctttatccacgaaaagcacgcgcacaccatcaagcctgcactggtggggtggttcggccacgaactgtccacgcgctttaagatggacaacaaactccaactcattccaggagtctgcggcttcaggatctccaaccctccaatcttgctggtgtgctccctccatgctagcctggaaatctttaagcaggcaactatgaaggctttgaggaagaaatccgtgctgttgacgggctatctggagtacctgatcaagcataactacggaaaagacaaggcggccactaaaaagccggtggtcaacatcatcactccgagccacgtcgaagagcggggttgccaattgacgatcacctttagcgtcccgaacaaggatgtctttcaggaattggaaaagcgcggagtcgtgtgtgacaagaggaatccgaatggaattagagtcgccccagtgccattgtacaactccttccatgatgtgtacaagtttactaatctgttgacttcaattctggactccgcggagacgaagaac

SEQ ID NO: 77239 - DNA, 1395 bp, Artificial Sequence
  derived and/or modified sequence
atggaaccttcgtcacttgagttgccggccgacactgtgcagcggatcgcagcggagctgaaatgccatccgaccgacgagcgtgtggctctgcacctggacgaagaagataagttgagacacttccgcgaatgcttctacatcccaaagatccaggacctgccgccggtagacctttcactcgtgaacaaggatgaaaatgctatctacttcctcggcaattcattgggcctgcagccaaagatggtcaagacttatctggaggaggaactcgacaagtgggccaaaatcgcagcgtacgggcacgaggttggaaaacgcccgtggatcactggagatgaatcgatcgtggggcttatgaaggatatcgtcggtgccaacgaaaaagaaattgccctcatgaatgctctcaccgtcaacctgcacctgctgatgctctccttcttcaagccgacgccaaagcggtataagattctgctcgaggccaaggcttttccctcggaccattacgcaatcgagagccaattgcagctccacggccttaacattgaggagagcatgagaatgatcaagccgagggaaggcgaagaaacgctgcggatcgaggacatcctggaagtcatcgagaaggaaggagactcgattgcggtgattctgttctccggagtgcatttctacactggacaacatttcaacatccccgcaatcactaaagcaggacaggccaagggatgctacgtgggcttcgacctggcacatgccgtcggtaacgtggaactctatctccatgactggggagtggattttgcgtgctggtgctcatacaagtacctgaacgcgggagccggagggatcgcgggtgcttttatccacgaaaaacacgcccacaccatcaagcctgctctggtgggctggttcggacacgaactcagcacccgcttcaagatggacaataagctgcagctcatcccgggcgtctgcggtttccggatctccaatcctccaatccttctcgtgtgcagccttcatgcgtccctggagatcttcaaacaagcgactatgaaggcactccggaagaagagcgtgctgctgactggatacctcgaatacctgatcaaacacaactacggaaaagacaaggccgctaccaagaagccagtggtgaacattatcaccccaagccacgtcgaggagcgcggctgccagctcactattacttttagcgtgccgaataaggacgtgtttcaggagctcgaaaagcgcggggtggtctgcgataagcggaatccgaatggaatccgagtcgctccagtgcctctgtacaactccttccacgacgtgtacaagttcactaacctgctgaccagcatcctggattccgcggaaactaagaac

SEQ ID NO: 77240 - DNA, 1395 bp, Artificial Sequence
  derived and/or modified sequence
atggaaccgtccagcctggagctccctgccgataccgtccagcggattgccgcggaacttaaatgccacccgactgacgagcgggtggcccttcacctcgatgaagaagataagctgcggcactttcgggagtgtttctacatcccgaaaattcaggacctgcccccggttgatctctcactggtgaacaaagacgagaatgccatctatttcttgggcaactccctgggactgcaacctaagatggtgaaaacctacctggaggaagagctggacaagtgggcgaagatcgccgcatacggtcatgaggtgggtaagcgcccgtggattaccggagacgaatcaattgtgggattgatgaaggacattgtgggagccaatgagaaagaaatcgcactcatgaacgcactgaccgtgaacctgcatttgctgatgttgtcgttcttcaagcccacgccaaaacggtacaagatcctcctggaagccaaggcctttccctcggatcactacgccattgaatcccaattgcagctccatggactgaatatcgaggagtctatgcggatgatcaagccacgcgaaggagaggagactctgcggattgaagatatcctcgaagtgatcgaaaaggaaggcgacagcatcgcggtcatcctgttctcaggcgtccatttctacaccgggcagcacttcaacattccagctatcactaaagcggggcaggccaaaggatgctacgtcgggtttgacctggcccacgccgtggggaatgtggagctgtacctccacgattggggagtggacttcgcgtgctggtgctcatacaagtacctgaatgcgggcgccggcggtatcgcgggcgccttcatccacgagaaacatgcccacaccatcaaaccggccctggttggttggttcggacacgaactcagcactagattcaagatggacaacaagctgcagttgatccctggagtctgcgggttccggatttcgaatccaccgatcctccttgtctgtagtctgcacgcctcgcttgaaatctttaagcaggccactatgaaggcgctgcgcaaaaagtcagtcctgctcactggatacttggaatacttgattaagcataactatggaaaggataaggcggcgaccaaaaagccggtcgtgaacatcattaccccatcgcatgtcgaggaacgggggtgtcaactgaccattaccttttccgtgccgaacaaggatgtgtttcaagaactcgagaaacgaggagtcgtttgcgacaagcgcaatccaaacgggatccgcgtagctccggtgcctctctacaactcgttccacgacgtgtacaagtttactaacctcctcaccagcattctggattctgccgaaaccaaaaac

SEQ ID NO: 77241 - DNA, 1395 bp, Artificial Sequence
  derived and/or modified sequence
atggagccctcaagcctcgaactgccggcagacaccgtgcaacgcatcgctgcggaactcaagtgtcatccaaccgacgagagagtggccctgcatctggacgaagaggacaagctgaggcacttccgcgaatgtttttacatccccaagatccaggacttgccgccggtggacctgagtctggtgaacaaggacgaaaacgccatctattttctcggaaactcgcttggcctgcagccgaaaatggtcaagacctacctcgaggaagagctcgacaagtgggcaaagatcgcggcatacgggcacgaagtcggaaaaaggccatggatcactggagacgaaagcattgtgggactgatgaaagatatcgtcggcgcgaatgagaaggaaatcgctctgatgaacgcgctgaccgtcaacctgcatctcctgatgctcagcttcttcaagccgaccccgaaacggtacaagatcctgctggaagccaaggcattcccatcagaccactacgcgattgaaagccaactgcaactgcacgggctgaatattgaggaatccatgcggatgatcaagccacgcgaaggagaagaaactctgcgcatcgaggatatactggaggtgatagaaaaggagggagatagcattgccgtgatcctgttctccggcgtccacttctacactggccagcacttcaacatcccggcaatcaccaaggctggccaagcaaagggatgctacgtcggattcgaccttgcacacgccgtgggtaacgttgagctctaccttcatgactggggagtggattttgcctgttggtgcagctacaaatacctgaacgctggtgccggaggaatcgccggtgcttttatccacgagaaacatgcccacaccatcaagccagccctcgtgggttggtttggccacgaactgtcaactcggtttaagatggataacaaactgcagctgatccctggagtgtgcggcttccggatctccaacccaccgattcttctggtgtgcagcctccatgccagcctcgaaatctttaagcaggcgactatgaaggctctccgcaagaaatctgtgctcctcactggatacctcgaatacctgatcaagcataactatggaaaggacaaggcggccactaagaagccggtggtgaacataatcactcctagccacgtggaggagcggggatgtcagctcacgatcaccttctcggtgccgaacaaggatgtctttcaggaactggaaaagcgaggagtcgtgtgcgacaagagaaacccgaatgggatcagggtggcgccggtgcctctgtacaactcattccacgacgtctacaagtttaccaacctgttgacctccatccttgactccgctgagactaagaac

SEQ ID NO: 77242 - DNA, 1395 bp, Artificial Sequence
  derived and/or modified sequence
atggagccgtcatccctggaacttccggccgacaccgtgcagcgcattgcggccgagcttaagtgtcacccaaccgatgagcgggtggcattgcatctggacgaggaggacaagctgagacactttagggagtgcttctatattccaaaaatccaggatctgccccctgtcgacctgagcctggtgaacaaagacgagaacgccatctacttccttggcaactccttaggattgcagcccaaaatggttaagacatatctagaagaagaactggataaatgggccaagattgccgcatatggacatgaagtggggaaaaggccttggatcaccggtgacgagagtatagtaggtttaatgaaggacatcgtcggtgctaatgaaaaggaaatagccctcatgaacgcattgaccgtgaacctacatctgctcatgctgtcctttttcaagccaacgccgaagcggtacaagattctcttagaggcgaaagctttcccttcagaccattacgcaattgaaagccaactacagttgcacggccttaatatagaggaatcgatgagaatgatcaaacctcgcgaaggcgaggaaactctgcggatagaagatatattagaggtcatagagaaggaaggagactccatcgcggtgatcttgtttagcggcgtccatttttatacaggtcagcattttaatattcccgctattacgaaagccggacaagctaagggttgttacgtggggttcgacttggcccacgcagtgggcaacgtcgagttgtacctgcatgactggggcgtggactttgcctgctggtgctcctacaagtatcttaacgccggggctggcggcatcgctggggcgttcatccacgagaaacacgctcatacgattaagcccgcattggtgggctggttcggccacgagctgtccacgaggttcaaaatggacaataaactccagctcattcccggcgtgtgtgggttccgaatttcaaacccgcctatactcttggtctgctcactacatgcgtcgttggagatcttcaagcaagctaccatgaaggctctgcgtaaaaaaagtgtgctcctgaccgggtacctggaatacctcatcaagcacaactacggcaaagataaggcagctacgaaaaagcccgtcgtaaatattatcaccccctcccacgtcgaagagcggggctgccagctcacaataacattctccgtcccaaacaaagatgtgttccaagaactcgagaagcgaggcgtcgtttgcgacaagaggaatccaaacgggatcagggttgcccctgtcccactatacaacagtttccacgatgtttacaagttcacgaacttactgaccagcattctcgactccgccgagactaaaaat

SEQ ID NO: 77243 - DNA, 1395 bp, Artificial Sequence
  derived and/or modified sequence
atggagccgagttccctggaacttcctgcggatactgttcaacgaatcgcagcggagctgaaatgccacccgacagatgaacgggtggccttgcacctggacgaagaggataaactccgccacttcagagagtgcttctatatccctaaaatccaggatttaccgcccgttgatttgtctctggttaataaagacgaaaatgctatttatttcctaggcaactcgttggggctccagcccaagatggtcaagacctatcttgaggaagagttggacaaatgggccaagatcgcggcctacggtcatgaggtgggcaaacggccatggattacaggggatgagtctatcgtgggtcttatgaaagacatcgttggagcgaacgagaaggaaatcgctcttatgaatgcactcaccgtgaacctccacctgctaatgctaagctttttcaaaccaacccccaaacggtataagattctcctggaggctaaggcatttcccagtgatcactacgcaatcgaaagccagctccagctgcacggtctcaacatagaggagtcaatgcgcatgattaagcctcgcgaaggggaagaaaccctgcgtatcgaggatatattggaagtgattgaaaaagagggggattccattgccgtgatcttgttctccggtgtccacttttatacaggccaacattttaacataccagcaatcaccaaagcagggcaggctaaaggatgctatgtgggatttgatctggcacacgccgtcgggaacgtcgagctgtacctgcacgactggggcgtggacttcgcctgctggtgctcgtataagtaccttaacgctggtgccggtggaattgccggggcctttattcacgagaaacacgctcacaccattaagcccgcactcgtggggtggttcggccacgaactcagtactcgtttcaaaatggataataaactccaattaatcccaggcgtatgtggctttcgcatatccaatccaccaatattgttagtgtgttccttgcacgccagcctggaaatcttcaaacaggccacgatgaaggccctgcggaaaaagtccgtcttgttaactgggtacctcgagtacctcatcaagcataactatggcaaggataaggctgctaccaagaaaccagtggttaacatcattacacctagccatgtcgaggaacggggatgtcagctgacaatcactttttctgtgcctaataaggacgtctttcaggagcttgagaaacgtggagtcgtgtgtgacaaacggaatccaaatggtataagagtggcccctgttcccctgtacaattctttccacgatgtttacaagtttacaaacttactgacttctatcctcgattcagctgagaccaagaat

SEQ ID NO: 77244 - DNA, 1395 bp, Artificial Sequence
  derived and/or modified sequence
atggaaccgtctagcttggagctgccggccgacacagtgcaaaggattgccgcagaactgaagtgccaccctacggatgaacgagttgcgctgcacctcgacgaggaagacaagcttcgccacttccgtgagtgcttttatatcccgaagattcaggatttacctccggtggatctttcgctggtgaacaaagacgagaatgccatttatttcctgggtaatagcctggggttgcagcctaagatggtcaagacgtacttggaagaggagttggataaatgggctaagattgctgcttatggtcacgaagtgggcaaacgaccctggatcaccggagatgaaagcatcgtgggtcttatgaaagacattgttggagcgaacgagaaagagattgcactgatgaacgccctgaccgtgaatctgcacctgctcatgttatcctttttcaaacctacccctaaacgatacaaaatactgctagaggctaaagctttcccgagcgaccattatgccatcgagtcgcaattacagctgcatggccttaacatcgaggagtccatgcgcatgattaaaccgcgagaaggtgaggaaaccctgcggatcgaggacatcctggaggtgatcgagaaagaaggggactccatagcagtcattctcttcagcggggttcacttttatacgggtcagcatttcaacattccagccatcacgaaagcaggccaagctaagggttgctatgtgggttttgatctggcacacgccgtgggcaacgttgagctgtaccttcatgattggggagtggactttgcatgctggtgctcctataaatatctgaatgccggagccgggggcatcgctggtgcctttatccatgaaaagcatgcacacaccatcaagcctgctttagttggctggtttgggcatgaactgtctacccggttcaaaatggataacaagctgcagctgatcccgggtgtgtgcggtttccggatttccaatccgcctattctgctggtttgctccctgcacgcaagcctcgagatcttcaagcaggcaaccatgaaggcgctgcgcaagaagagcgtcctcctgaccggttatctggagtatctgattaagcacaattacggtaaagataaggctgctaccaagaaaccggtcgttaacatcattactccttctcacgtggaagagcgaggttgccagctgacgattacctttagcgtaccgaacaaagacgtgtttcaggagctggagaaacgcggtgtggtttgtgacaagaggaacccaaacggaattcgcgtggcgcctgtgcctctgtataacagcttccacgatgtgtataaattcaccaatctgttgaccagcattctggattctgcggaaaccaaaaac

SEQ ID NO: 77245 - DNA, 1395 bp, Artificial Sequence
  derived and/or modified sequence
atggaaccctcatctcttgagcttccggccgacacggtgcagcggatcgccgcagaacttaagtgccaccctacagatgaaagagttgcccttcacttagatgaagaagataaactgagacacttccgagaatgtttttacataccgaaaatacaagacctaccacccgtagatctgagcctagtcaataaggatgagaacgctatctacttccttggcaattctctggggttgcagcccaagatggtgaaaacatatctcgaagaagagctcgataaatgggcgaagatcgcggcctacggacacgaggtgggcaagaggccatggataaccggagacgagtcaattgttggcctgatgaaggatattgtgggcgcgaatgagaaggaaattgccctaatgaatgcgctaacggttaatctgcacctactcatgctatcgttctttaagcccacacccaaacgttacaaaatccttctcgaggccaaagcatttccgtccgaccactatgccattgagagtcagctgcagctacacggtttaaacatcgaggagagcatgagaatgataaaaccaagagaaggagaggagaccctacggatcgaagacatactggaggtgatagaaaaggaaggcgattcaatcgctgttatcctgttctccggagtgcacttttacactgggcagcatttcaatatccctgcaattaccaaggcaggtcaggctaaaggatgctacgtgggttttgacctcgcccacgcagtcgggaatgtggagctctacctccacgattggggtgtcgattttgcttgctggtgtagctataaatacctcaatgcgggggccggaggcatcgcaggagctttcatccatgaaaagcacgcgcacaccattaagcccgcattagtggggtggtttggacatgaattgtcaaccagattcaagatggataacaagcttcagctcataccaggtgtgtgtggattccgaatctctaatcctccaatattactggtgtgctctctccatgccagtctcgaaatattcaagcaggccacaatgaaagcactgcggaagaaaagtgttcttttgacgggttatctcgaatatctgattaaacacaattacggcaaggataaagcagcgacaaaaaaacccgtggtaaacatcatcacccccagccacgtggaagaaagaggatgccagctcactataacattcagcgtacccaacaaggacgtgttccaggaacttgaaaaaagaggcgtggtatgtgataaaagaaatcccaacggaatcagggttgccccggtcccgctatataactcgtttcatgatgtgtacaagttcacaaatctcctgacgagcattctggattctgccgaaactaagaac

SEQ ID NO: 77246 - DNA, 1395 bp, Artificial Sequence
  derived and/or modified sequence
atggaaccgtcaagcttagaacttccggcagatacagtccaaagaatcgccgcggaacttaaatgtcatcctacagatgagcgagtggcgcttcacttggatgaagaagacaagcttcgacactttagagaatgcttttacatcccgaaaattcaagatcttccgccggtggatttgtcattagttaataaagatgaaaatgcgatctatttcctggggaattctctgggtctgcagccgaagatggttaagacatacttggaagaggaactcgataagtgggcgaaaattgcagcgtacgggcatgaagtgggcaagagaccatggatcacgggagacgagtccattgtaggattgatgaaagatattgtcggagcgaacgagaaagaaatcgcacttatgaacgcccttacagtaaatcttcacttactcatgttgagcttttttaaaccgactccgaaacgttataagatattgctcgaagcaaaggcatttccatcggatcattatgctatagagagccagttacagttgcatggactcaatatcgaagaaagtatgcgcatgataaagccccgcgagggagaggaaactttacgaatcgaagatattttagaagtgattgagaaagaaggcgactctattgcggtaatcttgttttctggcgtacatttttatacggggcagcatttcaacattcctgccataacaaaagcgggacaagcgaaagggtgctatgtgggatttgatctggcgcatgcagtcggcaacgtagaactgtacctgcatgactggggtgttgactttgcttgttggtgctcatacaaatatttaaacgctggagctggcggtattgcgggcgcttttatccacgagaaacatgctcatactattaaacccgcattggtaggctggtttgggcatgaactgagtacacgctttaagatggacaacaaactccagttgatcccaggcgtttgcggctttcgaattagtaatccccctatcttattggtctgttccttacatgcgtcattagaaatttttaaacaggcgactatgaaagcgctgcgcaaaaaatcggttctgcttacaggttaccttgagtacttaattaaacacaactatggcaaagataaagcagctacgaaaaaaccggttgtgaatatcatcaccccttcccacgtcgaggaacgaggatgtcagttaacgattacgtttagcgttccgaacaaagacgtgtttcaggagcttgaaaagaggggggtcgtctgtgataagagaaatccgaatggtattagagttgcaccagtgccactttataactcgttccatgatgtgtacaaattcacgaatctgctcacatcaattcttgattcagcagagacaaaaaat

SEQ ID NO: 77247 - DNA, 1395 bp, Artificial Sequence
  derived and/or modified sequence
atggaaccgtcgtcccttgagctgcctgcagacactgtgcaacggattgctgctgaactgaagtgtcatcctactgacgagcgcgtggcgcttcacctggacgaagaggataaacttcgtcacttcagagaatgtttttacattcctaaaatccaggatcttccccccgtcgaccttagcctggtgaacaaggacgaaaatgccatctacttcctcggcaattcgcttggacttcagcctaaaatggtcaagacctaccttgaggaggaactggataagtgggccaaaattgcggcttatggccacgaggtgggcaaacgcccgtggattaccggggatgaatctatcgtgggtttgatgaaggatatcgtgggagcaaacgaaaaggaaatagccttgatgaatgcactcactgtaaacctccatttgttgatgctgtcgttctttaagcccaccccaaaacgttacaaaatacttctggaagcaaaggcatttccaagcgaccattacgcaatcgagtctcaacttcaactgcatgggctgaatattgaggaatcgatgcgaatgataaagcctagggagggagaagaaacgcttcggatcgaggatatccttgaggtgatcgagaaggaaggggactcaatagctgtgattctcttttcgggcgtgcatttctacacgggacaacatttcaacatccctgcaattaccaaggcgggccaagcaaagggttgttacgtgggctttgacctcgcccatgccgttggaaacgtcgaactgtaccttcacgattggggtgtcgattttgcatgttggtgtagctataagtacctcaatgcaggtgccggaggcattgcaggggctttcatccacgaaaagcacgcccatactataaagccagcactggttggttggtttggacatgaactttctactcggttcaagatggataacaaacttcagctgattccaggagtctgcggttttagaatttccaaccccccaatcctgctcgtatgctcactgcatgcctcccttgagatattcaagcaagctaccatgaaggcattgagaaagaaatcagtactgctcacgggatacctggagtacctgattaagcacaactacggaaaagataaagcagcaaccaagaaaccagtggtgaacatcattaccccgtcgcatgtggaggaaagaggatgccagcttactattaccttttcagtccctaacaaggatgtgtttcaggaactcgaaaagcgtggcgtggtctgtgacaagcgcaaccccaatggcattcgcgtggcacctgtccctctgtacaattcctttcacgatgtgtataagtttaccaatcttcttacctcaattctggattcggcggagactaagaac

SEQ ID NO: 77248 - DNA, 1395 bp, Artificial Sequence
  derived and/or modified sequence
atggaaccgtcctcccttgagctgccagctgacaccgttcaaagaattgctgcagagctgaagtgccaccccacagatgaacgggtagcactgcacctggatgaagaagataagcttagacattttcgggaatgtttttacatacctaagatccaagacctgccgccagtcgacctgtcactggtcaataaggatgaaaatgcaatctattttctgggaaactccctcgggctccagcctaaaatggtaaaaacgtacctcgaggaagagctagataagtgggctaagattgctgcctacggccacgaggtgggcaaacggccatggattaccggggatgagagcatagtgggcctgatgaaggacattgtgggagcaaacgaaaaggagattgccctgatgaacgcgcttaccgtgaatttgcatttgttgatgttgtcatttttcaagcccactcccaagcgctataagatcctgctcgaggctaaggctttccctagcgaccactacgccatcgaatcgcagctgcaactccatgggctcaacatagaagaaagcatgcgaatgattaagcccagggagggcgaagagacgctaagaatcgaggatattcttgaagttattgaaaaggaaggcgacagcatcgctgtgatcctcttcagtggggtgcacttctacaccggccagcactttaatatccctgcgattacaaaggctgggcaagccaagggctgttatgtgggtttcgaccttgcccacgccgtcggcaatgtggagctgtacctccacgattggggagtcgatttcgcttgctggtgtagctataagtacctgaatgcgggcgctggcggcatcgccggcgctttcatacacgagaagcatgcccataccatcaagccagctctggtggggtggtttggccatgaattatccacacgcttcaagatggacaataagctgcagctcattcctggagtgtgtggattcaggatatccaatccccctatccttttggtgtgttccctccatgcatcgctcgagattttcaagcaggcaactatgaaggcactccggaaaaagtccgttctgctgacaggatatctcgagtaccttattaagcacaactatggcaaggacaaggccgccacaaaaaagccagtggtcaacattatcacccctagtcatgtcgaagagagagggtgccagctcactatcaccttttcagtgcccaacaaggatgtcttccaggagctggagaaacgcggcgtggtctgcgataagaggaaccctaacggaattcgcgtcgcaccggtgcctctgtacaattcatttcacgatgtctataaattcacgaatctgctgacatccattctcgacagcgctgaaacaaagaac

SEQ ID NO: 77249 - DNA, 1395 bp, Artificial Sequence
  derived and/or modified sequence
atggaaccttcttcattggaactccctgctgacactgtgcaaagaatagctgctgaactcaagtgtcatcctacggatgaacgcgtggcgctgcatctggatgaggaggacaagttgagacacttcagagaatgcttctacattccaaagattcaggacttgccaccagtggatctgtcgcttgtgaacaaagacgagaacgcaatttactttttggggaatagccttggcctgcaaccaaagatggtgaaaacgtaccttgaggaagagcttgacaagtgggccaaaatagccgcatacggccatgaagtcgggaaaagaccctggattactggtgatgagtcaattgtgggactcatgaaagatatagtgggtgcaaacgaaaaggaaattgcgctgatgaatgccttgaccgtcaatctccacctgctgatgctgtcgttctttaaaccgacccccaagagatacaaaatacttctggaagcgaaggcattccccagcgatcactacgcaattgagtcgcagctccaacttcatggtcttaacatagaggagtcgatgagaatgatcaaacccagggagggagaggaaaccctgcgaattgaagatattctggaggtcattgaaaaggagggtgactccatcgcagtgattttgttttccggggtccatttctacaccgggcagcatttcaatattccagcaattaccaaggcaggccaggcaaagggatgctatgtgggatttgatctcgcacatgcagtgggtaacgtggagttgtacttgcacgactggggcgtcgatttcgcatgctggtgttcctacaaatatcttaatgcaggggcaggtgggatcgccggagcgtttatccatgaaaagcatgcacacactattaagcctgcactggtgggatggtttggacatgaactgagcacccggtttaagatggacaataaactccagctgatccctggggtgtgtggttttagaatttcgaacccaccgatcttgctcgtgtgttcacttcacgcctccctggagattttcaagcaagccaccatgaaggccctccggaagaaatccgtgcttctcaccggataccttgagtacctcataaagcacaattatggaaaggataaggcagccacgaagaagccagtggtaaacatcataacgccgtcacacgtcgaagagcggggatgtcagcttacgatcactttttcggtgccgaacaaggatgtctttcaggagcttgaaaagcgaggtgtggtgtgcgataagcgtaatcctaacggaatccgggtggctcctgtgcctctgtacaattcgtttcatgatgtctacaagtttaccaaccttctcacttcaattttggactcagcagaaaccaagaac

SEQ ID NO: 77250 - DNA, 1395 bp, Artificial Sequence
  derived and/or modified sequence
atggagccatcctcgctggaacttcctgcggacaccgtgcagcgcatcgccgcggaacttaagtgtcatccgaccgacgagagagtggcgctccatcttgacgaagaagataagctccggcattttagggaatgcttctacattcctaagatccaggaccttccaccagtcgatttgtcgctggtgaataaggacgaaaacgcgatttactttcttggaaactcccttggactgcaaccaaagatggtcaaaacttacctcgaagaagaacttgacaagtgggcaaagatagcagcatacggacatgaggttggtaagaggccatggattaccggagatgagtctatcgtgggccttatgaaggatattgttggtgccaacgaaaaagaaatcgctctcatgaacgcacttactgtgaatctgcaccttctgatgttgtcgtttttcaaaccgacccctaagcggtacaagatcctgttggaagcaaaggcgtttccatctgatcattacgcaattgaatctcaactgcagctccacggtcttaacatcgaagaaagcatgagaatgatcaagccaagagagggcgaggaaacccttcggatagaagatattctggaagtgattgaaaaagagggtgattctatcgctgtcatactgttttcaggagtccatttctacactggacagcactttaacattccagcgatcaccaaagcaggacaagcaaagggttgctacgtgggatttgaccttgcccacgcagtcggtaacgtggagctgtacctgcatgactggggggtcgattttgcctgttggtgttcctataagtacctgaacgcaggggcaggcggcatagccggagcattcatacacgagaaacacgcccatactataaagccagcacttgtcggatggtttggacatgaactgagcactcgcttcaagatggataacaaactccagcttattcccggagtgtgcggcttccgcatttcaaatcctccaatccttttggtgtgtagcctccatgcatcgcttgaaatctttaagcaggcaactatgaaggcactgcgcaagaaatcggtgctgctcaccggctacctggagtacctgattaagcacaattacggcaaggataaggcagccactaaaaagcccgtggtgaacataatcactccttcgcatgtggaagaacggggctgtcaactgaccatcactttctcagtgcctaacaaagatgtgtttcaagagctggaaaagagaggggtggtgtgtgataagaggaaccctaatggcattcgtgtggcgcctgtgccgctgtacaattcattccatgatgtttacaagtttactaacttgctgacttcgatccttgattcggcagagacgaagaac

SEQ ID NO: 77251 - DNA, 1395 bp, Artificial Sequence
  derived and/or modified sequence
atggaaccgtcgagtttggaattgcctgcagacacagtgcaacgtatagcagctgagctcaagtgtcatccgacggatgagcgtgttgcactgcacctagatgaagaggacaagctcagacattttagagagtgtttctatattccaaagatccaagatttgccacccgtagatctttctctagtaaacaaggacgaaaacgcaatatatttcctcggaaattctcttggactgcaaccaaagatggttaaaacctaccttgaagaggagctcgataagtgggcaaagattgcagcgtatggccacgaagttggtaaacgtccttggattacaggagacgagtcaatagttggattgatgaaggatattgttggagctaacgaaaaagaaatcgctctaatgaatgccttaactgttaacctccatttgcttatgctttccttctttaagccaactccaaaaaggtacaagatccttctcgaggctaaggcttttccatcggatcactacgcgatcgaaagccagttacagctgcacggacttaatattgaggagtcaatgcggatgattaagccaagagaaggagaagaaactttacgtatcgaggatattcttgaagttattgagaaggagggcgactcaatcgctgtaatcctattctcaggtgtccacttctatacgggacaacactttaacataccagctataacaaaagctggacaagcgaaaggatgttacgtcggattcgatcttgcacatgctgtcggaaacgttgaactctacctccatgattggggagtagactttgcttgctggtgtagttataaatatttgaatgccggtgcaggaggcatagctggagcttttatacatgagaagcacgcgcacacaatcaaaccggcgttagtgggttggttcggtcatgagctgtcgaccagatttaagatggataacaagcttcagctgataccaggagtctgcggttttcggatcagtaacccaccgatactgctagtctgttcacttcatgcttctctggaaatcttcaagcaggccaccatgaaggcattacgaaaaaaatcagttcttttaaccggttacctcgaatatcttatcaaacataattacggtaaagacaaggcagcaactaagaagccagttgtgaacattatcactccatcacacgtagaagagcgcggatgtcaactaaccattacgttctcagttccgaacaaggacgtttttcaggaacttgaaaaaagaggagtagtatgtgataaacgaaaccccaatggaattcgagtagcccccgttccattatacaattcattccacgacgtctataaattcaccaatcttctaacttcaattctcgactcagccgagacaaaaaat

SEQ ID NO: 77252 - DNA, 1395 bp, Artificial Sequence
  derived and/or modified sequence
atggaaccatcgtccctggaactccccgccgatactgtgcaaaggatcgcggccgagcttaagtgccaccccacggacgagcgtgtcgctttgcatctggacgaagaggacaagctgcggcacttccgcgagtgcttctacatcccgaagatccaggatcttccaccagtggacctcagtctcgtgaataaggacgagaatgccatttactttctgggcaattcgttgggactgcagccgaagatggtcaagacctacctggaagaggagctggacaaatgggccaaaatcgccgcatacggacatgaagtgggaaaacgcccatggatcactggagacgaatccatcgtcggactgatgaaggacatcgtcggagccaacgaaaaggaaatagccctgatgaacgcgctgactgttaacctgcacttgctcatgctctcctttttcaaaccaacccctaagcggtacaaaatcctgctggaggccaaggcgttcccttctgatcattacgcaatcgagtcacaactccaactgcatggcctgaacatcgaagagtccatgcgcatgatcaagccaagagagggagaggaaacccttcgtatcgaggacatcttggaggtgatcgaaaaagagggagacagcatcgcagtgatcctgttctctggagtgcatttctacacgggacagcacttcaacatcccggccatcacgaaggccggccaggcaaagggatgttacgtgggattcgacctggcccatgcagtggggaatgtggagctttacctccacgattggggagtggacttcgcctgctggtgctcctacaagtacctgaatgcaggtgccggaggaatcgctggggcgttcatccatgaaaaacacgcccacaccatcaagcctgctctggtgggctggttcggccatgaactgtccacccgctttaagatggacaataagctccagctcatcccaggggtctgcggctttcggatctcaaatccgccaatccttctggtgtgcagcctccacgcgtccctggaaatcttcaagcaggccacgatgaaggcgctgcggaaaaagtcagtgctcctgaccggatacctcgagtatctcatcaagcataactacggaaaggacaaggcggctactaaaaagccggtcgtcaatatcatcaccccgtcccacgtggaagaaagagggtgccaactgaccataactttctcggttccgaacaaggatgtctttcaggaattggaaaagcgcggagtcgtctgcgacaaacgcaatccaaacggaattcgggtggccccggtgccgctgtataactcgtttcacgacgtctacaaattcaccaacctgctgacctcgattctcgattcggctgagactaaaaac

SEQ ID NO: 77253 - DNA, 1395 bp, Artificial Sequence
  derived and/or modified sequence
atggagcccagctctctggaactcccagctgataccgtgcagagaattgcagcagaactgaagtgccaccctactgacgagagggtggccctccatctggatgaggaggataaacttagacactttcgcgagtgcttctatatcccaaagatccaagatctgccacccgtagatctgagtttggttaacaaagacgaaaacgcaatctactttcttggcaattcacttggcctgcaacctaagatggtcaagacttacctcgaagaggaacttgacaaatgggcaaaaattgcagcgtacgggcacgaggtggggaaacgcccttggattaccggggatgaaagcatcgtgggattaatgaaagacatcgtaggcgcaaacgagaaggaaattgctcttatgaatgccctcactgttaaccttcacttactgatgctgtcattttttaaacctaccccgaagagatacaagattctgttggaggcaaaagcattccccagcgatcattacgccatcgaatcccagctccaactccacggattgaatatcgaagagagtatgaggatgatcaaaccacgcgagggggaagaaactctcagaatcgaagatattcttgaagtgatcgagaaagagggagatagtattgcagtcatcctcttctcaggcgtccatttctacaccggccagcattttaacatcccagccatcactaaagctggccaggcaaagggttgctacgtcggcttcgaccttgcccacgcggtcggcaatgtcgagctttatctgcacgattggggcgtcgattttgcttgttggtgcagctataagtacttgaatgcgggagcgggagggatagctggcgccttcattcacgagaaacacgctcacacgattaagcccgcattggtcggatggtttggccatgagctgagtacacgtttcaagatggacaacaaactgcagctgattccaggcgtctgtggcttcagaatcagcaaccccccaattctacttgtctgtagcctgcatgcttcattggagatctttaagcaggctacaatgaaggccctccgcaaaaaaagtgtcttgctcaccggctatctggagtacctgatcaagcacaattatggcaaagataaagctgcgacaaagaagcccgtggttaatattattacaccatcccatgtggaggagagaggatgtcagctgaccatcactttctccgtgccgaacaaggatgttttccaggagttggagaagaggggggttgtgtgtgacaagaggaaccctaacggcatcagagtcgcccctgtgcctctgtacaactcttttcacgacgtgtataaattcaccaacttactgacatcaatccttgattccgctgagaccaaaaac

SEQ ID NO: 77254 - DNA, 1395 bp, Artificial Sequence
  derived and/or modified sequence
atggagccaagcagccttgagctccctgcggacactgtgcagcgcatcgccgcggaactgaagtgccacccaaccgatgagcgggtggccctgcatttggatgaagaggataagttgcgccactttagggagtgtttttacatcccaaagatccaggacctgcccccggtggacctcagtctcgtgaacaaagatgaaaacgccatctactttcttgggaacagccttggactgcagccgaagatggtcaagacctaccttgaggaagagctcgacaaatgggccaaaatcgctgcctacggtcatgaagtcggcaagcgaccgtggataaccggagatgaatcgatcgtcggactgatgaaggacatcgtcggtgccaacgagaaggagatcgcgttgatgaacgcgctcactgtgaacctgcatcttctgatgttgagctttttcaagccgactccgaagagatacaaaatcctgttggaagctaaggcattcccaagcgaccattacgcaatcgagtcgcagctccaactgcatggccttaacatcgaggaatcaatgcggatgatcaaacctcgcgaaggtgaggagactctgcggatcgaagatattctggaagttattgagaaggaaggggattcgatagccgtgatcctgttttcaggcgtgcacttttacacgggccaacatttcaatattcccgcgattactaaagccggacaggcgaagggatgctacgtggggttcgacctggcccacgccgtcggcaatgtggagctgtacctgcatgactggggggtggattttgcctgctggtgctcgtataagtacctgaatgccggcgccgggggtatagcaggagcattcatccacgagaaacacgcacacactataaagccggccctggtcggatggttcggacatgagctgtcaacccgcttcaagatggacaataagctccaactgatccctggagtctgcggatttaggatcagcaatcccccgatccttctcgtctgtagcctgcacgcctccttggaaatcttcaagcaggcgaccatgaaagccctgcgcaagaagagcgttctgctgaccggctatctcgaatacctgatcaaacacaactacggaaaggataaggcggctacgaagaagccggtggtcaatatcatcaccccgagccacgtggaagagcgcggctgccagctcacgattactttctccgtgccaaacaaggacgtgttccaagaactcgaaaagcggggagtggtgtgcgacaaaagaaacccgaatgggattcgagtggcacccgtcccactgtacaactcgttccacgacgtgtacaagtttaccaatctgctgacgtcgatccttgactccgccgaaactaaaaac

SEQ ID NO: 77255 - DNA, 1395 bp, Artificial Sequence
  derived and/or modified sequence
atggaaccatcgtctcttgagctgccggccgacactgtccagcgcatcgcggccgaactcaagtgccatccaactgatgagcgcgtggccctgcacctggatgaggaagataaactcagacacttccgggagtgtttctacattcctaagattcaagacctccccccggtcgatctgtcgctggtgaataaagacgaaaacgcgatttacttcctcggaaacagcttgggactgcagcctaagatggtgaaaacctacctggaagaagagctggataaatgggccaaaatcgccgcctatggtcatgaggtgggtaagcggccgtggatcacgggagacgagtcaatcgttggactcatgaaggacattgtgggagcaaatgaaaaggagatcgctctgatgaacgccctgaccgtgaatctccatctcctgatgttgagctttttcaagccgactccgaagcggtacaagatcctcctggaagcaaaggcatttccgagcgaccactacgcgatcgaatcccagctgcagttgcatggacttaatatcgaggagtcaatgcgcatgatcaagccccgagaaggagaagagactctgaggatcgaggacatccttgaagtcatcgaaaaagagggtgactccatcgctgtgatcctgttctcgggagtccacttctacactggccaacattttaacatcccggcgatcaccaaggctgggcaggctaaggggtgctacgtcggattcgacctggcacacgccgtggggaatgttgaactttacctgcacgattggggagtggacttcgcctgctggtgctcgtacaagtacctgaatgccggggcgggcggaattgcaggagctttcatccacgaaaagcatgcgcatactatcaaaccagcactcgtgggctggttcggccacgaactgtccacccgctttaagatggataacaaactgcaactgattccgggtgtgtgtggatttcgcatctccaacccgccaatcctcctcgtgtgttcgctgcatgcgtcactggaaatcttcaaacaggccaccatgaaggccttgagaaaaaagtcggtgctcctcaccgggtacttggaatacctgatcaaacacaactacggcaaggacaaggctgcgactaagaagccggtcgtgaacatcattactccttcccacgtggaggagcggggatgccaactgaccatcacgttttccgtgccaaacaaggatgtgttccaggagctggaaaagcggggcgtcgtgtgcgataaaagaaaccctaatggcataagggtggcacccgtcccactctacaacagcttccacgacgtctataagttcaccaacctgcttaccagcatcctcgactcagccgaaaccaagaac

SEQ ID NO: 77256 - DNA, 1395 bp, Artificial Sequence
  derived and/or modified sequence
atggaacccagttctctggaactgcctgcagatacagtgcagaggatcgctgccgagctgaagtgccatcccaccgacgagagagttgcactccatttggacgaggaggataaactgaggcactttcgggaatgtttctacattcccaagattcaggacctcccccccgtcgacctcagtctggtcaacaaagacgagaacgccatttacttcttggggaacagtctgggactgcagccaaagatggtgaagacatacttggaagaagagttggataagtgggctaaaatcgcagcttacgggcatgaggtcggtaagcgcccctggatcaccggcgacgaaagcatcgtggggctgatgaaggatatagtgggcgcaaatgaaaaggaaattgccctgatgaacgcactgacggtcaatctccatctgctgatgctgtccttttttaaaccaactcccaagcggtataagatcctcctggaggccaaggcctttccaagcgaccactacgccatagaatctcagctccagttgcatggcctcaatatcgaggagtcaatgagaatgattaagcctcgagaaggggaagaaaccttgcgcatagaggacatcctggaggtgattgagaaagagggggattccattgccgtcatcctgttttccggcgtccacttttacacgggacaacattttaacatcccagccatcacaaaggccggacaggcaaaggggtgttacgttggctttgacctggcccatgcggtcggtaacgtagagctgtacctgcatgactggggagtggactttgcctgttggtgctcttacaaatatctcaacgccggagcaggagggatcgcaggagcttttatccatgagaagcacgctcacacaatcaagccggccctcgtaggatggtttgggcatgagctctccacccggtttaaaatggataataagcttcaactcatccctggggtgtgtggctttcgcattagtaaccctcctatcctgttggtatgcagcctccatgcctctctggagatcttcaagcaggcaacgatgaaggccctcagaaaaaaaagcgttttgctcaccgggtatctggagtacttgatcaaacataactatggcaaggacaaggccgccaccaagaaacctgtcgtaaacataataactccctctcatgtagaagaaagaggatgtcaattgaccatcacattttcagtacccaacaaagacgtcttccaggagctggagaagcggggggtcgtgtgcgataaacggaaccccaacggtatcagagtcgcccccgttccactgtacaattcttttcacgacgtttacaagttcacaaatctgctgacaagtatccttgactccgcagaaacaaagaac

SEQ ID NO: 77257 - DNA, 1395 bp, Artificial Sequence
  derived and/or modified sequence
atggagccatcatcactggagctgcccgcagataccgtccagcgcatcgccgcagaactcaaatgtcaccctacagacgagcgagtcgccctgcatctcgatgaagaggataagctaaggcatttccgtgaatgcttctatataccaaaaatccaggatctcccacctgtcgacctgtctctcgttaacaaagatgaaaatgcgatttattttctcggtaatagtcttgggcttcagcctaagatggttaaaacatatcttgaggaagaactggacaagtgggccaagatcgctgcgtatggtcacgaggttggcaaaagaccatggataacgggtgacgagtcaattgttggtttgatgaaggacattgtgggagcgaacgaaaaggagattgccctgatgaacgctttgacggtgaatctgcatctgctgatgcttagcttctttaagcccactcctaaaaggtataagatcctcctggaagcaaaggctttcccctccgaccactatgcaatcgagtctcagctgcaactgcatggacttaatatcgaggagtctatgagaatgattaaaccacgagagggcgaggaaaccctccggattgaagacatcttggaggtcatcgagaaagaaggtgactccatcgccgtgatcctgttcagcggcgtacatttctacacgggacagcacttcaacatccctgcgatcacaaaagccgggcaagcaaaaggatgctatgtgggctttgatctagcccacgcagtcggcaatgtcgagctgtatctccatgattggggagtggatttcgcctgctggtgcagctacaaatacctcaatgctggcgccggcgggattgcgggggcattcattcatgaaaagcacgcccacaccatcaaaccggctctcgtaggctggttcgggcatgagcttagcaccaggtttaagatggacaacaagctacagctgatccctggggtgtgtggctttcgaatctccaatccacctatcctactggtgtgtagcctgcacgccagtctcgagatctttaagcaggccacgatgaaagctttgcggaaaaagtcagtgctcctaactgggtatttagaatacctcatcaagcataattacggcaaggataaggctgctaccaaaaaacccgttgtgaacataattacaccttcacatgtcgaggagagagggtgtcagcttacaattactttttcagttccaaataaggatgtattccaagaactggaaaagaggggagtggtttgcgacaaacggaatcccaacggaattcgcgtagcaccagtgcctctctataactccttccatgacgtgtataaatttactaacctcctgactagtatcttggattccgcggagacaaaaaac

SEQ ID NO: 77258 - DNA, 1395 bp, Artificial Sequence
  derived and/or modified sequence
atggagccgagctccctggagctccctgcagataccgtgcagagaatcgctgcagaacttaagtgtcaccctactgatgagcgcgtggcgctccatctcgacgaagaggacaagctgcggcactttagggaatgtttctacatcccgaagatccaggacctcccgccagtggacttgtcgctcgtcaacaaagatgaaaacgcgatttacttcctggggaacagcctgggactccagccgaagatggtcaagacttatctggaggaggagctcgacaagtgggcgaagatcgccgcatacggtcatgaggtgggaaagcgcccctggatcacgggagacgaatccatcgtgggactgatgaaagatatcgtcggcgcaaacgaaaaggaaatcgcgctgatgaacgcgctcacggtcaatctccacttgctcatgctgtcttttttcaaaccgaccccgaagaggtacaaaatcctgctggaagccaaagcgttcccaagcgaccattatgcaatcgaatcccagctgcagttgcatggactgaatatcgaagagtcgatgcggatgattaaaccaagagaaggagaagaaactctcaggattgaggacatcctcgaggtaatcgagaaagagggcgacagcattgccgtcatcctgttctccggagtgcacttctacaccggccagcactttaacataccggccattaccaaggccgggcaggcaaaaggctgctacgtcgggttcgacctggctcacgccgtcggaaacgtggagctgtatctgcacgactggggggtggatttcgcgtgttggtgctcgtacaaatacctgaacgcaggagcgggaggaatcgcgggcgcgttcattcatgagaaacacgcccataccattaagcccgctctcgtgggatggtttggccacgaactgtccacccgctttaagatggacaacaagctccagctgattccaggtgtgtgcggatttcgcatctccaacccacccatcctgcttgtctgctccctccacgcctcattggaaatctttaagcaagcaaccatgaaagccctgcgaaagaaaagcgtgcttctgaccgggtacctcgaatacctgatcaagcacaattacggaaaggacaaggccgcgaccaagaagcccgtcgtcaacatcatcactccgagccacgtggaggagcgcggatgccagctgactatcaccttttccgtgccgaataaggacgtgtttcaggagctggaaaagcggggcgtggtgtgcgataagcgcaatccgaacggaattcgggtggcgcctgtgccattgtacaattccttccacgatgtctataagttcaccaacttgctcactagcatcctggattccgcagagactaaaaac

SEQ ID NO: 77259 - DNA, 1395 bp, Artificial Sequence
  derived and/or modified sequence
atggagccgtccagcttggagctcccggctgataccgtccagcgtatcgctgcagagctgaagtgccaccccacagatgaaagggtggcactgcaccttgatgaagaagacaagctcagacacttccgtgaatgtttctacatcccaaaaattcaggacctgccaccagtggatctgtctcttgtcaacaaagatgaaaatgcgatctatttcctgggcaacagtctggggttgcagcctaagatggtcaaaacctatcttgaggaagaacttgacaagtgggctaaaatcgccgcatatgggcatgaggtcggcaaacgcccgtggattaccggggatgagagcatcgtggggctgatgaaagatatagtcggtgctaatgaaaaggaaatagcacttatgaacgccttgacagttaatctccatctccttatgctcagcttttttaagcccacccccaaaaggtataaaatcttgctggaggcaaaagccttcccatcagatcactatgcaatagaatcccagttacagctgcatggcctgaatatcgaggaatccatgagaatgatcaagccacgcgagggagaggagaccctgaggattgaggacattctcgaggtgatagagaaggagggcgattctatcgccgtaatcctgttctcaggggttcacttctacaccggacaacactttaatattcccgcgatcacgaaagcgggacaggccaaaggatgctacgtcggcttcgatctggcgcacgccgtcggcaatgtggagctttatttgcacgattggggagtggatttcgcatgctggtgctcatataagtacctgaacgccggcgcgggcggcatcgcaggagccttcattcacgaaaagcacgcccacaccataaaacccgctttggtgggctggttcggacacgaattgagcaccaggtttaagatggacaataagcttcagcttatccccggggtctgtgggtttagaatcagtaatccacccatcctcctcgtgtgctcactccatgccagtctggagattttcaagcaggccacgatgaaggcactgcgcaagaagtccgtcctgttgaccggttatctggaatacctaataaagcacaactacggcaaagataaagctgccaccaagaagcccgtggtgaatatcattactccatctcacgtcgaagaacgcggctgtcagctcacgataacattttctgtccctaataaggatgtgttccaggaattggaaaagcgaggcgtcgtttgtgacaaacggaaccccaatgggatacgggtggctcccgttccattgtacaacagcttccacgacgtgtataagtttacgaatctgctcacttcaatcctggacagcgctgaaaccaagaac

SEQ ID NO: 77260 - DNA, 1395 bp, Artificial Sequence
  derived and/or modified sequence
atggaacctagtagcctggagctcccagccgacaccgttcagcgtatagctgccgaattgaaatgtcatcctacagatgagcgtgttgctctgcaccttgacgaagaggataagctgaggcattttcgggaatgtttctatattcctaagatccaggacctcccaccagtggacctctcactggtgaacaaagatgagaacgcgatctacttcttggggaactcgcttggcctccagcccaagatggtgaagacataccttgaggaggaacttgacaaatgggctaagatagccgcttacgggcacgaagtcgggaaacggccatggattactggtgacgaaagtatcgtggggctcatgaaagacattgtcggcgctaatgaaaaggagatcgcgttgatgaatgccctcacggtgaacctgcatctgttaatgctgagtttttttaaaccaacccctaagagatacaagatactgcttgaggccaaagctttcccctcagatcactatgcaatcgaatcgcaactgcaactccacggcctgaatatcgaggagagcatgcgcatgattaagcctcgggagggcgaagagaccctgagaattgaagacattctcgaggtgatcgagaaagagggtgactccatagccgtgatattattcagtggcgtacacttctacaccggacagcacttcaacatcccggctattaccaaagcaggacaggcaaagggctgctatgtggggtttgacctagcgcatgcagtgggcaatgtggagctctacttgcacgactggggcgtggacttcgcctgttggtgctcgtataagtatctcaacgccggggccgggggtattgcgggggcttttatacatgagaagcacgcccacaccatcaagcctgccctggtgggttggtttggccatgagttatctacccgatttaagatggataacaaactgcagctgattccgggtgtctgcggcttcaggatttcaaacccaccaatactattggtgtgttctttacacgctagcctggagatttttaagcaagcaactatgaaagcccttagaaaaaagtctgtcttgctgacgggatacttggagtatctaatcaaacacaattacggaaaagacaaggcggcaaccaagaaaccggtagtcaatatcatcactccatcccacgtagaagaaaggggttgtcagctaacgatcaccttttctgttccaaataaagatgttttccaggagctagagaaaaggggggttgtctgtgataaaaggaatcctaacggcatccgcgtcgccccagtgcccttatataacagtttccacgatgtttataagttcactaatctactgacttcaatcttggattctgccgaaacgaaaaat

SEQ ID NO: 77261 - DNA, 1395 bp, Artificial Sequence
  derived and/or modified sequence
atggagcccagttctttagaactaccagctgatactgtgcagagaatcgccgcagagttaaaatgtcatccaacggacgaacgggtggctctccacttggacgaggaagacaagctcaggcattttcgggaatgtttctatattcctaagatccaagatttgccaccggtcgacttatcgctcgttaacaaggatgaaaacgccatctacttcctcgggaacagtttaggcctgcagccaaagatggtgaagacttacttagaagaggaactggataaatgggctaagatagcagcctatggtcatgaagtagggaagagaccatggatcaccggggacgagtccatcgtgggcctcatgaaagacattgttggggccaacgagaaggaaatagctctcatgaatgcacttacggtaaacttgcatcttctgatgctctccttctttaagcccactcctaagagatacaagattctgctggaggccaaagccttcccaagcgaccattacgccattgagtcacagcttcagttgcatggactgaatattgaagagtccatgaggatgataaaacctcgagaaggcgaggagactctacggatcgaggatattctggaggtcatcgaaaaagagggagactcaatagccgtgattttgtttagcggggtacacttctacacgggccagcatttcaatatacccgccatcaccaaagccggtcaagccaaggggtgctacgtggggtttgatttggctcacgccgtggggaatgtggaactatacctacacgactggggagtggatttcgcttgttggtgtagttacaagtatctcaacgcaggagctggaggtattgcaggagcctttatccacgagaaacatgctcataccataaaacccgcgctcgtgggctggttcggtcacgagctgtccaccagatttaagatggacaataagctgcagctcatcccgggcgtgtgtgggtttaggatctctaatccacccattcttcttgtttgctccctgcacgcttcacttgagattttcaagcaggcgacaatgaaagcacttcgaaagaagtcagtattactgaccggctatctggaataccttattaagcataattatggaaaggataaggccgcgaccaagaaacccgtggtgaacatcattactccctcccacgtagaggaacggggttgtcagcttacaatcacatttagtgtcccaaataaagatgtattccaagagctcgaaaaacgaggggttgtatgcgacaaaaggaatcctaatggcatccgcgtggctcccgtacctttatataatagttttcacgatgtctacaaattcaccaacctcctgacctcgatcctggactccgcagagactaagaac

SEQ ID NO: 77262 - DNA, 1395 bp, Artificial Sequence
  derived and/or modified sequence
atggagcccagctccctagagctgccagctgacaccgtccagcggatcgccgcagagctgaagtgccacccgactgacgaacgcgtggccttgcacctggacgaagaagataagctcagacatttccgggagtgcttctacattcccaagatccaggacctccccccagttgatctatccctggtgaacaaggatgaaaatgctatatacttcttaggaaattctctggggctgcagcccaaaatggtcaaaacttatctggaggaggaattggataaatgggcaaagatcgccgcctacggacatgaagtagggaagcgaccttggattaccggggatgaaagtatcgtgggtttgatgaaggacatcgtgggagccaacgaaaaagaaatcgccctaatgaacgctctgactgtaaacctacatctgctgatgctttcattttttaagccaacaccaaagcgctacaagatcctgctggaagctaaagccttcccatcagatcattacgccatagagagtcagctgcaactccatggcctcaatattgaagagtcaatgaggatgatcaagccacgagagggggaagagactttgaggatcgaggatattctagaggtgattgaaaaagaaggcgacagtatcgcagtaatactgttttcgggcgtccatttctacacgggccaacatttcaacattcctgccatcacaaaggcgggacaagcaaaggggtgctacgtcggcttcgatctcgcgcatgccgtggggaacgtggaactgtatctccacgactggggggtggacttcgcctgctggtgttcttataagtacttgaatgctggggccgggggaatagctggggcattcattcacgaaaagcacgcacataccatcaagccagcgctggtcgggtggttcggtcatgagcttagcacaagattcaagatggacaacaaactacagctgattccgggagtgtgtgggttccggatctctaatccacctatactgctggtttgttcactgcacgcgagccttgagattttcaaacaggccactatgaaagccctgcgcaaaaaatccgtgctactcacgggctatctcgagtatttgattaagcataactacggaaaagataaggcggccacgaagaaaccagtggttaacattattacgccttcgcacgttgaggagcgaggatgccagttgacaataacattttctgttcctaacaaagacgtgtttcaggaactggaaaaacgcggggtcgtgtgtgacaagcggaatcccaacggtatccgtgttgcaccagtcccactctacaactcctttcacgatgtgtacaagttcaccaatctcctcacatcgatcttagatagcgccgagaccaagaat

SEQ ID NO: 77263 - DNA, 1395 bp, Artificial Sequence
  derived and/or modified sequence
atggaacccagcagccttgagctcccagctgatacagttcagcgtattgccgcggagttgaagtgccacccgacggatgaacgggtcgcccttcacctggatgaagaggacaaattaaggcattttcgagagtgcttttacatacccaagatccaggaccttccacccgtcgatctaagcctggttaacaaggatgaaaatgcaatctattttttaggtaattctcttgggcttcagcctaaaatggtaaaaacatatctagaggaagagctggacaaatgggctaaaatagcagcatacggccacgaagtcggcaaaaggccttggattacgggtgacgaatctattgttggcctcatgaaagacatcgtgggggccaacgaaaaggaaatcgctctaatgaacgcgctgacagtgaatctgcatcttttgatgttgtctttcttcaagcctactccaaaacggtataaaatcctgttagaagcaaaggcttttccgtcagatcattacgcgattgagagccagctgcaactgcacggccttaacattgaagagtcgatgaggatgataaaaccacgcgagggcgaagagacccttaggattgaggacatcctggaagtcatcgaaaaagaaggggatagtattgctgtcatcctgttctcaggggtacacttctacacaggccagcactttaatatcccggcaataaccaaagctgggcaggccaaaggctgttatgtaggttttgacctggctcacgccgtagggaacgtggaactctacctgcacgactggggggtcgattttgcttgttggtgtagctacaaatacctcaatgccggcgccggcggcattgctggggccttcatccatgagaagcatgcacataccataaaacctgcgcttgtaggctggttcgggcatgaattgtcaacacgcttcaagatggacaataagctccagttgatccctggcgtctgcggtttcagaatctctaatccgcccatcctgcttgtatgcagtctgcacgcctctctggaaatctttaagcaggctactatgaaagcacttaggaaaaaatcagttctcctaacaggatacctggaatatctcattaaacacaactacggaaaggataaggctgctactaagaaacctgtggtcaatattatcacgccatctcacgtggaagagcgggggtgtcagctgacaattactttcagcgtgcccaataaagatgtgtttcaggagctggagaagcgaggggtggtttgtgacaagaggaaccccaatggaatacgagtcgctccagtgccactctataactctttccacgatgtatacaaatttaccaatctgctgacaagtattttagattcggccgagacaaaaaat

SEQ ID NO: 77264 - DNA, 1395 bp, Artificial Sequence
  derived and/or modified sequence
atggaaccatcatctctcgaacttcctgccgatacggtgcagcggatcgcagccgaactcaaatgtcatcccacagacgaacgggttgccctacatctagatgaagaggataagctccggcactttagggaatgcttttatatccccaaaattcaggatctacctcccgtggatctttctctggtgaataaggatgaaaatgcaatctactttctaggaaactccttaggacttcagccaaagatggtgaaaacgtacctcgaagaagaactagataaatgggctaagatcgccgcatatgggcatgaggtggggaaaaggccatggattactggagatgaatctatcgtcggactcatgaaagatatagtcggggccaatgaaaaggaaatagctcttatgaatgccctgactgttaatctgcatctgctgatgcttagtttctttaagcctactccaaaacggtataaaatactcctcgaagccaaagccttcccatcagatcattatgccatcgaatctcagttacagcttcacgggctcaatatcgaagaatccatgaggatgatcaaacctagggaaggagaagagacacttagaatagaagatatcctagaggttatagaaaaagaaggggattctatagccgtgattctcttttccggagtgcatttctatacagggcagcatttcaatatacccgccattactaaagccggacaggctaaagggtgttatgtaggatttgacttagcccacgccgtgggaaacgttgaactctatttacatgattggggagtggattttgcttgttggtgttcctacaaatatctaaacgcgggggctggaggaatcgcaggggcatttatccacgaaaaacatgcccacacaataaaacctgctttagttgggtggtttgggcatgaactttctacacgctttaaaatggataataaacttcagctgatccctggagtgtgcgggttccgaatctcaaatcctcctatcttactggtttgttcactccacgcttcacttgaaatattcaagcaggccactatgaaggcactccgaaaaaaatccgtacttcttacaggatacctggaatacctgataaaacataattatgggaaagataaagcagccactaaaaaacctgtcgtgaatatcatcacacccagtcatgtcgaggaaagaggatgccagcttactataacatttagtgtacccaataaggatgtttttcaggaactagaaaaacggggggtggtgtgtgataaacggaatccaaatgggataagggtggctcctgtgcctctctataattctttccatgatgtatacaagttcactaacctactgacatctattttagattcagccgaaacaaagaat

SEQ ID NO: 77265 - DNA, 1395 bp, Artificial Sequence
  derived and/or modified sequence
atggagccgtcgagcttggagctcccggccgacactgtgcagcggatagccgctgaactgaagtgccatcccaccgacgaacgggtggccttgcatcttgatgaagaggacaaactgaggcacttccgtgagtgcttctacatcccgaagattcaggatctcccgccagtggacttgagccttgtgaacaaggacgaaaatgccatttacttcctgggaaactcactggggctgcagccgaagatggtcaagacctacctggaggaggaactcgacaagtgggcaaagatcgctgcttacggccatgaggtgggaaagcgcccctggatcactggtgatgagtcgatcgtgggactgatgaaagatatcgtgggtgccaatgaaaaagagatcgctctgatgaacgcgctgactgtgaacctgcatttgctgatgttgtctttcttcaagccaactccgaaaaggtacaagatcctgctggaggcaaaggcgtttccgtccgaccactacgccattgaatcacaactccagctgcatggactgaacatcgaagaatcaatgagaatgatcaagcctagagagggagaggaaaccctgcgaatcgaggacatcctggaagtgatcgagaaagaaggagactcaatcgccgtgattctgttctctggggtgcacttttacaccggacagcacttcaatatcccagcaatcaccaaagccggacaggcgaaagggtgctatgtgggattcgacctggcccacgccgttggaaatgtggaactgtacctccacgactggggagtggactttgcgtgttggtgcagctacaagtaccttaacgcgggcgccggcggtatcgcaggtgcatttatccatgaaaagcatgcgcacactatcaagcccgcactggtcggctggttcggtcatgaactctccactaggtttaagatggataacaaactccagcttattccaggagtgtgtggatttcggatctccaacccgccaatcttgctcgtgtgctccctgcacgcctccctcgaaatctttaaacaagccactatgaaagccctccggaagaagtccgtgctgctgactggctacctggagtacctgatcaaacacaattacggaaaggacaaggcggccaccaagaaacctgttgtgaacatcatcactccgagtcacgtggaggaaagaggctgccaactgaccatcactttctcagtgccgaacaaagacgtgtttcaggagttggagaagcgaggcgtggtgtgtgataagcgcaatccgaatgggatccgcgtggcgccagtcccactgtacaatagctttcacgacgtgtacaagtttacgaacctgctgacctcgatcctggattcggctgagactaagaac

SEQ ID NO: 77266 - DNA, 1395 bp, Artificial Sequence
  derived and/or modified sequence
atggagcctagcagcctggaattacccgccgataccgttcaaagaatcgcagccgagctcaagtgccaccccactgatgagagagtggccctgcacctagacgaagaggataaactgcggcactttagggagtgtttctatattcccaaaattcaggacctgccaccagtggatctgtcactggtgaacaaggatgaaaatgcaatctattttttggggaattccttagggttgcaaccgaagatggtcaagacatatctcgaggaggaacttgacaaatgggccaagatagcagcatatggccatgaggtgggaaaaagaccttggatcactggcgatgagtcaatcgtaggcctcatgaaggacatcgtgggcgccaatgaaaaggaaatcgcactcatgaacgctctgaccgtgaacttgcatctcctcatgctaagcttctttaagcctaccccaaaaagatataaaatacttctcgaagctaaggcttttccttccgatcactacgcgattgagagccagctgcagctacatgggctgaatatagaagaatccatgcgcatgatcaaaccacgagagggggaagaaacgctcaggatagaagacatcctggaggtgatagaaaaggaaggtgattcgatcgctgtgattttgttcagtggagttcatttttatactggtcagcatttcaatattccagccatcacaaaagccgggcaggccaaagggtgttatgtgggtttcgatctggcccatgcagttggtaacgtggagctgtatcttcacgattggggagtggacttcgcctgctggtgctcttataagtatctcaacgcgggcgctggcgggatcgctggtgcgttcatccacgagaaacatgctcacaccatcaagccggcattggtgggatggtttggccacgaactctctacacgcttcaaaatggacaataaactgcaacttattcccggggtgtgcggtttccgcatttcaaatccacctattctcctcgtgtgcagcttgcacgcctcccttgagattttcaagcaggcgaccatgaaggccttacgcaagaaaagcgtgctcttgaccggttacctggaatacttgataaagcataactatggtaaagacaaggctgccaccaaaaagcctgtggtcaacataatcacgccttctcacgtggaggagcgcggttgtcagctgaccatcacttttagcgtaccaaataaggacgtctttcaggagttggagaagcgtggcgtagtatgtgataaacgaaaccctaacgggatccgagtggcccccgtacccttgtacaattcattccacgatgtgtacaagttcacgaatctgctcactagcattctggattccgcggaaacaaagaat

SEQ ID NO: 77267 - DNA, 1395 bp, Artificial Sequence
  derived and/or modified sequence
atggagcctagtagcctggagcttccagctgacaccgtgcaacgcattgctgctgaattgaagtgtcatcctacggatgaaagagtggctctgcatctcgatgaggaagacaagctccgccattttcgggaatgcttttacatccccaagatccaagaccttccacctgtggacctgtcacttgtaaacaaggatgaaaacgctatttattttctcggaaacagcttggggcttcaacccaaaatggtgaagacatacctggaggaggagctggataaatgggcgaaaattgctgcatacgggcatgaagttggtaaaaggccttggatcactggagatgagtccatagtgggactcatgaaggacattgttggagcaaatgagaaggagattgcactgatgaacgcgctcactgttaacctgcatttgctgatgctctcattctttaaacctacccctaagcggtacaaaattcttctcgaggcaaaagctttccctagcgaccattatgctatcgagtcacagctccagctccacggcttgaacattgaggagagcatgagaatgatcaagccaagagaaggagaagaaacactgcgtattgaagacattctagaggtcatcgaaaaggaaggagactctatcgccgtcatcttattcagcggcgtccatttctacactggtcaacactttaacatcccagctattacaaaggctggccaggcaaagggctgctacgtcggctttgacttggcccacgcagtcggaaacgtggaactttacctccacgattggggagtggatttcgcttgttggtgctcgtacaagtacttaaatgcgggcgccggcgggatcgcaggggcatttatccatgagaaacacgctcacaccattaaaccagctctggtgggttggtttggacacgaactgtccactagatttaaaatggataataagctgcagctgattcctggcgtttgcggatttaggattagtaacccacctattcttttggtgtgcagccttcatgcctcacttgagatcttcaaacaagcaacaatgaaagctctgagaaagaaatctgtactgttaacaggttatttagaatatctcatcaagcataactacggtaaggacaaagctgctactaaaaaaccggtggttaacatcatcacccccagccacgtcgaagaaaggggctgccagctgactattacattttcggtgcctaacaaagatgtgttccaagagctggagaagaggggagtcgtctgtgataagcggaatccgaacggcatcagagtggcccctgtacctttgtataactctttccatgatgtgtacaagtttacaaatctcttgaccagtatcctggattccgcagagaccaagaac

SEQ ID NO: 77268 - DNA, 1395 bp, Artificial Sequence
  derived and/or modified sequence
atggaaccgtccagcctggagcttccggccgacactgtgcaacgcatcgcagcggaactcaagtgccacccaactgacgaacgcgttgcactccacctggatgaagaagataagctgcggcatttcagggagtgcttctatatcccaaagatccaggacctcccaccggtggatcttagccttgtgaataaggatgaaaacgccatctactttcttggaaattcactgggactccagccgaaaatggtgaaaacttatctcgaagaggaattggataagtgggctaaaatcgccgcttacgggcacgaggtgggcaagcgcccctggattacgggagacgagtctatcgtcgggctcatgaaggacatcgtcggtgccaacgaaaaggagatcgctctcatgaacgccctcactgtgaacctccacctgctgatgctgtcatttttcaagccgaccccgaagcgctacaaaatcctgttggaagctaaggcctttccgtccgaccactacgccatcgaatcgcagctgcaactccacggcctcaacatcgaggagtcgatgaggatgatcaagccgagagagggcgaggaaactcttcgcatcgaggacatactggaggttatcgagaaagagggggactcaatcgcggtgatcctgttctctggagtgcacttctacacgggccagcacttcaatatcccagcgattaccaaggccggccaagcgaaaggttgctacgtgggatttgaccttgcccacgccgtgggcaatgtggaactttacctccatgactggggagtggatttcgcgtgctggtgttcgtacaaatacctgaatgctggagctggaggaatcgcaggggcgttcatccacgaaaagcatgcccacaccatcaagccggccctcgtcgggtggtttggacacgagctttcgaccagattcaaaatggacaacaaactgcagctcattcctggagtctgcggatttaggatttcgaatccgccgatcctgctggtctgctcccttcacgcatcacttgagatcttcaagcaggcgactatgaaggcgctccgcaagaaatccgtgctgctgaccggctacctggaatacttgatcaagcataactacggaaaagacaaggccgccactaaaaagcctgtggtcaacatcatcaccccatcgcatgtcgaggaacggggatgccagctgactatcacgttttccgtgccgaataaggacgtctttcaagagctggaaaagcggggtgtggtgtgcgacaagcggaatccgaacggcattcgagtggcccccgttcctctgtacaactcatttcacgatgtgtacaagttcaccaacctgctcacctcgatcctggattcagcagagacgaagaac

SEQ ID NO: 77269 - DNA, 1395 bp, Artificial Sequence
  derived and/or modified sequence
atggagccttcttctctcgaactgccagccgacacagtacagagaattgcagctgagttaaaatgccacccaacagatgaacgggtcgccctgcatctcgacgaagaagataaacttcggcacttccgcgaatgcttttatatcccaaaaatccaggatctgccccctgtggacctgtctctagtcaacaaagatgaaaatgctatatactttctagggaattctctgggactccagcccaaaatggtcaaaacttacctggaagaagagctcgataaatgggccaagatcgccgcatatggacacgaagtcggaaaaagaccttggatcactggagatgaaagtatcgtcggactcatgaaagacatagttggagccaacgaaaaagaaattgctctaatgaatgcgttaactgtgaacctacatcttctcatgctttcattctttaaaccaacacctaaacgttataaaatactgcttgaagccaaagctttcccttcagaccactacgcaatagaatctcagttacagcttcatggactgaacatagaggaatccatgcggatgataaaacccagggaaggagaagaaactctgagaatagaagacatattagaagtcatagaaaaggagggggattctatagccgtaatactcttttcaggggtgcatttctatactgggcagcacttcaacattccagcaattacaaaagctgggcaggccaaaggatgctatgtgggatttgacctcgcacatgctgtgggaaatgtagaattatacctacacgattggggagtggacttcgcctgttggtgctcctataaatatctgaacgccggggccggaggaatagccggggctttcattcatgaaaaacatgctcacactatcaaacccgctctggtgggatggttcgggcatgaactcagtacacggtttaaaatggataataagttacaactgattcctggagtgtgtggattccggatctcaaacccccctatactgcttgtgtgttcactccatgcgtctttagaaattttcaaacaggctacaatgaaagcattaagaaagaaatcagtgcttctaactggatatctggaatatctcatcaaacataactacggaaaagataaagccgcaacaaaaaaaccagtagtaaatataattacaccttctcatgtcgaggaaagggggtgccagctcactattacattcagtgtccctaataaagatgtgtttcaggaactcgaaaaacggggagttgtgtgcgataaaaggaatccaaatggaatccgagtggcccctgtaccgttatataattcttttcatgatgtgtataaattcacaaatctcctaacaagtatccttgattccgctgaaactaaaaac

SEQ ID NO: 77270 - DNA, 1395 bp, Artificial Sequence
  derived and/or modified sequence
atggagccgagttccctggagctgccggcagacaccgtccagagaattgccgcggagctgaagtgccatcctacggatgaacgagtggcactgcatttggacgaagaggataagctcagacatttccgtgagtgtttctatatacccaagatccaggacctgccccctgttgacttgagtttggtcaataaggatgagaatgccatctattttttgggtaattcgctgggactgcagcccaagatggtgaagacgtatttagaggaggagctagataagtgggcgaagattgctgcctacggccatgaggtcggaaaaagaccttggatcacgggcgatgaatctatcgttggattgatgaaagatatagtaggagcaaatgaaaaagagatagccttaatgaacgctctgactgtcaatctgcaccttctgatgttgtcgttttttaagccaactcccaaacgctataaaatcctgcttgaggccaaggcctttccatctgatcactatgcaattgagtcgcagttacagctgcatgggctcaacatagaagagtcgatgaggatgattaaaccccgtgagggtgaggagaccctcaggatcgaggacatcctggaagttattgagaaagaaggcgatagcatcgctgtcatcctgttttcaggcgtgcatttttatacaggccagcactttaacattcctgctattactaaagccggacaggcgaaagggtgttatgtgggtttcgatctcgcacatgctgtggggaacgttgagctatacctccacgactggggagtggactttgcctgctggtgctcatacaagtaccttaatgcaggcgcaggcggaatagccggcgcctttattcacgagaagcacgcacacactattaaaccggcccttgtcggatggttcgggcatgaactatctacaaggttcaagatggataataaactgcagctgatacctggcgtctgcggcttccggatctccaacccacctatcctgctggtatgctcgttgcatgcatccctcgaaatcttcaaacaggctactatgaaagctctccggaaaaaatctgtgcttttaacgggatatctcgagtatctgatcaaacacaactacggaaaggacaaggctgcgacaaaaaagcccgtggtgaacattatcaccccttcccacgtcgaagagcgaggctgtcagcttaccatcacattctccgtgcctaataaagatgtgttccaggagttagaaaagcgcggcgtcgtttgcgacaagcgaaacccaaacgggataagggttgcgcccgtacccctttacaattcctttcatgatgtgtacaaattcaccaaccttttgacttcaatcttagatagcgctgagacaaagaac

SEQ ID NO: 77271 - DNA, 1395 bp, Artificial Sequence
  derived and/or modified sequence
atggaaccctcgtcccttgagctcccagcggataccgtgcaacgcattgcagcagagctgaagtgccatccgaccgatgagcgtgtggcgcttcaccttgatgaggaagataagctccgccactttagggagtgtttttacattccaaagatacaggaccttcctccggtggatctctcgcttgtgaacaaagatgagaatgcaatctactttctgggtaactcgctggggctgcaaccgaagatggttaaaacctacctggaggaagaactggacaagtgggccaagatcgcagcttatggtcatgaagtcggcaagcggccatggattaccggagatgaatcaattgtcggcctcatgaaggatatcgtcggagctaatgaaaaggagattgcacttatgaacgcccttactgtgaacctgcatctgttgatgcttagcttctttaagcctactcctaaacgttacaagatcctgctggaagctaaggcatttccttccgatcattacgcgatcgaatcccaacttcaactgcacggtctgaatatcgaagaatccatgagaatgatcaagccccgggaaggcgaggagacgctgagaattgaggacatactggaagtcattgaaaaggaaggcgattctattgcagtgatcctgttctccggagtgcacttctatactggacagcactttaacattccagcaatcactaaggcgggccaggcaaagggttgttacgtcggattcgacctcgcacatgcagtgggaaacgtggaattgtatctccatgactggggagtcgattttgcctgttggtgctcgtataagtaccttaacgcgggagccggggggatagcaggtgcattcattcatgaaaagcatgcccacactattaagccggcactggtgggatggtttggacacgagctgtcaactagatttaagatggacaacaaattgcaactcatccccggagtctgcggatttcgcatttccaatcctcctatcctgcttgtgtgctcactgcacgcgtcacttgaaatctttaagcaggcaaccatgaaagcccttcggaagaagtccgtgctgttgactggctacctggaatacctgattaagcacaattacggtaaggacaaggctgcaactaagaagccagtcgtgaatatcataactccttctcacgtggaagaacgcggttgtcaacttactattaccttttcggtgcctaataaggacgtgtttcaagaacttgaaaagcgtggtgtcgtgtgtgataaaagaaaccctaatggcattcgtgtggcccctgtgcctttgtacaacagctttcacgatgtctacaagtttactaatcttttgacctcaattctcgattccgcagaaaccaagaac

SEQ ID NO: 77272 - DNA, 1395 bp, Artificial Sequence
  derived and/or modified sequence
atggagccttcatctctcgagcttccggctgacaccgttcagaggatcgctgccgaactcaaatgtcaccctacagatgagcgggtcgcgcttcacctagatgaagaggacaagttgcggcacttccgagagtgtttttatattccgaaaatccaagacctccctcctgtagacttaagccttgtcaacaaggatgaaaacgccatttactttttagggaactctctggggctgcagccaaaaatggtgaaaacatatctcgaagaggaactggacaaatgggcgaagattgcggcgtacggacacgaagtggggaagagaccatggataacaggggatgagtccattgtaggcctgatgaaagatatcgtcggggcaaacgagaaggagatcgctctcatgaatgcactgacagttaacctacacttacttatgctgtccttttttaaaccaactcccaagcggtacaaaatactcctcgaggctaaggccttccccagcgaccactacgctattgagtctcagctccagctacacgggctgaatatagaggagtccatgcgaatgattaagccccgcgagggggaggaaaccctgagaatcgaggacattctggaggttatcgaaaaggagggtgatagtatcgcggtaattctattctcaggggtgcatttttatactggccaacactttaacattccggcaatcaccaaagctgggcaggctaaaggatgctatgttgggtttgatctcgctcacgccgtgggcaacgtggagctgtacctgcacgactggggcgtagacttcgcttgttggtgtagctacaaatatttaaacgcaggcgctggcggaatcgcgggcgccttcattcatgagaagcatgcccacactatcaaacccgcactggtcggatggttcggacatgagctgagcactcgatttaagatggacaacaaactccagctgattcccggagtgtgtggttttcggatctccaatcctccaatcctgctggtttgctctctgcatgccagcctcgagattttcaaacaggctactatgaaggcactgaggaagaaaagtgtgctcctgactggatacctggagtatctgataaaacataattatggaaaagataaggcagctacaaagaaacccgtcgtcaatatcattactccgtcgcatgttgaggagagagggtgtcagctgacgattacgttttctgtgccaaataaggacgtctttcaggaacttgaaaagcgtggcgtcgtgtgcgataagcggaatccaaacgggatcagagtggcgccagtccctctgtacaatagcttccacgacgtgtacaaatttacaaatttacttacaagcatcttggattcagcagaaaccaagaac

SEQ ID NO: 77273 - DNA, 1395 bp, Artificial Sequence
  derived and/or modified sequence
atggagccaagctcgctggaactgcccgccgacaccgtccaaagaatcgcagctgaattaaaatgccaccccaccgacgaacgcgttgccttgcacctggatgaggaggataagctgcgccactttagagaatgcttttatatacctaaaattcaggatctcccccccgtggatctgagcctcgtcaacaaggacgagaacgctatttacttccttggcaactctttggggctgcagccaaagatggtgaagacctaccttgaggaagagctcgataaatgggcgaaaattgctgcatatggccatgaggtgggtaaacgcccatggattaccggcgacgagtccatcgtggggctgatgaaggatatcgtcggagctaacgaaaaggaaattgcccttatgaatgcacttaccgtgaatttgcacctgctaatgttgtcttttttcaagccaacgccaaagaggtataagatattattggaggcaaaagcttttccgtctgatcattatgcgatagagagccagttgcagctgcacggcctgaacattgaggagagtatgcgcatgatcaagccaagagagggagaagagaccctgcgcatcgaggatatcctggaggtcatcgaaaaagagggggactcaatcgccgtgatcctcttttccggcgtacacttctacactggccagcattttaatattcctgctatcactaaagccggccaggctaaaggctgttacgtgggctttgaccttgcacacgctgtgggaaacgtagagctgtatcttcacgactggggcgtagactttgcgtgttggtgttcatacaaatacctgaacgcaggggccggtggcatcgcaggcgcctttatacacgaaaagcatgcccacacgatcaagcctgccctggtgggctggttcggccacgagctgagtaccagattcaagatggataacaaacttcagttgatacctggagtgtgcggctttaggattagcaacccaccgattttgttggtctgctccctgcacgccagtttagagatctttaaacaggcaaccatgaaagcactgagaaagaagtccgtcctacttacaggctatctggagtacctgattaaacacaactacggcaaggataaagctgccactaaaaagccagtggtgaacatcatcaccccctcgcacgtggaagagcgcggctgccagctgaccatcacattctctgtccccaataaggatgtcttccaggaacttgaaaagcgcggcgtcgtgtgtgacaagaggaatcctaatggtatccgagttgctcctgtgcctctctacaactctttccacgatgtctacaagttcacgaacctccttacttccatcctggactctgccgagacaaaaaat

SEQ ID NO: 77274 - DNA, 1395 bp, Artificial Sequence
  derived and/or modified sequence
atggaaccttcatcccttgaactacctgctgacactgtccagaggatcgcggcagaattgaagtgtcatccaactgacgaaagggttgccttgcatttggatgaggaagacaaacttcgacacttcagggaatgcttctacatcccaaaaattcaggatcttcctcctgtggatttgagtcttgtaaataaggacgaaaatgccatttattttcttggaaattctctaggactgcagcctaaaatggttaaaacttatctcgaagaggagcttgataagtgggctaagatcgcagcatacggtcacgaagttgggaaaaggccttggatcacaggagatgaaagtatagtaggcttaatgaaggatatagttggggcaaatgagaaggagattgctttgatgaacgcccttacagttaacttgcaccttctaatgttgagcttcttcaagcctactccaaagcgttataaaatactccttgaagccaaagcattcccatctgatcattacgccattgaatctcaactccagctccatggacttaacattgaagagtctatgcggatgataaaaccacgggaaggcgaagaaaccctgagaatagaagatatcctcgaggtgatagaaaaggaaggggattcaatcgcagttatactttttagtggagttcacttctacaccggccaacacttcaacatcccggcgattaccaaggcgggccaagctaaaggatgctatgtaggtttcgatttggctcacgccgttgggaatgttgagttgtaccttcacgactggggtgtagacttcgcttgctggtgctcttacaagtatctaaatgccggtgccggtggcatagctggagccttcattcatgaaaaacatgctcacaccatcaagccagctctcgtcggctggttcgggcatgaattaagcacaaggtttaaaatggacaataagctgcagttgattcctggcgtttgtggctttaggatatcaaacccccctattttgctcgtttgttcattacacgcatctcttgagattttcaaacaagctacaatgaaggcattacgtaaaaaatctgtacttctcaccggttaccttgaatatcttattaagcataactacggaaaggacaaagcagccactaaaaaacctgtggttaatattattacacctagtcatgtcgaggagcgtggctgtcaattgacgataacgttctccgtgccaaataaagacgttttccaggagctcgagaagaggggtgttgtttgtgataagagaaatcctaatggaatcagggtagctccagtccccctttataacagctttcacgacgtgtacaaattcactaaccttctcacatccattttggattcagctgagactaagaat

SEQ ID NO: 77275 - DNA, 1395 bp, Artificial Sequence
  derived and/or modified sequence
atggagccgtcttcgctggagctgccggcagatacggtgcagcgcatcgccgcggagctgaagtgccatccaactgatgagcgggtggctttgcacctggatgaggaagacaagctcagacatttcagagaatgcttctatattccaaagattcaggatctaccgccagtggacttgtctctggttaataaggatgagaacgctatctactttctcggcaactctctgggcctccaaccaaagatggttaagacctacttagaggaggaactcgataagtgggcaaagattgccgcatacggccacgaggtggggaagagaccctggatcaccggcgacgaaagcatagtgggactgatgaaggatatcgtgggagcaaacgaaaaagagatcgccttaatgaatgcccttaccgtgaaccttcacctgctgatgctgagttttttcaaacctacccccaagcgctacaagatcctgctggaagccaaagcatttccatccgatcactatgctatcgagtctcagctgcagcttcatgggttgaacatcgaggagagcatgcggatgatcaagccacgggagggagaagaaacactgcgcatcgaggatattttggaagttattgagaaggagggggactctatcgccgtgatattgttcagcggcgttcacttttacacgggccagcacttcaatatcccggccattactaaggctgggcaggccaaaggatgttatgtcgggttcgatctggcccacgcagtagggaacgtggagctgtatcttcacgactggggggttgattttgcgtgctggtgtagctacaagtatctcaatgcaggcgctggaggcattgccggggcgttcatccacgagaagcacgctcacactatcaagcccgctctagttggttggttcggccatgagctctcgacacgcttcaaaatggacaataaactgcaattgattcctggcgtgtgcggcttcaggatctctaaccctcctattctactggtatgcagcctccatgcctctttggagatattcaaacaggccaccatgaaagctcttcggaaaaagtcagtcctgctgaccggttacctcgaatacctgattaagcataattacggaaaagataaggctgctaccaagaagccagtggtgaacataattactcccagtcacgttgaagagagaggatgccagttaacgatcaccttttctgtgccgaataaggacgttttccaggagctggaaaaacggggagtggtttgcgacaagcgaaatccgaacggaatccgggttgcaccggtgccgctctataactccttccacgacgtgtataagtttacaaatcttttgacctcaatcttagacagtgcagagacaaagaac

SEQ ID NO: 77276 - DNA, 1395 bp, Artificial Sequence
  derived and/or modified sequence
atggaaccatcgtcgcttgagctgcctgccgacaccgtccaacgcatcgccgccgaactcaagtgccacccgaccgacgagcgggtggccttgcacctggatgaagaggacaagctccgccatttccgggagtgtttctacattcctaaaatccaggaccttccgccggtggacctttccctcgtcaacaaggatgaaaatgccatctactttttgggaaacagcctgggactgcaaccgaagatggtcaaaacctacctggaagaagaactggataagtgggccaagatcgctgcttacgggcatgaagttggcaagcgcccttggataacgggtgatgaaagcatcgttggccttatgaaagacatcgtgggcgccaatgaaaaggagatcgccctgatgaacgctctgaccgtcaacttgcacctgttgatgctgagctttttcaagccaacgccgaagagatacaagattttgctggaagcaaaggccttcccgagcgaccattatgccatcgagtcgcaattgcagctccacggccttaacatcgaagagtccatgcgcatgatcaagccgcgcgagggcgaggaaaccctgcggattgaagatattctcgaagtcatcgagaaggagggagactccattgcagtgatccttttttccggagtgcacttctacaccggacagcatttcaacatccctgcgatcaccaaagcgggacaggccaaaggatgctacgtgggatttgacctcgcacatgctgtgggaaatgtcgagctgtacctgcatgattggggagtggatttcgcatgctggtgctcgtacaagtacctcaacgccggcgcaggaggaatcgcaggagctttcattcacgagaaacacgcacacaccatcaagcctgctctcgtcggctggttcggacacgagctctccactagattcaagatggataacaaactccaacttatccctggagtttgcgggtttaggatctcgaatccaccgatcctcctcgtttgctcactgcacgcttcattggaaatcttcaagcaggccactatgaaggcactgaggaagaaaagcgtgctgctgactggatacctcgaatacctgatcaagcacaactacggaaaagataaggctgctaccaagaagccggtggtcaatatcatcaccccgagccacgtcgaagaacggggctgccagctgactatcaccttctcggtgcctaacaaagacgtgtttcaagagctcgaaaaacgcggagtggtctgcgacaagagaaacccgaacggaatccgagtcgccccagtgccactgtataactcgttccatgatgtgtacaagtttaccaacctgctcaccagtatccttgactcggccgaaacgaagaac

SEQ ID NO: 77277 - DNA, 1395 bp, Artificial Sequence
  derived and/or modified sequence
atggaaccttcctcgctcgagttgcccgcggacacagtccaaaggattgctgccgaactgaaatgtcaccccacagacgaacgggtcgccttacaccttgatgaagaagacaagctacggcactttcgagaatgcttttacatacccaaaatacaggacttgcctcctgtagacttgagcctggtcaataaagatgagaatgcaatttactttctaggtaactcattggggctacagccgaagatggttaaaacttatctcgaggaggagctggataagtgggctaagatcgctgcgtacgggcatgaagtgggaaaacggccgtggattactggcgatgagtctattgtgggactgatgaaggacattgttggcgctaatgaaaaggaaattgccttaatgaatgccttaaccgttaatctacatttactgatgctctccttcttcaagcctaccccaaagcgctacaaaatcctgttagaagccaaagctttcccttcggatcattacgccatcgagtcacagcttcagcttcacggcctcaatattgaggagtccatgcgtatgatcaaacccagggagggcgaagagacattacgcattgaggacatactggaagtgattgagaaggagggggactccatagcagtgatcctgttctctggcgttcacttttacaccggtcaacacttcaatatccctgctattacgaaagcaggacaggccaaaggctgctatgtcgggtttgatctggcgcatgcagtgggaaacgtcgagttatacttacatgattggggagtggactttgcctgttggtgctcctacaagtacctcaacgcgggtgcaggtggcatcgccggcgcatttatccatgaaaaacatgcccacaccataaaaccagccctcgtgggctggttcggccatgaattgtctacacgctttaaaatggataacaaacttcagttaatccctggggtctgtggatttcgcatctctaacccgcccattctcctcgtgtgttcgttgcacgcttccctggagatctttaagcaggccaccatgaaagcgctgcgcaaaaaatcagtgttgctaactggatacctagaatacttgattaaacataattacggaaaggacaaagccgccacaaaaaaaccggtggtgaatataatcacaccttctcacgtggaggaacggggctgtcagttgaccatcacgtttagtgtgcccaacaaggatgtgtttcaggaactcgagaaaagaggggtggtctgcgacaaacgcaacccaaatgggattcgggttgcccccgttccgctctacaactccttccacgacgtctacaagttcaccaaccttcttacttccatcctcgacagcgctgagacaaaaaat

SEQ ID NO: 77278 - DNA, 1395 bp, Artificial Sequence
  derived and/or modified sequence
atggagccttcctcgctggaactgcctgcagatactgtgcaacggatcgcggccgagcttaaatgccaccctaccgacgaaagggtcgctctgcacctcgatgaagaggacaaactcaggcacttccgcgaatgcttttacatcccaaagatccaggacttgccgccagtcgacctgtcgctggtcaacaaggatgagaatgccatctacttcctcggtaatagcctgggactccaaccgaagatggttaaaacctatctggaagaagaacttgacaaatgggcaaagatcgccgcatacggacacgaagttggaaagcgaccgtggatcactggggacgagtccatcgtcgggctgatgaaggacatcgtgggagcaaacgaaaaagaaatagcactgatgaacgctctgacggtgaatctgcacttgcttatgctgtctttctttaagcccacgcctaagcgctacaagatcctcctggaggccaaggcattcccttctgatcactacgcgatcgaatcacagttgcagctgcatgggttgaacatcgaagaatcgatgcggatgatcaagccacgggaaggggaggagacgctgcggatcgaggatatccttgaggtgatcgagaaagaaggagacagcatcgccgtcattcttttctcaggggtgcatttctacactgggcagcatttcaatatccctgccattactaaagcgggacaggccaagggctgctacgtcggattcgatttggcgcacgccgtgggcaacgtggaactgtacctgcatgattggggagtggacttcgcgtgctggtgttcgtacaagtatttgaacgccggagcaggcggaatcgcgggagctttcattcatgagaagcacgcgcacaccattaagcccgcactggtggggtggtttgggcacgaactctcaaccagatttaagatggacaacaaactgcagctgatcccgggtgtgtgcgggttccgcatttccaacccacccattctgcttgtgtgttccctccacgcatccctggaaatcttcaagcaagccaccatgaaagccttgagaaagaaaagcgtcctgctgacgggctacttggagtacctgatcaagcacaactacggaaaggataaggccgctaccaagaagccggtggtgaacatcatcactccttcacacgttgaagaaagaggctgtcaattgactatcacgttcagcgtgccaaataaggacgtgtttcaggagctggagaagaggggtgtggtttgcgataaaaggaatcccaacggcattcgggtcgcaccggtgccactgtacaactcgttccatgacgtatacaagttcactaatctgctgaccagcatcttggattccgcagagactaagaat

SEQ ID NO: 77279 - DNA, 1395 bp, Artificial Sequence
  derived and/or modified sequence
atggaaccgtctagccttgaacttccggctgatacggtccaacggatcgctgcggaactgaagtgtcaccccactgatgagcgcgtggccctgcacctcgacgaagaagataagctgaggcattttagagaatgtttttacatcccgaaaatccaggatctgccaccagtggacctgtctctggtcaataaggatgaaaatgcgatttactttctcggaaactccctggggttgcagcctaagatggtgaaaacctaccttgaggaggagctcgataagtgggcgaagattgccgcttacgggcacgaagtggggaagcggccatggatcacgggtgatgaaagcatcgtgggccttatgaaggacatcgtcggagcgaacgagaaggaaattgcactgatgaacgcacttactgttaatctccatttgttgatgctttcgtttttcaaaccaaccccaaagagatacaagattcttcttgaagcaaaggcatttccttccgatcattacgcaatcgagtcacaacttcaacttcacgggctcaacattgaggaaagcatgcgcatgataaagcctagagagggtgaagaaaccttgcgcatcgaggacattctggaggtcattgaaaaagaaggggattcgatagcagtgatcctcttctccggggttcacttttacactgggcagcacttcaatattcctgcaattacgaaggcgggtcaagccaagggttgttacgtcggatttgatttggcacatgccgtgggaaacgtcgaactttacttgcatgattggggtgtcgattttgcatgttggtgctcctacaaatatcttaatgcgggagcagggggaatcgccggagcattcattcatgaaaagcatgcacataccattaagcctgcacttgtgggatggttcggacatgaactgtctactagattcaagatggataacaagctccagttgattccaggcgtgtgcggctttcgtatttcaaatccccctatcctcctggtgtgctcgttgcatgcctcacttgaaatcttcaagcaggcaacgatgaaggcactgagaaagaagagcgtcttgcttactggttaccttgaatacctgatcaagcataactatggtaaggacaaagcagcaaccaagaagcctgtggtgaacattatcactccatcccacgtggaggagcgtggttgtcagcttactattaccttcagcgtgccaaacaaggacgtgtttcaagagctggagaaaaggggagtggtgtgtgataagcgcaatcctaacggtattcgggtcgcacccgtgcctctctacaactcgttccacgacgtgtacaagttcaccaacttgttgaccagcattctggacagcgcagagactaagaat

SEQ ID NO: 77280 - DNA, 1395 bp, Artificial Sequence
  derived and/or modified sequence
atggaaccatcttcccttgagctgcctgcagatactgtacagagaattgcagctgagttgaagtgtcaccctacggatgaaagagtcgcactgcatctggatgaagaggataagttacggcacttccgggaatgtttctacattccgaagatccaagacctgccgccagtagacctgtcccttgtgaacaaagatgagaacgcgatatacttcttgggaaattcactaggactgcagcccaagatggtcaagacctacctagaggaggaactggacaaatgggccaagatcgccgcctatggtcatgaagttggaaagcgtccctggatcactggcgacgaaagcattgtggggctgatgaaagacatcgtgggggccaacgaaaaagagatagcactgatgaatgccttgactgttaatcttcatctattgatgctctcttttttcaaaccaacccctaagcgctataagatcttactcgaggctaaagcgtttccatccgatcactatgccattgaatcgcagttacagctacacggcctgaatatcgaagagagcatgagaatgatcaaaccccgagagggggaagaaactctgcggattgaggatatactagaggtgattgaaaaggagggtgactcaatcgccgtaattctcttctcaggggtacacttctataccggccaacacttcaacatacctgcgataacgaaagccgggcaagccaaggggtgctatgttggatttgacctggcgcacgcagtcggtaatgtagagctgtacttacacgattggggggtggatttcgcgtgctggtgcagctataagtacctgaatgcaggtgcaggaggaatagctggcgcattcattcatgaaaagcatgcccacaccattaagccagcccttgtgggctggtttggtcatgaactgagcacacgctttaagatggataacaaactccagttaatccccggagtgtgcgggttccgaatcagcaatccacctatccttttggtttgctctctgcacgcatccctcgagatctttaagcaggcaaccatgaaagccttgcgaaagaaaagtgtcttgctcaccggctatctcgaatacctgataaaacacaactacggcaaggataaagctgcgactaagaaacccgtggtcaacatcatcacaccatcccacgtggaggaacgaggctgtcaactgacaataactttttcggtacctaataaagacgtatttcaggaattggaaaaaagaggcgtggtctgtgataagagaaatcccaatggcatccgggtggccccggtccctctctataacagctttcatgacgtgtacaagttcaccaacctgttgacatccatcctggactccgcggagaccaagaac

SEQ ID NO: 77281 - DNA, 1395 bp, Artificial Sequence
  derived and/or modified sequence
atggagccatcgtcgctcgaacttcccgccgacacggtgcagcggattgcagccgagttgaaatgccatccgacggacgagcgggttgctttgcatctggacgaggaggacaagttgcgtcattttagggaatgtttttatatacccaaaattcaagacttacctccggtcgacttgagcctggtcaataaagatgagaatgcgatctacttcctcgggaacagtctagggctgcagccaaagatggtgaagacttacctggaggaggagctcgataagtgggccaagattgctgcctacgggcatgaagtgggcaaacgaccctggattacaggcgacgagagtatcgtaggcttgatgaaggatatcgttggcgccaatgaaaaagaaatcgccctaatgaacgcactcactgttaacctccatctgcttatgttgtccttctttaaacctacacctaagaggtacaagattttgctcgaggccaaggcgtttccaagcgatcactacgctatcgagtcccagctccaacttcatggtttaaacatagaagaatctatgaggatgatcaagcctagagaaggggaggagacactcaggatcgaggacatcttagaagtcatagagaaggagggcgacagtatcgccgtgatccttttctctggtgtgcatttctacacaggacagcatttcaacattccggcaatcaccaaggccggtcaggccaaagggtgctacgtgggttttgatttagcccatgcagttgggaatgtggagttatacctgcacgattggggcgttgactttgcatgttggtgtagttacaagtatctgaacgccggtgctggcgggatagcaggagctttcatccatgaaaagcacgcacataccataaaacccgcgctggtgggctggtttggacacgaattgtcaacgcgcttcaagatggacaataagctgcagctaatcccaggtgtgtgtggcttcagaattagtaatccccctatcctactagtttgcagtctccatgcttctctggaaatctttaagcaagcaactatgaaggcgctccgcaagaagagcgtgttactgactggctaccttgagtatttaataaagcacaattatggtaaggacaaggcggcaaccaaaaagcctgttgtaaacattattacaccctcccacgtcgaggaacgcggatgtcagctcactattacgttctccgtgcctaataaggatgtttttcaggaacttgagaaaagaggggtcgtatgtgataagcgcaatcctaatggcattcgtgtggctcctgtccctctctataactcgttccatgatgtatacaaattcacgaaccttcttacaagtatactagactccgcagagaccaaaaat

SEQ ID NO: 77282 - DNA, 1395 bp, Artificial Sequence
  derived and/or modified sequence
atggagccatcaagcctggagctccctgctgataccgtgcagagaatcgccgctgaacttaaatgccaccctacggacgagagagttgccctccacctggacgaagaggacaagctgcggcactttagggaatgcttttacatcccaaagatccaggacctgccgccggtggacctgtcacttgtgaataaggatgaaaatgctatctactttctgggaaactccctgggattgcagccaaagatggttaagacctacttggaagaagaacttgataagtgggccaagattgccgcgtacggacatgaggtgggaaagaggccttggatcaccggtgacgagtcaattgtgggcctgatgaaggatatcgtgggagctaacgagaaagaaattgccctcatgaatgctcttactgtcaacctccatcttctcatgctgtcgttctttaagccgaccccaaagcggtacaaaatcctcttggaagcgaaagccttcccgtcagaccactatgctatcgaatcccagctccaactgcacgggctgaacatcgaagaatcgatgcgcatgatcaagccgcgagagggcgaagagactctgcgcattgaggacattctcgaggtcatcgaaaaagaaggcgactcgatcgctgtgatcctgttctccggagtccatttctacacgggccagcacttcaacatccccgccattaccaaggccggccaagccaaggggtgctacgtcggattcgacctggcgcatgctgtgggaaacgtggaactttacctgcacgattggggagtggactttgcctgctggtgttcatacaagtatctgaacgcaggggccgggggcatcgcgggagcctttatccacgagaaacacgctcatactatcaaaccggcgttggtgggctggttcggacacgagctttcaacccgattcaaaatggacaataagctccaactcatccctggtgtctgcggattccgcatctcgaacccgccgatcctgctcgtctgctcgctgcacgcatcgttggagatctttaaacaggcgactatgaaggcactgagaaaaaagtccgtgctgctgacgggatacttggagtacttgattaagcacaactacgggaaagataaggcagccactaagaaacccgtggtgaacatcattactccttctcatgtggaggaaagaggatgccaattgaccatcaccttttcagtcccaaataaggacgtgttccaggaacttgaaaaaaggggcgttgtctgcgacaagcgcaacccgaatggaattcgcgtcgcgcccgtgcctctctacaactcattccatgatgtgtacaagttcactaacctgctcacttccatcctggactccgcagagactaagaac

SEQ ID NO: 77283 - DNA, 1395 bp, Artificial Sequence
  derived and/or modified sequence
atggagccatcgagtctcgagttgccagccgatacggtgcaacgcattgccgccgaactgaagtgccaccctacggacgagcgggtggccctgcacctggacgaggaagataagctgcggcatttccgggagtgcttctacattcccaagatccaggacctccctccggtggatctttccctggtcaacaaggatgagaacgcaatatacttcttgggtaattcgttgggacttcagccgaagatggtgaaaacctacctggaagaagagctcgacaagtgggctaagatcgcggcctacgggcacgaagtcggaaaaagaccatggatcaccggagacgaatctatcgtgggcttgatgaaggatatcgtgggcgccaatgagaaagaaatcgccctgatgaacgcgttgaccgtgaacctgcaccttctgatgctttccttctttaagccaaccccaaagagatataagatcctgctggaggcgaaggcattcccatcagaccactacgcgatcgagtcccagctgcagttgcacggactgaacatcgaagagtccatgcgcatgatcaaaccacgggagggagaagagactctgagaattgaagatatcctggaggtgatcgagaaggagggtgacagcattgccgtgatccttttttcgggagtgcatttctacaccggacagcacttcaacatccctgcgattaccaaagcgggccaagcaaaggggtgttacgtgggatttgatcttgcgcatgctgtcggcaatgtcgagctgtatctgcatgattggggcgtagacttcgcctgctggtgttcatacaagtacctgaacgcgggagctggaggtatcgcgggcgcgttcatccatgagaaacacgcacatacgatcaagccggccctggtgggctggttcggacacgaactgtcgactcgctttaagatggataacaagctgcagctgatcccgggagtctgcggatttagaatatcaaatccccctatcctgctggtgtgcagcttgcacgctagcctggagattttcaagcaggctactatgaaggcgcttcggaagaaatcggtgttgctcaccggttacctggaatacttgatcaagcacaattacgggaaagacaaagccgccaccaaaaagccggtggtgaacatcattactccttcgcacgtcgaagagagagggtgccaactgactatcaccttctcggtcccgaacaaggacgtctttcaagagctggaaaaaagaggcgtcgtttgtgacaaacgcaatccaaacggaatccgcgtcgcaccagtgcccctgtacaacagcttccatgatgtttacaagttcaccaatttgttgacctcaatcctcgacagcgcagaaaccaaaaat

SEQ ID NO: 77284 - DNA, 1395 bp, Artificial Sequence
  derived and/or modified sequence
atggaaccatcatcgcttgaacttcccgcggatacggtgcaacggattgctgcagaactgaaatgtcacccaacggacgagcgagtggcccttcatctggacgaagaggataaacttagacattttcgtgagtgcttctacatccccaagattcaggacctgcctcctgtggatctgagcctggtgaacaaggacgaaaatgctatatacttcctgggtaactcgctgggacttcagcctaaaatggtgaaaacctatcttgaggaagaactcgacaagtgggcgaagatcgctgcgtacggtcatgaagtcggcaagaggccatggatcactggagatgagtcgattgtcgggcttatgaaggacatcgtgggtgccaacgagaaagaaattgcacttatgaacgcacttactgtcaaccttcatcttctcatgctgtcgtttttcaagccaactcccaagagatacaagatactgctggaagcgaaggcgttcccatccgaccattacgcgattgaatcacagctccagctccacggactcaacatagaggaatcgatgagaatgattaagcctcgggaaggagaggaaacgctccgaattgaagatatcttggaggttattgaaaaggagggcgattccatcgccgtgatcttgttcagcggggtgcacttttacactgggcaacactttaacataccggcaatcaccaaggcaggacaagctaaaggttgttacgtcgggtttgacctggcacacgcagtaggtaatgtagagctttacctgcatgattggggtgtcgattttgcctgttggtgttcttacaagtacctgaacgcgggagccggagggattgcaggagcattcattcacgaaaaacatgcacatactatcaagcctgcgctcgtgggatggtttggccatgaactctcgaccagattcaagatggataacaagctccagctcatacctggagtgtgtggcttccgcatttccaacccgcccatactcttggtttgctcgctgcacgcatcgctcgaaatctttaaacaagccactatgaaggcactgaggaaaaagagtgtgctgcttaccggctaccttgaatacctgatcaaacataactatggaaaggataaggcagcgactaagaagccagttgtgaacatcatcactccttcacatgtggaggagcgtggatgtcaacttaccattactttttcagtgcctaataaggacgtgtttcaggaacttgagaaacgcggtgtggtctgcgataaacgtaatccaaatggaattcgcgtggctccggtgcctttgtacaacagtttccacgacgtgtataagtttaccaatctcctgacctccattctggattccgcagaaaccaagaat

SEQ ID NO: 77285 - DNA, 1395 bp, Artificial Sequence
  derived and/or modified sequence
atggaaccctcgagcttggaattgccagctgacaccgtgcaaaggattgccgcggaactgaagtgccacccaaccgatgaacgagtggcacttcacctcgatgaggaagataagctcagacattttcgggaatgcttctatatcccaaagattcaagatctcccccctgtcgatctgtcactggtgaacaaggatgagaacgcaatctacttccttggaaatagtctgggactgcaacccaagatggtgaaaacctacttggaagaagaactggataagtgggcgaagatagccgcatacggtcatgaagtgggaaaaagaccttggatcaccggcgacgagtctattgtgggtcttatgaaagatattgtgggagcaaacgaaaaggaaatagcacttatgaacgcacttactgtgaaccttcaccttttgatgcttagcttctttaaaccaactcctaagcgctacaagatcctcctggaagcgaaggcatttccctcagatcattacgcaattgagtcacaactgcaacttcatggactgaacatcgaagaatccatgagaatgatcaaacctcgagaaggagaagaaactcttagaattgaggacatactcgaggtgattgagaaggagggtgactcgattgccgtgattcttttctcaggtgtgcacttttacaccggacagcactttaacattcccgcaattacgaaggcaggtcaagcaaagggttgctacgttggctttgaccttgcccatgccgtcgggaatgtcgaattgtaccttcatgattggggagtggactttgcatgctggtgcagctacaaatatctcaacgcaggcgcaggtggaattgcaggagcatttatccatgaaaagcacgcccatactattaagccggccctggtgggctggtttgggcatgaacttagcacccgctttaagatggataacaaactgcagctcatccctggcgtctgtggtttccgcatctccaatccgccaattctcctcgtgtgtagccttcacgcgagcctggagatcttcaaacaagcaaccatgaaggctttgagaaagaagtcggtgcttctgactggttacctcgaatacctgatcaagcacaactacggaaaggacaaagctgcaactaagaagccagttgtgaacatcattactccctcgcatgttgaagagcggggctgtcaactgacgattaccttttccgtgcctaacaaggatgtgttccaagaactcgaaaagagaggtgttgtgtgtgataagcgtaacccaaatggaatccgagtggcccctgtgcccctctacaattcgtttcatgatgtgtataagtttacgaacctcttgacctcgatcctggattcggctgaaaccaagaac

SEQ ID NO: 77286 - DNA, 1395 bp, Artificial Sequence
  derived and/or modified sequence
atggaaccttcttctttggagttgcccgccgatacagtgcagcgcatcgctgctgaacttaagtgccatccaacagacgagagggtcgcgttgcacctcgacgaggaggataaactccggcactttcgcgaatgcttttacattccgaagattcaggacctgcctccagtcgatctgtctctagttaataaggatgagaatgctatatattttctgggaaattcacttggactgcagccgaaaatggtgaaaacatacctcgaggaagagttggataaatgggccaagatcgctgcatacggtcacgaagtggggaaaaggccttggattacaggtgacgaaagtatagtggggctgatgaaggacattgtcggtgctaatgagaaagaaattgccctcatgaatgctttgacagtcaacttgcatctattaatgctgagcttcttcaagcccacaccaaaaaggtataagatacttctggaggcaaaagcctttccatcggatcattacgcaatcgagtcccagctgcagctgcacggattgaacatagaagagagcatgcgcatgataaagcctcgcgagggcgaggagactctgcgtatcgaagatatcctggaggttatcgagaaggaaggggactccattgcggtcatcttattcagcggcgtgcatttctatacgggtcagcatttcaacattcccgcaataacgaaggccgggcaggcaaaaggctgctacgtgggttttgatctggcccacgcggtggggaacgtagagttgtacttgcacgactggggagtggattttgcttgttggtgttcctacaaatatcttaatgccggcgctggtggcattgcaggagcgttcattcacgagaaacacgcacacacaattaagcccgctctcgttgggtggttcggccatgagctgtctactaggtttaaaatggataataagcttcagctcatacctggggtttgcggcttcagaatctctaatccaccaatcctcctggtgtgcagcttgcacgctagtctagagattttcaagcaagctacaatgaaggcgctacggaaaaaatcagttcttctcaccggatacctcgagtatctgatcaaacacaactatggcaaagacaaagctgcaacaaagaagcccgtcgttaatatcatcacaccatctcatgtggaagagaggggatgtcagctcaccattactttcagcgtgccaaataaagacgtgtttcaggaactggagaagagaggggtggtgtgtgacaaacgcaaccctaatggaatcagagtggcccctgtgccgctgtataattcctttcacgacgtgtacaaatttaccaacttgctgactagtattctggatagcgccgagacgaagaat

SEQ ID NO: 77287 - DNA, 1395 bp, Artificial Sequence
  derived and/or modified sequence
atggagccttcgagccttgagctccccgcagacaccgtgcagaggattgcagctgagctgaaatgtcaccctactgatgaaagagtggcactgcatcttgatgaagaggataagttgagacatttccgagagtgcttttacatcccaaagattcaggacctccctcctgtggacctgtcactggtgaacaaagacgaaaacgcgatctatttcctcggtaattcgcttggtttgcagccgaagatggttaagacctaccttgaagaggagctggacaagtgggcaaagattgcagcatacgggcacgaagtcggtaagcgcccgtggattactggcgacgaatccatcgtcggactgatgaaggacatcgtgggtgccaatgaaaaagaaattgccctgatgaatgcactgactgttaacctccatcttctgatgcttagctttttcaagcctaccccaaaacgatacaaaattctccttgaagcgaaggccttcccttcggatcactacgcaatcgaaagccaactgcagctgcacggtttgaatattgaagaatccatgcggatgatcaagcctagggagggagaagaaactctccgcattgaggatattcttgaggtgatcgagaaagaaggagattctatagcagtgatattgttttccggagtgcacttctacactggccagcactttaacatccccgcgatcacgaaggcaggacaggctaagggctgttacgtgggttttgacctggcacatgcggttggtaacgtcgaactctaccttcacgactggggagtcgactttgcgtgctggtgctcctacaaatatcttaatgcaggcgcaggaggtattgcgggggcattcatccatgagaagcatgcccatacgataaagccggcgctggtgggatggtttggacatgagctctcgactaggtttaagatggataacaagttgcagctgattcctggagtctgtgggtttcggatctccaacccgcctatactgctggtctgttcgctgcatgcatcccttgagatctttaaacaggcaaccatgaaggcattgagaaagaagagcgtcctcctgactgggtacctggagtacctgattaagcacaattatggaaaagataaagccgcaaccaaaaagcctgtcgtgaacatcatcacccctagccatgtggaagaacggggttgccagctcactattactttttcggtgccaaacaaggatgtgtttcaggaactggaaaaaaggggggtggtgtgcgacaagcgcaatccaaacgggataagagtcgcaccagtgccattgtacaattctttccatgatgtgtacaagtttaccaaccttctgacgagcatacttgatagcgccgaaactaagaac

SEQ ID NO: 77288 - DNA, 1395 bp, Artificial Sequence
  derived and/or modified sequence
atggaacctagctcgctggaactccccgccgatactgtccagcggatcgccgcggaactgaagtgccatcctactgacgaaagggtcgctctgcacctggacgaagaagataagttgcggcatttccgggaatgcttctacatcccgaaaatccaagacctgccaccagtggacctgtccctcgtgaacaaggacgagaacgccatttactttctgggtaactcgctgggactgcagccaaagatggtgaaaacgtacctggaggaagaacttgataagtgggccaaaattgcagcttacggacacgaggtcggaaagcggccgtggatcacgggggacgaaagcatcgtgggactgatgaaagatatcgtgggagccaatgagaaagagatcgcgcttatgaacgcacttacggtcaaccttcatctcctgatgctgtcattcttcaaaccaacccccaagagatacaagatccttctggaagcgaaagcgttcccgtcggatcattacgcaatcgaatcccagttgcagctgcacggactgaatatagaagagtcgatgcgcatgatcaagccaagagaaggcgaagaaacccttcgcatagaggatatcctggaagtgatcgagaaggaaggggacagcattgccgttatcctgttcagcggagtgcatttctacactggtcagcactttaacatccccgccattaccaaggccggacaggccaaaggatgttacgtgggttttgacctggctcacgccgtgggtaacgtggaactgtaccttcacgactggggcgtcgacttcgcctgctggtgttcgtataagtacctcaacgcaggagcaggtggtatcgccggagcctttatccacgaaaagcacgcccacaccatcaaaccggcactggtggggtggtttggccatgaactgtctactcggttcaagatggataacaagctgcaactgatccccggagtgtgcggattccgaatctccaacccgccgatcctgctcgtctgctcactccatgcttcgctggaaatctttaagcaagccactatgaaggccctgcgcaagaagtcagtcctgttgaccggctacctggagtatctgatcaagcataactacgggaaggacaaggccgcaaccaagaaacccgtggtgaatatcatcacgccgtcacatgtggaggaaaggggatgccagctgactatcacttttagcgtgccgaataaagatgtgtttcaggagctggaaaagcgcggcgtcgtgtgtgacaagcgcaatccaaatggaatccgggtggcgcccgtgccgctgtacaattcgttccatgacgtctataagtttaccaacttgcttaccagcatcctcgactcagctgaaaccaaaaat

SEQ ID NO: 77289 - DNA, 1395 bp, Artificial Sequence
  derived and/or modified sequence
atggaaccgtcgtcgctggaactgccagcagacactgtccagcgcatcgccgctgagttgaaatgccacccgactgacgaacgggtggctctgcacctggatgaggaagataagttgcggcattttcgcgagtgcttttacatccccaaaatccaggacctgccacctgtagatctcagcctcgtcaacaaggacgaaaatgcaatctacttcctgggcaactcccttggactccagccgaaaatggtcaagacttacctcgaagaagagctggataaatgggcaaagattgcagcttacggccacgaggtgggaaagcgcccttggattactggggacgagtcaatagtgggtttgatgaaggacatcgtcggagctaatgaaaaggaaattgcactcatgaacgcacttaccgtcaacctgcatctgctgatgctctcattcttcaagccaacccctaagagatataagatcctcttggaagccaaagcatttcctagcgatcattacgctatcgaaagccaactgcagcttcacggcctcaatatcgaggagtccatgcggatgatcaagcctagagaaggagaagaaactctccgaatcgaggacatcttggaggtgatcgagaaggagggagattcgattgcggtgatcctgttctccggcgtgcacttctataccggccagcacttcaatatcccggccataaccaaggcagggcaagcgaaaggttgctacgtcggattcgatttggcgcatgccgtgggaaacgtggaactctacctgcacgattggggagtcgactttgcctgctggtgcagctacaagtacctgaacgcgggagcgggcggaatcgccggagctttcatacacgagaagcatgcgcataccattaagccggcgttggtcggttggttcggacatgaactcagcacccgcttcaagatggataacaagttgcaactcatccctggagtatgcggcttccgcatttcaaatccccctatcctgcttgtctgctcactgcatgcttcgctggagatcttcaagcaagcgaccatgaaggccctcagaaagaagtcagtgctgctcacgggataccttgagtacctgattaagcacaactacgggaaggacaaggccgcaactaaaaagccagtagtgaacatcatcaccccgtcccacgtcgaggagagaggatgtcagctgacgatcaccttttccgtgccgaataaagacgtgttccaggaactggagaaaaggggggtggtgtgtgacaagaggaatcccaatggcatcagagtcgccccggtgccactgtacaattcgtttcacgacgtttacaaattcactaaccttctcacttctatcctggattccgcggaaaccaagaac

SEQ ID NO: 77290 - DNA, 1395 bp, Artificial Sequence
  derived and/or modified sequence
atggagccgtccagcctcgagctgcctgccgatacggtgcagcgaatcgcagccgagctcaagtgtcaccctacggacgaaagggtggcactgcacctggacgaggaagataaactacgtcacttcagagagtgtttttacatcccaaagattcaggatttgcccccagtggacctcagcctggtcaacaaggatgagaacgccatctattttttggggaactcactgggcctccaacctaaaatggtgaaaacgtaccttgaagaggagctggataagtgggcaaagattgctgcctatgggcacgaagtcggcaagaggccctggatcaccggggacgagtccatagtgggcctgatgaaagacattgtgggggccaacgagaaagaaattgcgctgatgaatgctctcactgttaatttgcacctgctgatgctgtcgtttttcaagccgacccctaagaggtacaagattctgctcgaagcaaaggcctttccgtctgatcattacgccatcgagagtcagctacaacttcatggcctgaacatcgaagagagtatgcgcatgattaagcctagggagggggaggaaaccctgcggattgaagatatcttagaagtcattgaaaaagaaggagattcgattgcagtcatactattttctggcgtccacttctataccggccagcattttaacattcctgcaatcacaaaagccggccaggcaaaaggctgttatgtagggttcgatcttgcccatgccgtgggtaatgtggaattatatctgcacgattggggtgtggatttcgcatgttggtgttcctacaagtacttaaacgccggagccggaggaatcgctggtgccttcattcacgaaaaacacgcacacacgattaagcctgccctggtaggctggtttgggcacgaactgtctactaggtttaaaatggacaacaaactgcagctgattcccggagtctgtggttttcgcatctcaaaccctccgatcctacttgtgtgttcactgcacgcttcacttgagatctttaagcaggccacaatgaaggccctgcgaaagaagtctgtgctactaactggctacctagaatatctaattaagcacaattacgggaaggacaaggcagccacaaagaagcccgtggtcaacatcatcacccccagtcacgtcgaagaacgcgggtgtcagctgaccatcacattcagcgttcccaacaaagatgtgttccaggaactggagaaaaggggcgtggtgtgtgataagcggaatcccaatggcatccgcgttgcacccgtgccgctctataactccttccacgatgtttacaagtttacaaatctgctgacatctatactggattcggccgaaactaagaat

SEQ ID NO: 77291 - DNA, 1395 bp, Artificial Sequence
  derived and/or modified sequence
atggagccgtcatcccttgaactgcctgctgatactgtgcagcgcatcgcagccgagctcaagtgtcacccgactgatgaacgcgtagctctccacctggatgaggaggacaagttgcgccacttccgcgagtgcttctacattcccaagattcaggacctccctccagtagatctgtcccttgtgaacaaggatgaaaacgctatctatttcctgggcaattccttgggattgcaacctaagatggtcaagacctatctcgaggaggagctggacaaatgggccaagatcgcagcgtatggacacgaagtaggaaagaggccctggattaccggtgacgagtccatcgttggattgatgaaggacatcgtgggtgctaatgaaaaggagattgccttgatgaatgctctgaccgttaacttgcatttgctcatgctgtctttcttcaagccaacgcccaaaaggtacaagatcctgctggaggctaaggcgtttccaagtgaccattatgccatagaaagtcagctgcagctgcatggattgaatatagaagaatccatgagaatgatcaaacctagggaaggtgaagagactcttagaatcgaagatatattggaggtgatcgagaaagaaggagactccatcgccgtcatcctgttctccggcgtgcacttctacacaggacagcacttcaacatccctgccatcactaaagcgggccaagctaaaggctgttatgtgggctttgacttggcacacgctgttggtaatgtagagctgtatctccacgactggggcgtggactttgcgtgttggtgtagttacaaatatctcaacgctggagcgggcggtatcgcgggagccttcatccatgagaaacacgcccacaccattaagcctgcacttgtgggatggttcggccacgagctgtcaaccagattcaagatggataataagctccagctgattcccggagtgtgcggatttaggatctcaaatcccccaatccttctggtatgttctctccacgcgtctctggaaatttttaagcaggctaccatgaaagcactcaggaaaaaaagcgtcttgctgactggttacctggaatacttgattaagcacaattacggtaaagataaggccgcaacaaaaaagcctgtggtgaacatcattaccccttcccacgtcgaggagagaggctgtcagttgactatcacgttcagtgtacccaacaaggatgtgtttcaggagctggagaagagaggtgtcgtatgtgataaaaggaatcctaacggcatcagagtggccccagtgcctctttataattctttccacgacgtttacaagttcacgaacttgctgacttccattctggatagtgccgaaaccaaaaat

SEQ ID NO: 77292 - DNA, 1395 bp, Artificial Sequence
  derived and/or modified sequence
atggagccgtcctctttggaactgccagccgatacagtgcagaggatcgccgctgaactgaagtgccatcctactgatgagagagtggccctgcatctcgacgaggaagacaaactgcgtcacttccgagaatgcttctatatcccaaagatccaggatctgccccctgtcgaccttagcctggtcaacaaggacgagaacgccatttacttcctaggcaattccctggggctgcagcctaagatggtaaagacctatcttgaagaggaattagacaagtgggccaagatagccgcctacggccatgaagtcggaaagaggccttggattaccggcgacgaaagcattgtggggctgatgaaagatatcgtaggagccaacgagaaagaaatcgctttgatgaacgcactgaccgtaaacctccatttactgatgctctccttcttcaagcccaccccaaaacggtacaagatcctgttggaggccaaggcctttccatctgaccactacgccattgaatcccaactccaacttcatggccttaatattgaggagagtatgagaatgatcaagccaagagaaggtgaggaaacccttcgaattgaggacatactcgaagtcatcgagaaggagggagattctatcgctgtcatcttattcagcggagttcacttctacacagggcaacatttcaatatcccagcaataacgaaggcagggcaggctaaaggctgctacgtcggcttcgatctggcccacgccgtgggcaatgtggaactgtatctccacgactggggagtggatttcgcctgttggtgcagctacaagtacctcaatgcaggagccggcggaatcgcaggggcatttattcacgaaaaacatgcccataccataaaaccagcgctcgtaggctggttcggacatgaactgagcacccgattcaaaatggataacaaacttcaactgataccaggggtatgcggcttccgaatcagcaacccaccaatcttgctcgtgtgttctctgcatgcctctttggaaatttttaagcaagcgacaatgaaggcactcaggaaaaaatcagtcctgctgacgggatacctggaatacctcataaaacacaattacggcaaggataaagctgcaacaaagaagcccgttgtaaacattatcaccccttctcacgtggaagaaaggggctgccaactcacaatcaccttctccgtaccaaataaagacgtgtttcaggagctcgaaaagagaggggttgtgtgtgataagaggaacccgaatggcatccgtgtggcgcctgtacctctgtataactcgttccatgatgtatataaattcaccaatctgctgacatctatcctggactccgccgaaaccaaaaac

SEQ ID NO: 77293 - DNA, 1395 bp, Artificial Sequence
  derived and/or modified sequence
atggagccatcgtcgcttgaactgcctgcggacaccgtgcagcggattgccgcagaattgaaatgtcaccctactgacgagagagtcgcccttcatctggatgaagaggataagctgaggcactttcgagagtgcttctatatacccaaaattcaagacctgcccccggtggatctctcgctggtcaataaggacgagaacgccatctatttcttggggaactccctgggcctgcaaccgaagatggtcaagacctacttggaggaagagttggacaagtgggccaagatcgcagcatacggccatgaagtgggaaaacgaccttggattaccggtgatgagagcattgtgggattgatgaaggacatcgtcggcgcgaacgaaaaagagatcgcactcatgaacgcactgacggtcaacctgcacctcctgatgctttcgtttttcaagcctacgcccaagcgctacaaaattcttctggaagctaaggcatttccatcagaccattacgcaatagaatcccagctccagctgcacggtttgaatattgaagaatccatgagaatgatcaagccacgcgaaggagaagagactctgaggattgaagatattctggaagtgattgaaaaagaaggagattcgatagcagtgattctgttcagcggcgtccacttttacactggccaacatttcaacatcccagctattaccaaggcagggcaagcaaagggttgttacgtgggctttgacctggcgcacgctgtcggaaatgtcgagctgtacctgcatgattggggggtcgacttcgcgtgttggtgttcatacaaataccttaacgctggagcaggaggcattgccggagctttcattcatgaaaagcacgcccatactatcaaaccagcacttgtgggctggtttggccacgaactttcgacccgctttaagatggacaacaagctgcaactcatccctggagtgtgtggatttcgcatctccaatcctccaattcttttggtgtgtagcctgcacgcttcgctggagatctttaaacaagcaaccatgaaggcacttcgtaagaagtccgtcctcctcactggttatctggaataccttatcaagcataactacgggaaggataaggcggcgaccaaaaagccagtggttaacattatcactccttcccatgttgaagagcgggggtgccagctgactatcactttcagcgtgcctaacaaggatgttttccaagagctcgaaaaacggggagtcgtctgtgacaagcggaatcctaatggtatcagagtggcaccagtccctttgtacaactcatttcacgatgtctacaagtttactaatctgctgacttcaatactggactcggcagaaaccaagaat

SEQ ID NO: 77294 - DNA, 1395 bp, Artificial Sequence
  derived and/or modified sequence
atggagccctccagtcttgaactcccagctgacacagtgcagcggatcgcggcggaattgaaatgccacccaaccgatgagagagttgccctgcacctggacgaggaggataagctccggcatttccgagagtgtttctatatcccaaaaatccaggacttgcctcctgtagacctgagcctagtgaataaggacgaaaacgcaatctacttcctcggcaattccctcgggctccagccaaaaatggtaaagacttacctggaagaagaattagataaatgggccaaaatagccgcttacgggcatgaggtgggcaaaaggccgtggatcaccggggacgagtctatcgtcggattgatgaaagacatcgtgggagctaacgaaaaagaaatcgctctcatgaacgccctgacagtcaaccttcacctcttgatgctctccttcttcaagcccactcctaagcgttacaagattctattggaagcaaaagcgttcccaagcgatcactacgcgattgagtcacagctacagctgcatgggttaaacatcgaagaatccatgaggatgattaagcccagagagggggaagagaccttaagaattgaggacatcctggaagtgatcgagaaagaaggcgactccatcgcggtgatcctcttctcaggggtgcatttctataccggacaacatttcaacattccggcaattactaaggccgggcaggcaaagggctgctacgtgggctttgatcttgctcacgcagtggggaatgtggaactatacctgcacgattggggagtagatttcgcgtgctggtgttcttacaagtatctgaacgccggcgccggcgggatcgctggtgcattcatccatgaaaaacacgcgcacactattaaacccgcactcgtaggatggttcggacatgaactgtccacccggttcaagatggataataagctccagcttatcccaggagtttgcggatttaggatctcaaacccccccatcctcttggtgtgctcccttcacgccagcttggaaatattcaaacaagccactatgaaagcgctgagaaagaagtctgtgctgttgactggctacctcgagtatctgattaaacacaattacggaaaggacaaagcagctaccaaaaagcctgtcgtcaatataatcactccctcacacgtagaagagagaggatgtcagcttacaattaccttctctgttccaaacaaggacgtgtttcaggaactggaaaaacggggagtggtgtgcgacaaaagaaatcctaatgggattagagtagccccagtccctctgtacaactcattccatgacgtatacaaattcactaacctactgacttccattctagattctgcagaaacaaaaaat

SEQ ID NO: 77295 - DNA, 1395 bp, Artificial Sequence
  derived and/or modified sequence
atggagccaagtagtcttgaattaccagcagatacagtacaaagaattgctgctgagttgaagtgtcatccaaccgatgaaagagtagcacttcatttagatgaagaagataaacttcgtcatttcagagaatgtttttatattccaaaaatccaagatttgccaccagttgacttatcattagtaaacaaggatgaaaatgctatttattttttaggaaatagtttaggtttacaaccaaagatggttaaaacatatttagaagaagaattagataaatgggcaaaaattgccgcttatggacatgaagttggtaaaagaccatggattacaggagatgaatcaatagttggacttatgaaagatattgtaggtgcaaatgaaaaagaaatcgctcttatgaatgcattaacagttaaccttcacttgttaatgttaagtttttttaagccaacaccaaaaagatataagatcttattagaggcaaaggcatttccatcagatcattacgctattgaatctcaacttcaattgcatggattaaatattgaagagagtatgagaatgattaaaccacgagaaggagaagaaactttaaggattgaggatatacttgaagtcattgaaaaagaaggagattcaatagcagttattttattttctggagttcatttttatacgggtcaacattttaatattccagcaataacaaaggctggacaagcaaaaggatgttatgttggatttgatttagcacatgctgttgggaatgttgaattatatcttcatgattggggagtagattttgcatgttggtgttcatataagtatttaaatgctggagcaggaggaattgcaggtgcttttattcatgaaaaacatgcacatactattaaaccagcactagtaggttggttcggacatgagcttagtactcgatttaagatggacaataagctacaattaattccaggagtttgtggatttcgaatctctaatcctcctattcttttagtttgcagtttacatgcttcgcttgaaatttttaaacaagctacaatgaaagcattaagaaaaaaatcagtattattaactggttatcttgaatatttaataaaacataattatggaaaagataaagctgcaacaaaaaaaccagtagtcaatattataacaccaagtcatgtagaagaaagaggatgtcaattaaccattacatttagtgtacctaataaagatgtctttcaagaattagaaaaaagaggagttgtatgtgataagcgtaatccaaatggaattagagttgctccagtaccactttataattcgtttcatgatgtatataagttcacaaaccttttaacttctattttagattcagccgaaacaaaaaat

SEQ ID NO: 77296 - DNA, 1395 bp, Artificial Sequence
  derived and/or modified sequence
atggagccatcttcgctagagctccccgcggacaccgtgcaacgcatcgccgcggagctgaaatgccaccctacagacgagagagtcgcgttgcatctggatgaggaagataaactcagacacttcagggagtgcttctatatacctaagatccaggatcttccccccgtcgatctcagcttggtgaacaaggacgaaaatgccatttacttcctgggaaattccttagggttgcagccaaagatggtgaaaacgtacctggaggaagagctcgataagtgggccaaaattgcagcttatggccacgaggtgggaaagcggccatggatcaccggcgacgagtcaatcgtcggcttaatgaaggatatcgtaggggcaaacgaaaaggagatcgcactgatgaacgctctcaccgtgaacttacatttgttaatgctgtctttctttaagccaaccccaaaacggtataagattctgttggaagccaaagcattcccatcagaccactatgctatagagagtcagctacagctccatgggcttaacatagaggagtcaatgagaatgataaagcctcgagagggcgaggaaactcttcgcatagaggatatactggaggtgatcgagaaggaaggtgactcaattgctgtgatactgtttagcggcgttcatttctacaccggccagcatttcaatatcccagcaatcacaaaggccggacaggcgaagggatgctacgtgggttttgatctggcccacgccgtcgggaacgtggaactgtatttgcacgactggggggtagattttgcctgctggtgttcctacaaatacctaaacgccggagccgggggaatcgctggggctttcattcatgagaagcacgcacacaccatcaagccagcgctggtcggctggtttggccatgagctgtcaacaagattcaagatggacaacaaactccagttaattcccggtgtctgtggctttagaatctcaaaccctcctatcctactggtttgtagcctgcacgctagcctagaaattttcaagcaggctacaatgaaggccctgcggaaaaagagcgtgctgctgaccggctatctcgaatatctgataaagcataattacggaaaagacaaagcagccacaaagaagcctgtggttaatataattactccctctcacgtagaagagaggggctgccagcttactatcaccttctcggtgcccaataaggacgtttttcaggaattggagaagcgtggggtagtttgcgacaagaggaatccaaatggaattcgtgtggcacctgtccccctctacaacagcttccacgacgtgtataagttcaccaatctcctgaccagtatcttggattctgcagaaacaaagaac

SEQ ID NO: 77297 - DNA, 1395 bp, Artificial Sequence
  derived and/or modified sequence
atggaaccaagtagtctcgagttgccagcagacaccgttcagcggattgccgctgagcttaagtgtcatcctacagacgaacgcgtcgcccttcacctggatgaggaagacaaactccgacacttcagggagtgtttttatattcccaagatccaggatctgccacccgtggatctgagccttgttaataaggacgaaaatgctatttatttcctgggtaattccctcggtcttcaacccaaaatggtgaaaacctacctggaggaagagctcgataagtgggcaaaaatcgcggcctacggacacgaagtgggcaaaagaccctggattacaggggacgagagtatagtgggcctgatgaaagacatcgtcggagcaaacgagaaagaaatcgctctgatgaacgctctgaccgttaatctgcatctgcttatgctgtctttctttaagcctacgcctaaacgctacaaaatattgctcgaggcgaaagcgtttccgagcgaccattatgctatcgagtcccagctgcagctgcatggtctcaacatagaggagtctatgcgcatgatcaaacctcgggaaggtgaggaaaccctgaggattgaagacatactcgaggtgatagagaaagaaggcgactccatagcagtgatcctgttcagcggcgtgcatttttacaccggccaacatttcaatatccccgccattaccaaggcagggcaggctaaaggatgctacgtggggttcgatcttgctcacgctgtggggaatgtcgaactgtacctccacgattggggcgtcgactttgcctgctggtgttcctacaagtatctgaacgcaggtgctggcgggatagccggtgcttttatccatgagaaacacgcccacacaataaagcccgcacttgtgggatggtttggtcacgaactgtcaaccaggtttaagatggacaacaaactgcaattgattcctggagtctgcggcttccgaatctctaatcctccaattttgctggtgtgttctctccacgcatccctggagatcttcaagcaggctactatgaaggcccttaggaaaaaatcagtactcctgacaggctacctggagtacctcatcaagcacaattacggcaaggacaaagcagccactaagaaacccgtcgtgaacattataactccgagtcacgtggaggaacggggatgtcagcttactatcacattctcagtacccaataaagatgttttccaggagctcgagaagaggggtgtggtttgtgataaaagaaacccaaacggaattagagtggcaccggtgcccttgtacaacagtttccatgacgtatacaagtttaccaaccttctgaccagcatccttgactctgctgagactaaaaat

SEQ ID NO: 77298 - DNA, 1395 bp, Artificial Sequence
  derived and/or modified sequence
atggagccaagctcattggaattgcctgctgacacggtgcaacgcatcgccgccgagctgaagtgccacccgaccgatgagcgggtggccctccacctggatgaagaagataagttgagacatttccgggagtgtttttacattccaaagatccaagatctgccaccagtggatctctcgctggtgaacaaggatgaaaatgcaatctactttctgggaaactcgctcggacttcagcctaagatggtcaagacctaccttgaagaagagctcgataagtgggctaagattgcagcttacggacatgaagtgggcaaaagaccgtggattactggagacgaatccatcgtgggcctgatgaaagatatcgtgggagcaaatgaaaaggagattgcacttatgaacgcacttaccgtcaatcttcatctcctgatgctcagctttttcaaacctactccaaagcggtacaaaattcttcttgaagcgaaggcattcccttcggatcattacgccatcgaatcgcagctgcagcttcacggactgaacatcgaagaatcaatgcggatgattaagccccgggagggtgaagaaaccctgcgaatcgaggacatcctcgaagtcattgaaaaagaaggcgatagcattgcggtcatacttttcagcggagtgcatttctacaccggacagcactttaacattcccgcaattactaaggctggacaagccaaggggtgttatgtgggatttgatcttgcgcacgcagtgggcaacgtggagctgtacctgcacgattggggagtggattttgcttgctggtgttcgtacaaatacctgaatgccggtgcaggaggtattgccggagcatttatccatgaaaaacatgctcataccatcaagccggcactggtgggctggttcggacatgaattgtcaaccagattcaagatggacaacaaactccagctgataccgggtgtgtgtggctttagaatttccaaccctccgatacttctggtgtgttcgcttcatgcatccctggaaatctttaagcaggccactatgaaagctctccggaagaagagcgtcctcctgaccgggtaccttgagtacctgattaaacacaactacggaaaggacaaggccgcaaccaaaaagcctgtggtcaacattatcaccccctcacacgtggaagagaggggttgtcagctcaccattactttttctgtcccgaacaaagacgtgttccaggaacttgaaaagcgaggtgttgtgtgtgacaaacgtaatccaaatggtattagagtggcaccagtgcccctgtacaatagcttccatgatgtttacaagtttactaatctgctgacttcgattcttgacagcgccgaaaccaaaaac

SEQ ID NO: 77299 - DNA, 1395 bp, Artificial Sequence
  derived and/or modified sequence
atggagccctccagtctcgagcttcctgcggatactgtgcagaggattgcggccgaactgaaatgtcatcctactgacgaacgagtcgccctacacttggatgaagaagacaaactccgccattttagagagtgtttctatatcccaaagatccaggacctgcctcctgtggacctgagtctagttaataaggacgagaacgccatctattttttaggaaactctttagggttgcagcctaaaatggtaaagacctacctcgaggaagaactggacaaatgggctaagatcgcggcctatggacacgaagtaggcaagaggccatggattactggagatgagtcgatcgtagggttaatgaaggatatcgttggcgcaaacgagaaagagatcgccctgatgaatgccctgacagtgaacctgcaccttctcatgttaagcttcttcaagcccacgcctaaacggtacaaaattctcttggaagctaaggcatttcccagcgaccactatgccatagaaagtcagctgcagttacacggtttgaatatcgaggaatcaatgcggatgatcaagcctcgggagggagaggagacccttcgcatcgaggacatcttggaggttatcgaaaaagagggggattccattgctgtaattctgtttagtggcgtgcacttctatacagggcagcacttcaatattcctgcgattaccaaggccggtcaggcgaagggttgctacgtggggtttgaccttgcgcatgctgtgggcaacgtggagctatatcttcacgactggggcgtggactttgcatgctggtgcagttataagtaccttaacgccggggcagggggcattgcaggagcttttatccacgagaagcacgcccatacgataaaacccgccctagtaggctggttcgggcacgaacttagtacaagatttaagatggataacaagctgcagctgatcccaggcgtgtgtgggttcagaataagcaaccctcccatcctgctggtatgctccctgcacgcctccctagagatcttcaaacaggccacaatgaaagcactgcggaaaaaatctgtgttgctcactggatacctagaatacctcattaagcacaattatgggaaagacaaggctgccactaagaaacctgtagtaaacatcatcaccccaagccacgttgaagagagaggctgtcagctgactattactttttctgtcccaaacaaggatgtttttcaggaattggagaagaggggggtggtgtgtgacaagagaaatccgaatgggattcgcgtggctcccgtgccactctacaatagttttcacgacgtgtacaaattcactaacctcctgacaagcatacttgattctgccgagaccaagaac

SEQ ID NO: 77300 - DNA, 1395 bp, Artificial Sequence
  derived and/or modified sequence
atggagccaagctccctggaactgccagccgacactgtccagcggatcgctgcggagcttaaatgccacccgaccgacgaaagggtcgcactgcacctggacgaggaagataaactccgccatttccgggagtgcttttacatccccaaaatccaggaccttccacctgtggacctgtccctggtcaataaggacgaaaacgccatttactttctgggaaattccttgggactgcaaccgaagatggtcaaaacctacctggaggaagagctggataagtgggccaagatcgccgcctacggtcatgaggtcggaaagcgcccgtggatcaccggagatgagagcatcgtcggactgatgaaagacatcgtgggagcaaatgaaaaggagatagcacttatgaatgccctcactgtgaacctgcaccttcttatgctctcctttttcaagccgactcctaagcggtacaagatccttctcgaagcgaaagccttcccaagcgaccattacgcgatcgaatcgcaactgcagctgcacggcctgaacatcgaggaatcgatgcgcatgatcaagccacgcgaaggcgaagaaactctccgaatcgaagatatcctcgaagtgatcgagaaggagggagacagcatcgctgtgatcctgttcagcggcgtgcacttctataccggccagcactttaacatcccagccattactaaagccggtcaagctaaaggatgctacgtcggctttgacctggcccacgccgttggcaacgtggagctctacctgcacgactggggcgtggacttcgcatgctggtgttcctacaaatacttgaacgcgggagccggcggcatcgccggcgccttcatccacgaaaagcacgcccacaccatcaagccagctctggtgggatggtttggacatgagttgtcaactcgcttcaaaatggacaacaaactccagctcatccctggagtttgtggttttcgcatctcaaatccgccgatccttctcgtgtgctccctgcatgcgtcgctcgaaatcttcaaacaggccactatgaaggccctcagaaagaaaagcgtgttgctcaccggctacctggagtacctgattaagcacaattacggaaaggataaggcggcgaccaagaaacctgtggtgaacatcatcactccgtcccacgtcgaggaaagaggatgccagctgactatcaccttctccgtgcccaacaaggacgtctttcaggaactggagaagcggggagtcgtctgcgataagcgcaatccgaacggaatccgggtggcgcccgtgccactgtacaatagctttcacgatgtgtacaagtttactaatctccttacctccattcttgacagcgcagagacgaagaac

SEQ ID NO: 77301 - DNA, 1395 bp, Artificial Sequence
  derived and/or modified sequence
atggagccaagttcgctggagctaccagcagatacagtgcaaaggatcgctgccgagttaaagtgtcatcccacagacgagcgggtggcccttcacctggacgaggaagataaactacgtcatttccgggagtgtttttatatccctaaaatccaagacctaccccccgtggatcttagtttggtgaataaggacgagaatgctatttattttctggggaactctttgggactccagcctaaaatggtgaagacatacctagaagaggaattggataagtgggctaagattgcagcttatggtcacgaggtgggaaagagaccttggattacaggggatgaaagcatagttggcctcatgaaggacattgttggcgccaacgaaaaggagatcgctctcatgaatgctttaacggtgaacctccatctgcttatgctgagcttcttcaagccgacccccaaacggtacaaaattctgctggaggccaaagctttccctagcgaccactacgctattgaatcacagctgcagctgcatggattgaacattgaagaaagtatgagaatgattaaacctagggaaggcgaggagaccctcagaatagaggatattctggaggttatcgagaaagagggagactcaatagccgtaatcctgttctcgggggtacacttctataccggccaacattttaacatccctgctatcaccaaagctggtcaggccaaaggctgctatgtgggattcgacttagcccatgccgtggggaacgtggaactctacttgcacgactggggggtggacttcgcgtgttggtgcagttataaatatcttaacgcaggggcgggcggaatcgccggcgcattcatccatgagaagcacgctcataccatcaaaccggccttggtgggatggttcgggcacgaactgtcgaccaggttcaaaatggataacaaactgcagctcattcctggcgtgtgcggatttcgcatctccaatccaccgatcctcttggtgtgtagcctgcatgcatctctggagatcttcaaacaggccacgatgaaagctctgcggaagaagtcagtgctcctaacgggctatctggagtaccttatcaagcacaactatggcaaagacaaggctgccactaaaaaaccggtcgtcaacatcataacgccctctcatgtggaggagcgggggtgccagttaactatcaccttctccgtccctaataaggacgtcttccaggaactggaaaagaggggtgttgtctgtgataagaggaatcccaatggaattcgagttgcgcccgtccccctgtacaatagtttccatgatgtgtataagtttacaaacctgctgacgtcaatactggacagtgccgagaccaaaaac

SEQ ID NO: 77302 - DNA, 1395 bp, Artificial Sequence
  derived and/or modified sequence
atggagcccagctctctggagctcccagcagatacagtgcagaggatagctgccgaactgaagtgccacccaactgacgagcgagtggctctccacctggatgaggaggacaagctgagacactttcgggaatgcttctatatccccaagatacaggacctcccccctgttgacctgagcctagtaaataaagacgagaatgcaatctacttcctcgggaactcccttggcctgcagcccaaaatggtaaaaacttacctcgaggaagagctcgacaagtgggcaaagatcgccgcatacggacacgaagtgggcaagcgcccctggatcacgggcgacgaatctatcgtggggcttatgaaggacatagtgggcgcgaatgagaaggaaattgctctcatgaatgctctgacggtgaatctgcatctcttgatgctctccttctttaaacccaccccaaagcgctacaagatattgctggaagccaaagcctttccctcagatcactatgcaatcgaaagtcagctgcagttacacgggctgaatatcgaggaatcgatgcgaatgattaagcctagggagggggaagagacgctccgcatcgaagacattctggaagtcattgagaaggagggagattctatcgccgtgatccttttctctggcgttcacttttatacaggccagcatttcaatattccggccatcacgaaggccggacaggctaagggctgttacgtcggcttcgatctcgctcatgcagttgggaacgtcgagctgtatctacacgactggggagtagatttcgcctgttggtgctcctacaagtatctgaacgcaggtgcgggcggtatcgccggcgcatttattcacgagaaacacgctcacaccattaagcctgctctcgtaggctggttcggtcacgaactctctacaaggttcaagatggataacaagctgcagcttattccaggagtgtgtggcttccgcatttctaacccacctattctgcttgtatgctcccttcacgcctccttggagatttttaagcaagccactatgaaggctctgcgtaaaaaatctgtgctgcttaccgggtacctggaatacctgataaagcacaactatggaaaagacaaagccgccactaagaagcctgtggttaacatcatcaccccttctcatgtggaggagagaggatgccagctgacaataacctttagtgtacccaacaaggacgtcttccaggaattagagaaacgtggagtcgtgtgcgataagaggaaccctaacggtatccgggtagcacctgttcctttgtataattccttccatgacgtgtacaagttcactaacctgcttacatccatactggattcggccgagacaaagaat

SEQ ID NO: 77303 - DNA, 1395 bp, Artificial Sequence
  derived and/or modified sequence
atggaaccgtccagcctcgaactgcctgcagacaccgtgcaacggatcgcagccgagttgaagtgtcatcctaccgacgaacgggtggcactgcacctggacgaggaagataagctgcgccactttcgcgagtgtttctacattcctaagattcaagatctgccaccggttgatctgtcgctggtcaataaggacgaaaacgcaatttactttctgggaaactccctgggcctccagcctaagatggtcaagacgtaccttgaggaagagctcgacaaatgggccaagattgccgcatacggtcatgaagtcggaaaacgcccttggattaccggtgatgaatcaattgtgggactcatgaaggatatagtgggagcgaatgagaaggaaatcgccctgatgaacgcactgaccgtcaaccttcatcttctgatgctctcctttttcaagccaactcccaagagatataagattttgctggaggcaaaagcattcccatccgaccactacgccattgaatcccaactgcagcttcacggcttgaatatcgaagagtcgatgagaatgattaagccccgggaaggggaggaaaccttgagaatcgaggatattctcgaagtgattgaaaaggaaggagattccattgcagtgatcctgttttccggagtccatttctacactgggcaacatttcaatattcctgccattactaaggccggccaggcaaagggatgttacgtcggtttcgatcttgcgcacgcagtgggaaacgtggagctctacctccacgactggggcgtggatttcgcttgctggtgttcgtacaagtacctgaatgcaggagcaggcggaatagccggcgcctttatccacgaaaagcacgcccatactatcaaacccgcgctggtcggatggtttgggcatgaactttccactagatttaagatggacaataaactgcagcttattcctggggtgtgtggtttcagaatctctaaccccccaatattgctggtctgttcgctccatgcttccctcgagatattcaaacaagcaaccatgaaagcacttcgaaagaagtccgtccttctgacgggatacctggaatacctgataaagcacaattacggaaaagataaagcagcaaccaaaaagcctgtcgtgaacatcatcactccttcccacgtggaagaacggggatgccagcttaccatcactttttcagtccctaataaggacgtctttcaagaactcgagaagagaggggttgtttgtgacaagaggaaccctaatggaatcagagtggcacctgtgcccttgtacaacagttttcatgatgtgtacaagtttaccaatcttctgacttcgattcttgacagcgcagaaacgaagaat

SEQ ID NO: 77304 - DNA, 1395 bp, Artificial Sequence
  derived and/or modified sequence
atggaaccgtcgtcgctagaactaccggcggatacggtacaacgaatagcggcggaattaaaatgtcatccgacggatgaacgtgtagcgttacatctagatgaagaagataaactacgacattttcgtgaatgtttttatataccgaaaatacaagatttaccgccggttgatctatcgttagtaaataaagatgaaaatgcgatatattttttaggtaattcgttaggtctacaaccgaaaatggtaaaaacgtatttagaagaagaactagataaatgggcgaaaatagcggcgtatggtcatgaagtaggtaaacgtccgtggataacgggtgatgaatcgatagttggtttaatgaaagatatagttggtgcgaatgaaaaagaaatagcgctaatgaatgcgttaacggtaaatctacatctattaatgttatcgttttttaaaccgacgccgaaacgatataaaatactactagaagcgaaagcgtttccgtcggatcattatgcgatagaatcgcaactacaattacatggtttaaatatagaagaatcgatgcgaatgataaaaccgcgtgaaggtgaagaaacgttacgtatagaagatatactagaagtaatagaaaaagaaggtgattcgatagcggtaatactattttcgggtgtacatttttatacgggtcaacattttaatataccggcgataacgaaagcgggtcaagcgaaaggttgttatgtaggttttgatctagcgcatgcggtaggtaatgtagaactatatttacatgattggggtgttgattttgcgtgttggtgttcgtataaatatttaaatgcgggtgcgggtggtatagcgggtgcgtttatacatgaaaaacatgcgcatacgataaaaccggcgttagttggttggtttggtcatgaactatcgacgcgatttaaaatggataataaactacaactaataccgggtgtttgtggttttcgaatatcgaatccgccgatattattagtttgttcgttacatgcgtcgttagaaatatttaaacaagcgacgatgaaagcgttacgtaaaaaatcggtactactaacgggttatttagaatatttaataaaacataattatggtaaagataaagcggcgacgaaaaaaccggtagtaaatataataacgccgtcgcatgttgaagaacgtggttgtcaattaacgataacgttttcggtaccgaataaagatgtatttcaagaactagaaaaacgtggtgttgtttgtgataaacgaaatccgaatggtatacgtgttgcgccggtaccgttatataattcgtttcatgatgtatataaatttacgaatctattaacgtcgatactagattcggcggaaacgaaaaat

SEQ ID NO: 77305 - DNA, 1395 bp, Artificial Sequence
  derived and/or modified sequence
atggaaccgagttccctcgagcttccagcagacacagtccagagaatcgctgcggagcttaaatgccaccccactgatgaacgggtggcgctgcatttggatgaggaagataagttgcggcacttccgcgaatgcttctacattcctaaaattcaggatctaccacccgtcgacctctcactggtgaataaggacgaaaacgcaatatattttctaggtaactcgctcggtcttcagcctaagatggttaaaacctatcttgaagaggaactagataaatgggctaagatcgccgcatacggtcacgaggttggtaaacgaccttggattacgggcgacgagtccattgtggggctgatgaaagacatcgtgggggcgaatgagaaggagatcgcattgatgaacgctcttaccgtgaacttgcacctgctaatgctgtcgttctttaagccgacccctaagcgatataagatcctgctggaagccaaagccttcccatccgaccactacgctatcgagtcgcagctccagctacatggactcaatattgaggagtcaatgagaatgatcaaaccacgggagggagaggagactctccgcattgaggatattctcgaagtgatcgagaaagaaggggacagcattgccgtaatactcttctccggggtgcacttctacacaggccagcatttcaacatcccggcaatcacgaaggccggccaggcaaaaggatgctatgtgggctttgacctggcccatgctgtgggcaatgtggagctgtatctccacgactggggcgtggatttcgcatgctggtgctcttataaatatctgaacgccggagctggtgggattgcgggcgctttcatccacgaaaagcacgctcacaccatcaagcctgccctcgtcggctggttcgggcacgagctgagtacgcggttcaaaatggataacaaactgcagctaattcccggcgtgtgcggtttccggattagtaaccccccaattctgttggtgtgcagtctacacgctagcctcgaaatatttaaacaggctacaatgaaagccctacgaaagaagtctgtgctgttaaccggctacctagagtacctgattaagcataattatggtaaggacaaagccgctacaaaaaagcctgtagtcaacataattactcctagtcatgtggaagagagggggtgtcaactgacaatcacattttccgtacctaataaagacgttttccaggaactggagaaacgcggtgtggtctgtgataaacggaatcccaatggaatcagagtggcccctgttcccctgtacaactcattccatgatgtgtacaagttcacaaatttattgacatccatcctagattccgccgaaaccaagaat

SEQ ID NO: 77306 - DNA, 1395 bp, Artificial Sequence
  derived and/or modified sequence
atggagccgagttctcttgagctcccagccgacacagttcagcgtattgccgctgaacttaagtgccaccccacggatgagagggtggcccttcatctggatgaagaagacaagttgaggcacttccgcgaatgcttttacattccaaagattcaggatctccctcccgtggacttgagtttagtgaacaaggatgagaatgccatatacttccttggaaatagcctcggcttacagccaaagatggtcaaaacctacctggaggaggagctggacaagtgggcaaaaatcgccgcctacggccatgaggttggaaaaaggccgtggatcaccggagacgagagcattgtcggccttatgaaagacatcgttggcgccaacgaaaaagagatcgctttgatgaatgctctgacagtgaatctgcacctcctgatgctatctttttttaagcctactcctaagcggtacaaaatactgcttgaggccaaggcctttccctcagatcactatgcgattgagagccagttacaattgcatggactgaacatcgaggagagcatgcggatgatcaagccacgggagggtgaggaaacgttgagaattgaggatatcttagaggttatcgagaaggagggggactcgattgccgtcatccttttctcaggggtacacttctacacaggtcagcattttaatataccggccataaccaaggccggtcaggcaaaggggtgctacgttggtttcgacctagcccacgccgtcggcaacgtggagctctacctgcacgattggggcgtagactttgcatgctggtgtagctacaagtacttaaacgcaggtgccgggggcattgccggcgccttcatccatgaaaaacacgcccacaccatcaagccagctttagttggctggtttggtcatgagcttagtaccagatttaagatggacaacaaattacagcttataccaggagtgtgtggttttcgaatttctaatcctcccatactccttgtttgcagcctgcacgccagcctggagattttcaagcaggccaccatgaaagccctgcgaaagaagtcagtgttgctgactggttacctggagtacctgatcaagcataattatggaaaagataaggccgcaaccaagaaaccagtggttaatattataacgccctcccacgtcgaggaacgcggctgccagctcacaattactttttcggtgcccaacaaggacgtgttccaggagctggagaaaagaggtgtcgtgtgcgacaagcgcaacccaaatggaatccgcgtggcccccgttcccctctacaactcctttcacgatgtgtacaaattcacaaacctgctaacaagtattttggactcagctgagaccaagaat

SEQ ID NO: 77307 - DNA, 1395 bp, Artificial Sequence
  derived and/or modified sequence
atggagccttcatcgcttgaactgcccgctgatactgtccaacgcatagccgctgagctgaagtgtcaccccactgacgagcgcgtggccctgcacctggatgaggaggataagttgcgacacttccgcgagtgcttctacatccccaagatccaagacctgccgccggtcgacctctcgcttgtcaataaggacgagaacgcaatttacttcctaggcaactctctgggactgcagccgaagatggtgaaaacgtacctcgaagaagagctggacaagtgggccaagatcgccgcctacggacatgaggtcggtaagcgcccctggatcactggtgacgaaagcattgtggggctcatgaaggatattgtaggagccaacgagaaggagatcgccctcatgaacgccctcaccgttaacctgcatttgctgatgctgagcttcttcaagcccaccccaaagcggtacaaaatcttattggaagctaaggcctttccctctgatcactacgctatcgagtctcagttgcagctgcacggcttgaacatcgaagagtccatgaggatgataaagccccgtgagggtgaggagacccttcgcattgaggacatcctggaggtcatcgagaaagaaggtgactccattgcggtcatattgttctctggtgtccatttctacacgggtcagcacttcaacatccccgcaatcaccaaggctggccaggctaaaggatgctatgtgggcttcgaccttgcgcatgccgtgggtaatgtggagctctatctgcacgattggggcgtcgacttcgcctgctggtgttcttacaagtatctcaacgctggtgccggcggaattgcgggtgcgttcattcacgagaagcatgcgcacactatcaagccggccctggtgggatggttcggccacgagttgagcacgcgcttcaagatggataacaaactccagttgataccgggcgtgtgtggcttccgcatctcgaacccccccattctcctcgtctgtagtctccacgcctcgctcgagatcttcaaacaagccactatgaaggcccttcgcaagaagtctgtgctgttgaccggttacctcgaatacctcatcaaacacaactacggaaaggacaaagccgccacgaagaaacccgtggtgaacataattaccccctctcatgtggaggagcgcggctgccagttgaccatcactttctccgtgcccaataaggacgttttccaagagctagagaagaggggagtagtatgcgataaacgtaatccgaacggaattcgcgttgcacccgttccgttgtacaacagcttccacgacgtctacaagttcaccaatcttttgaccagcatcctggattccgccgagaccaagaac

SEQ ID NO: 77308 - DNA, 1395 bp, Artificial Sequence
  derived and/or modified sequence
atggagcccagcagcctggaactgcccgcagacacagtacagcggatcgccgccgagcttaagtgccatcctacagacgaacgcgtcgccctacatctagatgaggaagacaagcttaggcactttagggaatgcttctatatcccaaagattcaggatttacctcctgttgatctctccctcgtgaacaaggatgagaacgctatctacttcctcgggaactcccttggcctccagcctaagatggtgaagacttatctcgaagaagaacttgacaagtgggcaaagatcgccgcttatggacacgaagtcgggaagaggccttggatcacaggggacgagagtatagtcggcctgatgaaggatatcgttggagccaacgagaaggaaattgcacttatgaatgctctcactgtgaatttgcacttacttatgctttctttttttaaaccaactccaaaacggtacaagatcctactcgaggcgaaggctttcccgtcagaccattacgctattgagagccaactgcagctgcacggtctgaacattgaggaaagtatgagaatgatcaagcccagagagggggaagagactctgagaatcgaggacatcctggaggttatagagaaggaaggagattctatcgcagtgatcctttttagcggcgtacacttctacaccggccaacacttcaatattcctgcaattactaaggctggtcaggccaagggatgttacgttggatttgacctggcacacgctgtcgggaatgtagagctctaccttcatgactggggggttgactttgcttgctggtgctcctataaatatctcaatgccggtgctggcggcatagccggtgccttcatccacgagaaacatgcccacacgataaagccggccctcgttgggtggttcggccacgagcttagcaccaggttcaagatggacaataagctgcaactcatcccaggtgtgtgtggctttaggatcagtaacccgcctatcctgctggtgtgtagcctgcatgcaagcttggaaattttcaagcaggctacaatgaaagcccttcggaagaagagcgtccttcttaccgggtacctggaatatttgatcaaacataattatggaaaggacaaggctgctaccaaaaagcccgtagtgaatatcatcacacccagccatgtggaggagcgaggatgccagctcacaattacgttctcagttcccaacaaagacgtttttcaggagctagagaagagaggtgtcgtgtgcgataagaggaacccaaacggcatcagggtcgcacctgtacctttgtacaactcttttcacgatgtctataagttcacaaacttactgacctccatcctagactccgctgaaacgaaaaac

SEQ ID NO: 77309 - DNA, 1395 bp, Artificial Sequence
  derived and/or modified sequence
atggagccttcgtcgctggagcttcctgctgacaccgtccaaagaatcgccgctgaactgaagtgtcatccgacggatgaaagagtggccctccatctcgatgaagaagataagttgcgccacttcagggaatgtttctacattcctaagatccaggatctgccccccgtggatctctctcttgtgaataaggatgagaacgctatctactttctgggcaactccctcggacttcagccgaaaatggtcaagacctatttggaggaagagctggacaagtgggcaaagattgcagcatacggccatgaagtgggaaaaagaccgtggattacgggtgatgagtccattgtgggccttatgaaagacatcgtgggtgccaatgagaaggagattgcgcttatgaatgccctgaccgtgaatctgcacttgctgatgctgtcatttttcaagcctactcctaaacgctacaaaattcttcttgaggcaaaggcgtttccctcagaccattacgcaatagaaagccaactccaactgcacggactgaacattgaggagtcaatgagaatgatcaagcctagggagggcgaagaaactcttcggatagaagatattcttgaagtcattgaaaaagaaggcgatagcattgccgtcattctgttctcgggggtgcatttctacactggtcaacatttcaacattcctgcaataacgaaagctggacaagcaaagggttgttacgtggggtttgatttggctcatgcagtgggtaatgtggaattgtatcttcacgattggggagtcgatttcgcgtgttggtgttcctacaagtatctgaacgctggagctggaggcatcgccggtgcctttatacatgagaaacacgcacatactataaagccagcacttgttggctggtttggtcacgaactttctactcgttttaagatggacaataagctgcagttgatcccaggagtctgcggttttagaatcagcaacccaccaattttgctcgtgtgctcgctgcacgcctcgctggagatcttcaagcaggcaactatgaaggcactccgcaagaagtccgtgctgttgaccggatacctggaatacctgattaaacataactacgggaaagacaaggcagcgaccaagaagccagtggttaacattatcactcccagccatgtcgaagaacggggatgtcaattgaccattaccttttcggtgcccaacaaggacgtgttccaggaacttgagaagcggggggtggtgtgcgacaaaaggaatccaaacggtatacgagtcgcaccagtgcccctttacaactcgtttcatgacgtgtacaagtttaccaaccttcttacctccatcctggattctgcggaaaccaagaac

SEQ ID NO: 77310 - DNA, 1395 bp, Artificial Sequence
  derived and/or modified sequence
atggagccttcctcgctcgaactccctgcagacaccgtccaaaggattgcagcggaactcaagtgccaccctaccgacgaaagagtggcacttcatctcgatgaagaggataagctgaggcacttcagagagtgcttctatatccctaagattcaagatctccctcccgtggatttgtctttggtcaataaggatgaaaatgcaatttactttttggggaacagcctgggccttcagcccaagatggtcaagacgtaccttgaagaagaattggataaatgggccaagattgcagcctacgggcatgaagtgggtaagcgtccatggatcaccggagacgaaagcatcgtgggacttatgaaggacatagtgggagctaacgagaaggagattgcccttatgaacgccctcaccgtgaacctgcacctccttatgctttcctttttcaagccaactcccaagaggtataagatccttctggaagcaaaggcgttccccagcgaccactacgccatcgagtcgcaacttcaacttcatggactgaacatcgaggagtcaatgcgcatgattaagccaagggagggagaagaaaccctcagaattgaggatatactggaagtgattgagaaggagggagatagcattgctgtgattcttttttcaggggtccacttttacaccggtcaacactttaacattcccgcgattacgaaggcaggacaagccaagggttgctacgtggggttcgacctggcccatgcagtgggtaacgtcgagctgtaccttcacgattggggggtcgatttcgcatgttggtgttcatacaagtacttgaacgcaggtgccggaggaatagccggtgcctttatccatgaaaagcatgcacacactatcaaacctgcacttgtggggtggtttggacatgagctgagcactagatttaagatggataacaagctccagcttataccaggcgtctgtggattcagaatttcgaacccgcccattctccttgtttgttccttgcatgcttccctcgaaatctttaagcaggcaactatgaaagccctgcgtaagaagagcgtgctgctgaccggttacctggaatacttgatcaaacacaattacggaaaagacaaggccgcaacgaagaaaccagtcgtgaatatcataaccccgtcgcacgtggaggagcgcggatgtcagctcactattaccttttccgtccctaacaaagacgtttttcaggagctggaaaagcgtggagtcgtgtgtgacaaacggaaccctaacggtattagagtcgccccagttcctctctacaactcctttcatgacgtgtacaagtttaccaacctgctcaccagcattttggattcggcagaaactaagaac

SEQ ID NO: 77311 - DNA, 1395 bp, Artificial Sequence
  derived and/or modified sequence
atggaaccgtcgtctctggaacttccggccgacactgtccagaggatcgccgccgagctgaagtgccacccaaccgacgagcgcgtggccctgcatcttgacgaggaggacaagctgaggcatttcagggaatgcttctacatccctaagatccaagaccttccgcctgtggatctttccttggtgaataaagacgaaaacgcgatctacttcctggggaatagcctgggactgcagcccaaaatggtaaagacctacctggaagaagaattggacaaatgggcgaagattgcagcgtacgggcatgaagtgggcaagaggccttggatcaccggggacgaaagcattgttggcctgatgaaggatatcgtgggggcgaatgagaaagagatcgcactgatgaatgctttgaccgtcaacctgcatctgctgatgctctccttcttcaagccgaccccaaaacggtacaaaatcctgctggaggctaaggcgttcccgtccgatcactacgccatcgaatcccaattgcagctccacgggttgaacatcgaggagagcatgcggatgatcaagccgcgcgagggtgaggaaaccctgcgcatcgaggacatcctggaggtgatcgaaaaggaaggagattcgatcgccgtgatcctcttctcaggagtgcatttctacaccggacagcacttcaacatcccagccatcaccaaggctggtcaagcaaaaggctgctacgtgggattcgatcttgcgcatgcagtcggcaacgtggaactgtacctgcatgattggggcgtggattttgcgtgctggtgctcctacaagtacttgaacgccggcgcgggtggaatcgccggagcgttcatacacgaaaaacacgcacatactatcaaaccggctctggtgggatggttcggacacgagctctcgacccgtttcaagatggataacaagctgcagctgattccgggagtgtgcggttttcgcatcagcaaccctcctatcctcctggtctgttctctccatgcgtcgttggaaatcttcaaacaggccaccatgaaggctctgcggaagaaatcagtgctgctgactggatatttggagtacctgatcaagcacaattacggtaaagacaaggccgccaccaagaagccggtggtcaatatcatcaccccgtcacatgtggaggaaagaggatgccagctgactatcaccttctcagtcccaaacaaagatgtgttccaagaactcgagaagcggggagtcgtctgcgataagcgcaatccgaacggaatccgcgtggccccggtcccactctacaattcgttccatgacgtctataagttcaccaacctgctgacttccattttggactccgctgagactaagaat

SEQ ID NO: 77312 - DNA, 1395 bp, Artificial Sequence
  derived and/or modified sequence
atggagccatcttcactcgagctccctgctgacaccgtgcagcggatcgcagcggagttgaagtgtcatcccaccgacgagcgggtagccctgcatctagacgaggaagataagctccgtcactttcgggagtgtttctacattcctaaaatacaagacctgccaccggtagatctgtctttggtgaataaagatgagaatgccatctacttcctgggcaattctctcggactgcagcccaaaatggtgaagacttacttggaagaggagctggacaagtgggctaagattgccgcatatggccacgaggtcggcaaacgaccctggataacaggggatgagagcatcgtgggattgatgaaggatatcgtaggtgccaacgagaaagaaatcgctctgatgaacgctctcacagtgaatctgcatctgttgatgctgtcgtttttcaaacccacgcccaaacgctacaaaattctattggaggctaaggcattccctagcgaccattacgccattgaatcgcaactccagctgcacggactgaacatagaagagagtatgagaatgatcaagccaagggagggcgaagaaacgctgagaatcgaggatatactggaagtcattgagaaagagggggatagcattgccgtgattctgtttagcggtgtacacttttataccggccagcactttaacatccctgccattactaaagctgggcaggcgaaggggtgttacgtcggcttcgatcttgctcatgccgttgggaacgtggagctctatctccacgactggggcgttgattttgcttgttggtgttcttacaagtatctgaatgccggagcaggaggaatagccggggcctttattcacgagaagcatgcccataccatcaagccagcccttgtgggctggtttggccatgagctgagcacacggtttaaaatggacaacaaactccaactcattcccggggtatgcggattccgcataagtaatccaccgattctgctcgtatgcagtctgcatgcatctctggagatttttaagcaggcaaccatgaaggccctccggaagaaaagcgtcctcttaacaggatatctcgagtacttgatcaaacataactatgggaaagacaaggctgccactaagaaaccagtggtgaacataatcacgcccagtcacgtcgaggagcgcggttgccaactgactatcacattctcagttcctaataaagatgtgttccaggaactggaaaagcggggggtcgtatgcgataagaggaaccccaacggcatccgggtggcaccagtgcccctctataatagcttccatgatgtctataagttcacaaacctgcttacgagcattctcgattcagctgaaactaaaaac

SEQ ID NO: 77313 - DNA, 1395 bp, Artificial Sequence
  derived and/or modified sequence
atggaaccatcgtcgctcgaactgccagcagataccgtgcagaggatagcagcagaactcaaatgtcacccaactgacgaaagagtcgcactccacctggatgaagaggataaactgcggcatttcagagagtgtttctacattcctaaaatccaagacctgccgcctgttgatttgagcctggtcaataaggatgaaaatgcaatctattttcttggaaactcccttggcctgcaaccgaagatggtcaaaacttatttggaagaggagttggataagtgggctaagattgcagcatacggtcatgaggttggaaagcgaccctggattaccggcgacgagtcaattgttggactcatgaaggatattgttggtgccaacgaaaaggagattgcccttatgaacgcacttactgtgaacctgcacctgcttatgctttcctttttcaagccaacgcctaagagatacaagatcctgcttgaggcgaaggcattcccttccgatcactacgccatcgaatcgcagctgcaattgcacggccttaacatagaggaatcaatgcgaatgataaaacctcgggaaggtgaggaaactcttagaattgaagatattctggaagtcatcgaaaaagaaggagacagcattgccgtgattctcttctccggagtccacttctataccggacaacactttaacattcccgcaattaccaaggccggccaagcaaaaggctgttacgtgggattcgatctggcacatgccgtgggtaacgttgaactgtaccttcatgattggggggtggactttgcatgctggtgctcctacaagtaccttaatgcgggcgcaggagggatcgcaggggctttcatccatgagaagcacgctcataccataaaacccgcgcttgtgggttggttcggtcatgaactctccaccagatttaagatggacaacaagctgcagctgatacctggagtgtgcggattcaggatctcaaaccccccgattctcctggtctgctcgttgcatgcatcattggagatctttaaacaagcgacgatgaaggcgctgagaaagaagtcagtgttgctcaccggttacctggaatacctgataaaacataactacgggaaggacaaggccgcaaccaagaagccagtcgtgaatatcattacgccatcacatgtggaagaacgcggttgccagcttactatcactttctcggtgcctaataaggacgtgtttcaggaactggaaaaacgaggagtggtgtgtgataaaagaaacccaaatggaatccgtgtggcgcccgtccctctgtacaactcgtttcacgacgtgtacaaattcaccaatcttctgacctcgattcttgatagcgccgagactaaaaac

SEQ ID NO: 77314 - DNA, 1395 bp, Artificial Sequence
  derived and/or modified sequence
atggaaccttcgtcccttgagctgcccgcagataccgtgcaacgaattgcagcagagctgaagtgccatcctactgacgaacgtgtggcattgcacctggacgaagaagataaactgagacatttcagagaatgtttttacattccaaagatccaggatctgccacctgtcgatctttccctcgtgaataaggatgaaaatgcaatttacttccttggtaactcgcttggcctccagcctaaaatggtgaaaacctacctggaggaggaactggataagtgggctaagatagccgcatatggacacgaggtcggtaaacgtccatggataactggtgatgaatcaattgtcggcctcatgaaagacattgtgggtgcaaacgaaaaagagattgcactgatgaatgcccttactgtcaacctgcatcttcttatgctcagcttctttaagcctacgcctaagagatacaaaattctgctggaagcaaaggcttttccctccgaccactacgcaatcgagtcccaactgcaactgcatggtctgaacattgaggagtcgatgaggatgatcaagccgagagagggtgaagagacgcttcggatcgaagatattctggaagtgatcgagaaagaaggtgattcgatcgcggttatactgttttccggcgtgcacttctataccgggcaacacttcaatatccccgcgattaccaaggcaggtcaggcaaaagggtgctacgtgggctttgaccttgcacacgcagtgggtaatgtggagctgtacctccacgactggggtgttgacttcgcatgttggtgcagctacaagtaccttaatgcaggagccgggggaatcgctggagcatttatccatgagaagcatgcgcataccattaagccggcacttgtgggatggtttggacacgaactctcaacccgttttaagatggacaataaacttcaactgatcccaggcgtctgtggatttagaatttctaacccacccattctgctcgtgtgcagccttcatgcatcgcttgagatctttaagcaagcaactatgaaggcactgcgcaaaaagtcagtgcttctgaccggatatctggaatacctcattaagcacaactacggtaaggacaaagcagccactaagaagccggttgtgaacatcataacgccgtcccacgtggaagaacgaggttgtcagctgactatcacgttttcggttcctaacaaggatgtctttcaagaacttgaaaagcgtggggtggtatgtgataagcggaatccgaacgggattcgggtggcccctgtgccactctacaatagtttccatgacgtctacaaattcactaacctcctgacttcgattctcgactcggcagaaaccaaaaac

SEQ ID NO: 77315 - DNA, 1395 bp, Artificial Sequence
  derived and/or modified sequence
atggaacccagttctttggagttgccagccgacaccgtgcagcgtatagctgccgagctcaaatgccacccaaccgatgaaagggtggcactgcatttggatgaggaagataagctgcgtcatttccgtgagtgcttttatattccaaagatccaggatctccctccagtggaccttagcttggtaaacaaggacgagaatgctatctactttctgggtaattcactgggattgcagccaaagatggtgaagacataccttgaggaggaattggacaagtgggccaagatagctgcctacggtcacgaggtgggtaagcgtccatggatcactggtgatgagtctatcgtaggcttgatgaaggatatcgtcggcgccaacgagaaggagattgctctgatgaatgctctcaccgtaaaccttcaccttctgatgctgtctttcttcaaacctacaccaaagcgctataaaatcttgttggaagccaaggccttcccaagtgaccattacgcaatcgaaagccagttgcaattgcacggtttgaacatagaggagtccatgaggatgataaagcctagggaaggcgaagagacactgcgcatcgaggacatccttgaggttatcgagaaggagggcgatagcatcgctgtcatattgttctctggtgtacacttttataccggtcaacactttaatatccctgcaatcactaaagccggccaggctaagggctgttacgtgggattcgatcttgcccacgctgtaggcaatgttgagctgtatcttcacgactggggcgtggactttgcttgctggtgttcttataagtacctgaacgctggtgctggcggaatcgctggagctttcatccatgaaaagcacgcacacacaatcaagcccgctctggttggatggttcggtcacgagctttccactcgttttaaaatggacaacaaactgcagcttattcccggtgtgtgtggctttcgtatctctaacccccccattttgctggtgtgtagtctgcacgcctctctggagattttcaagcaagcaaccatgaaggcacttcgtaagaagtctgtactcctgacaggatacctggaatatctgataaagcacaactatggcaaggataaggccgccactaagaaacctgttgtgaacatcatcacaccttcacatgtagaggagagaggctgccagcttactattaccttttccgtgccaaacaaggacgtcttccaggagcttgagaagcgtggagtggtttgtgataagaggaaccccaacggtatcagagtggctcctgtgcctctgtacaacagcttccacgacgtctacaaattcacaaatctcctcacatcaattctggacagcgcagagaccaagaac

SEQ ID NO: 77316 - DNA, 1395 bp, Artificial Sequence
  derived and/or modified sequence
atggagccttcttcgctggaactcccagcagatactgtccagcggattgccgcagagcttaagtgtcaccccaccgatgaacgggtggcactccatctggacgaggaagacaagctacgccactttagagagtgcttctatattccaaagatccaggacctcccacctgttgatctctccctcgttaacaaagatgagaatgccatttacttcctcggaaacagcctgggactgcagcctaaaatggtaaagacctacctggaagaggagctagataagtgggctaaaatcgctgcctatgggcacgaagttggcaagaggccctggatcaccggggatgaatccatagtcggtttgatgaaagacatagtgggcgccaatgaaaaagaaatcgccctgatgaacgccctgaccgttaaccttcacctcctgatgctcagcttctttaaacccaccccgaaaaggtataagatcctcttggaagctaaagcgtttccctcagaccattatgccatcgagtctcagcttcaactacacggactgaacatagaagagtctatgcgtatgattaagcctagagaaggcgaggaaacgctgcggattgaggacatccttgaagtgatagagaaggaaggtgactcgatcgccgtcattctcttcagcggagtacatttttacactgggcagcacttcaatattcccgctataaccaaagccggccaggctaaaggatgctatgtggggttcgatctggcccacgcagttggaaatgtcgaactgtatttgcacgactggggcgtggactttgcatgctggtgcagctacaaatatctgaatgccggcgcgggagggattgcaggggcgttcattcatgaaaagcacgcccacactatcaagcccgcgttggttgggtggtttggacacgaactgagtacacggtttaaaatggacaacaagctgcagctgattcccggggtctgcggctttaggatcagtaacccacctatcttgcttgtgtgtagcctacatgcgtctctggagatcttcaaacaggctactatgaaggcattgcggaaaaagtcggtcctgctcactgggtacctcgagtatctgattaagcataactacgggaaggacaaggccgccaccaagaaacccgttgtgaatattatcaccccatcccacgtggaggagaggggctgccaactgaccatcacatttagcgtgccaaataaggacgtgtttcaggagctggagaagcggggtgtggtctgcgataaacgcaatccgaacggaatccgggtggcgccagtgccactatataattctttccacgacgtgtataaattcactaacctactgacatctatactggactccgctgagacaaagaac

SEQ ID NO: 77317 - DNA, 1395 bp, Artificial Sequence
  derived and/or modified sequence
atggagccgtctagtcttgagctgccggccgacaccgttcagcgtatcgccgctgagttgaaatgccaccctactgacgagagagtggctctccacctggacgaagaagataagctccggcattttagagagtgcttttacatccccaaaatccaagacctccctccagtagacctgtccctcgtgaacaaagatgaaaacgcaatctatttcctaggaaactcattaggtttgcaacccaagatggtgaaaacctatctggaggaagagctcgataaatgggccaaaatcgcagcttacggccatgaggtggggaaaagaccttggatcacgggagatgagtccatagtgggcctgatgaaggacatagtgggagccaacgagaaggaaatagccctgatgaatgcgttgaccgtgaacctacacttgctaatgctatccttcttcaagcccaccccaaagaggtacaaaattctactcgaggccaaggcctttccgtccgaccattacgccattgagtcccagcttcagctccatggcctgaatatcgaggaatcaatgaggatgatcaaacctcgggagggtgaggaaaccctgcggatagaggatatactggaagtcatagagaaggaaggagactccattgcggtaatcctgttctcaggcgtgcatttttataccggccagcatttcaatatccctgcaatcacaaaagccgggcaagccaaaggctgctacgttggcttcgatctggcccacgccgtggggaacgttgagctctatctccacgattggggtgtggattttgcttgttggtgtagctacaaatacttgaatgcaggtgctggcggaatcgcaggcgccttcatacacgaaaagcacgcccataccatcaagcccgcacttgtcggatggttcggccacgaactgtctactaggtttaaaatggacaataaactgcagttaatccccggggtttgtggattccggattagtaatcccccgattcttctggtgtgttcactgcatgcttcactcgagatttttaagcaggccacaatgaaggcactgcgaaagaaaagtgtcttactcacaggctacctggagtatctgattaagcacaactatgggaaggacaaggcagctacaaaaaagccagttgtgaacatcatcacaccctcacatgtggaggaaagaggatgccagctcacaattacctttagcgttccgaataaggacgtgtttcaggaactggagaagcgcggcgtcgtgtgtgataaacggaacccgaatggcatccgggtcgcaccagtccctctctacaattcgtttcacgacgtatataagttcactaacctgttgacttcgatcttagacagcgcagagactaagaat

SEQ ID NO: 77318 - DNA, 1395 bp, Artificial Sequence
  derived and/or modified sequence
atggaaccctctagtttggaactcccagcagacactgtacagaggattgctgcggaactgaagtgtcaccctacggacgaacgggtcgccctccatttggatgaagaggacaagttgcggcatttccgcgaatgcttctacatccccaaaattcaagatcttcctccagtcgacctttcactggtgaacaaagatgagaacgccatttactttctcggcaacagtttggggctgcaaccaaaaatggttaagacatatctggaagaggagctggataagtgggccaagatcgctgcttacggtcacgaagtcggtaaaagaccctggatcacaggcgacgaaagcatcgtgggcctgatgaaggacatagtgggcgcgaatgaaaaggaaatcgccttgatgaatgcactgactgtgaacctgcatctgctcatgctgtctttctttaagcccacaccgaaaagatacaagattctgttggaagctaaggcatttccaagcgaccattatgcgattgaaagccagctgcaactccatggattgaacatagaggaatctatgaggatgattaagcctagggagggcgaggagacactgagaattgaggatatcctcgaggtgatagaaaaggaaggggactccatcgcagtgatacttttctccggggtgcatttctatacagggcagcatttcaacatccccgcgatcaccaaggctgggcaggcaaagggatgctatgtggggttcgatctggcgcacgcagtgggcaatgtagaactgtacctccacgactggggggtggatttcgcatgctggtgctcttacaaatacctcaatgcaggcgctggagggattgctggggcttttatccatgagaagcacgcgcataccataaagcctgcgctggtgggttggtttgggcacgaactgtctacacggtttaagatggacaacaagctccagttgattccaggggtttgtgggttcagaatctccaatccaccaatcttgctggtatgcagcctgcatgcctctttggagattttcaagcaggccactatgaaggctctgcgcaagaagtccgtgcttcttactgggtacctggaatatctcattaaacataattatggtaaagataaggcggccactaagaaacccgtggtcaatattatcaccccttctcacgtagaagagcggggctgtcagctcacaatcacctttagcgtgcctaataaagacgtcttccaggagctcgaaaagcgaggtgtcgtctgtgacaagcgcaatccaaacggtatcagagtcgcaccagtgccattgtacaactcttttcacgacgtttataaatttacaaacttgctgacaagcatcctggatagcgccgagactaagaat

SEQ ID NO: 77319 - DNA, 1805 bp, Artificial Sequence
  derived and/or modified sequence
tggcatttgaaatggtgggcaggagcacatgttgcttaaatttctgacagtggctggagattaccgattggttaggggagaggaagtaaagtaaaatatttataaattctccactgggtggagtctgagcagttctttgaatttctcaccctaagatctggcctgtacattttcaaggaattcttgagaggttcttggagagattctgggagccaaacactccattgggatcctagctgttttagagaacaacttgtaatggagccttcatctcttgagctgccggctgacacagtgcagcgcattgcggctgaactcaaatgccacccaacggatgagagggtggctctccacctagatgaggaagataagctgaggcacttcagggagtgcttttatattcccaaaatacaggatctgcctccagttgatttatcattagtgaataaagatgaaaatgccatctatttcttgggaaattctcttggccttcaaccaaaaatggttaaaacatatcttgaagaagaactagataagtgggccaaaatagcagcctatggtcatgaagtggggaagcgtccttggattacaggagatgagagtattgtaggccttatgaaggacattgtaggagccaatgagaaagaaatagccctaatgaatgctttgactgtaaatttacatcttctaatgttatcattttttaagcctacgccaaaacgatataaaattcttctagaagccaaagccttcccttctgatcattatgctattgagtcacaactacaacttcacggacttaacattgaagaaagtatgcggatgataaagccaagagagggggaagaaaccttaagaatagaggatatccttgaagtaattgagaaggaaggagactcaattgcagtgatcctgttcagtggggtgcatttttacactggacagcactttaatattcctgccatcacaaaagctggacaagcgaagggttgttatgttggctttgatctagcacatgcagttggaaatgttgaactctacttacatgactggggagttgattttgcctgctggtgttcctacaagtatttaaatgcaggagcaggaggaattgctggtgccttcattcatgaaaagcatgcccatacgattaaacctgcattagtgggatggtttggccatgaactcagcaccagatttaagatggataacaaactgcagttaatccctggggtctgtggattccgaatttcaaatcctcccattttgttggtctgttccttgcatgctagtttagagatctttaagcaagcgacaatgaaggcattgcggaaaaaatctgttttgctaactggctatctggaatacctgatcaagcataactatggcaaagataaagcagcaaccaagaaaccagttgtgaacataattactccgtctcatgtagaggagcgggggtgccagctaacaataacattttctgttccaaacaaagatgttttccaagaactagaaaaaagaggagtggtttgtgacaagcggaatccaaatggcattcgagtggctccagttcctctctataattctttccatgatgtttataaatttaccaatctgctcacttctatacttgactctgcagaaacaaaaaattagcagtgttttctagaacaacttaagcaaattatactgaaagctgctgtggttatttcagtattattcgatttttaattattgaaagtatgtcaccattgaccacatgtaactaacaataaataatataccttacagaaaatctgatataa

SEQ ID NO: 77320 - DNA, 1398 bp, Artificial Sequence
  derived and/or modified sequence
atggagcccagcagcctggagctgcccgccgacaccgtgcagagaatcgccgccgagctgaagtgccaccccaccgacgagagagtggccctgcacctggacgaggaggacaagctgagacacttcagagagtgcttctacatccccaagatccaggacctgccccccgtggacctgagcctggtgaacaaggacgagaacgccatctacttcctgggcaacagcctgggcctgcagcccaagatggtgaagacctacctggaggaggagctggacaagtgggccaagatcgccgcctacggccacgaggtgggcaagagaccctggatcaccggcgacgagagcatcgtgggcctgatgaaggacatcgtgggcgccaacgagaaggagatcgccctgatgaacgccctgaccgtgaacctgcacctgctgatgctgagcttcttcaagcccacccccaagagatacaagatcctgctggaggccaaggccttccccagcgaccactacgccatcgagagccagctgcagctgcacggcctgaacatcgaggagagcatgagaatgatcaagcccagagagggcgaggagaccctgagaatcgaggacatcctggaggtgatcgagaaggagggcgacagcatcgccgtgatcctgttcagcggcgtgcacttctacaccggccagcacttcaacatccccgccatcaccaaggccggccaggccaagggctgctacgtgggcttcgacctggcccacgccgtgggcaacgtggagctgtacctgcacgactggggcgtggacttcgcctgctggtgcagctacaagtacctgaacgccggcgccggcggcatcgccggcgccttcatccacgagaagcacgcccacaccatcaagcccgccctggtgggctggttcggccacgagctgagcaccagattcaagatggacaacaagctgcagctgatccccggcgtgtgcggcttcagaatcagcaacccccccatcctgctggtgtgcagcctgcacgccagcctggagatcttcaagcaggccaccatgaaggccctgagaaagaagagcgtgctgctgaccggctacctggagtacctgatcaagcacaactacggcaaggacaaggccgccaccaagaagcccgtggtgaacatcatcacccccagccacgtggaggagagaggctgccagctgaccatcaccttcagcgtgcccaacaaggacgtgttccaggagctggagaagagaggcgtggtgtgcgacaagagaaaccccaacggcatcagagtggcccccgtgcccctgtacaacagcttccacgacgtgtacaagttcaccaacctgctgaccagcatcctggacagcgccgagaccaagaactag

SEQ ID NO: 77321 - protein, 215 aa, Artificial Sequence
  derived and/or modified sequence
MAKERCLKKSFQDSLEDIKKRMKEKRNKNLAEIGKRRSFIAAPCQIITNTSTLLKNYQDNNKMLVLALENEKSKVKEAQDIILQLRKECYYLTCQLYALKGKLTSQQTVEPAQNQEICSSGMDPNSDDSSRNLFVKDLPQIPLEETELPGQGESFQIEDQIPTIPQDTLGVDFDSGALEVSPAKEAIFILYYVREFVSRFPDCRKCKLETHICLR

SEQ ID NO: 77322 - DNA, 648 bp, Artificial Sequence
  derived and/or modified sequence
atggcaaaggagagatgcctgaagaaaagttttcaggacagtctggaagatatcaagaagcgaatgaaggaaaaacgcaataaaaatctagcagaaattgggaagcgcaggagctttatcgctgccccatgccagatcattacgaacacatccacgctgctgaagaactatcaggacaacaataagatgctagtgctggccttggagaatgagaaatcgaaggtcaaggaggcccaagacatcatcctgcagctcagaaaagaatgttattacttgacctgtcagctttacgccttgaaggggaagctgacgagtcaacaaactgtggaaccggctcaaaaccaagaaatctgttcttcaggcatggacccaaactccgatgactcttctcgcaatctgttcgttaaagaccttccacagattccactcgaggagactgagcttccagggcaaggggaatcattccaaatcgaggatcagatcccaacaattccccaggacacactcggggtggattttgacagtggcgccctggaggtgtctcctgctaaggaggctatatttattctctactacgtgcgcgagtttgtaagccggttccccgattgcagaaagtgcaagctggagacacacatttgtctcagatag

SEQ ID NO: 77323 - DNA, 648 bp, Artificial Sequence
  derived and/or modified sequence
atggccaaggagcgctgcctgaagaagagcttccaggacagcctggaggacatcaagaagaggatgaaggagaagaggaacaagaacctggccgagatcggcaagaggaggagcttcatcgccgccccctgccagatcatcaccaacaccagcaccctgctgaagaactaccaggacaacaacaagatgctggtgctggccctggagaatgagaagagcaaggtgaaggaggcccaggacatcatcctgcagctgaggaaggagtgctactacctgacctgccagctgtatgccctgaagggcaagctgaccagccagcagacagtggagcccgcccagaaccaggagatctgcagcagcggcatggaccccaacagtgatgacagcagcaggaacctgtttgtgaaggacctgccccagatccccctggaggagacagagctgcccggccagggcgagagcttccagatcgaggaccagatccccaccatcccccaggacaccctgggcgtggactttgattctggggccctggaggtgtccccagccaaggaggccatcttcatcctgtactacgtgcgggagtttgtgagccgcttcccagactgcaggaagtgcaagctggagacccacatctgcctgaggtag

SEQ ID NO: 77324 - DNA, 648 bp, Artificial Sequence
  derived and/or modified sequence
atggccaaggagcggtgcctgaagaagagcttccaggacagcctggaagatattaagaaacgcatgaaggagaagagaaacaagaacctggctgaaattggcaaacggaggagttttatcgctgctccctgtcagatcataaccaacacctctactctgctgaaaaactaccaggacaacaataaaatgctggtcctggccctggaaaatgagaagtccaaagtgaaagaggcccaagatatcatattacagttgcggaaggaatgttactaccttacatgtcaactttatgctctcaagggcaaactaaccagtcagcagaccgttgagccagcccagaaccaggaaatctgctcctccggaatggaccctaactccgatgactctagcaggaacctctttgtgaaagatctgccacagattccactcgaggagactgagcttcccggacagggcgaatctttccaaatcgaggatcagattcctacaatacctcaggacactcttggtgtggactttgattctggcgcccttgaggtgtcacccgctaaggaggcgatctttattctgtattacgtgagagagtttgtcagccgctttcccgattgtaggaaatgcaagctagaaacccatatctgcctccgctag

SEQ ID NO: 77325 - DNA, 648 bp, Artificial Sequence
  derived and/or modified sequence
atggctaaggagcggtgccttaagaagtcgtttcaggacagtctggaggatatcaagaaacggatgaaagaaaaacgtaacaagaaccttgcagagatcggcaagaggaggagctttatagcggctccttgccagatcataaccaatacgtctacattattgaagaactaccaggataacaacaaaatgcttgtgttggccctggaaaacgagaaatctaaggtaaaagaggcccaggatattatcctgcagctgcgcaaggagtgttattacctgacttgccagctgtacgccctaaaaggaaaactgactagccagcagactgttgaaccggctcaaaatcaggagatatgctccagcggtatggatccgaactcggacgattccagccgcaatttattcgtgaaggacctaccgcagattccccttgaggaaacagagctgcctggccagggagagtcgtttcagatcgaggaccagattcccacaatccctcaggatacactgggggttgacttcgatagcggggcattagaagtgtcccctgctaaggaagccatcttcatactgtactacgtcagggaattcgtctcccggtttccagattgccggaaatgcaagcttgaaacccatatctgcctgaggtag

SEQ ID NO: 77326 - DNA, 1298 bp, Artificial Sequence
  derived and/or modified sequence
agttccaggcgacggcggacggtggtacggtcctggagggcccagtgcgcggggctagccgtggctggagagcttcgaagagccttgaaatgtgaggaggaggaagatagctgttgcagaagtagtggccaaggcaaaagatggccaaggaaagatgcctgaaaaagtcctttcaagatagtcttgaagacataaagaagcgaatgaaagagaaaaggaataaaaacttggcagagattggcaaacgcaggtcttttatagctgcaccatgccaaataatcaccaacacttctacactgctgaaaaattaccaagacaacaacaaaatgttagttttagctttggaaaatgaaaaatccaaagtgaaagaagcccaagatatcatcctacagctgagaaaagaatgttactatctcacatgtcagctatatgcattgaaaggaaaacttacatcacaacaaacagtagaacctgctcagaaccaggaaatatgttcctctggaatggaccccaatagtgatgacagctccagaaatttatttgtgaaggatttaccgcaaattcctcttgaagaaactgaacttccaggacaaggagaatcatttcaaatagaagatcagatacctactattcctcaagacacactgggagttgattttgattcaggagccctggaggtatcacctgccaaagaagcaatttttattttatattatgttcgagaatttgtttcgagattcccagactgtaggaaatgtaaacttgaaacccacatctgcttgaggtaaagtccacgggcttcacatccttagaaaacttttttagtccatgcattcactaatgtatgcagacctttaatagattctagctttatgtgttgggggagagatggaggggtgttgacagtctgtttcactcagcctacatacataataaaatctaagccctttaattagagatagcaactttcccagggtgaccgaggaatcagtacgtgttgaacccctcttttaagtttccttttggttgtgtcacttggagattgccttttctttcttgtaagctcagctgtgtcctcaaatatattgcattttacccagcatttccaggtgttttcaggggtcaaagtttttaagttatcttagtctttgatattgtgtaagcgaaattctccaatcccatctcctagatgatttttttttaaatcacaaaatgtgattatgcttaacagctgtttcctgtttctcttaaaataaaatccatttcctatttctcttaaaataaaatccattattctt

SEQ ID NO: 77327 - DNA, 648 bp, Artificial Sequence
  derived and/or modified sequence
atggccaaggagagatgcctgaagaagagcttccaggacagcctggaggacatcaagaagagaatgaaggagaagagaaacaagaacctggccgagatcggcaagagaagaagcttcatcgccgccccctgccagatcatcaccaacaccagcaccctgctgaagaactaccaggacaacaacaagatgctggtgctggccctggagaacgagaagagcaaggtgaaggaggcccaggacatcatcctgcagctgagaaaggagtgctactacctgacctgccagctgtacgccctgaagggcaagctgaccagccagcagaccgtggagcccgcccagaaccaggagatctgcagcagcggcatggaccccaacagcgacgacagcagcagaaacctgttcgtgaaggacctgccccagatccccctggaggagaccgagctgcccggccagggcgagagcttccagatcgaggaccagatccccaccatcccccaggacaccctgggcgtggacttcgacagcggcgccctggaggtgagccccgccaaggaggccatcttcatcctgtactacgtgagagagttcgtgagcagattccccgactgcagaaagtgcaagctggagacccacatctgcctgagatag

SEQ ID NO: 77328 - protein, 328 aa, Artificial Sequence
  derived and/or modified sequence
MTGNAGEWCLMESDPGVFTELIKGFGCRGAQVEEIWSLEPENFEKLKPVHGLIFLFKWQPGEEPAGSVVQDSRLDTIFFAKQVINNACATQAIVSVLLNCTHQDVHLGETLSEFKEFSQSFDAAMKGLALSNSDVIRQVHNSFARQQMFEFDTKTSAKEEDAFHFVSYVPVNGRLYELDGLREGPIDLGACNQDDWISAVRPVIEKRIQKYSEGEIRFNLMAIVSDRKMIYEQKIAELQRQLAEEPMDTDQGNSMLSAIQSEVAKNQMLIEEEVQKLKRYKIENIRRKHNYLPFIMELLKTLAEHQQLIPLVEKAKEKQNAKKAQETK

SEQ ID NO: 77329 - protein, 326 aa, Artificial Sequence
  derived and/or modified sequence
MTGNAGEWCLMESDPGVFTELIKGFGCRGAQVEEIWSLEPENFEKLKPVHGLIFLFKWQPGEEPAGSVVQDSRLDTIFFAKQVINNACATQAIVSVLLNCTHQDVHLGETLSEFKEFSQSFDAAMKGLALSNSDVIRQVHNSFARQQMFEFDTKTSAKEEDAFHFVSYVPVNGRLYELDGLREGPIDLGACNQDDWISAVRPVIEKRIQKYSEGEIRFNLMAIVSDRKMIYEQKIAELQRQLAEEPMDTDQGNSMLSAIQSEVAKNQMLIEEEVQKLKRYKIENIRRKHNYLPFIMELLKTLAEHQQLIPLVEKFEKHFEKTLLGK

SEQ ID NO: 77330 - DNA, 981 bp, Artificial Sequence
  derived and/or modified sequence
atgaccggcaacgccggcgagtggtgcctgatggagagcgaccccggcgtgttcaccgagctgatcaagggcttcggctgcagaggcgcccaggtggaggagatctggagcctggagcccgagaacttcgagaagctgaagcccgtgcacggcctgatcttcctgttcaagtggcagcccggcgaggagcccgccggcagcgtggtgcaggacagcagactggacaccatcttcttcgccaagcaggtgatcaacaacgcctgcgccacccaggccatcgtgagcgtgctgctgaactgcacccaccaggacgtgcacctgggcgagaccctgagcgagttcaaggagttcagccagagcttcgacgccgccatgaagggcctggccctgagcaacagcgacgtgatcagacaggtgcacaacagcttcgccagacagcagatgttcgagttcgacaccaagaccagcgccaaggaggaggacgccttccacttcgtgagctacgtgcccgtgaacggcagactgtacgagctggacggcctgagagagggccccatcgacctgggcgcctgcaaccaggacgactggatcagcgccgtgagacccgtgatcgagaagagaatccagaagtacagcgagggcgagatcagattcaacctgatggccatcgtgagcgacagaaagatgatctacgagcagaagatcgccgagctgcagagacagctggccgaggagcccatggacaccgaccagggcaacagcatgctgagcgccatccagagcgaggtggccaagaaccagatgctgatcgaggaggaggtgcagaagctgaagagatacaagatcgagaacatcagaagaaagcacaactacctgcccttcatcatggagctgctgaagaccctggccgagcaccagcagctgatccccctggtggagaagttcgagaagcacttcgagaagaccctgctgggcaagtag

SEQ ID NO: 77331 - DNA, 954 bp, Artificial Sequence
  derived and/or modified sequence
atggagagcgaccccggcgtgttcaccgagctgatcaagggcttcggctgcagaggcgcccaggtggaggagatctggagcctggagcccgagaacttcgagaagctgaagcccgtgcacggcctgatcttcctgttcaagtggcagcccggcgaggagcccgccggcagcgtggtgcaggacagcagactggacaccatcttcttcgccaagcaggtgatcaacaacgcctgcgccacccaggccatcgtgagcgtgctgctgaactgcacccaccaggacgtgcacctgggcgagaccctgagcgagttcaaggagttcagccagagcttcgacgccgccatgaagggcctggccctgagcaacagcgacgtgatcagacaggtgcacaacagcttcgccagacagcagatgttcgagttcgacaccaagaccagcgccaaggaggaggacgccttccacttcgtgagctacgtgcccgtgaacggcagactgtacgagctggacggcctgagagagggccccatcgacctgggcgcctgcaaccaggacgactggatcagcgccgtgagacccgtgatcgagaagagaatccagaagtacagcgagggcgagatcagattcaacctgatggccatcgtgagcgacagaaagatgatctacgagcagaagatcgccgagctgcagagacagctggccgaggaggagcccatggacaccgaccagggcaacagcatgctgagcgccatccagagcgaggtggccaagaaccagatgctgatcgaggaggaggtgcagaagctgaagagatacaagatcgagaacatcagaagaaagcacaactacctgcccttcatcatggagctgctgaagaccctggccgagcaccagcagctgatccccctggtggagaagttcgagaagcacttcgagaagaccctgctgggcaagtag

SEQ ID NO: 77332 - DNA, 657 bp, Artificial Sequence
  derived and/or modified sequence
tgactgagcgagttcaaggagttcagccagagcttcgacgccgccatgaagggcctggccctgagcaacagcgacgtgatcagacaggtgcacaacagcttcgccagacagcagatgttcgagttcgacaccaagaccagcgccaaggaggaggacgccttccacttcgtgagctacgtgcccgtgaacggcagactgtacgagctggacggcctgagagagggccccatcgacctgggcgcctgcaaccaggacgactggatcagcgccgtgagacccgtgatcgagaagagaatccagaagtacagcgagggcgagatcagattcaacctgatggccatcgtgagcgacagaaagatgatctacgagcagaagatcgccgagctgcagagacagctggccgaggaggagcccatggacaccgaccagggcaacagcatgctgagcgccatccagagcgaggtggccaagaaccagatgctgatcgaggaggaggtgcagaagctgaagagatacaagatcgagaacatcagaagaaagcacaactacctgcccttcatcatggagctgctgaagaccctggccgagcaccagcagctgatccccctggtggagaagttcgagaagcacttcgagaagaccctgctgggcaagtag

SEQ ID NO: 77333 - DNA, 552 bp, Artificial Sequence
  derived and/or modified sequence
tgacagcagatgttcgagttcgacaccaagaccagcgccaaggaggaggacgccttccacttcgtgagctacgtgcccgtgaacggcagactgtacgagctggacggcctgagagagggccccatcgacctgggcgcctgcaaccaggacgactggatcagcgccgtgagacccgtgatcgagaagagaatccagaagtacagcgagggcgagatcagattcaacctgatggccatcgtgagcgacagaaagatgatctacgagcagaagatcgccgagctgcagagacagctggccgaggaggagcccatggacaccgaccagggcaacagcatgctgagcgccatccagagcgaggtggccaagaaccagatgctgatcgaggaggaggtgcagaagctgaagagatacaagatcgagaacatcagaagaaagcacaactacctgcccttcatcatggagctgctgaagaccctggccgagcaccagcagctgatccccctggtggagaagttcgagaagcacttcgagaagaccctgctgggcaagtag

SEQ ID NO: 77334 - DNA, 348 bp, Artificial Sequence
  derived and/or modified sequence
tgagagggcgagatcagattcaacctgatggccatcgtgagcgacagaaagatgatctacgagcagaagatcgccgagctgcagagacagctggccgaggagcccatggacaccgaccagggcaacagcatgctgagcgccatccagagcgaggtggccaagaaccagatgctgatcgaggaggaggtgcagaagctgaagagatacaagatcgagaacatcagaagaaagcacaactacctgcccttcatcatggagctgctgaagaccctggccgagcaccagcagctgatccccctggtggagaagttcgagaagcacttcgagaagaccctgctgggcaagtag

SEQ ID NO: 77335 - DNA, 981 bp, Artificial Sequence
  derived and/or modified sequence
atgaccgggaatgctggtgagtggtgcttaatggagtctgatcctggagtctttacagagctgataaagggttttggttgtaggggggcccaggtcgaagagatctggtctctcgagcccgaaaactttgagaaattgaaacccgtgcacggcttaatcttcctatttaaatggcagcctggcgaggagcccgctggctcagtcgtccaagactcacgtttagatactatcttttttgcaaagcaggtgatcaataacgcctgcgctactcaggcaatcgtctctgtgctgttgaactgcactcatcaggacgtacatcttggtgagacactaagtgaatttaaggaattctctcaatcgtttgacgccgccatgaaggggcttgctcttagcaatagtgatgtaattcgtcaggtccataactcatttgctcgccaacaaatgttcgagttcgacaccaagaccagcgccaaagaggaagacgccttccatttcgtgagttacgtccccgtgaacggaagactctatgagttggacgggctgcgcgaggggcccattgacctgggagcatgtaaccaggatgattggatttcagccgtgcgtccagttatcgagaaacgcatccagaagtacagcgagggggaaatccggtttaacttaatggccattgtgagtgaccggaagatgatatacgaacagaaaatcgccgagctgcagagacagttggctgaggagcccatggacacagatcaggggaacagcatgctatccgccatccagtctgaggtggccaagaatcagatgcttattgaggaggaagtgcaaaagctgaagaggtataagattgagaacattagacggaagcacaactatctcccattcattatggagcttttgaagactttggccgagcaccaacaactaatcccgctggtggagaagttcgagaagcactttgaaaaaaccctcctgggcaagtag

SEQ ID NO: 77336 - DNA, 954 bp, Artificial Sequence
  derived and/or modified sequence
atggaaagcgatccgggcgtttttaccgagctgatcaagggcttcggctgcagaggcgctcaggttgaagaaatttggtctctagagcctgagaattttgagaaactcaagcccgtccacggtctgatcttcttgttcaagtggcaacctggagaagaaccggccggctcggtagtgcaagattccaggctggatacaattttcttcgctaagcaggtgattaacaatgcttgcgccacacaagcaattgtttccgtgctgctaaactgcacccaccaggacgtgcatctcggggaaacgctgtcagaattcaaggagttcagccaaagtttcgatgctgcaatgaaagggctcgcactgagcaatagtgacgtcattcggcaggtgcataatagttttgcccgtcagcaaatgttcgagtttgatactaagaccagcgctaaagaagaggatgcattccactttgtgagctatgtccctgtcaacggaagactatacgaattggacggtctccgggaaggacccattgacctgggagcttgcaaccaggatgactggatttccgctgtgcgcccggtaatagagaaacgcattcagaaatatagcgaaggggagatccgttttaatcttatggctattgtgtccgaccgtaagatgatctatgagcagaaaatagctgaattacagaggcaactcgccgaagaggaacccatggacaccgaccaggggaactccatgctgtctgccatccaatctgaggtcgcaaaaaatcaaatgctgatcgaagaggaggttcagaagttaaaaagatataagatagaaaatataaggcgcaagcacaactacctgcctttcataatggagctgctgaagaccctggcagaacaccagcagctgatcccgctggtagaaaagttcgagaaacatttcgaaaagacactgctaggcaaatag

SEQ ID NO: 77337 - DNA, 657 bp, Artificial Sequence
  derived and/or modified sequence
tagctttctgaattcaaagagttttcccagtctttcgatgccgcaatgaaagggcttgccctgagtaattcagacgtgatcagacaggttcataacagcttcgcccgtcagcagatgttcgagttcgatacaaagaccagtgcaaaggaagaggatgcatttcattttgtgtcatacgtccccgttaatggtagactatacgagctcgatgggcttagggaggggcctatcgatcttggcgcatgcaaccaggatgactggatttccgcggtgcgacctgtgatcgagaagagaattcagaagtattcggagggtgagatccgctttaatctgatggctatcgtatcagaccgtaagatgatctacgaacaaaagattgctgagcttcaaaggcaactagctgaggaggagcccatggatacagaccaaggaaattctatgcttagcgccattcagtcagaggtcgcaaaaaatcaaatgctgatagaggaggaggtgcagaaactcaagaggtataagatcgagaatattcgtcgcaaacacaactacttgcccttcattatggagctgctcaagactctcgcagaacaccagcaactgatccctctggtggaaaaatttgaaaaacatttcgagaaaacccttctggggaagtag

SEQ ID NO: 77338 - DNA, 552 bp, Artificial Sequence
  derived and/or modified sequence
tgacagcagatgttcgagttcgatacgaaaacatcagctaaggaagaggatgcattccattttgtgagctatgtcccagtgaatggcagactctacgagttagacgggctgcgagagggtccaatcgatttgggggcatgcaatcaggacgattggatttctgccgtacggcctgtaattgaaaaacgtattcagaaatactcggagggtgaaatcagattcaacctgatggctatcgtctccgaccggaaaatgatttacgagcagaaaattgctgaattgcagcgccagctggccgaagaggagcctatggatactgaccaaggcaattccatgctatctgccatacaatccgaggtcgctaaaaatcagatgctgatcgaggaggaagtgcagaagttgaagcggtacaagatcgagaacattagacgaaagcataactacctgccctttatcatggagctgctgaagacgctggcagagcatcagcaacttatccctctggttgagaaattcgagaaacattttgagaaaacactcctgggcaagtag

SEQ ID NO: 77339 - DNA, 348 bp, Artificial Sequence
  derived and/or modified sequence
taggagggtgagatacgatttaacctgatggctatcgtgagtgatcgcaaaatgatatacgagcagaaaatcgccgagctccagcgacagctcgccgaggaaccgatggatactgaccagggtaatagcatgctgagcgcaattcagtccgaggtggccaaaaaccaaatgctgattgaagaggaggtgcagaaacttaagaggtacaaaatcgaaaatatccggagaaaacataactatcttccttttatcatggaactgcttaaaactctcgccgagcatcaacagctcatccctctcgtggagaaattcgagaaacacttcgaaaagaccctgcttggaaagtag

SEQ ID NO: 77340 - DNA, 981 bp, Artificial Sequence
  derived and/or modified sequence
atgactggaaatgctggggagtggtgcctgatggagagtgaccccggggtcttcacagagctgatcaagggcttcggctgccgcggggcccaggtggaggagatctggagcctggagccagaaaattttgagaagctgaagcctgtgcacggcctcatcttcctgttcaagtggcagcccggggaggagcctgctggctctgtggtgcaggacagccggctggacaccatcttctttgccaagcaggtgatcaacaatgcctgtgccacccaggccatcgtgtctgtgctgctgaactgcacccaccaggatgtgcacctgggggagaccctgtctgagttcaaggagttcagccagagctttgatgctgccatgaagggcctggccctgagcaacagtgatgtgatccggcaggtgcacaacagctttgcccggcagcagatgtttgaatttgacaccaagaccagcgccaaggaggaggatgccttccactttgtgtcctatgtgcctgtgaatggccgcctgtatgagctggatggcctgcgggagggccccatcgacctgggcgcctgcaaccaggatgactggatctctgctgtgcggcctgtgattgagaagaggatccagaagtacagcgagggggagatccgcttcaacctgatggccatcgtgtctgacaggaagatgatctatgagcagaagattgctgagctgcagaggcagctggccgaggagcccatggacacagaccagggcaacagcatgctgagcgccatccagagcgaggtggccaagaaccagatgctgattgaggaggaggtgcagaagctgaagcgctacaagattgagaacatccggaggaagcacaactacctgcccttcatcatggagctgctgaagaccctggccgagcaccagcagctgatccccctggtggagaagtttgagaagcactttgagaagaccctgctgggcaagtag

SEQ ID NO: 77341 - DNA, 954 bp, Artificial Sequence
  derived and/or modified sequence
atggagagtgaccccggggtcttcacagagctgatcaagggcttcggctgccgcggggcccaggtggaggagatctggagcctggagccagaaaattttgagaagctgaagcctgtgcacggcctcatcttcctgttcaagtggcagcccggggaggagcctgctggctctgtggtgcaggacagccggctggacaccatcttctttgccaagcaggtgatcaacaatgcctgtgccacccaggccatcgtgtctgtgctgctgaactgcacccaccaggatgtgcacctgggggagaccctgtctgagttcaaggagttcagccagagctttgatgctgccatgaagggcctggccctgagcaacagtgatgtgatccggcaggtgcacaacagctttgcccggcagcagatgtttgaatttgacaccaagaccagcgccaaggaggaggatgccttccactttgtgtcctatgtgcctgtgaatggccgcctgtatgagctggatggcctgcgggagggccccatcgacctgggcgcctgcaaccaggatgactggatctctgctgtgcggcctgtgattgagaagaggatccagaagtacagcgagggggagatccgcttcaacctgatggccatcgtgtctgacaggaagatgatctatgagcagaagattgctgagctgcagaggcagctggccgaggaggagcccatggacacagaccagggcaacagcatgctgagcgccatccagagcgaggtggccaagaaccagatgctgattgaggaggaggtgcagaagctgaagcgctacaagattgagaacatccggaggaagcacaactacctgcccttcatcatggagctgctgaagaccctggccgagcaccagcagctgatccccctggtggagaagtttgagaagcactttgagaagaccctgctgggcaagtag

SEQ ID NO: 77342 - DNA, 657 bp, Artificial Sequence
  derived and/or modified sequence
tgactgtctgagttcaaggagttcagccagagctttgatgctgccatgaagggcctggccctgagcaacagtgatgtgatccggcaggtgcacaacagctttgcccggcagcagatgtttgaatttgacaccaagaccagcgccaaggaggaggatgccttccactttgtgtcctatgtgcctgtgaatggccgcctgtatgagctggatggcctgcgggagggccccatcgacctgggcgcctgcaaccaggatgactggatctctgctgtgcggcctgtgattgagaagaggatccagaagtacagcgagggggagatccgcttcaacctgatggccatcgtgtctgacaggaagatgatctatgagcagaagattgctgagctgcagaggcagctggccgaggaggagcccatggacacagaccagggcaacagcatgctgagcgccatccagagcgaggtggccaagaaccagatgctgattgaggaggaggtgcagaagctgaagcgctacaagattgagaacatccggaggaagcacaactacctgcccttcatcatggagctgctgaagaccctggccgagcaccagcagctgatccccctggtggagaagtttgagaagcactttgagaagaccctgctgggcaagtag

SEQ ID NO: 77343 - DNA, 552 bp, Artificial Sequence
  derived and/or modified sequence
tgacagcagatgtttgaatttgacaccaagaccagcgccaaggaggaggatgccttccactttgtgtcctatgtgcctgtgaatggccgcctgtatgagctggatggcctgcgggagggccccatcgacctgggcgcctgcaaccaggatgactggatctctgctgtgcggcctgtgattgagaagaggatccagaagtacagcgagggggagatccgcttcaacctgatggccatcgtgtctgacaggaagatgatctatgagcagaagattgctgagctgcagaggcagctggccgaggaggagcccatggacacagaccagggcaacagcatgctgagcgccatccagagcgaggtggccaagaaccagatgctgattgaggaggaggtgcagaagctgaagcgctacaagattgagaacatccggaggaagcacaactacctgcccttcatcatggagctgctgaagaccctggccgagcaccagcagctgatccccctggtggagaagtttgagaagcactttgagaagaccctgctgggcaagtag

SEQ ID NO: 77344 - DNA, 348 bp, Artificial Sequence
  derived and/or modified sequence
tgagaaggagagatccgcttcaacctgatggccatcgtgtctgacaggaagatgatctatgagcagaagattgctgagctgcagaggcagctggccgaggagcccatggacacagaccagggcaacagcatgctgagcgccatccagagcgaggtggccaagaaccagatgctgattgaggaggaggtgcagaagctgaagcgctacaagattgagaacatccggaggaagcacaactacctgcccttcatcatggagctgctgaagaccctggccgagcaccagcagctgatccccctggtggagaagtttgagaagcactttgagaagaccctgctgggcaagtag

SEQ ID NO: 77345 - DNA, 981 bp, Artificial Sequence
  derived and/or modified sequence
atgaccggcaacgccggcgagtggtgcctgatggagagcgaccccggcgtgttcaccgaactgattaaaggttttggctgccggggggcgcaagtggaggagatctggagcctagagccagagaattttgaaaaactcaaacccgtacatgggttgatttttctctttaagtggcagcctggcgaggagcctgccggctccgtcgttcaggatagtcgccttgacacgatcttcttcgccaagcaggtaattaacaacgcctgtgctacccaggcaatcgtgagcgtcctgttgaattgtacccaccaggacgttcatttgggcgagacactctcagaatttaaggaattttcccagagttttgatgccgcgatgaaaggactggctctgtcaaatagcgacgtgatcaggcaggttcacaattcattcgcccggcaacagatgttcgaattcgacaccaagacttccgccaaagaggaagacgcattccacttcgtgagttatgtaccagtgaacggccggctctacgaattggatggactccgcgaagggcctattgacctcggcgcttgcaatcaagatgattggatctccgccgtccgccctgtgattgagaaacgcatacaaaagtacagcgagggcgagattcggttcaaccttatggcaatagtgtcagaccggaaaatgatatatgaacaaaagatcgcagaacttcagcggcagcttgctgaggagcctatggacactgaccagggtaattcaatgctttcagccatccagtctgaggtcgccaagaatcaaatgttaattgaagaagaggtccaaaaactcaaaagatataaaattgaaaacattcgtcgcaaacataattacctgccctttataatggagctcctcaagacattagcagagcatcagcagctaatcccactggtggaaaagtttgaaaagcatttcgaaaagaccctcctgggaaaatag

SEQ ID NO: 77346 - DNA, 954 bp, Artificial Sequence
  derived and/or modified sequence
atggagagcgaccccggcgtgttcaccgagctgatcaagggcttcggctgccgcggcgctcaggtagaagaaatttggtcactggaaccagaaaactttgagaagctgaagccggttcacggccttatctttctgtttaaatggcagcctggggaggagccagcggggtctgtcgtgcaggattccagactcgacactattttcttcgcaaagcaggtgataaacaatgcatgcgccacccaagccattgtgtcagtacttctgaattgcacacatcaggacgtccacctgggggaaacgctgagcgaattcaaggaattttcccagtccttcgacgcggctatgaagggcctggcccttagcaactccgatgtcatccgacaggtgcacaacagttttgcccgccagcagatgttcgaattcgacacgaaaacatctgccaaagaggaggacgctttccacttcgtctcctacgtgcctgtgaatgggagattgtacgaattagatggtctgagagagggccccatcgatttaggagcgtgtaaccaggacgactggattagcgccgtgcggcctgtgattgagaagcggatacagaagtatagtgaaggagagatcagattcaacctgatggctatcgtctccgacaggaagatgatctacgaacagaagatagcggagttacagaggcagcttgccgaagaagagccgatggatacggaccaagggaacagcatgctgtctgcaatccagtcagaagtagccaagaaccagatgctgatcgaggaggaggtccagaaacttaagcggtacaagattgagaacatccgcagaaagcataactacctgcctttcataatggaattgctgaagaccttagcggagcatcaacagctcatcccgttggtagagaaattcgagaagcactttgagaagacacttctggggaaatag

SEQ ID NO: 77347 - DNA, 657 bp, Artificial Sequence
  derived and/or modified sequence
tgactgagcgagttcaaggagttcagccagagcttcgacgccgccatgaaggggctggctctatccaattcggacgtgatccgccaggttcataattcttttgcgaggcaacagatgttcgaatttgatacgaagacctcagctaaagaggaagacgccttccatttcgtcagctatgtacccgttaatggcagactgtacgaactggacggtttgcgagaggggcccatcgatctcggagcttgcaatcaggacgactggatctctgccgtcagacctgtaatagagaagaggattcagaagtactctgagggtgaaatccgcttcaatcttatggccatagtctccgataggaaaatgatttacgaacagaagattgccgagctgcagaggcaactggcagaggaagaacccatggacacagatcagggaaacagtatgctttctgcaatccagtcagaggttgctaaaaatcagatgttgattgaggaggaggttcagaagctgaagaggtacaaaatcgaaaatattcgccgaaaacacaactatctgccgttcatcatggagttgctgaaaacactggcggagcaccaacagctgattccactggttgagaagttcgaaaaacacttcgaaaaaacattgcttggcaaatag

SEQ ID NO: 77348 - DNA, 552 bp, Artificial Sequence
  derived and/or modified sequence
tgacagcagatgttcgagttcgacaccaagaccagcgccaaggaggaggacgccttccactttgtgagctatgtcccagtcaacggccgcctgtatgaactcgacggtttacgcgagggtcctatcgatctgggagcctgcaaccaagacgactggatctcagctgtgcgccctgttattgagaagcgcattcagaagtacagtgaaggagagatcaggttcaatctgatggccatcgtatcggatcgcaagatgatttacgaacagaaaatcgctgaactacagaggcaactggcagaggaggaacccatggacacagaccagggtaatagcatgcttagcgcgattcagagcgaggtagcaaagaaccagatgctgattgaagaggaagtacagaaactgaaacgttacaagatcgagaatatcaggagaaagcacaattacctgccattcatcatggagctcctgaaaacattagctgagcatcagcagctgataccccttgtggaaaaattcgagaaacattttgagaaaactttattggggaagtag

SEQ ID NO: 77349 - DNA, 348 bp, Artificial Sequence
  derived and/or modified sequence
tgagagggcgagatccggttcaacctgatggccatcgtgagcgacagaaaaatgatctacgagcagaaaattgcagaacttcagagacagttggccgaggaacccatggatacggaccaaggaaacagtatgttgtctgccatacaatcagaggtggccaaaaatcagatgctaattgaagaagaagtgcagaagctcaagagatataaaattgagaacatcagaagaaagcacaactatttgccctttataatggaactgttaaaaaccctggccgagcatcagcaattgatcccactggtggagaaattcgaaaaacactttgagaaaacgttactaggaaagtag

SEQ ID NO: 77350 - DNA, 981 bp, Artificial Sequence
  derived and/or modified sequence
atgacaggaaacgctggtgaatggtgcctcatggagagtgatccaggcgtgtttaccgaacttattaaaggattcggatgcaggggtgcacaggtggaagagatctggagcctggagccagaaaatttcgaaaaacttaaaccagtgcacggcctcatcttcctcttcaagtggcaacctggagaggaacctgccggtagtgtcgtgcaggacagtcggttggacaccatcttcttcgcgaagcaggtaattaacaatgcctgtgcaacgcaggctattgtgtccgtgctgctgaactgcacacatcaggacgtgcatctgggggaaactctgtccgaattcaaggaattctcccaaagtttcgatgctgctatgaagggtttagcgctctctaattcagatgttatacggcaggtgcataattcctttgccagacagcagatgttcgaatttgacacaaagacttccgctaaggaagaggatgcctttcacttcgtgtcttatgtgcccgtgaatggacgactgtatgagttagatggcctcagagaagggcctatcgatcttggcgcatgtaatcaggacgactggatctctgcggtgaggccagtaatagagaaaaggattcagaagtatagcgaaggagagatcagattcaatctgatggccatcgtcagcgatcgcaagatgatctacgaacaaaagatcgctgaactacaacgtcagctggcagaggagcctatggacacagaccaaggtaactccatgttaagcgccatacagtctgaggtggcaaaaaaccagatgctcattgaggaggaagtgcagaagttaaaaaggtacaaaatagaaaacatccgccgaaaacataactatctgccattcattatggaacttctcaaaacacttgcagagcaccaacaactcattccattggttgaaaaattcgagaaacacttcgaaaagacattgctgggtaaatag

SEQ ID NO: 77351 - DNA, 954 bp, Artificial Sequence
  derived and/or modified sequence
atggaatcagacccaggagtgtttaccgagctgattaagggttttggctgtcgaggcgcacaagttgaagagatctggagtctggagccggagaatttcgagaagcttaaaccagtgcacggattaatttttctttttaagtggcagcctggcgaagagcccgcaggatcggttgtgcaggactcacgccttgatacaattttttttgctaagcaggtgatcaacaacgcctgtgcgacccaggccattgtgtccgtactactgaattgcacgcaccaggatgtgcacctaggagagacactctcggagttcaaagaattcagccagtcgttcgatgccgctatgaagggcttggccctctcaaatagcgatgtcatcagacaagtccacaacagtttcgcacggcagcagatgtttgagttcgacacaaaaaccagcgctaaggaagaagacgccttccactttgtttcctacgtgcctgtgaacggtcgtctatatgagcttgacggcttaagggaaggacccattgatctaggggcatgcaaccaggatgattggattagcgccgtgcgacctgtgatcgagaaaagaattcaaaagtatagcgagggtgagatccgctttaacctgatggcaatcgtcagcgatcgaaagatgatttatgaacagaaaatcgcggaattgcaacgacagctcgctgaagaggagccgatggataccgaccagggcaactctatgctgtccgccattcagagcgaggtcgcaaaaaaccagatgctgatcgaggaggaggtacagaaactgaagagatacaaaattgaaaacatacgacgcaagcataattacctcccctttattatggagctgcttaagactttggccgagcaccagcaactaattcccttggtggagaaatttgaaaaacactttgaaaaaactctgctcggcaagtag

SEQ ID NO: 77352 - DNA, 657 bp, Artificial Sequence
  derived and/or modified sequence
taactctctgagtttaaggagttcagtcagtcgtttgacgccgcaatgaagggcctcgcgctgagtaattctgacgtgattagacaggtccacaattcgtttgcccgtcagcagatgtttgaattcgatacaaagacttcagccaaagaggaagacgcattccattttgttagctatgttcctgtgaatggcagattatacgagcttgatggcttgagggaaggccctatcgacctgggagcctgtaatcaggacgactggatttccgctgtgaggcctgtcatcgagaagcggatccagaagtactccgagggggagatccgcttcaacctgatggctattgtgagcgataggaagatgatttacgagcaaaagatagcagaactgcaacgccagctcgccgaggaagagcctatggataccgatcagggcaatagcatgctgtccgccatccagagcgaagtagcaaaaaaccagatgttgatcgaagaggaggttcagaagctcaaaagatacaagatcgagaatatccgccgtaagcataactatctgccgtttataatggagttgctgaaaaccctggctgagcatcagcagctcatcccactggtggagaagtttgagaaacatttcgagaagactctcctcggcaaatag

SEQ ID NO: 77353 - DNA, 552 bp, Artificial Sequence
  derived and/or modified sequence
tagcagcagatgtttgagtttgacaccaagacttcagccaaggaggaggacgccttccacttcgtgtcttatgtgccagtgaacggcagactttacgagctggacggtttgcgcgagggccctatagatttgggcgcttgtaatcaggatgattggatctcagccgtcagacctgtcattgagaaacgcatccagaagtactctgagggcgagatccggttcaaccttatggccatcgtgtctgaccgcaagatgatttacgagcagaagatcgctgaacttcagaggcagttggcagaggaggagccaatggacaccgatcagggtaacagtatgttgtccgctatccagtccgaggtcgcaaagaatcagatgctgatagaggaggaggttcagaaattgaaaagatacaagatagagaatatccggcgaaaacacaattatctcccttttatcatggagttgcttaagacccttgccgagcatcagcaactgattccactggtcgagaaatttgagaaacattttgaaaaaaccctcctcgggaagtag

SEQ ID NO: 77354 - DNA, 348 bp, Artificial Sequence
  derived and/or modified sequence
tgagaaggcgagattaggttcaacctaatggcgatagtgagcgataggaagatgatctacgagcaaaagatcgccgaattacagaggcagctggccgaggagccaatggacacagaccaggggaacagcatgctctctgccatccagtcagaggtggccaagaatcagatgttaatcgaagaagaggttcagaaactgaagcgctataaaattgagaatatccgtcggaaacataattacttgccttttattatggaactgttgaaaaccttggcggagcatcagcagttaatccctcttgttgagaagttcgaaaagcactttgagaagacactgctgggtaagtag

SEQ ID NO: 77355 - DNA, 1911 bp, Artificial Sequence
  derived and/or modified sequence
aaggaggagaaagaggaggagtaaagcaggccctctcgacgtcggcctgtggggagcgatgccgacaagcaggagcggtcccggcttcggaaagggcccaccctgaggaatggtccggccgggcctagcgaggatgtccctaccgcgatgctggttccgttacccagggtggacaggcgcggaagcgggacggggaagagcgatagtttcgcggcgtttgcccagcctcaacccctgggatgcgggtgagagacatggaggactggtcagaatttgcgcgtccctggggccgcacaaaaggctcccagccggcctcccgcaatgtcctcacctgtacctggcagccgaccccctggatccgcagcgccgccaggagaagtcctgcgcagcgctgggaaacgacaaaagaaggcagcctgacgggcagcgacagccacagcaacagcaacagccccactgccgccggggattccaggttgccgaggagcccaagtagaagaaatatggagtttagagcctgagaattttgaaaaattaaagccagttcatgggttaatttttcttttcaagtggcagccaggagaagaaccagcaggctctgtggttcaggactcccgacttgacacgatattttttgctaagcaggtaattaataatgcttgtgctactcaagccatagtgagtgtgttactgaactgtacccaccaggatgtccatttaggcgagacattatcagagtttaaagaattttcacaaagttttgatgcagctatgaaaggcttggcactgagcaattcagatgtgattcgacaagtacacaacagtttcgccagacagcaaatgtttgaatttgatacgaagacatcagcaaaagaagaagatgcttttcactttgtcagttatgttcctgttaatgggagactgtatgaattagatggattaagagaaggaccgattgatttaggtgcatgcaatcaagatgattggatcagtgcagtaaggcctgtcatagaaaaaaggatacaaaagtacagtgaaggtgaaattcgatttaatttaatggccattgtgtctgacagaaaaatgatatatgagcagaagatagcagagttacaaagacaacttgcagaggaacccatggatacagatcaaggtaatagtatgttaagtgctattcagtcagaagttgccaaaaatcagatgcttattgaagaagaagtacagaaattaaaaagatacaagattgagaatatcagaaggaagcataattatctgcctttcattatggaattgttaaagactttagcagaacaccagcagttaataccactagtagaaaagatattctgatataggggaaggattctttaataagttccccaagtgattctaatgcaactggtctgtgtaccacagtttgagaaacactttgagaagacactactaggcaaataaaattttggaccattaacttaaagacgagaatacatggtaggtatattttccttattaattttaaagtttacaaagcaaagattgatttcaaccaagctgtttcatgttatacattctaaataatatgagatgtgagctaataagttttttgtgtatattaccttattgattgaaacatgtgacccaacttttagcattaaatgtaaaaattattgcagaagactgctaaatcttctcttttccattataggtttttctgttcatgcatctcagggtgtattctaagatgggaaactgtttttaaagttttagattaatacagggtcctgtggttctcaaaattgcttggttaacaagaatacctagatatgatgttattaatcatatcaaatgtttttctgttaaaaatattaaaataactataaaatgtgctaaatatgtgatacatcagatttt

SEQ ID NO: 77356 - DNA, 411 bp, Artificial Sequence
  derived and/or modified sequence
taatttaatggccattgtgtctgacagaaaaatgatatatgagcagaagatagcagagttacaaagacaacttgcagaggaacccatggatacagatcaaggtaatagtatgttaagtgctattcagtcagaagttgccaaaaatcagatgcttattgaagaagaagtacagaaattaaaaagatacaagattgagaatatcagaaggaagcataattatctgcctttcattatggaattgttaaagactttagcagaacaccagcagttaataccactagtagaaaagatattctgatataggggaaggattctttaataagttccccaagtgattctaatgcaactggtctgtgtaccacagtttgagaaacactttgagaagacactactaggcaaataaaattttgg

SEQ ID NO: 77357 - DNA, 1329 bp, Artificial Sequence
  derived and/or modified sequence
cattatcagagtttaaagaattttcacaaagttttgatgcagctatgaaaggcttggcactgagcaattcagatgtgattcgacaagtacacaacagtttcgccagacagcaaatgtttgaatttgatacgaagacatcagcaaaagaagaagatgcttttcactttgtcagttatgttcctgttaatgggagactgtatgaattagatggattaagagaaggaccgattgatttaggtgcatgcaatcaagatgattggatcagtgcagtaaggcctgtcatagaaaaaaggatacaaaagtacagtgaaggtgaaattcgatttaatttaatggccattgtgtctgacagaaaaatgatatatgagcagaagatagcagagttacaaagacaacttgcagaggaggaacccatggatacagatcaaggtaatagtatgttaagtgctattcagtcagaagttgccaaaaatcagatgcttattgaagaagaagtacagaaattaaaaagatacaagattgagaatatcagaaggaagcataattatctgcctttcattatggaattgttaaagactttagcagaacaccagcagttaataccactagtagaaaagtttgagaaacactttgagaagacactactaggcaaataaaattttggaccattaacttaaagacgagaatacatggcaaaagaaaaacagaacgcaaagaaagctcaggaaaccaaatgaagatgttttcagatatgtacacatttctgcttctgcacatattttcatggaaaccattatgtataaagaacttagagcaacatcctaattggctcagtgcacgtttggcaatagtgccagcctgtcttgtctttaatgcatggattcataaacttcttccctacctgcatcatgtgcatgtagtgcatattaaatgaaagtgatattaagaatgctttcccaaattccattatttgacattgagtctgacaactgttagttttctggttgtctaactaccatatgaagctagaaaatgcacaaacgatattccttatctgtaatttaaatacttaaaatttgcaattgtcagatcttgattaaactggttgtcttatttcttctcatcattaacggaaaaaaaatcagtatttctatctttgatatctaagtgttttgaggattttaaaactgaattttatctgctataccagttatttgagaaagtatgattttaatgtaaatcatttaaaaaggacaaaagtataatttccagtgattttcactgctgtcagtagaaaagtaataaacatctcaattttattttagtaaa

SEQ ID NO: 77358 - DNA, 785 bp, Artificial Sequence
  derived and/or modified sequence
acagcaaatgtttgaatttgatacgaagacatcagcaaaagaagaagatgcttttcactttgtcagttatgttcctgttaatgggagactgtatgaattagatggattaagagaaggaccgattgatttaggtgcatgcaatcaagatgattggatcagtgcagtaaggcctgtcatagaaaaaaggatacaaaagtacagtgaaggtgaaattcgatttaatttaatggccattgtgtctgacagaaaaatgatatatgagcagaagatagcagagttacaaagacaacttgcagaggaggaacccatggatacagatcaaggtaatagtatgttaagtgctattcagtcagaagttgccaaaaatcagatgcttattgaagaagaagtacagaaattaaaaagatacaagattgagaatatcagaaggaagcataattatctgcctttcattatggaattgttaaagactttagcagaacaccagcagttaataccactagtagaaaagtttgagaaacactttgagaagacactactaggcaaataaaattttggaccattaacttaaagacgagaatacatgggaaaataggataaaagaacaaggtgtgagaaggaatagaaggaaacaaacaggaaagatatggctgcaccatgcagtgctactatatgctgagattctacaggatgagatttttgaatagctgaggcagttgcctataatctgtgatgacataaaagtatttgacctaaaatctttttatttgcaaaataataaataa

SEQ ID NO: 77359 - DNA, 784 bp, Artificial Sequence
  derived and/or modified sequence
tgaaggtgaaattcgatttaatttaatggccattgtgtctgacagaaaaatgatatatgagcagaagatagcagagttacaaagacaacttgcagaggaacccatggatacagatcaaggtaatagtatgttaagtgctattcagtcagaagttgccaaaaatcagatgcttattgaagaagaagtacagaaattaaaaagatacaagattgagaatatcagaaggaagcataattatctgcctttcattatggaattgttaaagactttagcagaacaccagcagttaataccactagtagaaaagtttgagaaacactttgagaagacactactaggcaaataaaattttggaccattaacttaaagacgagaatacatggcaaaagaaaaacagaacgcaaagaaagctcaggaaaccaaatgaagatgttttcagatatgtacacatttctgcttctgcacatattttcatggaaaccattatgtataaagaacttagagcaacatcctaattggctcagtgcacgtttggcaatagtgccagcctgtcttgtctttaatgcatggattcataaacttcttccctacctgcatcatgtgcatgtagtgcatattaaatgaaagtgatattaagaatgctttcccaaattccattatttgacattgagtctgacaactgttagttttctggttgtctaactaccatatgaagctagaaaatgcacaaacgatattccttatctgtaatttaaatacttaaaatttgcaattgtcagatctt

SEQ ID NO: 77360 - protein, 316 aa, Artificial Sequence
  derived and/or modified sequence
MTGNAGEWCLMESDPGVFTELIKGFGCRGAQVEEIWSLEPENFEKLKPVHGLIFLFKWQPGEEPAGSVVQDSRLDTIFFAKQVINNACATQAIVSVLLNCTHQDVHLGETLSEFKEFSQSFDAAMKGLALSNSDVIRQVHNSFARQQMFEFDTKTSAKEEDAFHFVSYVPVNGRLYELDGLREGPIDLGACNQDDWISAVRPVIEKRIQKYSEGEIRFNLMAIVSDRKMIYEQKIAELQRQLAEEPMDTDQGNSMLSAIQSEVAKNQMLIEEEVQKLKRYKIENIRRKHNYLPFIMELLKTLAEHQQLIPLVEKGK

SEQ ID NO: 77361 - DNA, 951 bp, Artificial Sequence
  derived and/or modified sequence
atgaccggcaacgccggcgagtggtgcctgatggagagcgaccccggcgtgttcaccgagctgatcaagggcttcggctgcagaggcgcccaggtggaggagatctggagcctggagcccgagaacttcgagaagctgaagcccgtgcacggcctgatcttcctgttcaagtggcagcccggcgaggagcccgccggcagcgtggtgcaggacagcagactggacaccatcttcttcgccaagcaggtgatcaacaacgcctgcgccacccaggccatcgtgagcgtgctgctgaactgcacccaccaggacgtgcacctgggcgagaccctgagcgagttcaaggagttcagccagagcttcgacgccgccatgaagggcctggccctgagcaacagcgacgtgatcagacaggtgcacaacagcttcgccagacagcagatgttcgagttcgacaccaagaccagcgccaaggaggaggacgccttccacttcgtgagctacgtgcccgtgaacggcagactgtacgagctggacggcctgagagagggccccatcgacctgggcgcctgcaaccaggacgactggatcagcgccgtgagacccgtgatcgagaagagaatccagaagtacagcgagggcgagatcagattcaacctgatggccatcgtgagcgacagaaagatgatctacgagcagaagatcgccgagctgcagagacagctggccgaggagcccatggacaccgaccagggcaacagcatgctgagcgccatccagagcgaggtggccaagaaccagatgctgatcgaggaggaggtgcagaagctgaagagatacaagatcgagaacatcagaagaaagcacaactacctgcccttcatcatggagctgctgaagaccctggccgagcaccagcagctgatccccctggtggagaagggcaagtag

SEQ ID NO: 77362 - DNA, 579 bp, Artificial Sequence
  derived and/or modified sequence
atgaagggcctggccctgagcaacagcgacgtgatcagacaggtgcacaacagcttcgccagacagcagatgttcgagttcgacaccaagaccagcgccaaggaggaggacgccttccacttcgtgagctacgtgcccgtgaacggcagactgtacgagctggacggcctgagagagggccccatcgacctgggcgcctgcaaccaggacgactggatcagcgccgtgagacccgtgatcgagaagagaatccagaagtacagcgagggcgagatcagattcaacctgatggccatcgtgagcgacagaaagatgatctacgagcagaagatcgccgagctgcagagacagctggccgaggagcccatggacaccgaccagggcaacagcatgctgagcgccatccagagcgaggtggccaagaaccagatgctgatcgaggaggaggtgcagaagctgaagagatacaagatcgagaacatcagaagaaagcacaactacctgcccttcatcatggagctgctgaagaccctggccgagcaccagcagctgatccccctggtggagaagatcttctag

SEQ ID NO: 77363 - DNA, 987 bp, Artificial Sequence
  derived and/or modified sequence
atgaccggcaacgccggcgagtggtgcctgatggagagcgaccccggcgtgttcaccgagctgatcaagggcttcggctgcagaggcgcccaggtggaggagatctggagcctggagcccgagaacttcgagaagctgaagcccgtgcacggcctgatcttcctgttcaagtggcagcccggcgaggagcccgccggcagcgtggtgcaggacagcagactggacaccatcttcttcgccaagcaggtgatcaacaacgcctgcgccacccaggccatcgtgagcgtgctgctgaactgcacccaccaggacgtgcacctgggcgagaccctgagcgagttcaaggagttcagccagagcttcgacgccgccatgaagggcctggccctgagcaacagcgacgtgatcagacaggtgcacaacagcttcgccagacagcagatgttcgagttcgacaccaagaccagcgccaaggaggaggacgccttccacttcgtgagctacgtgcccgtgaacggcagactgtacgagctggacggcctgagagagggccccatcgacctgggcgcctgcaaccaggacgactggatcagcgccgtgagacccgtgatcgagaagagaatccagaagtacagcgagggcgagatcagattcaacctgatggccatcgtgagcgacagaaagatgatctacgagcagaagatcgccgagctgcagagacagctggccgaggagcccatggacaccgaccagggcaacagcatgctgagcgccatccagagcgaggtggccaagaaccagatgctgatcgaggaggaggtgcagaagctgaagagatacaagatcgagaacatcagaagaaagcacaactacctgcccttcatcatggagctgctgaagaccctggccgagcaccagcagctgatccccctggtggagaaggccaaggagaagcagaacgccaagaaggcccaggagaccaagtag

SEQ ID NO: 77364 - DNA, 951 bp, Artificial Sequence
  derived and/or modified sequence
atgaccggaaatgctggtgaatggtgcttaatggagagtgatcccggcgtcttcacagaattaatcaagggatttgggtgtagaggagcccaggttgaggagatttggagcttggagcctgagaatttcgagaagcttaagccggtacacggtctcatcttcctgtttaagtggcaaccaggcgaagaaccagccggcagcgtcgtgcaagacagccgcctcgacaccatttttttcgcaaagcaggtgatcaacaatgcttgtgccacccaagccattgtgtctgtgttactcaactgcacacaccaggacgtgcatctgggagagacgctcagcgaattcaaagaattttcccaatccttcgacgccgccatgaaaggactggccctctccaactctgacgtgatccgacaagtgcacaattcctttgccagacagcagatgtttgaattcgataccaagacaagcgctaaggaggaggacgcattccactttgtctcttatgtgcctgtcaacggacgactgtacgaactcgacggcctgagggaaggccccattgatcttggggcttgcaatcaggatgattggatcagcgctgttcggcccgtaatcgagaagagaatccagaaatacagcgagggagagatcaggtttaatctaatggccatcgtttcagatcgcaaaatgatctacgagcagaagatcgccgagttgcaaagacagctggcggaggagcctatggacacggatcagggtaatagcatgctttctgccatacagtccgaggttgcaaagaaccaaatgctcatcgaagaagaagtccagaaactgaaaaggtacaaaatcgaaaacatccggagaaagcacaactatttgccttttattatggagcttttgaaaactcttgctgagcaccagcagctcatacccctggtggagaagggaaagtag

SEQ ID NO: 77365 - DNA, 579 bp, Artificial Sequence
  derived and/or modified sequence
atgaaaggcctcgctctgagtaattctgacgtgattaggcaggtccataactcctttgcaaggcaacaaatgttcgagtttgatacaaaaacctctgcaaaagaagaagacgcattccatttcgtgagctacgtccccgtaaatgggaggttgtacgagctggacgggcttcgagagggcccaattgatctcggcgcatgtaaccaggatgattggatcagcgctgtccgccctgtcattgagaaacgtattcaaaaatacagcgaaggcgagatcagatttaacctgatggctatcgtgtccgacagaaaaatgatctacgaacagaaaatcgcagaactgcagcggcagcttgccgaggaaccaatggatactgatcaggggaactcaatgctgagcgcaatccagagcgaggtggccaaaaaccaaatgcttattgaagaggaagtgcagaagctgaaaagatataaaatcgagaacattcgcaggaagcacaattatctgccctttatcatggagcttttgaaaaccttggccgaacaccagcagctgatcccactggtagaaaaaattttttag

SEQ ID NO: 77366 - DNA, 987 bp, Artificial Sequence
  derived and/or modified sequence
atgacaggcaacgccggggaatggtgcctgatggaaagtgaccccggtgttttcacggaactgatcaaaggatttggctgtagaggcgctcaggtcgaagaaatttggtccttggagcccgaaaactttgaaaagctgaagcccgtgcatggattgatttttctgttcaaatggcagcctggcgaagagccagccgggagtgtggtgcaggacagtcggctggatacgatcttctttgctaaacaggttattaataacgcctgcgccactcaggcaatcgtatcggtcttactgaattgcacacaccaggacgtgcaccttggagaaactctctccgagtttaaagagttttctcagtccttcgatgccgcgatgaagggcctggcgctaagcaactctgatgtcataaggcaggttcacaatagctttgcacggcagcagatgtttgagttcgataccaagacgtccgccaaggaagaagatgccttccatttcgtaagctatgtccccgtgaatgggcgcctctacgagttagatggactcagagaggggccaattgatctgggagcgtgtaatcaagacgattggatcagtgcagttcgtccagtcatcgaaaagcggatccagaaatactctgaaggagagatacgtttcaacttgatggccatcgtatccgaccggaagatgatctatgagcagaaaattgcagagcttcagaggcagctcgcggaggagcccatggatactgaccaaggtaatagcatgctctcagcaattcagtcagaagtggctaaaaaccaaatgctcatcgaagaagaggtgcagaaactgaagcgatacaagatcgagaacattcgccggaaacacaattatctccctttcataatggagttgttgaaaacactagctgagcaccagcaattaatacccctggtcgaaaaagccaaggagaaacagaatgccaaaaaagcccaggaaacaaaatag

SEQ ID NO: 77367 - DNA, 951 bp, Artificial Sequence
  derived and/or modified sequence
atgactggaaatgctggggagtggtgcctgatggagagtgaccccggggtcttcacagagctgatcaagggcttcggctgccgcggggcccaggtggaggagatctggagcctggagccagaaaattttgagaagctgaagcctgtgcacggcctcatcttcctgttcaagtggcagcccggggaggagcctgctggctctgtggtgcaggacagccggctggacaccatcttctttgccaagcaggtgatcaacaatgcctgtgccacccaggccatcgtgtctgtgctgctgaactgcacccaccaggatgtgcacctgggggagaccctgtctgagttcaaggagttcagccagagctttgatgctgccatgaagggcctggccctgagcaacagtgatgtgatccggcaggtgcacaacagctttgcccggcagcagatgtttgaatttgacaccaagaccagcgccaaggaggaggatgccttccactttgtgtcctatgtgcctgtgaatggccgcctgtatgagctggatggcctgcgggagggccccatcgacctgggcgcctgcaaccaggatgactggatctctgctgtgcggcctgtgattgagaagaggatccagaagtacagcgagggggagatccgcttcaacctgatggccatcgtgtctgacaggaagatgatctatgagcagaagattgctgagctgcagaggcagctggccgaggagcccatggacacagaccagggcaacagcatgctgagcgccatccagagcgaggtggccaagaaccagatgctgattgaggaggaggtgcagaagctgaagcgctacaagattgagaacatccggaggaagcacaactacctgcccttcatcatggagctgctgaagaccctggccgagcaccagcagctgatccccctggtggagaagggcaagtag

SEQ ID NO: 77368 - DNA, 579 bp, Artificial Sequence
  derived and/or modified sequence
atgaagggcctggccctgagcaacagtgatgtgatccggcaggtgcacaacagctttgcccggcagcagatgtttgaatttgacaccaagaccagcgccaaggaggaggatgccttccactttgtgtcctatgtgcctgtgaatggccgcctgtatgagctggatggcctgcgggagggccccatcgacctgggcgcctgcaaccaggatgactggatctctgctgtgcggcctgtgattgagaagaggatccagaagtacagcgagggggagatccgcttcaacctgatggccatcgtgtctgacaggaagatgatctatgagcagaagattgctgagctgcagaggcagctggccgaggagcccatggacacagaccagggcaacagcatgctgagcgccatccagagcgaggtggccaagaaccagatgctgattgaggaggaggtgcagaagctgaagcgctacaagattgagaacatccggaggaagcacaactacctgcccttcatcatggagctgctgaagaccctggccgagcaccagcagctgatccccctggtggagaagatcttctag

SEQ ID NO: 77369 - DNA, 987 bp, Artificial Sequence
  derived and/or modified sequence
atgactggaaatgctggggagtggtgcctgatggagagtgaccccggggtcttcacagagctgatcaagggcttcggctgccgcggggcccaggtggaggagatctggagcctggagccagaaaattttgagaagctgaagcctgtgcacggcctcatcttcctgttcaagtggcagcccggggaggagcctgctggctctgtggtgcaggacagccggctggacaccatcttctttgccaagcaggtgatcaacaatgcctgtgccacccaggccatcgtgtctgtgctgctgaactgcacccaccaggatgtgcacctgggggagaccctgtctgagttcaaggagttcagccagagctttgatgctgccatgaagggcctggccctgagcaacagtgatgtgatccggcaggtgcacaacagctttgcccggcagcagatgtttgaatttgacaccaagaccagcgccaaggaggaggatgccttccactttgtgtcctatgtgcctgtgaatggccgcctgtatgagctggatggcctgcgggagggccccatcgacctgggcgcctgcaaccaggatgactggatctctgctgtgcggcctgtgattgagaagaggatccagaagtacagcgagggggagatccgcttcaacctgatggccatcgtgtctgacaggaagatgatctatgagcagaagattgctgagctgcagaggcagctggccgaggagcccatggacacagaccagggcaacagcatgctgagcgccatccagagcgaggtggccaagaaccagatgctgattgaggaggaggtgcagaagctgaagcgctacaagattgagaacatccggaggaagcacaactacctgcccttcatcatggagctgctgaagaccctggccgagcaccagcagctgatccccctggtggagaaggccaaggagaagcagaatgccaagaaggcccaggagaccaagtag

SEQ ID NO: 77370 - DNA, 951 bp, Artificial Sequence
  derived and/or modified sequence
atgaccggcaacgccggcgagtggtgcctgatggagagcgaccccggcgtgtttaccgagctgatcaagggatttggatgcagaggggctcaggtcgaagaaatttggtccctggaaccggaaaactttgaaaagttgaagccggtacacggtttaatctttctctttaaatggcagccgggagaggagccagccgggagcgtggttcaggatagccgtttagacacaatctttttcgccaagcaagtgatcaataatgcctgtgccacgcaggctatcgtcagcgtgttgctcaactgtactcaccaggatgtccacctaggagagacactctcagaattcaaagaattttcccagagcttcgacgccgccatgaagggtctggccctatctaattccgatgttatccggcaggtccataactcttttgctagacagcagatgtttgagttcgacaccaagactagcgccaaggaagaggacgcctttcactttgtcagctacgtgccagtcaatgggcgcttgtacgagctggatggtttgcgggagggacccattgatttgggagcctgtaatcaggacgactggatctcggccgtccgacctgtgattgagaaacgaatccagaaatattccgagggcgagatacggtttaatctcatggccattgtcagtgaccggaagatgatctacgaacagaagatcgcggagctacagaggcaattagcagaagaacctatggatacggaccaaggaaattcaatgctaagcgccatacagtccgaggtggctaagaaccagatgctaatagaggaggaggtccaaaagttgaaaagatataaaattgagaatatacggaggaagcataattacttgccgttcattatggaactgctgaaaaccctcgccgaacaccagcaactgattcctctcgtcgagaagggaaagtag

SEQ ID NO: 77371 - DNA, 579 bp, Artificial Sequence
  derived and/or modified sequence
atgaagggcctggccctgagcaacagcgacgtgatccggcaggtgcacaattccttcgcgcgacaacagatgttcgaattcgacaccaagacaagcgccaaagaagaggatgctttccacttcgtgtcttacgtgccagtgaatggccgcctctatgagctggacggccttcgggagggacccatagaccttggcgcctgtaatcaggatgactggatctcagctgttcggcctgtgatcgaaaagcggattcagaagtattcggagggggaaataagattcaacctgatggctatcgtgagtgaccgcaaaatgatctacgagcagaagatcgcagagctgcagcggcaactggctgaggaacccatggatactgaccagggaaattcgatgctgtccgccatacagagcgaggtcgccaaaaatcagatgctcattgaggaagaggtacagaaactgaagaggtataaaattgagaacattaggagaaaacacaactatctgccttttatcatggagcttctgaaaaccctcgcagagcaccagcagcttatcccccttgtggagaagattttttag

SEQ ID NO: 77372 - DNA, 987 bp, Artificial Sequence
  derived and/or modified sequence
atgaccggcaacgccggcgagtggtgcctgatggagagcgaccccggagtctttactgaactaattaaagggtttgggtgtcgcggcgcccaggtcgaagagatttggagtttggaacctgagaacttcgaaaagctgaagcccgtacatggattaatcttcctgttcaagtggcagcctggggaggaacctgccggtagtgtggtacaggatagtcgtttggatactatcttttttgccaagcaggtaatcaataacgcttgtgcaacccaggcgattgtctctgtgttgctgaactgcacccatcaagatgttcatctaggggagactctctcagagtttaaggagttttcacaatctttcgatgccgctatgaagggcctggctctctctaattccgacgtgatccgacaggttcacaactcttttgcacgtcaacagatgttcgaattcgatactaaaacctcggctaaggaagaggatgcttttcatttcgtatcatatgtcccagtgaatgggcgactgtacgagttggacgggctgcgcgaaggaccaattgatcttggtgcgtgcaaccaggacgattggattagcgcagtcagacctgtaatcgaaaaacggatacagaaatacagtgaaggcgaaattcgctttaatctcatggcaattgtgtcagatcgcaagatgatttacgagcagaaaatagcggaattacaaaggcagctcgctgaggagccaatggacacggatcaaggtaattcgatgctgtctgcaatacagagcgaagtagcaaagaaccagatgctgattgaagaggaggtccaaaaactcaagcgctataaaattgagaatatacgtcggaaacacaactatttaccgtttatcatggagttgttgaagacactcgccgagcaccaacagctgattcctctggtggaaaaggccaaagagaagcagaacgcgaagaaagcccaagagacgaaatag

SEQ ID NO: 77373 - DNA, 951 bp, Artificial Sequence
  derived and/or modified sequence
atgacggggaacgccggagagtggtgcctcatggagagtgatcccggtgtgttcaccgagctcatcaagggctttggctgccgcggagcccaggtggaagaaatttggtcccttgaaccggagaatttcgagaaactaaagcctgtgcatggcctgatattcctttttaagtggcagcctggagaggagcccgcagggtcagtggtgcaggattccaggctggataccatctttttcgccaaacaggtgattaataacgcgtgcgccactcaggctattgtcagcgtgctgttgaactgcacccatcaggatgtgcacctgggtgaaactctgagtgagttcaaggagttttcccagtcgttcgacgctgctatgaagggcctcgccctaagtaatagtgatgttattcgacaggtgcacaactccttcgcaaggcagcagatgttcgagttcgatacaaaaacaagcgctaaagaagaggacgcgttccatttcgtgtcttacgtgccggttaatggacggctttatgagctcgatggcctacgagagggcccaatagacttgggtgcctgcaaccaggacgactggatcagcgcggtacggcctgtcattgagaaacgaatacagaaatacagcgagggagagattaggttcaatttaatggcaattgtgtctgacagaaaaatgatttatgagcagaaaattgcggagcttcagcggcagttggctgaggaaccgatggacacagaccaaggcaattctatgttaagtgctatccaaagcgaagtggctaaaaatcagatgttaatcgaggaggaggtgcaaaagctgaagcggtacaaaatagagaacataagacggaagcataattacctgccctttatcatggagcttctgaaaaccttggctgagcatcagcagctcattcccttagttgaaaaaggcaagtag

SEQ ID NO: 77374 - DNA, 579 bp, Artificial Sequence
  derived and/or modified sequence
atgaagggactggccctgtcaaatagtgatgtaatccggcaagtgcataatagcttcgctagacagcagatgttcgagttcgatactaagacttctgccaaggaggaggacgccttccacttcgtcagctatgtgcctgtcaatggtcgcctgtatgaactggacggcctgcgggaagggccaatcgacctgggggcatgtaaccaagatgactggataagtgcagtgcggcctgtgatcgaaaaaagaatccagaagtatagtgaaggtgagatccggtttaatctcatggctatagtttcggataggaaaatgatctacgaacaaaaaattgcggagctccagagacagctcgccgaggagcccatggatacggaccaaggcaatagcatgctgagcgccattcaatccgaggttgccaaaaatcagatgcttatcgaagaggaagtgcagaaacttaagcggtacaagattgagaatataaggcgaaagcacaattatctaccctttattatggagctcctcaaaactctagccgagcaccaacagcttattccactggtggaaaaaattttctag

SEQ ID NO: 77375 - DNA, 987 bp, Artificial Sequence
  derived and/or modified sequence
atgaccgggaatgctggcgaatggtgtctaatggagtctgatccaggagtgttcacggagctgataaaaggtttcggctgcaggggcgcacaagtcgaggagatatggtcactggagcccgagaatttcgaaaaattgaaacctgtgcatggattgatcttcctctttaaatggcaaccaggcgaggagcctgccggatctgtcgtgcaggattcccggctggacaccatctttttcgccaagcaagtgatcaataacgcatgcgccactcaggctatcgtgtcagtgctgctgaattgcacccaccaggacgtgcacctgggcgaaactttaagcgagttcaaagaattttcacaatccttcgacgcggcaatgaaaggattagccctcagtaactccgatgtgatcagacaggtgcataacagcttcgctaggcagcagatgttcgaattcgacacaaagacttcggcaaaagaggaagacgcattccatttcgttagctacgtgcccgtgaatggtcgattgtatgaactggacggtctgcgcgaggggcctatcgaccttggtgcttgtaatcaagacgactggattagtgccgtgcgaccggtcattgagaaacgaattcagaagtacagtgaaggggagattcggttcaatctgatggctatcgtctcagaccggaagatgatttatgagcaaaagatagctgaactacagaggcagttggcagaggaaccgatggatactgaccagggtaattctatgctgtcagccattcagtctgaggtggctaaaaaccagatgctgatcgaagaagaggtgcaaaagctgaagcggtacaaaatcgagaacatcaggcgaaagcacaattaccttccctttatcatggagctgctgaagacgctagccgaacatcaacagctgataccactggtggagaaggcaaaggagaagcagaatgcaaagaaagctcaggaaacaaaatag

SEQ ID NO: 77376 - protein, 366 aa, Artificial Sequence
  derived and/or modified sequence
MNSSPAGTPSPQPSRANGNINLGPSANPNAQPTDFDFLKVIGKGNYGKVLLAKRKSDGAFYAVKVLQKKSILKKKESHIMAERSVLLKNVRHPFLVGLRYSFQTPEKLYFVLDYVNGGELFFHLQRERRFLEPRARFYAAEVASAIGYLHSLNIIYRDLKPENILLDCQGHVVLTDFGLCKEGVEPEDTTSTFCGTPEYLAPEVLRKEPYDRAVDWWCLGAVLYEMLHGLPPFYSQDVSQMYENILHQPLQIPGGRTVAACDLLQSLLHKDQRQRLGSKADFLEIKNHVFFSPINWDDLYHKRLTPPFNPNVTGPADLKHFDPEFTQEAVSKSIGCTPDTVASSSGASSAFLGFSYAPEDDDILDC

SEQ ID NO: 77377 - protein, 367 aa, Artificial Sequence
  derived and/or modified sequence
MNSSPAGTPSPQPSRANGNINLGPSANPNAQPTDFDFLKVIGKGNYGKVLLAKRKSDGAFYAVKVLQKKSILKKKEQSHIMAERSVLLKNVRHPFLVGLRYSFQTPEKLYFVLDYVNGGELFFHLQRERRFLEPRARFYAAEVASAIGYLHSLNIIYRDLKPENILLDCQGHVVLTDFGLCKEGVEPEDTTSTFCGTPEYLAPEVLRKEPYDRAVDWWCLGAVLYEMLHGLPPFYSQDVSQMYENILHQPLQIPGGRTVAACDLLQSLLHKDQRQRLGSKADFLEIKNHVFFSPINWDDLYHKRLTPPFNPNVTGPADLKHFDPEFTQEAVSKSIGCTPDTVASSSGASSAFLGFSYAPEDDDILDC

SEQ ID NO: 77378 - protein, 198 aa, Artificial Sequence
  derived and/or modified sequence
MNSSPAGTPSPQPSRANGNINLGPSANPNAQPTDFDFLKVIGKGNYGKVLLAKRKSDGAFYAVKVLQKKSILKKKESHIMAERSVLLKNVRHPFLVGLRYSFQTPEKLYFVLDYVNGGELFFHLQRERRFLEPRARFYAAEVASAIGYLHSLNIIYRDLKPENILLDCQGHVVLTDFGLCKEGVEPEDTTSTFCGTPE

SEQ ID NO: 77379 - DNA, 1101 bp, Artificial Sequence
  derived and/or modified sequence
atgaattcatctcccgctggtacacccagtccacaaccttctcgggctaatggcaatataaacctggggccaagtgccaatccgaacgcgcagcctactgactttgacttcctgaaggttatcggtaaagggaactatggcaaagtgctgcttgctaagagaaagtcagacggcgcattctacgcagtgaaggtgttacagaaaaagagcatcctcaagaagaaagagagtcatatcatggctgagagatccgttctccttaagaatgtgcgacacccattcttagttggactgcgttactcatttcagacacctgagaagctatattttgtactagattatgtcaatggtggggagctgttttttcatctgcagagggagagacgatttctcgagcctagggccagattctacgctgccgaggtggcatctgctataggctatctgcatagcttaaatatcatctacagagatctgaagccagagaacatactgctggattgtcaggggcatgtggttttgactgacttcggcttatgcaaggagggagtagaaccagaagatacaacatccacattttgcgggactcccgagtatctggccccagaggtccttaggaaggagccatacgacagggctgtggactggtggtgcctgggggctgtgctttacgagatgttgcacggcctgcccccattttattcacaggatgtctcacaaatgtacgaaaatatcctgcatcagcctctgcagatacctggagggcggacagtggcggcctgcgatctcctacagagcctcctccacaaggatcagaggcaaaggttaggctcaaaagccgactttctcgagatcaagaatcacgtctttttttcacctatcaactgggacgacctataccacaaacgattaaccccccctttcaaccccaatgtgaccggacccgccgaccttaaacattttgatccggaatttactcaggaggcagtcagcaaaagcataggttgcacgccggacacagtggcatccagctcaggtgcctcttctgcgttcctcggcttctcttacgcccccgaggacgatgacattctggactgctag

SEQ ID NO: 77380 - DNA, 1104 bp, Artificial Sequence
  derived and/or modified sequence
atgaacagttctccggctgggacaccaagccctcagccaagccgggccaatggcaacattaacctcgggccctccgctaaccctaatgcacagccaacagatttcgactttctgaaggtcatcggaaaggggaactacggcaaggtcctcctcgccaagcgaaaatctgatggcgctttctacgccgtcaaagtgttacagaaaaaatctattctgaaaaagaaggaacaatctcacatcatggccgagagatccgtcctgctgaaaaacgtcaggcaccccttcctcgttggactcagatattcttttcagacaccagaaaaactgtactttgtgctggattacgtgaacggtggagaattgttttttcacctccagagggagcgcaggttccttgagcctcgtgcaagattctacgcggccgaggtagcatctgccattggatatctgcacagcctaaatattatctacagagatttgaagccggagaacattctcctcgattgccagggacatgtcgtgctgacagattttggtctgtgtaaagagggagtggagcctgaagacactacaagtaccttctgcggtaccccggagtacctggcaccggaagtcctgcgcaaagagccatacgaccgcgctgtggactggtggtgcttgggggccgtcctgtatgaaatgctgcatggattgcctcccttttacagccaggacgtctcacagatgtacgagaatattttgcaccaacctctacagatcccagggggccgaaccgtcgctgcatgcgacctgttgcagagtttgctgcataaggaccaacgacagcgcttgggatctaaagctgattttcttgagattaagaaccacgttttctttagcccgattaattgggatgacctgtaccataagaggctgacacccccattcaatcccaacgtcacaggccctgcagacttgaagcacttcgacccggagttcacacaagaagccgtgtctaaaagcatcggatgcacgcctgatactgtggcctctagttcaggggcctcttcggcctttctgggttttagctatgccccagaggacgacgatatccttgattgttag

SEQ ID NO: 77381 - DNA, 1104 bp, Artificial Sequence
  derived and/or modified sequence
atgaactcctcccccgctgggacgcctagcccccaacctagcagggccaacggaaacatcaacctaggccccagcgctaacccaaatgcccagccaactgacttcgatttcttaaaggtaattggaaagggtaactacggaaaggtgctcctcgccaaaagaaaatcagacggcgctttctatgctgtaaaagtgttacaaaaaaagtctatcctcaaaaaaaaagagcagtcccacatcatggctgagcggtcagtattactcaaaaacgtgaggcatccctttctcgtcgggttaaggtactcattccaaacccctgagaaactctattttgtgttggactatgtcaacggaggcgagttattcttccaccttcagcgggagaggaggtttttagaaccaagggctcgattctacgcggcagaggtggccagtgctatcggatacctgcattcgcttaacattatataccgggaccttaagcccgagaacatcctcctagactgccagggccacgtggtgctgaccgactttgggctgtgcaaagaaggcgtggaacccgaggatactacctccactttctgtggcacaccagagtatctcgcccccgaggtgttgagaaaagagccgtatgatcgtgctgtcgattggtggtgcctaggggctgtcctgtatgagatgttacacggtttaccaccgttctattctcaggacgtatcgcagatgtatgaaaacatcctgcatcagccgttgcaaatcccaggcgggcgaacggtggcagcatgcgacctgttgcagtcactactacacaaggatcaaagacagaggctcggaagcaaggcggattttctggaaataaagaatcatgtctttttcagccccataaactgggacgatttataccacaaaaggcttacgccaccttttaaccccaacgtgaccggccccgcagatctgaaacacttcgatccagagtttacccaggaggcggtcagtaaatctattgggtgcacgcctgacaccgttgcatcctccagcggggctagttctgcattcttggggttctcttatgcccctgaagatgatgacattttggattgttag

SEQ ID NO: 77382 - DNA, 597 bp, Artificial Sequence
  derived and/or modified sequence
atgaatagttctccagcgggcacaccctccccccagcctagtcgggctaacggcaacatcaatctggggccaagcgccaatccaaacgctcaacctactgacttcgacttcctcaaggttatcgggaagggcaactatggtaaagtcctgctcgccaaaaggaagagtgacggcgctttctacgccgtcaaagtgttacagaagaagagcattctgaagaaaaaagagtctcacatcatggccgaacggagtgtgctacttaaaaacgtgcggcaccccttcctggtcggtctcaggtactcctttcaaacgccagaaaagctttatttcgtcctcgattatgtgaatggcggagagctattctttcaccttcaacgcgaacgtaggttcctggaaccccgcgcccgcttttacgccgccgaagtagcgtccgccatcgggtaccttcacagtcttaacatcatctatagggacttgaaacctgagaatatcttgctggattgtcaggggcacgtcgtgctgacagattttggcctgtgcaaggaaggcgtggaacctgaggataccacctccacattttgtggaaccccggagtag

SEQ ID NO: 77383 - DNA, 1104 bp, Artificial Sequence
  derived and/or modified sequence
atgaattcatcccccgccggaacaccaagtcctcagcctagtagagccaacggcaacatcaatctgggcccgtcagcgaatccgaacgcccagcctacagattttgacttccttaaagtcattggcaaaggaaattatggtaaggtgttgctggcaaagagaaagagcgacggcgcattctacgctgtgaaagtcctgcagaagaagagtatcctgaagaagaaagagcagagccacatcatggccgagcggagcgttctgctaaagaacgttcggcaccctttcttggtgggccttcgctatagttttcaaactccggagaaattgtactttgtacttgactatgttaacggaggggagctcttcttccatctgcagcgcgaaagacgcttcctggaacccagggcccggttttatgccgctgaggttgcttccgctatcgggtacctgcacagtctcaatataatttaccgggatctgaaaccagaaaacatattactggattgccaaggccatgtggtcctgaccgactttgggctgtgtaaagaaggagtggaacccgaggacacaacctctactttttgtggcactcccgaatacctggcccccgaggtactgaggaaggagccttatgaccgagccgtcgattggtggtgcttgggggcagtcctgtatgagatgctacacggactgcccccattctattcacaagatgtcagtcaaatgtatgaaaacatccttcatcaacccttgcagatccccggtggcaggacagtggcagcatgtgatttgctgcagtcactgttacacaaagatcaaagacagagactgggcagcaaggccgattttctggagattaaaaaccatgtatttttctctcctattaactgggacgatctctatcataagcgactgaccccgcctttcaatccgaatgtgacgggcccggccgatctcaagcacttcgatcccgaattcacacaggaggcagtctccaaatcaatcggatgcacacccgacaccgtcgcgtctagttcaggtgcaagctccgcttttctgggattctcatatgcacctgaggatgacgatatcctggattgttag

SEQ ID NO: 77384 - DNA, 1101 bp, Artificial Sequence
  derived and/or modified sequence
atgaacagcagccctgctggcacccccagcccccagcccagccgggccaatggaaacatcaacctgggccccagcgccaaccccaatgcccagcccacagactttgacttcctgaaggtgattggaaaaggaaactacggcaaggtgctgctggccaagaggaagagtgatggagccttctatgctgtgaaggtgctgcagaagaagagcatcctgaagaagaaggagagccacatcatggccgagaggtctgtgctgctgaagaatgtgcgccaccccttcctggtgggcctgcgctacagcttccagaccccagagaagctgtactttgtgctggactatgtgaatggaggagagctgttcttccacctgcagcgggagcggcgcttcctggagccccgggcccgcttctatgctgctgaggtggccagcgccatcggctacctgcacagcctgaacatcatctacagagacctgaagccagagaacatcctgctggactgccagggccacgtggtgctgacagactttggcctgtgcaaggagggcgtggagcctgaggacaccaccagcaccttctgtggcaccccagagtacctggcccctgaggtgctgaggaaggagccctatgacagagctgtggactggtggtgcctgggcgctgtgctgtatgagatgctgcacggcctgccccccttctacagccaggatgtgtcccagatgtatgagaacatcctgcaccagcccctgcagatccctgggggccgcacagtggccgcctgtgacctgctgcagagcctgctgcacaaggaccagaggcagaggctgggcagcaaggctgacttcctggagatcaagaaccacgtgttcttcagccccatcaactgggatgacctgtaccacaagaggctgaccccacccttcaaccccaacgtgactggacctgctgacctgaagcactttgatcctgagttcacccaggaggccgtgtccaagagcatcggctgcaccccagacacagtggccagcagcagcggggccagcagcgccttcctgggcttctcctatgccccagaagatgatgacatcctggactgctag

SEQ ID NO: 77385 - DNA, 1104 bp, Artificial Sequence
  derived and/or modified sequence
atgaacagcagccctgctggcacccccagcccccagcccagccgggccaatggaaacatcaacctgggccccagcgccaaccccaatgcccagcccacagactttgacttcctgaaggtgattggaaaaggaaactacggcaaggtgctgctggccaagaggaagagtgatggagccttctatgctgtgaaggtgctgcagaagaagagcatcctgaagaagaaggagcagagccacatcatggccgagaggtctgtgctgctgaagaatgtgcgccaccccttcctggtgggcctgcgctacagcttccagaccccagagaagctgtactttgtgctggactatgtgaatggaggagagctgttcttccacctgcagcgggagcggcgcttcctggagccccgggcccgcttctacgccgctgaggtggccagcgccatcggctacctgcacagcctgaacatcatctacagagacctgaagccagagaacatcctgctggactgccagggccacgtggtgctgacagactttggcctgtgcaaggagggcgtggagcctgaggacaccaccagcaccttctgtggcaccccagagtacctggcccctgaggtgctgaggaaggagccctatgacagagctgtggactggtggtgcctgggcgctgtgctgtatgagatgctgcacggcctgccccccttctacagccaggatgtgtcccagatgtatgagaacatcctgcaccagcccctgcagatccctgggggccgcacagtggccgcctgtgacctgctgcagagcctgctgcacaaggaccagaggcagaggctgggcagcaaggctgacttcctggagatcaagaaccacgtgttcttcagccccatcaactgggatgacctgtaccacaagaggctgaccccacccttcaaccccaacgtgacaggccctgctgacctgaagcactttgatcctgagttcacccaggaggccgtgtccaagagcatcggctgcaccccagacacagtggccagcagcagcggggccagcagcgccttcctgggcttctcctatgccccagaagatgatgacatcctggactgctag

SEQ ID NO: 77386 - DNA, 597 bp, Artificial Sequence
  derived and/or modified sequence
atgaacagcagccctgctggcacccccagcccccagcccagccgggccaatggaaacatcaacctgggccccagcgccaaccccaatgcccagcccacagactttgacttcctgaaggtgattggaaaaggaaactacggcaaggtgctgctggccaagaggaagagtgatggagccttctatgctgtgaaggtgctgcagaagaagagcatcctgaagaagaaggagagccacatcatggccgagaggtctgtgctgctgaagaatgtgcgccaccccttcctggtgggcctgcgctacagcttccagaccccagagaagctgtactttgtgctggactatgtgaatggaggagagctgttcttccacctgcagcgggagcggcgcttcctggagccccgggcccgcttctatgctgctgaggtggccagcgccatcggctacctgcacagcctgaacatcatctacagagacctgaagccagagaacatcctgctggactgccagggccacgtggtgctgacagactttggcctgtgcaaggagggcgtggagcctgaggacaccaccagcaccttctgtggcaccccagagtag

SEQ ID NO: 77387 - DNA, 1101 bp, Artificial Sequence
  derived and/or modified sequence
atgaacagcagccccgccggcacccccagcccccagcccagccgggccaatggaaacattaatttgggccctagcgccaatccaaacgcccagccaactgacttcgactttctgaaagtcatcggaaagggcaactatggcaaagtcctgcttgcaaagaggaaatcggatggtgccttttatgctgtcaaggtgttgcagaaaaagagcatcctcaaaaaaaaggaatcacatattatggctgagcgcagcgtgttactgaagaatgtgaggcacccatttttagttggactgcggtatagctttcaaacgcccgagaagttatatttcgtacttgactacgtgaatggcggcgagctttttttccacctacagcgtgagcgtcgctttctggaaccccgggcacgattttacgccgcagaagttgcaagcgctatcgggtatctgcacagtttgaacataatatatagagatttgaaaccggagaacatcctgctggactgccagggtcacgtggtgctgacagatttcggcctctgcaaagaaggcgttgagccggaggatactacctcaacattctgtggcacccccgagtacctggcccctgaagtgttgcgaaaagaaccctacgacagagcagtggactggtggtgcctcggggctgtcctatatgagatgttgcacggcttgccacccttttattctcaggatgtgtcacagatgtatgagaatattctccatcaacctctccagattcccggcgggaggactgtggctgcatgcgatctcctccagtcactgctgcataaagaccagcgccagcggctgggctcaaaggctgatttcttggagatcaaaaaccacgtttttttctcacctataaactgggatgatctttaccataaaagacttacgcccccttttaaccctaacgtgaccgggcctgcagacttaaagcactttgatccagagttcacacaagaggcagtttccaaatctattggctgtacgccagatactgtcgcgtccagctcaggcgcctcgtcagccttcctcggcttctcttacgctccagaggatgatgacatcctggactgttag

SEQ ID NO: 77388 - DNA, 1104 bp, Artificial Sequence
  derived and/or modified sequence
atgaacagcagccccgccggcacccccagcccccagcccagccgggctaacgggaacattaacctgggccccagcgctaatccgaatgctcagccgactgactttgattttctgaaagtcattggtaagggtaactacggtaaagtgctgctggcaaagagaaagtccgacggggccttttatgccgttaaggttctgcagaaaaagtcgattttgaaaaagaaggaacaatcgcatataatggcagagagatcggttctgctgaaaaacgtacgacatccttttctcgtgggtttgcgatacagcttccaaacccctgagaaactctatttcgttctcgactacgttaacgggggcgagctgttcttccatctacaacgtgagcgcagattcctggagccccgggcccgattttatgccgccgaagtggcctccgctatagggtacctgcattctctgaatatcatttacagagatcttaaacccgagaatatcttgctcgactgccaaggccatgtggtgctgacggacttcggcctgtgcaaggaaggcgttgagcccgaagataccacatcgacattctgcgggacaccagagtaccttgcacccgaagttctgcgcaaggagccttacgacagggcggtcgattggtggtgcctcggagctgtcctttatgagatgttgcatggcctgccccctttctatagtcaggacgtgtctcagatgtacgaaaatattttgcaccagccgctgcaaattccaggtggtcgaaccgtggctgcgtgtgatcttcttcagtccttgctccataaggatcagcgccagcgcctgggatcaaaagctgatttcctcgagattaaaaatcacgtattcttttcaccaattaattgggatgatctgtaccacaagaggctgactccacctttcaacccgaacgttacaggcccagcagatttaaagcatttcgatcctgagttcacacaagaggccgtgtccaagtcgatcggttgtaccccagacacagtggcttccagcagcggggcatcttccgcctttctcgggttttcctacgctcctgaggacgatgacatcctggactgctag

SEQ ID NO: 77389 - DNA, 1104 bp, Artificial Sequence
  derived and/or modified sequence
atgaacagcagccccgccggcacccccagcccccagcccagccgggctaatggcaatattaacctcgggccatccgctaatcccaatgcccaacctacagatttcgatttcctgaaagtgatcggcaaaggcaattatggcaaggttctgttagccaaacggaaaagcgatggagcattttacgccgtgaaagtgctgcagaagaaaagcatcctaaagaagaaagagcagagccatatcatggccgaacggagtgtactgctgaagaacgtgcgccatccctttttagtggggctgcgatactcattccaaacacccgagaagctgtatttcgtgttggattatgtgaatggtggtgagctattcttccaccttcagcgggaaaggcgcttcctagaacctagggcccgtttctacgcagccgaggtcgcttctgcaatcgggtacttacatagcctcaacattatctacagagatctcaaaccagaaaatatacttctggattgtcagggccacgtcgtgctcaccgacttcgggctgtgcaaggagggagtggagcctgaggacactactagcacattctgcgggacccctgagtatctcgctccagaagtcctccgcaaggagccttacgaccgcgccgtggactggtggtgtttaggggcagttctttatgagatgttacacggactccctcctttctacagtcaagatgtgtcgcagatgtatgagaatattttacatcagcccctgcaaattccgggagggcgaactgtggcagcctgtgacctgcttcagtcgctactgcacaaagaccagagacagcggctggggtccaaagcagatttcctcgaaattaaaaaccacgtgttcttctcaccaatcaattgggatgacctgtatcacaaacgcctgactccgccattcaatccaaacgtaaccgggcctgcagatttaaagcactttgatcctgagttcacccaagaggccgtgtctaagagcattggctgcacccctgatacagtggcttcatctagtggcgctagttctgctttcttaggtttctcgtacgcccccgaggatgatgatattctggactgctag

SEQ ID NO: 77390 - DNA, 597 bp, Artificial Sequence
  derived and/or modified sequence
atgaacagcagccccgccggcacccccagcccccagcccagccgggcaaacggcaacatcaacttgggcccctcggccaacccgaacgcacagccaaccgatttcgactttctaaaagtcattgggaaagggaactacggaaaggtgctccttgcaaagaggaaatcagatggcgcattctatgctgtaaaagtgctccagaagaagagtattctcaaaaagaaggaatcccacattatggcagaaagatctgtcctgctgaaaaacgtgcggcatcccttcctggtcggattgcgctacagctttcagacaccagagaaactttattttgtgctagattatgttaatggtggtgaacttttctttcacctgcaacgtgagaggagatttctggaaccacgggcacgcttctacgctgctgaagttgctagcgccatcgggtacctgcattcgctgaatattatctacagggatctgaagcccgaaaatatccttctggactgtcagggtcatgtggtgctgaccgatttcggcctgtgtaaggagggtgtggagccggaggacaccacatccactttttgcggtactccagagtag

SEQ ID NO: 77391 - DNA, 1104 bp, Artificial Sequence
  derived and/or modified sequence
atgaacagcagccccgccggcacccccagcccccagcccagccgggcaaacgggaacattaaccttggacccagtgctaaccccaatgcacaaccgacagactttgacttcctgaaagtaattggaaaaggcaactacgggaaggtgctgctggccaagagaaaatccgatggcgccttctacgcggtaaaggtgctgcagaagaaatcaatccttaaaaaaaaggagcagtcccacattatggctgagcggagcgtgttactgaagaacgtgaggcatccgttcctcgtcggcctgcggtacagtttccagacaccagagaagctgtacttcgtactcgactatgtgaatgggggagaactttttttccatctccagcgagagagaaggtttctcgagccaagggctcgcttctatgcagcggaggtggcctcagcaattggatacttgcattcattgaacatcatttatcgggatttgaaacctgaaaatattttgttagactgtcagggccacgtggtgttgaccgattttggcctgtgtaaggagggcgtggagccagaagataccacaagcacattttgcggcactcccgagtatctggccccagaggtgcttcggaaggagccttatgatcgtgccgtggactggtggtgccttggcgcggttctgtacgaaatgctacacggattgcccccattctattcccaggacgtgtctcagatgtatgagaatattttacaccagcccctccagatccctggcggacggaccgtcgcagcatgcgatctcctgcagtctcttcttcacaaagaccagaggcaaaggctgggaagcaaggccgactttttggaaatcaagaaccatgtgttcttctctcctatcaactgggacgatttgtaccacaaaaggctaacccccccattcaaccccaatgtgacgggcccagccgatctcaaacatttcgatcccgagtttacccaggaggctgtctccaagagcataggttgtacccctgacaccgtggcctccagctcaggcgcgtctagcgcattcttgggttttagttacgcaccagaggacgacgatattcttgattgctag

SEQ ID NO: 77392 - DNA, 1101 bp, Artificial Sequence
  derived and/or modified sequence
atgaatagcagccccgcagggacaccaagcccacagcctagccgtgcaaacggaaatattaatctggggcctagcgcgaaccctaacgcccagccaacagatttcgattttctgaaagtcatcggcaaggggaattacggtaaggtcctcctggccaaacgaaagagtgacggtgccttttatgctgtgaaagtcttacagaagaagtcaattttgaaaaaaaaggagtcccacatcatggctgagcggtctgtgctcttgaaaaacgtgaggcacccattcctagtgggcctccggtactcttttcaaaccccagagaagttatatttcgtgcttgactatgtaaacggaggagaactgttttttcacttgcagagggagcgacgttttctggagccaagggcaaggttttacgcagctgaagtcgcgtctgctataggctacctgcacagtttgaatatcatctatcgggatcttaagcctgagaacatcctcttggattgtcagggtcacgtcgtgctcaccgatttcggcctctgtaaggaaggggtggagccagaggacactacctcgacgttttgtggcacccctgagtacttggccccagaggtcctcaggaaagagccctacgaccgagcggtggattggtggtgtctgggagccgtactctacgagatgttgcacggcctgccgcctttctactcacaagacgtgtcccagatgtacgagaacatcttacatcagcctctgcagatcccaggagggaggaccgttgcggcttgcgacttgctgcaatctctactccataaggatcagagacagcgcctgggaagtaaagctgacttcctggaaattaaaaaccacgtgtttttctcccccatcaactgggacgacctgtaccataaaaggttaacccccccattcaatcccaacgttacgggaccagccgatctgaaacattttgatcccgagttcactcaggaggctgtcagcaaaagtatcggctgtacgcctgacactgtagctagctcgagcggggcatcctcggcattcctaggattttcctacgctcctgaagacgatgacatcctggactgctag

SEQ ID NO: 77393 - DNA, 1104 bp, Artificial Sequence
  derived and/or modified sequence
atgaactcttccccagccggaaccccatccccccagccctcccgggctaacgggaacattaacttgggtccatcagcaaaccctaatgcacagccgacggactttgacttcttgaaggtgataggcaagggcaactatggaaaagtcctgctggccaagcgcaagtccgatggcgctttctatgctgtaaaagtcttgcagaagaagtcgatactgaagaagaaggagcaatctcatatcatggccgagcggtccgttctcttaaaaaacgtccggcacccttttttggtgggactgaggtacagctttcaaacacccgagaaactatacttcgtcttagactatgtcaacggcggtgaactgttctttcacctccaacgagaaagaaggtttctggagcccagggctaggttttatgctgccgaggtggcgtccgctataggctacctccattcgcttaacatcatttatcgggacctgaagcccgagaatattctcctagactgccaggggcatgttgtgctgactgatttcggcctgtgcaaggagggagtggagcctgaagatacaacttccactttttgtggtaccccagaatatttggctcctgaagtcttgcgcaaagaaccttatgacagagctgttgattggtggtgtttgggtgctgtgctctatgagatgctccacggactgcctcccttctactcacaagacgtctctcagatgtatgagaatatcctacatcaaccactgcagatcccaggcggaagaacggttgccgcttgcgatctgctgcagtccctcctgcataaggatcagaggcagagactgggctctaaggcggacttccttgaaatcaagaaccacgtgttcttttcccctattaactgggacgatctgtaccataagcggctaacccctccttttaaccccaacgtcactggcccagccgacttaaagcatttcgatcctgagtttacacaggaagcagtgtcgaagtccatcggttgcactccggacacggttgcgtccagctccggagctagctcggccttcttgggcttttcatatgctcccgaagatgacgatattttagactgttag

SEQ ID NO: 77394 - DNA, 1104 bp, Artificial Sequence
  derived and/or modified sequence
atgaatagctcacctgccggtacccctagccctcagccatctagagctaatgggaacattaatctgggaccctctgcaaacccaaacgcccagccaactgacttcgatttcctgaaagtgataggcaaaggcaactacggtaaagtgcttctcgcaaaacggaagagcgatggagctttctatgcagttaaagtgcttcagaaaaaatctatcctcaaaaagaaggaacagtcacacataatggccgagagatctgtgctgctgaaaaacgttagacacccattcctggtgggcctgagatactcttttcaaactcccgaaaaactgtactttgtcctcgattacgtcaatggtggtgaactgttctttcatctgcagcgcgaaagaagattcctcgagcctcgggctcgtttctacgccgctgaggttgcctccgctattgggtatctgcacagtctgaacatcatctatcgggatctaaaacctgaaaatatcttgcttgattgccaaggccatgtcgtgctcaccgattttggtctgtgcaaggagggtgtggagcccgaggacaccactagcaccttctgtggaacacccgaatacctagccccagaggtgctgagaaaggagccttacgaccgggctgttgactggtggtgtctaggtgccgtgctttacgagatgcttcatggcctccccccattctactctcaggacgtgtctcagatgtatgaaaacatacttcatcagccgctccagattcctggcggacgcaccgttgcagcttgtgacctactccagtctctgctgcacaaggaccagaggcagagactgggctcaaaggctgacttcttagagatcaaaaaccacgtcttcttctccccgatcaactgggatgatctatatcacaagcggctcaccccccctttcaatccgaatgtcaccggtccagcagacctcaaacattttgaccccgagttcacccaagaggcagtatctaagtcaatcggatgcacaccggatacagttgccagcagcagtggagcctcatcagcctttctgggattttcctatgcgccagaagacgacgacattctcgactgctag

SEQ ID NO: 77395 - DNA, 597 bp, Artificial Sequence
  derived and/or modified sequence
atgaactcctccccagctggcacgccttcgccacagcccagcagagcaaatggcaacatcaatctgggacccagcgccaacccaaatgcccaaccaaccgactttgatttcctgaaagtcatcggcaaggggaactacgggaaggtcctactggccaagaggaagagcgatggtgccttttacgcagtcaaagtgttgcagaaaaagagcattctcaagaaaaaggagagccacatcatggccgagagaagcgttttactcaagaacgtgaggcatccattcctcgtcggcctcaggtactcattccaaacgcctgagaagctttatttcgtcctcgattacgtcaacggcggtgaactgtttttccacctgcagagggaaaggaggtttctggaaccaagagccagattttatgcggcagaagtggctagcgccatcggttacctccatagcctaaacatcatctatagagacttgaaacccgagaacatcctgctggactgccagggtcacgtggtcctgacagacttcgggctgtgtaaggagggcgtagaacccgaggacaccacctccacattttgtggtacgcctgagtag

SEQ ID NO: 77396 - DNA, 1104 bp, Artificial Sequence
  derived and/or modified sequence
atgaactcttcacccgcaggcaccccatcaccacagcctagcagagccaatggaaacatcaacctcggaccctccgcgaatcccaacgcccaacccaccgatttcgattttttgaaagtcatcggtaagggcaattatggcaaagtcttgctcgccaaacgtaagagcgacggagccttttacgctgtgaaagtgttacaaaagaaatccatactcaaaaaaaaggagcagagccacatcatggcagagaggtcagtgttacttaaaaatgtccggcacccgtttttggtcgggctccgatattcgtttcagacaccagaaaaactgtattttgtgctggactacgtgaacggtggcgagctgttctttcatcttcagcgcgaaagacgcttcctggagcctagggcccgattttatgccgctgaggtggcctccgccataggatacctgcatagcctgaatatcatttatagggatctgaagcctgagaacattctgctggattgccagggccacgtagtccttactgatttcggactttgtaaggaaggggtggaaccagaggatactacgagtacattttgtggcaccccggaatatctggctcctgaagtcttgaggaaggagccatacgaccgcgctgtcgactggtggtgcttgggcgcagtcctgtacgaaatgttgcacgggctccctccgttctacagccaggatgtctcacagatgtatgagaatatcctccaccagcccctacagatccccggagggagaacagtcgctgcctgcgatctactgcagtctctgctacacaaggatcagcggcagaggttgggttctaaagcggattttttagaaatcaaaaaccatgtgtttttcagcccaatcaactgggatgatctataccacaagaggctgactccaccctttaaccccaacgtgacaggcccagcagatctaaaacactttgatcctgagtttacccaggaagccgtgtcaaaatctatcggttgcacccctgataccgtggcatccagcagcggagctagctcagccttcctagggttcagctacgcaccggaggacgatgacattctcgattgctag

SEQ ID NO: 77397 - DNA, 1101 bp, Artificial Sequence
  derived and/or modified sequence
atgaacagcagccccgccggcacccccagcccccagcccagcagagccaacggcaacatcaacctgggccccagcgccaaccccaacgcccagcccaccgacttcgacttcctgaaggtgatcggcaagggcaactacggcaaggtgctgctggccaagagaaagagcgacggcgccttctacgccgtgaaggtgctgcagaagaagagcatcctgaagaagaaggagagccacatcatggccgagagaagcgtgctgctgaagaacgtgagacaccccttcctggtgggcctgagatacagcttccagacccccgagaagctgtacttcgtgctggactacgtgaacggcggcgagctgttcttccacctgcagagagagagaagattcctggagcccagagccagattctacgccgccgaggtggccagcgccatcggctacctgcacagcctgaacatcatctacagagacctgaagcccgagaacatcctgctggactgccagggccacgtggtgctgaccgacttcggcctgtgcaaggagggcgtggagcccgaggacaccaccagcaccttctgcggcacccccgagtacctggcccccgaggtgctgagaaaggagccctacgacagagccgtggactggtggtgcctgggcgccgtgctgtacgagatgctgcacggcctgccccccttctacagccaggacgtgagccagatgtacgagaacatcctgcaccagcccctgcagatccccggcggcagaaccgtggccgcctgcgacctgctgcagagcctgctgcacaaggaccagagacagagactgggcagcaaggccgacttcctggagatcaagaaccacgtgttcttcagccccatcaactgggacgacctgtaccacaagagactgaccccccccttcaaccccaacgtgaccggccccgccgacctgaagcacttcgaccccgagttcacccaggaggccgtgagcaagagcatcggctgcacccccgacaccgtggccagcagcagcggcgccagcagcgccttcctgggcttcagctacgcccccgaggacgacgacatcctggactgctag

SEQ ID NO: 77398 - DNA, 1104 bp, Artificial Sequence
  derived and/or modified sequence
atgaacagcagccccgccggcacccccagcccccagcccagcagagccaacggcaacatcaacctgggccccagcgccaaccccaacgcccagcccaccgacttcgacttcctgaaggtgatcggcaagggcaactacggcaaggtgctgctggccaagagaaagagcgacggcgccttctacgccgtgaaggtgctgcagaagaagagcatcctgaagaagaaggagcagagccacatcatggccgagagaagcgtgctgctgaagaacgtgagacaccccttcctggtgggcctgagatacagcttccagacccccgagaagctgtacttcgtgctggactacgtgaacggcggcgagctgttcttccacctgcagagagagagaagattcctggagcccagagccagattctacgccgccgaggtggccagcgccatcggctacctgcacagcctgaacatcatctacagagacctgaagcccgagaacatcctgctggactgccagggccacgtggtgctgaccgacttcggcctgtgcaaggagggcgtggagcccgaggacaccaccagcaccttctgcggcacccccgagtacctggcccccgaggtgctgagaaaggagccctacgacagagccgtggactggtggtgcctgggcgccgtgctgtacgagatgctgcacggcctgccccccttctacagccaggacgtgagccagatgtacgagaacatcctgcaccagcccctgcagatccccggcggcagaaccgtggccgcctgcgacctgctgcagagcctgctgcacaaggaccagagacagagactgggcagcaaggccgacttcctggagatcaagaaccacgtgttcttcagccccatcaactgggacgacctgtaccacaagagactgaccccccccttcaaccccaacgtgaccggccccgccgacctgaagcacttcgaccccgagttcacccaggaggccgtgagcaagagcatcggctgcacccccgacaccgtggccagcagcagcggcgccagcagcgccttcctgggcttcagctacgcccccgaggacgacgacatcctggactgctag

SEQ ID NO: 77399 - DNA, 597 bp, Artificial Sequence
  derived and/or modified sequence
atgaacagcagccccgccggcacccccagcccccagcccagcagagccaacggcaacatcaacctgggccccagcgccaaccccaacgcccagcccaccgacttcgacttcctgaaggtgatcggcaagggcaactacggcaaggtgctgctggccaagagaaagagcgacggcgccttctacgccgtgaaggtgctgcagaagaagagcatcctgaagaagaaggagagccacatcatggccgagagaagcgtgctgctgaagaacgtgagacaccccttcctggtgggcctgagatacagcttccagacccccgagaagctgtacttcgtgctggactacgtgaacggcggcgagctgttcttccacctgcagagagagagaagattcctggagcccagagccagattctacgccgccgaggtggccagcgccatcggctacctgcacagcctgaacatcatctacagagacctgaagcccgagaacatcctgctggactgccagggccacgtggtgctgaccgacttcggcctgtgcaaggagggcgtggagcccgaggacaccaccagcaccttctgcggcacccccgagtag

SEQ ID NO: 77400 - protein, 934 aa, Artificial Sequence
  derived and/or modified sequence
MEPRDGSPEARSSDSESASASSSGSERDAGPEPDKAPRRLNKRRFPGLRLFGHRKAITKSGLQHLAPPPPTPGAPCSESERQIRSTVDWSESATYGEHIWFETNVSGDFCYVGEQYCVARMLQKSVSRRKCAACKIVVHTPCIEQLEKINFRCKPSFRESGSRNVREPTFVRHHWVHRRRQDGKCRHCGKGFQQKFTFHSKEIVAISCSWCKQAYHSKVSCFMLQQIEEPCSLGVHAAVVIPPTWILRARRPQNTLKASKKKKRASFKRKSSKKGPEEGRWRPFIIRPTPSPLMKPLLVFVNPKSGGNQGAKIIQSFLWYLNPRQVFDLSQGGPKEALEMYRKVHNLRILACGGDGTVGWILSTLDQLRLKPPPPVAILPLGTGNDLARTLNWGGGYTDEPVSKILSHVEEGNVVQLDRWDLHAEPNPEAGPEDRDEGATDRLPLDVFNNYFSLGFDAHVTLEFHESREANPEKFNSRFRNKMFYAGTAFSDFLMGSSKDLAKHIRVVCDGMDLTPKIQDLKPQCVVFLNIPRYCAGTMPWGHPGEHHDFEPQRHDDGYLEVIGFTMTSLAALQVGGHGERLTQCREVVLTTSKAIPVQVDGEPCKLAASRIRIALRNQATMVQKAKRRSAAPLHSDQQPVPEQLRIQVSRVSMHDYEALHYDKEQLKEASVPLGTVVVPGDSDLELCRAHIERLQQEPDGAGAKSPTCQKLSPKWCFLDATTASRFYRIDRAQEHLNYVTEIAQDEIYILDPELLGASARPDLPTPTSPLPTSPCSPTPRSLQGDAAPPQGEELIEAAKRNDFCKLQELHRAGGDLMHRDEQSRTLLHHAVSTGSKDVVRYLLDHAPPEILDAVEENPCSPSGETCLHQAAALGQRTICHYIVEAGASLMKTDQQGDTPRQRAEKAQDTELAAYLENRQHYQMIQREDQETAV

SEQ ID NO: 77401 - DNA, 2805 bp, Artificial Sequence
  derived and/or modified sequence
atggagcccagagacggcagccccgaggccagaagcagcgacagcgagagcgccagcgccagcagcagcggcagcgagagagacgccggccccgagcccgacaaggcccccagaagactgaacaagagaagattccccggcctgagactgttcggccacagaaaggccatcaccaagagcggcctgcagcacctggccccccccccccccacccccggcgccccctgcagcgagagcgagagacagatcagaagcaccgtggactggagcgagagcgccacctacggcgagcacatctggttcgagaccaacgtgagcggcgacttctgctacgtgggcgagcagtactgcgtggccagaatgctgcagaagagcgtgagcagaagaaagtgcgccgcctgcaagatcgtggtgcacaccccctgcatcgagcagctggagaagatcaacttcagatgcaagcccagcttcagagagagcggcagcagaaacgtgagagagcccaccttcgtgagacaccactgggtgcacagaagaagacaggacggcaagtgcagacactgcggcaagggcttccagcagaagttcaccttccacagcaaggagatcgtggccatcagctgcagctggtgcaagcaggcctaccacagcaaggtgagctgcttcatgctgcagcagatcgaggagccctgcagcctgggcgtgcacgccgccgtggtgatcccccccacctggatcctgagagccagaagaccccagaacaccctgaaggccagcaagaagaagaagagagccagcttcaagagaaagagcagcaagaagggccccgaggagggcagatggagacccttcatcatcagacccacccccagccccctgatgaagcccctgctggtgttcgtgaaccccaagagcggcggcaaccagggcgccaagatcatccagagcttcctgtggtacctgaaccccagacaggtgttcgacctgagccagggcggccccaaggaggccctggagatgtacagaaaggtgcacaacctgagaatcctggcctgcggcggcgacggcaccgtgggctggatcctgagcaccctggaccagctgagactgaagccccccccccccgtggccatcctgcccctgggcaccggcaacgacctggccagaaccctgaactggggcggcggctacaccgacgagcccgtgagcaagatcctgagccacgtggaggagggcaacgtggtgcagctggacagatgggacctgcacgccgagcccaaccccgaggccggccccgaggacagagacgagggcgccaccgacagactgcccctggacgtgttcaacaactacttcagcctgggcttcgacgcccacgtgaccctggagttccacgagagcagagaggccaaccccgagaagttcaacagcagattcagaaacaagatgttctacgccggcaccgccttcagcgacttcctgatgggcagcagcaaggacctggccaagcacatcagagtggtgtgcgacggcatggacctgacccccaagatccaggacctgaagccccagtgcgtggtgttcctgaacatccccagatactgcgccggcaccatgccctggggccaccccggcgagcaccacgacttcgagccccagagacacgacgacggctacctggaggtgatcggcttcaccatgaccagcctggccgccctgcaggtgggcggccacggcgagagactgacccagtgcagagaggtggtgctgaccaccagcaaggccatccccgtgcaggtggacggcgagccctgcaagctggccgccagcagaatcagaatcgccctgagaaaccaggccaccatggtgcagaaggccaagagaagaagcgccgcccccctgcacagcgaccagcagcccgtgcccgagcagctgagaatccaggtgagcagagtgagcatgcacgactacgaggccctgcactacgacaaggagcagctgaaggaggccagcgtgcccctgggcaccgtggtggtgcccggcgacagcgacctggagctgtgcagagcccacatcgagagactgcagcaggagcccgacggcgccggcgccaagagccccacctgccagaagctgagccccaagtggtgcttcctggacgccaccaccgccagcagattctacagaatcgacagagcccaggagcacctgaactacgtgaccgagatcgcccaggacgagatctacatcctggaccccgagctgctgggcgccagcgccagacccgacctgcccacccccaccagccccctgcccaccagcccctgcagccccacccccagaagcctgcagggcgacgccgcccccccccagggcgaggagctgatcgaggccgccaagagaaacgacttctgcaagctgcaggagctgcacagagccggcggcgacctgatgcacagagacgagcagagcagaaccctgctgcaccacgccgtgagcaccggcagcaaggacgtggtgagatacctgctggaccacgccccccccgagatcctggacgccgtggaggagaacccctgcagccccagcggcgagacctgcctgcaccaggccgccgccctgggccagagaaccatctgccactacatcgtggaggccggcgccagcctgatgaagaccgaccagcagggcgacacccccagacagagagccgagaaggcccaggacaccgagctggccgcctacctggagaacagacagcactaccagatgatccagagagaggaccaggagaccgccgtgtag

SEQ ID NO: 77402 - DNA, 3337 bp, Artificial Sequence
  derived and/or modified sequence
ggcacttcctggagcggcggcggcagcggcttcccgggcacctgggcgtggggagcgggggcgcgcggcgcggggcgggcggagcgagcgcgcgccatggaggtggcgggcggcgcggagcgggcgtgctgagccccggccgccggcccggcatgggcgtctcccgcgggccctccgccggccggggctagggccggatggagccgcgggacggtagccccgaggcccggagcagcgactccgagtcggcttccgcctcgtccagcggctccgagcgcgacgccggtcccgagccggacaaggcgccgcggcgactcaacaagcggcgcttcccggggctgcggctcttcgggcacaggaaagccatcaccaagtcgggcctccagcacctggccccccctccgcccacccctggggccccgtgcagcgagtcagagcggcagatccggagtacagtggactggagcgagtcagcgacatatggggagcacatctggttcgagaccaacgtgtccggggacttctgctacgttggggagcagtactgtgtagccaggatgctgcagaagtcagtgtctcgaagaaagtgcgcagcctgcaagattgtggtgcacacgccctgcatcgagcagctggagaagataaatttccgctgtaagccgtccttccgtgaatcaggctccaggaatgtccgcgagccaacctttgtacggcaccactgggtacacagacgacgccaggacggcaagtgtcggcactgtgggaagggattccagcagaagttcaccttccacagcaaggagattgtggccatcagctgctcgtggtgcaagcaggcataccacagcaaggtgtcctgcttcatgctgcagcagatcgaggagccgtgctcgctgggggtccacgcagccgtggtcatcccgcccacctggatcctccgcgcccggaggccccagaatactctgaaagcaagcaagaagaagaagagggcatccttcaagaggaagtccagcaagaaagggcctgaggagggccgctggagacccttcatcatcaggcccaccccctccccgctcatgaagcccctgctggtgtttgtgaaccccaagagtgggggcaaccagggtgcaaagatcatccagtctttcctctggtatctcaatccccgacaagtcttcgacctgagccagggagggcccaaggaggcgctggagatgtaccgcaaagtgcacaacctgcggatcctggcgtgcgggggcgacggcacggtgggctggatcctctccaccctggaccagctacgcctgaagccgccaccccctgttgccatcctgcccctgggtactggcaacgacttggcccgaaccctcaactggggtgggggctacacagatgagcctgtgtccaagatcctctcccacgtggaggaggggaacgtggtacagctggaccgctgggacctccacgctgagcccaaccccgaggcagggcctgaggaccgagatgaaggcgccaccgaccggttgcccctggatgtcttcaacaactacttcagcctgggctttgacgcccacgtcaccctggagttccacgagtctcgagaggccaacccagagaaattcaacagccgctttcggaataagatgttctacgccgggacagctttctctgacttcctgatgggcagctccaaggacctggccaagcacatccgagtggtgtgtgatggaatggacttgactcccaagatccaggacctgaaaccccagtgtgttgttttcctgaacatccccaggtactgtgcgggcaccatgccctggggccaccctggggagcaccacgactttgagccccagcggcatgacgacggctacctcgaggtcattggcttcaccatgacgtcgttggccgcgctgcaggtgggcggacacggcgagcggctgacgcagtgtcgcgaggtggtgctcaccacatccaaggccatcccggtgcaggtggatggcgagccctgcaagcttgcagcctcacgcatccgcatcgccctgcgcaaccaggccaccatggtgcagaaggccaagcggcggagcgccgcccccctgcacagcgaccagcagccggtgccagagcagttgcgcatccaggtgagtcgcgtcagcatgcacgactatgaggccctgcactacgacaaggagcagctcaaggaggcctctgtgccgctgggcactgtggtggtcccaggagacagtgacctagagctctgccgtgcccacattgagagactccagcaggagcccgatggtgctggagccaagtccccgacatgccagaaactgtcccccaagtggtgcttcctggacgccaccactgccagccgcttctacaggatcgaccgagcccaggagcacctcaactatgtgactgagatcgcacaggatgagatttatatcctggaccctgagctgctgggggcatcggcccggcctgacctcccaacccccacttcccctctccccacctcaccctgctcacccacgccccggtcactgcaaggggatgctgcaccccctcaaggtgaagagctgattgaggctgccaagaggaacgacttctgtaagctccaggagctgcaccgagctgggggcgacctcatgcaccgagacgagcagagtcgcacgctcctgcaccacgcagtcagcactggcagcaaggatgtggtccgctacctgctggaccacgcccccccagagatccttgatgcggtggaggaaaacccctgctcccccagcggggagacctgtttgcaccaagcagcggccctgggccagcgcaccatctgccactacatcgtggaggccggggcctcgctcatgaagacagaccagcagggcgacactccccggcagcgggctgagaaggctcaggacaccgagctggccgcctacctggagaaccggcagcactaccagatgatccagcgggaggaccaggagacggctgtgtagcgggccgcccacgggcagcaggagggacaatgcggccaggggacgagcgccttccttgcccacctcactgccacattccagtgggacggccacggggggacctaggccccagggaaagagccccatgccgccccctaaggagccgcccagacctagggctggactcaggagctgggggggcctcacctgttcccctgaggaccccgccggacccggaggctcacagggaacaagacacggctgggttggatatgcctttgccggggttctggggcagggcgctccctggccgcagcagatgccctcccaggagtggaggggctggagagggggag

SEQ ID NO: 77403 - DNA, 2805 bp, Artificial Sequence
  derived and/or modified sequence
atggaaccccgcgatggttctccggaggctcgcagctcggactccgaatcagcctcagcttcctcaagcggctccgagagggatgccgggccggaacccgacaaggccccacgcagactgaataagagacgattcccagggctgcgcctttttggacacagaaaggccatcactaagtccggcttacagcacctagcacctccaccacccacacccggggcaccatgcagtgagtctgaacgacagatccggtcaacagtggactggtccgaatcggccacttatggagagcatatatggttcgagaccaatgtgtcaggggacttttgttacgttggcgaacagtactgcgttgctcggatgcttcagaaaagcgttagccggcgaaaatgcgccgcatgcaaaatcgttgtccacacaccctgcatcgagcagctggagaaaataaatttcaggtgcaagccaagctttcgcgaatctggtagccgtaatgtcagggagcccacattcgtgcggcaccattgggtccacaggcggagacaggatggaaaatgtaggcattgcgggaaagggtttcaacagaagtttactttccactcgaaagaaatagtcgccatctcgtgtagttggtgcaagcaggcctaccacagcaaagtgtcgtgtttcatgctgcagcagattgaagaaccttgttctctgggggtgcacgcggctgttgttatcccccctacctggattctccgggcgagaagacctcagaacacactgaaggccagtaaaaagaaaaaacgggcatcattcaaacggaaaagctcaaaaaaggggcctgaggagggacgctggcgaccttttataattcgaccaacaccaagcccgctgatgaaacccctcttagtgttcgtgaatccaaagtccggagggaaccagggggctaaaattatccaaagcttcctctggtatctgaacccccgacaggtgtttgatctgagccagggtggaccaaaggaagccctggagatgtacagaaaagtgcacaacctccggattctcgcatgcgggggggatggaaccgtgggttggattctgagcacgctggatcagttgagactgaagccaccccccccggtggctatcctgcccctggggaccggcaacgatctggccaggacactcaactggggcggaggttataccgacgagcctgtcagcaagatcttgtcccatgtagaggagggtaacgttgtgcagctcgatagatgggatctacatgctgaacccaaccctgaggctggtcccgaggacagagatgaaggggcgacagatcgattaccacttgatgtttttaacaactatttttctctggggtttgacgctcacgtaacactggaatttcacgaaagccgggaggctaacccagagaaattcaacagtagatttcgcaataaaatgttttacgcgggaacagcgttctcggattttcttatggggtcttccaaggatctggccaagcacatacgtgtagtctgcgatggaatggatctgacacccaagattcaggacctgaagccccagtgcgttgtgtttctcaacattccccgatattgtgctggcactatgccctggggtcaccctggggaacatcatgattttgagccccagagacatgacgatgggtaccttgaggtgatcgggtttactatgacatccttggcagctctgcaggttggaggacacggagaaaggctgacccagtgccgcgaagtcgtgctaaccacctcaaaggcgatccctgtccaagtggacggcgagccttgcaagctggcggcaagtagaatccgcatcgctttacgaaaccaggctaccatggtacagaaagcaaagcggaggtcagcagctcccctacatagcgatcagcagcccgtgcccgagcagcttaggatccaggtgtccagggtaagtatgcatgattatgaagcactacactatgacaaggaacagttgaaggaggcctccgtgcctttgggcaccgtggtggtccccggcgactcagatttggagctttgccgagctcatatcgagagactgcagcaggaaccagatggagccggcgctaaatctcccacatgtcagaaactgtcccccaagtggtgtttcctcgatgccactacagcttctcgtttttacagaattgatagggctcaggaacatttgaactacgtcacagagatcgcccaggacgaaatttatattcttgaccccgagcttctcggagcttcagccaggccagatctgcccacacccactagccccctgcccacttctccctgcagtcctaccccacgatctctgcaaggcgacgctgcccctccacaaggggaggaactcattgaggcagccaaacgcaacgatttttgtaaactgcaggaactccacagagccggcggggatcttatgcatagagatgagcagtccaggaccctgctccaccacgctgtgtccactgggtctaaggatgtggtgcggtatcttttggatcatgcaccccccgaaatcctggatgccgtggaagagaatccctgtagtccctcaggagaaacgtgccttcatcaggccgctgctttgggccagcgcacaatctgccactacattgtcgaggcaggagcatccctcatgaaaactgaccagcagggcgacaccccgcgccaacgggcagaaaaggcccaggacactgagctcgctgcctatctggagaaccggcagcattaccagatgatccagagagaggaccaggaaaccgccgtgtag

SEQ ID NO: 77404 - DNA, 2805 bp, Artificial Sequence
  derived and/or modified sequence
atggagcccagagatggcagccctgaggcccggagcagtgacagcgagagcgccagcgccagcagcagcggcagcgagagagatgctggccctgagccagacaaggccccccggcggctgaacaagaggcgcttccctggcctgcggctgtttggccacaggaaggccatcaccaagagcggcctgcagcacctggcccctcctccacccacccctggggccccctgcagcgagagcgagcggcagatccgcagcacagtggactggagcgagagcgccacctatggagagcacatctggtttgagaccaacgtgtctggggacttctgctacgtgggggagcagtactgtgtggccaggatgctgcagaagtctgtgtccaggaggaaatgtgccgcctgcaagatcgtggtgcacaccccctgcatcgagcagctggagaagatcaacttccgctgcaagcccagcttccgggagagcggcagcagaaatgtgcgggagcccacctttgtgcgccaccactgggtgcacagaagacggcaggacggcaagtgccgccactgtgggaagggcttccagcagaagttcaccttccacagcaaggagatcgtggccatcagctgctcctggtgcaagcaggcctaccacagcaaggtgtcctgcttcatgctgcagcagatcgaggagccctgcagcctgggcgtgcatgctgctgtggtgatcccccccacctggatcctgcgggcccggcggccccagaacaccctgaaggccagcaagaagaagaagagggccagcttcaagaggaagagcagcaagaagggccctgaggagggccgctggaggcccttcatcatccggcccacccccagccccctgatgaagcccctgctggtgtttgtgaaccccaagagcggcggcaaccagggcgccaagatcatccagagcttcctgtggtacctgaacccccggcaggtgtttgacctgagccagggcggccccaaggaggccctggagatgtacaggaaggtgcacaacctgcgcatcctggcctgtggaggagatggcaccgtgggctggatcctgagcaccctggaccagctgcggctgaagcccccacctcctgtggccatcctgcccctgggcactggaaatgacctggcccggaccctgaactggggcggcggctacacagatgagcctgtgtccaagatcctgagccacgtggaggagggcaatgtggtgcagctggaccgctgggacctgcacgccgagcccaaccctgaggccggcccagaagatagagatgagggcgccacagaccggctgcccctggatgtgttcaacaactacttcagcctgggctttgatgcccacgtgaccctggagttccacgagagccgggaggccaaccctgagaagttcaacagccgcttcaggaacaagatgttttatgccggcacagccttcagtgacttcctgatgggcagcagcaaggacctggccaagcacatccgggtggtgtgtgatggcatggacctgacccccaagatccaggacctgaagccccagtgtgtggtgttcctgaacatcccccgctactgtgccggcaccatgccctggggccaccctggagagcaccacgactttgagccccagagacatgatgatggctacctggaggtgattggcttcaccatgaccagcctggccgccctgcaggtgggcggccacggggagcggctgacccagtgccgggaggtggtgctgaccaccagcaaggccatccctgtgcaggtggatggagagccctgcaagctggccgccagccgcatccgcatcgccctgaggaaccaggccaccatggtgcagaaggccaagagaagatctgctgcccccctgcacagcgaccagcagcctgtgcctgagcagctgcgcatccaggtgtcccgggtgtccatgcatgactatgaggccctgcactatgacaaggagcagctgaaggaggcctctgtgcccctgggcaccgtggtggtgcctggggacagcgacctggagctgtgccgggcccacatcgagcggctgcagcaggagccagatggagctggggccaagagccccacctgccagaagctgagccccaagtggtgcttcctggatgccaccacagccagccgcttctacagaattgaccgggcccaggagcacctgaactacgtgacagaaattgcccaggatgagatctacatcctggaccctgagctgctgggcgccagcgcccggccagacctgcccacccccaccagccccctgcccaccagcccctgcagccccacccccaggagcctgcagggagatgctgccccaccccagggcgaggagctgattgaggccgccaagagaaatgacttctgcaagctgcaggagctgcacagagctggaggagacctgatgcacagagatgagcagagcaggaccctgctgcaccacgctgtgtccacaggcagcaaggatgtggtgcgctacctgctggaccacgcccctcctgagatcctggatgctgtggaggagaacccctgcagccccagcggggagacctgcctgcaccaggccgccgccctgggccagaggaccatctgccactacatcgtggaggccggggccagcctgatgaagacagaccagcagggcgacaccccccggcagagagctgagaaggcccaggacacagagctggccgcctacctggagaaccggcagcactaccagatgatccagcgggaggaccaggagacagctgtgtag

SEQ ID NO: 77405 - DNA, 2805 bp, Artificial Sequence
  derived and/or modified sequence
atggagccccgggacggcagccccgaggcccggagcagcgacagcgaaagcgcctccgcatctagttccggcagcgaacgagatgccggtcccgagcccgacaaggccccaaggcgccttaataaacgtaggtttcctgggctcagactcttcggccatagaaaggctatcactaagtccggactgcagcacctcgcccccccaccacccacacccggggctccatgctcggaatctgagcggcagatcaggtccaccgtggactggagtgagtccgccacctacggcgagcacatttggttcgaaaccaatgtgagcggcgatttctgttacgttggggaacagtactgcgttgctcgcatgctgcagaagtccgtgtctaggagaaaatgtgctgcctgcaaaatcgtggtgcatacgccctgtatagagcagttggaaaaaattaacttccgttgcaaaccaagttttagggagtccggatctcgcaatgtgagggaacccacgttcgttaggcatcactgggtgcatcgtcgtcgacaggacggaaaatgccggcactgcggaaaggggtttcagcagaagtttacgtttcacagtaaggaaatcgtagccatctcatgttcatggtgtaaacaggcataccatagcaaggtgtcatgcttcatgttacaacagatcgaggagccttgctctctgggcgtacatgctgccgtcgtcatccctcctacctggatcctgagggcccgaaggccgcaaaacactcttaaggcttcaaaaaaaaagaagcgcgcttcattcaaaaggaagtccagcaagaagggaccggaagagggtagatggcgcccctttattataaggcctactcccagcccacttatgaagccactgctcgtttttgtcaatcccaagagtggagggaatcagggcgcaaaaatcatacagtcttttctgtggtacctgaacccacggcaggtgtttgatctcagccaaggaggccctaaggaagctctggaaatgtatcggaaggtccacaatctacgaatcctggcgtgcggcggggatggcaccgtcggatggatcctgagtaccttggaccagcttagactgaagcccccacccccggttgctattcttccactggggactggaaacgacctggctagaacactgaactggggcggcgggtacaccgacgagcctgtgtctaaaatcctgtctcacgtcgaagagggcaatgtcgtacagctagaccgttgggatttgcatgctgagcctaacccggaagctgggcccgaggaccgggatgaaggggcaaccgacaggctgcctctggacgtttttaataactactttagcctgggctttgatgctcacgtgactctcgagtttcacgagtcgagagaagccaaccccgaaaaattcaattctcgtttccggaacaagatgttttatgccgggactgccttttcggatttcctgatgggaagttctaaggaccttgctaagcacatccgagttgtgtgtgatggaatggacctgacccccaaaatacaagacttaaagccacagtgcgtcgtctttctgaatattcctcgctactgcgccgggaccatgccatggggacatccaggagaacatcacgacttcgaaccgcagcgccatgatgatggatacctcgaggtaattggttttacaatgaccagcttagcggctctgcaggtaggtgggcatggcgagagacttacgcagtgccgggaggtcgtgttaactacctcaaaggctatacccgtgcaggtggacggtgaaccatgcaaacttgctgctagccgtatccgcatcgccctccggaaccaggccactatggtccagaaagccaagcggaggagcgccgcacctcttcactctgaccagcagcctgtgcccgagcagctgcggatacaggtctctcgtgtgtctatgcatgactatgaagccttgcactatgacaaagaacaacttaaggaagcttcagtgcccctcgggactgttgttgtccctggagattcagatctggagctctgccgtgcacacatagagcggctccagcaggaacctgacggagctggagcgaaatcgcctacatgccaaaagctgtcacccaaatggtgcttcctcgatgccacgacagcgtcgagattttaccgtatcgatcgcgcacaagagcacttaaattatgtcacagagattgcccaggacgaaatctatattctggaccctgaattgctgggtgcctccgctcgtccagacttacctactcccacgtctccgcttcctacatcgccttgcagcccaaccccgcgcagcctgcagggcgacgctgccccccctcagggcgaggagcttatcgaagctgccaagcgcaatgacttctgcaaacttcaagagttgcacagggccgggggcgacctgatgcatcgggacgagcagtctcgcaccctgttgcaccacgctgtgtccaccggctccaaagacgtggtaagatatctgttagaccatgcgccccccgagatcctggatgcagttgaagagaacccttgctctccatccggagagacgtgtctccaccaggccgcagctctgggacaaagaaccatctgccactacatcgtcgaggccggcgcctccctaatgaagactgaccagcagggagatacacctcgccaacgcgctgaaaaggcccaagacacggaattggccgcttacctcgagaatcgccagcattatcagatgattcagcgagaggaccaggagactgctgtgtag

SEQ ID NO: 77406 - DNA, 2805 bp, Artificial Sequence
  derived and/or modified sequence
atggagccgagagacggctcaccggaagccaggtctagcgacagcgagtcagcatccgcgagttcttctggctctgaacgcgacgctgggcctgagcctgataaagctcccagaagactcaacaagcggagattccctggactgcggctcttcggccatcggaaagctattactaagtccggcttgcaacacttagctcccccaccccctacacctggcgcaccctgtagcgagagcgagcgccaaattagatctaccgtcgattggtctgaatctgctacatatggagaacatatctggttcgaaactaacgtgagtggggatttttgttacgtgggtgaacagtattgcgttgcaagaatgctgcagaagagtgtttctcgcaggaaatgcgccgcatgtaagatcgtcgttcacaccccctgcattgaacagctcgagaaaatcaacttcaggtgtaaaccatccttcagagagtcaggtagccgaaacgtgcgcgagcccacattcgtcagacaccactgggttcaccgcaggcggcaggatgggaagtgtcggcactgcggaaagggcttccagcaaaagttcacattccactcaaaggagattgtggccattagctgcagctggtgcaaacaggcctatcactccaaagttagctgctttatgttgcaacagatagaggagccatgcagcctcggcgtgcacgcagccgtcgtaatcccccctacatggattttgcgggctaggagacctcaaaacaccctgaaggcctccaaaaaaaaaaagagggcctcttttaaaagaaaatccagtaagaaaggcccagaggagggacggtggagaccttttattatccgcccaaccccctcccctttgatgaaaccactgctcgtcttcgttaatcccaaaagcggaggcaaccagggagctaaaatcatccagtccttcctgtggtatctcaaccctcggcaggtgttcgatctgtcccaaggcggacccaaggaggctttagagatgtacagaaaggtgcataacttacggatcctggcttgtgggggtgacggtaccgtcggatggatactgtcaaccctcgatcagttgcgcctgaagcctccaccgcctgtggctatcctgcccctgggaactggaaatgatctcgcaaggaccctgaattggggagggggatacacagacgaaccggtttcaaagatcctgagccatgtagaggagggaaacgtcgtccagctggacaggtgggatctgcatgccgagcccaatcctgaagctggccctgaggaccgggatgaaggggctactgatcgcttgcctttagacgtcttcaacaattacttctctctggggttcgatgctcacgtcactctggaatttcatgagtctagagaggccaaccctgagaagttcaattctagattccgcaacaagatgttctacgcgggtactgccttctctgattttctcatgggaagttccaaggatctcgcaaagcatatccgcgtggtgtgtgacggaatggatttgacccccaaaattcaggatctgaagccacagtgtgtagtgtttctgaatatcccacgatactgcgctggaacaatgccttggggccaccccggagagcaccacgactttgagccacagaggcacgatgacggctacctagaggtcatcggcttcacaatgacaagccttgcggctttgcaggtagggggtcatggggaaaggctcacccagtgtagggaagtggtattaacgacgagcaaggccattccagtgcaggttgatggggagccatgcaaacttgcagcttctaggatcaggattgccctgagaaatcaggccactatggtccaaaaggccaaacgccgaagcgcagctcccctccactcggatcagcagcccgtcccagagcagctccggatacaggtgtcgcgcgtgagcatgcatgactatgaggctctccattatgataaggaacagttgaaggaggcatccgtgcccttaggaacggtcgtggttcccggtgacagtgatctcgaattgtgtcgtgcccacattgaaagactgcagcaggagcccgatggtgccggtgccaagagccctacctgtcagaagctgtccccaaagtggtgtttcctagatgcgaccactgcttcacgcttttataggatcgatagagcccaggaacacctcaattatgtgacagagatcgcccaggatgagatttacatcctggacccagaacttctgggtgctagcgcaaggccagatctccccacccctacctcgcctctgccaacctctccatgctcccctactccccgatcccttcagggagacgctgctccaccccagggtgaagaactgattgaggctgctaagcgaaacgatttctgtaaattgcaagagctgcacagagccggtggcgatctcatgcatagagatgaacaatctcggaccctgcttcaccacgccgtctccaccggaagcaaggacgtggtcagatacttgttagatcacgcccctccagagattctggatgccgtagaggagaatccctgcagcccctcaggagaaacatgtctgcatcaggccgcagctctgggccaacgcaccatatgtcactatattgtcgaagctggggcaagcttgatgaaaactgaccagcaaggcgacacaccccgacagcgggctgagaaggctcaggataccgagttagccgcttacctggagaatcgtcagcactatcagatgatccagagggaggaccaagaaacagctgtatag

SEQ ID NO: 77407 - protein, 928 aa, Artificial Sequence
  derived and/or modified sequence
MEPRDGSPEARSSDSESASASSSGSERDAGPEPDKAPRRLNKRRFPGLRLFGHRKAITKSGLQHLAPPPPTPGAPCSESERQIRSTVDWSESATYGEHIWFETNVSGDFCYVGEQYCVARMLKSVSRRKCAACKIVVHTPCIEQLEKINFRCKPSFRESGSRNVREPTFVRHHWVHRRRQDGKCRHCGKGFQQKFTFHSKEIVAISCSWCKQAYHSKVSCFMLQQIEEPCSLGVHAAVVIPPTWILRARRPQNTLKASKKKKRASFKRKSSKKGPEEGRWRPFIIRPTPSPLMKPLLVFVNPKSGGNQGAKIIQSFLWYLNPRQVFDLSQGGPKEALEMYRKVHNLRILACGGDGTVGWILSTLDQLRLKPPPPVAILPLGTGNDLARTLNWGGGYTDEPVSKILSHVEEGNVVQLDRWDLHAEPNPEAGPEDRDEGATDRLPLDVFNNYFSLGFDAHVTLEFHESREANPEKFNSRFRNKMFYAGTAFSDFLMGSSKDLAKHIRVVCDGMDLTPKIQDLKPQCVVFLNIPRYCAGTMPWGHPGEHHDFEPQRHDDGYLEVIGFTMTSLAALQVGGHGERLTQCREVVLTTSKAIPVQVDGEPCKLAASRIRIALRNQATMVQKAKRRSAAPLHSDQQPVPEQLRIQVSRVSMHDYEALHYDKEQLKEASVPLGTVVVPGDSDLELCRAHIERLQQEPDGAGAKSPTCQKLSPKWCFLDATTASRFYRIDRAQEHLNYVTEIAQDEIYILDPELLGASARPDLPTPTSPLPTSPCSPTPRSLQGDAAPPQGEELIEAAKRNDFCKLQELHRAGGDLMHRDEQSRTLLHHAVSTGSKDVVRYLLDHAPPEILDAVEENGETCLHQAAALGQRTICHYIVEAGASLMKTDQQGDTPRQRAEKAQDTELAAYLENRQHYQMIQREDQETAV

SEQ ID NO: 77408 - DNA, 2787 bp, Artificial Sequence
  derived and/or modified sequence
atggagcccagagacggcagccccgaggccagaagcagcgacagcgagagcgccagcgccagcagcagcggcagcgagagagacgccggccccgagcccgacaaggcccccagaagactgaacaagagaagattccccggcctgagactgttcggccacagaaaggccatcaccaagagcggcctgcagcacctggccccccccccccccacccccggcgccccctgcagcgagagcgagagacagatcagaagcaccgtggactggagcgagagcgccacctacggcgagcacatctggttcgagaccaacgtgagcggcgacttctgctacgtgggcgagcagtactgcgtggccagaatgctgaagagcgtgagcagaagaaagtgcgccgcctgcaagatcgtggtgcacaccccctgcatcgagcagctggagaagatcaacttcagatgcaagcccagcttcagagagagcggcagcagaaacgtgagagagcccaccttcgtgagacaccactgggtgcacagaagaagacaggacggcaagtgcagacactgcggcaagggcttccagcagaagttcaccttccacagcaaggagatcgtggccatcagctgcagctggtgcaagcaggcctaccacagcaaggtgagctgcttcatgctgcagcagatcgaggagccctgcagcctgggcgtgcacgccgccgtggtgatcccccccacctggatcctgagagccagaagaccccagaacaccctgaaggccagcaagaagaagaagagagccagcttcaagagaaagagcagcaagaagggccccgaggagggcagatggagacccttcatcatcagacccacccccagccccctgatgaagcccctgctggtgttcgtgaaccccaagagcggcggcaaccagggcgccaagatcatccagagcttcctgtggtacctgaaccccagacaggtgttcgacctgagccagggcggccccaaggaggccctggagatgtacagaaaggtgcacaacctgagaatcctggcctgcggcggcgacggcaccgtgggctggatcctgagcaccctggaccagctgagactgaagccccccccccccgtggccatcctgcccctgggcaccggcaacgacctggccagaaccctgaactggggcggcggctacaccgacgagcccgtgagcaagatcctgagccacgtggaggagggcaacgtggtgcagctggacagatgggacctgcacgccgagcccaaccccgaggccggccccgaggacagagacgagggcgccaccgacagactgcccctggacgtgttcaacaactacttcagcctgggcttcgacgcccacgtgaccctggagttccacgagagcagagaggccaaccccgagaagttcaacagcagattcagaaacaagatgttctacgccggcaccgccttcagcgacttcctgatgggcagcagcaaggacctggccaagcacatcagagtggtgtgcgacggcatggacctgacccccaagatccaggacctgaagccccagtgcgtggtgttcctgaacatccccagatactgcgccggcaccatgccctggggccaccccggcgagcaccacgacttcgagccccagagacacgacgacggctacctggaggtgatcggcttcaccatgaccagcctggccgccctgcaggtgggcggccacggcgagagactgacccagtgcagagaggtggtgctgaccaccagcaaggccatccccgtgcaggtggacggcgagccctgcaagctggccgccagcagaatcagaatcgccctgagaaaccaggccaccatggtgcagaaggccaagagaagaagcgccgcccccctgcacagcgaccagcagcccgtgcccgagcagctgagaatccaggtgagcagagtgagcatgcacgactacgaggccctgcactacgacaaggagcagctgaaggaggccagcgtgcccctgggcaccgtggtggtgcccggcgacagcgacctggagctgtgcagagcccacatcgagagactgcagcaggagcccgacggcgccggcgccaagagccccacctgccagaagctgagccccaagtggtgcttcctggacgccaccaccgccagcagattctacagaatcgacagagcccaggagcacctgaactacgtgaccgagatcgcccaggacgagatctacatcctggaccccgagctgctgggcgccagcgccagacccgacctgcccacccccaccagccccctgcccaccagcccctgcagccccacccccagaagcctgcagggcgacgccgcccccccccagggcgaggagctgatcgaggccgccaagagaaacgacttctgcaagctgcaggagctgcacagagccggcggcgacctgatgcacagagacgagcagagcagaaccctgctgcaccacgccgtgagcaccggcagcaaggacgtggtgagatacctgctggaccacgccccccccgagatcctggacgccgtggaggagaacggcgagacctgcctgcaccaggccgccgccctgggccagagaaccatctgccactacatcgtggaggccggcgccagcctgatgaagaccgaccagcagggcgacacccccagacagagagccgagaaggcccaggacaccgagctggccgcctacctggagaacagacagcactaccagatgatccagagagaggaccaggagaccgccgtgtag

SEQ ID NO: 77409 - DNA, 3482 bp, Artificial Sequence
  derived and/or modified sequence
gcggcgcggagcgggcgtgctgagccccggccgccggcccggcatgggcgtctcccgcgggccctccgccggccggggctagggccggatggagccgcgggacggtagccccgaggcccggagcagcgactccgagtcggcttccgcctcgtccagcggctccgagcgcgacgccggtcccgagccggacaaggcgccgcggcgactcaacaagcggcgcttcccggggctgcggctcttcgggcacaggaaagccatcaccaagtcgggcctccagcacctggccccccctccgcccacccctggggccccgtgcagcgagtcagagcggcagatccggagtacagtggactggagcgagtcagcgacatatggggagcacatctggttcgagaccaacgtgtccggggacttctgctacgttggggagcagtactgtgtagccaggatgctgaagtcagtgtctcgaagaaagtgcgcagcctgcaagattgtggtgcacacgccctgcatcgagcagctggagaagataaatttccgctgtaagccgtccttccgtgaatcaggctccaggaatgtccgcgagccaacctttgtacggcaccactgggtacacagacgacgccaggacggcaagtgtcggcactgtgggaagggattccagcagaagttcaccttccacagcaaggagattgtggccatcagctgctcgtggtgcaagcaggcataccacagcaaggtgtcctgcttcatgctgcagcagatcgaggagccgtgctcgctgggggtccacgcagccgtggtcatcccgcccacctggatcctccgcgcccggaggccccagaatactctgaaagcaagcaagaagaagaagagggcatccttcaagaggaagtccagcaagaaagggcctgaggagggccgctggagacccttcatcatcaggcccaccccctccccgctcatgaagcccctgctggtgtttgtgaaccccaagagtgggggcaaccagggtgcaaagatcatccagtctttcctctggtatctcaatccccgacaagtcttcgacctgagccagggagggcccaaggaggcgctggagatgtaccgcaaagtgcacaacctgcggatcctggcgtgcgggggcgacggcacggtgggctggatcctctccaccctggaccagctacgcctgaagccgccaccccctgttgccatcctgcccctgggtactggcaacgacttggcccgaaccctcaactggggtgggggctacacagatgagcctgtgtccaagatcctctcccacgtggaggaggggaacgtggtacagctggaccgctgggacctccacgctgagcccaaccccgaggcagggcctgaggaccgagatgaaggcgccaccgaccggttgcccctggatgtcttcaacaactacttcagcctgggctttgacgcccacgtcaccctggagttccacgagtctcgagaggccaacccagagaaattcaacagccgctttcggaataagatgttctacgccgggacagctttctctgacttcctgatgggcagctccaaggacctggccaagcacatccgagtggtgtgtgatggaatggacttgactcccaagatccaggacctgaaaccccagtgtgttgttttcctgaacatccccaggtactgtgcgggcaccatgccctggggccaccctggggagcaccacgactttgagccccagcggcatgacgacggctacctcgaggtcattggcttcaccatgacgtcgttggccgcgctgcaggtgggcggacacggcgagcggctgacgcagtgtcgcgaggtggtgctcaccacatccaaggccatcccggtgcaggtggatggcgagccctgcaagcttgcagcctcacgcatccgcatcgccctgcgcaaccaggccaccatggtgcagaaggccaagcggcggagcgccgcccccctgcacagcgaccagcagccggtgccagagcagttgcgcatccaggtgagtcgcgtcagcatgcacgactatgaggccctgcactacgacaaggagcagctcaaggaggcctctgtgccgctgggcactgtggtggtcccaggagacagtgacctagagctctgccgtgcccacattgagagactccagcaggagcccgatggtgctggagccaagtccccgacatgccagaaactgtcccccaagtggtgcttcctggacgccaccactgccagccgcttctacaggatcgaccgagcccaggagcacctcaactatgtgactgagatcgcacaggatgagatttatatcctggaccctgagctgctgggggcatcggcccggcctgacctcccaacccccacttcccctctccccacctcaccctgctcacccacgccccggtcactgcaaggggatgctgcaccccctcaaggtgaagagctgattgaggctgccaagaggaacgacttctgtaagctccaggagctgcaccgagctgggggcgacctcatgcaccgagacgagcagagtcgcacgctcctgcaccacgcagtcagcactggcagcaaggatgtggtccgctacctgctggaccacgcccccccagagatccttgatgcggtggaggaaaacggggagacctgtttgcaccaagcagcggccctgggccagcgcaccatctgccactacatcgtggaggccggggcctcgctcatgaagacagaccagcagggcgacactccccggcagcgggctgagaaggctcaggacaccgagctggccgcctacctggagaaccggcagcactaccagatgatccagcgggaggaccaggagacggctgtgtagcgggccgcccacgggcagcaggagggacaatgcggccaggggacgagcgccttccttgcccacctcactgccacattccagtgggacggccacggggggacctaggccccagggaaagagccccatgccgccccctaaggagccgcccagacctagggctggactcaggagctgggggggcctcacctgttcccctgaggaccccgccggacccggaggctcacagggaacaagacacggctgggttggatatgcctttgccggggttctggggcagggcgctccctggccgcagcagatgccctcccaggagtggaggggctggagagggggaggccttcgggaagaggcttcctgggccccctggtcttcggccgggtccccagcccccgctcctgccccaccccacctcctccgggcttcctcccggaaactcagcgcctgctgcacttgcctgccctgccttgcttggcacccgctccggcgaccctccccgctcccctgtcatttcatcgcggactgtgcggcctgggggtggggggcgggactctcacggtgacatgtttacagctgggtgtgactcagtaaagtggatttttttttcttt

SEQ ID NO: 77410 - DNA, 2787 bp, Artificial Sequence
  derived and/or modified sequence
atggagccacgagatggctcgccggaagctcgatcctctgacagtgaatccgcttctgcctcctccagtggtagcgagcgtgacgcaggacctgagcccgataaggctccacgaaggcttaacaagcggcgctttcctggcctccgcctgtttggacatcgaaaagcaattaccaagagtggactgcaacacctggcacccccaccccccactcctggagcaccatgctccgaaagcgagagacaaataaggtctaccgtagactggtcggagagtgccacctacggcgagcacatctggtttgaaactaacgtttctggcgatttctgttatgtcggggagcagtattgtgtggcgaggatgctcaagtcagtctctcgacgcaaatgcgcagcatgcaagatcgttgttcacaccccttgtatagagcagctcgagaagataaactttaggtgcaaaccgtccttcagagagagtggcagtaggaatgtgagggagcccaccttcgtccggcatcactgggtccacagaagacgtcaagacggcaagtgtcgccattgtggaaaggggttccagcagaaatttaccttccatagcaaggagatcgtggccattagctgttcctggtgcaaacaagcatatcactctaaggtgtcatgcttcatgctgcaacagattgaggagccttgtagtctaggagtgcatgccgcagtggttattccaccgacctggatcctacgagcacggagaccacagaacacactcaaagcctctaaaaaaaagaagagagcatctttcaagcgcaagagctccaagaaaggaccagaggagggacgctggaggccgtttataattagaccaaccccttcacccttaatgaagcccttgctggtattcgtgaatcctaagagtggcggcaaccaaggagcaaaaataattcagagctttttgtggtatctgaaccctcggcaagtgttcgacttgtcacagggcgggccaaaagaggcactggagatgtatcgaaaggtccataacctcagaatattggcttgcggcggcgatggaaccgtggggtggatcctgagcacgctagatcagctgaggctcaagcctcccccgccagtcgctattttgccactcggtaccggcaatgacttggctcgcacacttaactgggggggcggctatacggacgagccggtgagcaaaattttgtcacatgtggaagagggtaacgtcgtccagttggaccgatgggacttgcacgcggaacctaatccagaggccggaccggaagatcgagatgagggtgccaccgatagactccccctcgatgtcttcaacaattactttagtctgggattcgacgcccacgttacactggaattccacgaatcacgcgaggccaaccccgagaaatttaactccaggtttcgcaacaaaatgttttacgcaggcactgcgttcagcgatttcctcatgggatcttcaaaggatctggcaaagcatatcagggtggtctgcgacggaatggacctgaccccaaagatccaagatctcaagccacagtgcgttgtgtttctgaatatcccccgctactgcgcaggcacaatgccatggggtcacccaggagagcaccacgacttcgagccgcaacgccatgatgacggatacctggaggtaattgggttcacaatgaccagcctggccgccctccaagtaggaggtcacggggagagacttacccagtgtcgggaggtggtcttgactacatccaaggctatccccgtgcaggtggacggggaaccatgtaagctcgctgccagtcgaattaggattgccctcaggaaccaggcgacaatggtccagaaggcaaagcgaaggtctgccgcccccctgcacagcgatcagcagcctgtgcccgagcagttaaggattcaggtgagtcgggtgtctatgcacgactatgaagccctccactatgacaaggagcagttgaaggaggccagtgttcccctcgggacagtggtcgttccaggggattctgacttggagctttgcagagcccacattgaacgcctgcagcaagagcctgatggagccggagcgaagtcaccaacatgtcagaagcttagtcctaaatggtgtttcttggatgcgaccaccgctagcagattttatcggatagatagagcacaggagcatctaaattatgttaccgagatagcccaggacgagatctatatcttggatcccgagttacttggcgcaagcgcacgccctgatctccctacgcctacaagccccctgcccacaagcccatgttctcccacgcctcgctcgctgcagggagatgccgctcctcctcaaggggaagaactgattgaggccgccaaaagaaacgacttttgtaagcttcaggagctgcaccgagcggggggggatctcatgcaccgggacgagcagtcaaggaccttgttgcaccatgccgtctctaccgggagcaaagacgttgtgcgctacctgctggaccatgccccccccgagatattggatgccgtagaggagaacggggaaacatgtctccaccaggctgccgctttagggcagagaaccatatgccactatattgtagaggctggtgcaagcctgatgaagaccgaccagcagggtgatacacctagacagagggccgagaaggcccaggacactgagctcgctgcctacctggaaaatcgacaacactatcagatgattcagagggaggaccaggaaacagctgtctag

SEQ ID NO: 77411 - DNA, 2787 bp, Artificial Sequence
  derived and/or modified sequence
atggagcccagagatggcagccctgaggcccggagcagtgacagcgagagcgccagcgccagcagcagcggcagcgagagagatgctggccctgagccagacaaggccccccggcggctgaacaagaggcgcttccctggcctgcggctgtttggccacaggaaggccatcaccaagagcggcctgcagcacctggcccctcctccacccacccctggggccccctgcagcgagagcgagcggcagatccgcagcacagtggactggagcgagagcgccacctatggagagcacatctggtttgagaccaacgtgtctggggacttctgctacgtgggggagcagtactgtgtggccaggatgctgaagtctgtgtccagaagaaaatgtgccgcctgcaagatcgtggtgcacaccccctgcatcgagcagctggagaagatcaacttccgctgcaagcccagcttccgggagagcggcagcagaaatgtgcgggagcccacctttgtgcgccaccactgggtgcacagaagacggcaggatggaaaatgtcgccactgtgggaagggcttccagcagaagttcaccttccacagcaaggagatcgtggccatcagctgctcctggtgcaagcaggcctaccacagcaaggtgtcctgcttcatgctgcagcagatcgaggagccctgcagcctgggcgtgcacgccgctgtggtgattcctcccacctggatcctgcgggcccggcggccccagaacaccctgaaggccagcaagaagaagaagagggccagcttcaagaggaagagcagcaagaagggccctgaggagggccgctggaggcccttcatcatccggcccacccccagccccctgatgaagcccctgctggtgtttgtgaaccccaagagcggcggcaaccagggcgccaagatcatccagagcttcctgtggtacctgaacccccggcaggtgtttgacctgagccagggcggccccaaggaggccctggagatgtacaggaaggtgcacaacctgcgcatcctggcctgtggaggagatggcaccgtgggctggatcctgagcaccctggaccagctgcggctgaagcccccacctcctgtggccatcctgcccctgggcactggaaatgacctggcccggaccctgaactggggcggcggctacacagatgagcctgtgtccaagatcctgagccacgtggaggagggcaatgtggtgcagctggaccgctgggacctgcatgctgagcccaaccctgaggccggccctgaggacagagatgaaggagccacagaccggctgcccctggatgtgttcaacaactacttcagcctgggctttgatgcccacgtgaccctggagttccacgagagccgggaggccaaccctgagaagttcaacagccgcttcaggaacaagatgttttatgccggcacagccttcagtgacttcctgatgggcagcagcaaggacctggccaagcacatccgggtggtgtgtgatggcatggacctgacccccaagatccaggacctgaagccccagtgtgtggtgttcctgaacatcccccgctactgtgccggcaccatgccctggggccaccctggagagcaccacgactttgagccccagagacatgatgatggctacctggaggtgattggcttcaccatgaccagcctggccgccctgcaggtgggcggccatggagagcggctgacccagtgccgggaggtggtgctgaccaccagcaaggccatccctgtgcaggtggatggagagccctgcaagctggccgccagccgcatcagaattgccctgaggaaccaggccaccatggtgcagaaggccaagagaagatctgctgcccccctgcacagcgaccagcagcctgtgcctgagcagctgcgcatccaggtgtcccgggtgtccatgcatgactatgaggccctgcactatgacaaggagcagctgaaggaggcctctgtgcccctgggcaccgtggtggtgcctggggacagcgacctggagctgtgccgggcccacatcgagcggctgcagcaggagccagatggagctggggccaagagccccacctgccagaagctgagccccaagtggtgcttcctggatgccaccacagccagccgcttctacagaattgaccgggcccaggagcacctgaactacgtgacagagatcgcccaggatgagatctacatcctggaccctgagctgctgggcgccagcgcccggccagacctgcccacccccaccagccccctgcccaccagcccctgcagccccacccccaggagcctgcagggagatgctgccccaccccagggcgaggagctgattgaagctgccaagagaaatgacttctgcaagctgcaggagctgcaccgggccggcggggacctgatgcacagagatgagcagagcaggaccctgctgcaccacgctgtgtccacaggcagcaaggatgtggtgcgctacctgctggaccacgcccctcctgagatcctggatgctgtggaggagaatggagagacctgcctgcaccaggccgccgccctgggccagaggaccatctgccactacatcgtggaggccggggccagcctgatgaagacagaccagcagggcgacaccccccggcagagagctgagaaggcccaggacacagagctggccgcctacctggagaaccggcagcactaccagatgatccagcgggaggaccaggagacagctgtgtag

SEQ ID NO: 77412 - DNA, 2787 bp, Artificial Sequence
  derived and/or modified sequence
atggagccccgggacggcagccccgaggcccggagcagcgacagcgagagcgcgagcgccagctcttccggctccgaacgagacgctggaccagaacccgataaggcacctcgccgacttaacaaaaggcgctttccaggcctgcgtctgtttggacacaggaaggcgattactaagtctgggcttcagcatctggctccgccacccccgacccctggcgcaccctgcagtgagagcgagcgccaaatccgcagtacggtggattggtctgagagcgcgacatatggagagcatatttggtttgaaacgaatgtgtctggcgatttttgttacgtcggcgaacagtactgcgtggctagaatgctgaaatctgtgagtcggagaaagtgcgcagcctgcaagatagtcgtacacactccatgcatcgagcagctcgagaaaattaacttcaggtgtaagccctctttccgcgaaagcggcagccgcaatgttagagaacctactttcgtgagacaccattgggttcacagacgacggcaggacggaaagtgtcgccattgtggaaagggattccagcagaaattcaccttccacagcaaggagatcgtagcaatctcatgctcctggtgcaagcaggcctatcactcaaaagtgagctgtttcatgctacagcagatcgaggaaccgtgttccttaggggtgcatgccgctgtggtaattcccccaacctggattctgcgtgcgcgccggcctcagaatacactgaaagcttcaaaaaagaagaagagggccagcttcaaacggaagtcctctaagaaaggaccagaggaaggccgctggcggccgtttatcattcggcccaccccatctccccttatgaagccactgcttgtgtttgtgaatcctaaaagcggtggcaaccagggcgccaaaattatacagagtttcctttggtaccttaatccccggcaggtattcgatctttcacagggtgggccgaaggaggcactggagatgtacaggaaagtgcacaatcttagaattcttgcatgtggcggtgacgggactgtcggctggatcctgagtacactcgaccagctgcgtttaaagcccccgcctcccgtcgccatattacctctgggaacaggaaatgatctcgcacggactctcaattgggggggggggtataccgacgaacctgtgtctaagatcttgtcccacgtcgaggagggaaacgtggtgcagctggatcgatgggacctgcatgcggaacccaaccccgaggcaggtcctgaggatcgcgatgagggtgctacagaccgcctccctctagatgtgttcaacaactacttctccctggggttcgacgcccatgttacacttgagtttcacgagtcacgcgaggcaaaccccgagaaatttaacagcagattcagaaataagatgttttacgctggtactgcctttagtgacttccttatgggtagttccaaggacttggcaaagcacattagagttgtctgtgatggcatggacctgactccaaagatccaggacctgaagccccaatgcgtcgtgttcctgaacattcccaggtactgcgcggggaccatgccttggggtcacccaggcgagcaccacgatttcgagccgcaacgccacgatgacggatacctcgaggttatcgggttcaccatgactagtttggccgcactccaagtcgggggtcatggtgaacgtctgacgcagtgcagagaggtggtgcttaccacttccaaggctatcccagtgcaggtggatggagaaccatgtaaacttgccgcctccaggatcagaatcgctttgaggaaccaggccacaatggtacagaaagctaaaaggcgcagcgctgccccactccactccgaccagcagccagtcccggagcagcttaggattcaagtaagtagagtgagtatgcatgactacgaggccctgcattacgacaaagaacaattgaaggaggcttctgtgccactgggcactgtcgtggtgcccggagattccgacctcgagctttgccgggcacatatagaaagactgcagcaggagccagacggtgccggcgcaaaatcgcccacgtgccagaaactctccccaaaatggtgctttctggacgccaccacagcctcccgcttttaccgtatcgaccgggcccaggaacaccttaactacgttaccgagattgcacaggatgaaatctacattctggacccagagctgttaggcgcgagcgcacgccctgatctgcccacaccaacctccccactgcctaccagcccgtgttcccctactccacggagtctacaaggcgacgcagcccccccacagggtgaggaactgatcgaggccgccaagcggaatgacttttgcaagttacaggaactccatcgcgcggggggagaccttatgcatagggacgaacaatccaggacccttcttcatcatgcggtgtctacgggatcgaaagacgtcgtaaggtatctgctggatcatgcccctcccgagatcctggatgccgtggaggaaaacggagaaacgtgcctgcaccaagccgccgcccttggtcagcggaccatctgtcactacatcgtggaggccggcgcctctctcatgaagaccgatcagcagggagatacccctagacagcgagccgagaaagctcaggacacggaactagccgcctacctcgagaatagacagcactaccaaatgatccagcgagaggaccaggaaacagccgtgtag

SEQ ID NO: 77413 - DNA, 2787 bp, Artificial Sequence
  derived and/or modified sequence
atggagccgagggatggttcccctgaggctcgatccagtgactccgaatctgcttccgcgtcttcatccgggtccgaacgggatgccggtcccgagcctgacaaagcacctaggcgccttaataaacgtaggtttcccggtctgcgcctctttggacaccgaaaggccattaccaaaagtggccttcagcatctggcaccgcctcctcccactcccggagctccatgttctgaatcagaacgacagatccgttccacagttgattggagtgagagcgcgacctacggtgagcacatttggtttgaaactaatgtctctggtgatttttgttacgtgggagagcagtattgtgtggcccgaatgctaaagtcagtctccaggcggaaatgtgcagcatgcaaaatcgtagtccacaccccctgcattgaacagctggagaaaataaatttccgctgtaagccgagtttccgcgaatctggctcacggaacgtgcgcgagcctacttttgttcggcaccactgggttcatcgcagaaggcaagacggcaagtgccgccactgcggaaagggtttccagcaaaaattcaccttccacagtaaggagatcgtagcgatttcttgctcttggtgtaagcaggcctaccattccaaagtgagctgctttatgctccagcagatcgaggagccatgttcgttaggggtacatgcagccgtagttatcccccctacttggattcttcgagcaaggcggccacagaacaccctgaaagccagcaagaagaagaaaagagcctcattcaaaaggaaatctagcaagaaaggtcctgaggaaggtcgctggcggccttttatcattagacccacaccatccccactgatgaagcctcttctcgtgtttgtaaatcccaagtccggaggaaatcagggcgctaagattattcaatcctttctgtggtacctaaaccccagacaggtctttgatctctcccaaggtgggcctaaagaggccctggagatgtacaggaaagtccacaacttgagaatattggcatgcggaggagacggtaccgtaggatggatacttagcacactcgaccagctcagactcaaaccgcctcccccagtggccattctgcctctagggacaggtaatgacctggccaggacattgaactggggcggtgggtataccgacgagcccgtgtcaaagattctttcccacgtggaggagggcaatgtagtccagctcgacaggtgggacttgcacgcagagcccaaccctgaagccggtcctgaggatagggacgaaggagctaccgaccgactgccgctagatgtgttcaataattacttttcacttggattcgatgctcacgtcactctggaattccacgagagtcgagaggctaatcccgagaagttcaattccaggttccgcaataaaatgttttatgccggaaccgccttctctgatttcctcatgggaagttctaaggacctggcaaaacacatcagagtcgtctgtgacggaatggacctgactccaaagattcaagatctgaagcctcagtgcgtggtcttccttaacattcccagatattgcgcaggtacaatgccctggggccaccctggagaacaccacgactttgaaccccagcgtcacgacgacggctatctggaggttatcgggtttaccatgacctccctcgccgcacttcaagtaggcggtcacggtgagaggcttacccagtgcagggaggtggtgttgaccacgagcaaagccattcccgttcaagtggatggcgaaccttgcaagctggccgcatcacggattcgaattgcgctgagaaaccaggctacaatggtgcagaaagcgaaacgcaggtccgcggctcctctgcatagcgaccagcagccagtccccgagcagttgaggatccaagtgtctcgcgtatccatgcacgactacgaagcgctgcactacgacaaggagcagcttaaagaggcgagtgtccccctcgggaccgtagtagtacctggtgacagtgatctggagttatgtcgtgcacacatcgagcgactgcagcaggaaccagatggagcaggggctaaatccccaacttgtcagaagctgagtccaaagtggtgctttctggatgccacaaccgcaagcaggttttatagaatcgatagggctcaggagcacctgaactatgtgacagagatcgcccaggatgagatctatatattggatccagaactattgggagcctccgctcgccctgacttgcctacccctacttctcccctgcctacttctccatgtagcccgacaccacgctctctgcagggagatgccgctccaccccagggggaagagctcatagaggccgctaaaaggaacgacttttgtaagctgcaagagctccatcgggctggtggggacctgatgcacagagacgagcagagccggactctcttacatcacgctgtgtccactggaagtaaagatgtggttagatatctcctggatcatgcccctcccgaaattttggacgctgttgaagagaatggagaaacatgcctgcaccaggcagctgcactgggccagagaaccatttgccactacatcgtggaggcaggagcttccctgatgaagacagatcagcagggcgacacaccaaggcagcgcgctgagaaagctcaggacactgaactggctgcctacctggaaaacaggcaacattaccagatgattcagagagaagaccaagagactgctgtatag

SEQ ID NO: 77414 - protein, 906 aa, Artificial Sequence
  derived and/or modified sequence
MEPRDGSPEARSSDSESASASSSGSERDAGPEPDKAPRRLNKRRFPGLRLFGHRKAITKSGLQHLAPPPPTPGAPCSESERQIRSTVDWSESATYGEHIWFETNVSGDFCYVGEQYCVARMLQKSVSRRKCAACKIVVHTPCIEQLEKINFRCKPSFRESGSRNVREGFQQKFTFHSKEIVAISCSWCKQAYHSKVSCFMLQQIEEPCSLGVHAAVVIPPTWILRARRPQNTLKASKKKKRASFKRKSSKKGPEEGRWRPFIIRPTPSPLMKPLLVFVNPKSGGNQGAKIIQSFLWYLNPRQVFDLSQGGPKEALEMYRKVHNLRILACGGDGTVGWILSTLDQLRLKPPPPVAILPLGTGNDLARTLNWGGGYTDEPVSKILSHVEEGNVVQLDRWDLHAEPNPEAGPEDRDEGATDRLPLDVFNNYFSLGFDAHVTLEFHESREANPEKFNSRFRNKMFYAGTAFSDFLMGSSKDLAKHIRVVCDGMDLTPKIQDLKPQCVVFLNIPRYCAGTMPWGHPGEHHDFEPQRHDDGYLEVIGFTMTSLAALQVGGHGERLTQCREVVLTTSKAIPVQVDGEPCKLAASRIRIALRNQATMVQKAKRRSAAPLHSDQQPVPEQLRIQVSRVSMHDYEALHYDKEQLKEASVPLGTVVVPGDSDLELCRAHIERLQQEPDGAGAKSPTCQKLSPKWCFLDATTASRFYRIDRAQEHLNYVTEIAQDEIYILDPELLGASARPDLPTPTSPLPTSPCSPTPRSLQGDAAPPQGEELIEAAKRNDFCKLQELHRAGGDLMHRDEQSRTLLHHAVSTGSKDVVRYLLDHAPPEILDAVEENGETCLHQAAALGQRTICHYIVEAGASLMKTDQQGDTPRQRAEKAQDTELAAYLENRQHYQMIQREDQETAV

SEQ ID NO: 77415 - DNA, 2721 bp, Artificial Sequence
  derived and/or modified sequence
atggagcccagagacggcagccccgaggccagaagcagcgacagcgagagcgccagcgccagcagcagcggcagcgagagagacgccggccccgagcccgacaaggcccccagaagactgaacaagagaagattccccggcctgagactgttcggccacagaaaggccatcaccaagagcggcctgcagcacctggccccccccccccccacccccggcgccccctgcagcgagagcgagagacagatcagaagcaccgtggactggagcgagagcgccacctacggcgagcacatctggttcgagaccaacgtgagcggcgacttctgctacgtgggcgagcagtactgcgtggccagaatgctgcagaagagcgtgagcagaagaaagtgcgccgcctgcaagatcgtggtgcacaccccctgcatcgagcagctggagaagatcaacttcagatgcaagcccagcttcagagagagcggcagcagaaacgtgagagagggcttccagcagaagttcaccttccacagcaaggagatcgtggccatcagctgcagctggtgcaagcaggcctaccacagcaaggtgagctgcttcatgctgcagcagatcgaggagccctgcagcctgggcgtgcacgccgccgtggtgatcccccccacctggatcctgagagccagaagaccccagaacaccctgaaggccagcaagaagaagaagagagccagcttcaagagaaagagcagcaagaagggccccgaggagggcagatggagacccttcatcatcagacccacccccagccccctgatgaagcccctgctggtgttcgtgaaccccaagagcggcggcaaccagggcgccaagatcatccagagcttcctgtggtacctgaaccccagacaggtgttcgacctgagccagggcggccccaaggaggccctggagatgtacagaaaggtgcacaacctgagaatcctggcctgcggcggcgacggcaccgtgggctggatcctgagcaccctggaccagctgagactgaagccccccccccccgtggccatcctgcccctgggcaccggcaacgacctggccagaaccctgaactggggcggcggctacaccgacgagcccgtgagcaagatcctgagccacgtggaggagggcaacgtggtgcagctggacagatgggacctgcacgccgagcccaaccccgaggccggccccgaggacagagacgagggcgccaccgacagactgcccctggacgtgttcaacaactacttcagcctgggcttcgacgcccacgtgaccctggagttccacgagagcagagaggccaaccccgagaagttcaacagcagattcagaaacaagatgttctacgccggcaccgccttcagcgacttcctgatgggcagcagcaaggacctggccaagcacatcagagtggtgtgcgacggcatggacctgacccccaagatccaggacctgaagccccagtgcgtggtgttcctgaacatccccagatactgcgccggcaccatgccctggggccaccccggcgagcaccacgacttcgagccccagagacacgacgacggctacctggaggtgatcggcttcaccatgaccagcctggccgccctgcaggtgggcggccacggcgagagactgacccagtgcagagaggtggtgctgaccaccagcaaggccatccccgtgcaggtggacggcgagccctgcaagctggccgccagcagaatcagaatcgccctgagaaaccaggccaccatggtgcagaaggccaagagaagaagcgccgcccccctgcacagcgaccagcagcccgtgcccgagcagctgagaatccaggtgagcagagtgagcatgcacgactacgaggccctgcactacgacaaggagcagctgaaggaggccagcgtgcccctgggcaccgtggtggtgcccggcgacagcgacctggagctgtgcagagcccacatcgagagactgcagcaggagcccgacggcgccggcgccaagagccccacctgccagaagctgagccccaagtggtgcttcctggacgccaccaccgccagcagattctacagaatcgacagagcccaggagcacctgaactacgtgaccgagatcgcccaggacgagatctacatcctggaccccgagctgctgggcgccagcgccagacccgacctgcccacccccaccagccccctgcccaccagcccctgcagccccacccccagaagcctgcagggcgacgccgcccccccccagggcgaggagctgatcgaggccgccaagagaaacgacttctgcaagctgcaggagctgcacagagccggcggcgacctgatgcacagagacgagcagagcagaaccctgctgcaccacgccgtgagcaccggcagcaaggacgtggtgagatacctgctggaccacgccccccccgagatcctggacgccgtggaggagaacggcgagacctgcctgcaccaggccgccgccctgggccagagaaccatctgccactacatcgtggaggccggcgccagcctgatgaagaccgaccagcagggcgacacccccagacagagagccgagaaggcccaggacaccgagctggccgcctacctggagaacagacagcactaccagatgatccagagagaggaccaggagaccgccgtgtag

SEQ ID NO: 77416 - DNA, 3213 bp, Artificial Sequence
  derived and/or modified sequence
gtgctgagccccggccgccggcccggcatgggcgtctcccgcgggccctccgccggccggggctagggccggatggagccgcgggacggtagccccgaggcccggagcagcgactccgagtcggcttccgcctcgtccagcggctccgagcgcgacgccggtcccgagccggacaaggcgccgcggcgactcaacaagcggcgcttcccggggctgcggctcttcgggcacaggaaagccatcaccaagtcgggcctccagcacctggccccccctccgcccacccctggggccccgtgcagcgagtcagagcggcagatccggagtacagtggactggagcgagtcagcgacatatggggagcacatctggttcgagaccaacgtgtccggggacttctgctacgttggggagcagtactgtgtagccaggatgctgcagaagtcagtgtctcgaagaaagtgcgcagcctgcaagattgtggtgcacacgccctgcatcgagcagctggagaagataaatttccgctgtaagccgtccttccgtgaatcaggctccaggaatgtccgcgagggattccagcagaagttcaccttccacagcaaggagattgtggccatcagctgctcgtggtgcaagcaggcataccacagcaaggtgtcctgcttcatgctgcagcagatcgaggagccgtgctcgctgggggtccacgcagccgtggtcatcccgcccacctggatcctccgcgcccggaggccccagaatactctgaaagcaagcaagaagaagaagagggcatccttcaagaggaagtccagcaagaaagggcctgaggagggccgctggagacccttcatcatcaggcccaccccctccccgctcatgaagcccctgctggtgtttgtgaaccccaagagtgggggcaaccagggtgcaaagatcatccagtctttcctctggtatctcaatccccgacaagtcttcgacctgagccagggagggcccaaggaggcgctggagatgtaccgcaaagtgcacaacctgcggatcctggcgtgcgggggcgacggcacggtgggctggatcctctccaccctggaccagctacgcctgaagccgccaccccctgttgccatcctgcccctgggtactggcaacgacttggcccgaaccctcaactggggtgggggctacacagatgagcctgtgtccaagatcctctcccacgtggaggaggggaacgtggtacagctggaccgctgggacctccacgctgagcccaaccccgaggcagggcctgaggaccgagatgaaggcgccaccgaccggttgcccctggatgtcttcaacaactacttcagcctgggctttgacgcccacgtcaccctggagttccacgagtctcgagaggccaacccagagaaattcaacagccgctttcggaataagatgttctacgccgggacagctttctctgacttcctgatgggcagctccaaggacctggccaagcacatccgagtggtgtgtgatggaatggacttgactcccaagatccaggacctgaaaccccagtgtgttgttttcctgaacatccccaggtactgtgcgggcaccatgccctggggccaccctggggagcaccacgactttgagccccagcggcatgacgacggctacctcgaggtcattggcttcaccatgacgtcgttggccgcgctgcaggtgggcggacacggcgagcggctgacgcagtgtcgcgaggtggtgctcaccacatccaaggccatcccggtgcaggtggatggcgagccctgcaagcttgcagcctcacgcatccgcatcgccctgcgcaaccaggccaccatggtgcagaaggccaagcggcggagcgccgcccccctgcacagcgaccagcagccggtgccagagcagttgcgcatccaggtgagtcgcgtcagcatgcacgactatgaggccctgcactacgacaaggagcagctcaaggaggcctctgtgccgctgggcactgtggtggtcccaggagacagtgacctagagctctgccgtgcccacattgagagactccagcaggagcccgatggtgctggagccaagtccccgacatgccagaaactgtcccccaagtggtgcttcctggacgccaccactgccagccgcttctacaggatcgaccgagcccaggagcacctcaactatgtgactgagatcgcacaggatgagatttatatcctggaccctgagctgctgggggcatcggcccggcctgacctcccaacccccacttcccctctccccacctcaccctgctcacccacgccccggtcactgcaaggggatgctgcaccccctcaaggtgaagagctgattgaggctgccaagaggaacgacttctgtaagctccaggagctgcaccgagctgggggcgacctcatgcaccgagacgagcagagtcgcacgctcctgcaccacgcagtcagcactggcagcaaggatgtggtccgctacctgctggaccacgcccccccagagatccttgatgcggtggaggaaaacggggagacctgtttgcaccaagcagcggccctgggccagcgcaccatctgccactacatcgtggaggccggggcctcgctcatgaagacagaccagcagggcgacactccccggcagcgggctgagaaggctcaggacaccgagctggccgcctacctggagaaccggcagcactaccagatgatccagcgggaggaccaggagacggctgtgtagcgggccgcccacgggcagcaggagggacaatgcggccaggggacgagcgccttccttgcccacctcactgccacattccagtgggacggccacggggggacctaggccccagggaaagagccccatgccgccccctaaggagccgcccagacctagggctggactcaggagctgggggggcctcacctgttcccctgaggaccccgccggacccggaggctcacagggaacaagacacggctgggttggatatgcctttgccggggttctggggcagggcgctccctggccgcagcagatgccctcccaggagtggaggggctggagagggggaggccttcgggaagaggcttcctgggccccctggtcttcggccgggtccccagcccccgctcctgccccaccccacctcctccgggc

SEQ ID NO: 77417 - DNA, 2721 bp, Artificial Sequence
  derived and/or modified sequence
atggaaccccgtgatggatcaccagaggcgcggtcctcagacagtgagtctgcttctgcctcaagcagcggaagcgagcgcgatgcaggtcctgagcccgacaaagccccacggcggttaaacaagcgccggtttcccggcttacgtctattcggacacaggaaagccatcacgaaaagcggcctgcagcacctcgctcctcctccacctacccctggggcaccttgttcagagagcgagcggcagatcaggtctacagtggactggagcgaatcagctacatatggggagcatatctggttcgaaactaatgtgagcggagatttttgttacgtgggcgaacagtattgcgtggcaaggatgttgcagaagtccgtatctaggcggaaatgtgctgcctgtaaaattgtggtccatactccctgcattgagcagctggagaaaattaatttccgatgtaaaccctcatttcgcgagagtggcagccgcaacgtgagggaaggatttcagcaaaaattcactttccatagtaaagaaattgtggccatttcttgtagttggtgcaagcaggcataccacagtaaggtgtcttgctttatgctacagcagatcgaagagccctgttcactgggcgtccacgcagccgtggtgatcccgcccacttggatactacgcgcacgcagacctcagaacacactgaaggccagtaagaaaaaaaagcgcgcatcctttaagcgcaagtcatccaaaaagggccctgaggaaggcagatggcgaccatttattattaggcccacccctagcccactcatgaagccgctgctcgtattcgttaatccaaagtctggtggcaaccagggggcaaagatcattcagtccttcctgtggtatctcaatccccgccaggtcttcgatctctcacagggagggccaaaagaagcactggagatgtacagaaaggtccataacctgcggattttggcatgtggcggagacggcaccgttggttggatcctgtctacactggatcaattacgcctcaagccacccccgcctgtcgctatcttacccctcggaacaggcaatgacttggccagaaccctgaactggggaggagggtataccgacgagcctgtgtcgaagatcctttcgcatgtggaagagggaaacgtggtgcagctggatcgctgggatctccacgccgagcccaaccctgaagccggccctgaggaccgggacgaaggggcaacagaccgacttccactggacgtattcaacaattacttttctctgggtttcgacgcccacgtgactttagagttccatgaatcaagggaagctaatcctgaaaagttcaactcacggttcagaaacaagatgttttatgcagggaccgcctttagtgacttccttatggggtcctccaaggacttggccaagcatattcgggttgtgtgtgatggaatggacctgactccaaagattcaggacctcaaacctcaatgcgtcgtgttcttgaatattccacgctactgtgctgggacaatgccctgggggcaccctggcgaacaccacgatttcgagccgcaaagacatgacgacgggtaccttgaggtcattggattcactatgacaagtctagctgccctgcaagtcggtgggcatggggaacgactgacacaatgcagagaagttgtgctaactacctcgaaagccatccctgtgcaagtggatggagaaccatgcaagctggccgcttctcggattcgaatcgccttgcgaaaccaggccaccatggtgcaaaaagccaagcgaagaagtgccgctcccttgcacagcgaccagcagcctgtgccagagcagctgcgaatccaggtgtcaagagtttcgatgcatgattacgaggccctgcattatgataaggagcagctgaaagaggcatctgttccactgggtactgtggtagttccaggagactccgacttagagctctgccgggctcacatagaacggctccagcaggaacctgatggcgcaggggcaaaatcccctacttgccaaaagttatcccctaagtggtgctttctagacgcaactacggcctctagattttataggattgatagggctcaggaacacctcaattatgtcacggaaattgcacaggatgaaatctacattctggacccagaacttttgggagcttcagccagacccgatctgcccacaccgacctccccgctccccaccagcccctgctcacccacccctaggtctcttcaaggcgatgctgcccctccccaaggcgaagagctaatagaagccgccaagaggaacgacttttgcaagcttcaggagctgcatagagccgggggcgatctgatgcacagggatgaacagagcaggaccctattacaccacgcagtgtccacagggtcaaaagatgtggtcagatatctgctggaccacgcaccgccagagattctggatgctgtggaggagaatggtgagacatgcttacatcaggctgcagccttagggcagaggactatttgtcactatattgttgaggcaggcgcttctctcatgaagacagaccagcagggcgacactcctagacaacgggctgagaaggcgcaggatactgagctggccgcgtacctggaaaatcgacaacactatcagatgatccaaagggaagatcaggagactgctgtgtag

SEQ ID NO: 77418 - DNA, 2721 bp, Artificial Sequence
  derived and/or modified sequence
atggagcccagagatggcagccctgaggcccggagcagtgacagcgagagcgccagcgccagcagcagcggcagcgagagagatgctggccctgagccagacaaggccccccggcggctgaacaagaggcgcttccctggcctgcggctgtttggccacaggaaggccatcaccaagagcggcctgcagcacctggcccctcctccacccacccctggggccccctgcagcgagagcgagcggcagatccgcagcacagtggactggagcgagagcgccacctatggagagcacatctggtttgagaccaacgtgtctggggacttctgctacgtgggggagcagtactgtgtggccaggatgctgcagaagtctgtgtccaggaggaaatgtgccgcctgcaagatcgtggtgcacaccccctgcatcgagcagctggagaagatcaacttccgctgcaagcccagcttccgggagagcggcagcagaaatgtgcgggagggcttccagcagaagttcaccttccacagcaaggagatcgtggccatcagctgctcctggtgcaagcaggcctaccacagcaaggtgtcctgcttcatgctgcagcagatcgaggagccctgcagcctgggcgtgcacgccgctgtggtgattcctcccacctggatcctgcgggcccggcggccccagaacaccctgaaggccagcaagaagaagaagagggccagcttcaagaggaagagcagcaagaagggccctgaggagggccgctggaggcccttcatcatccggcccacccccagccccctgatgaagcccctgctggtgtttgtgaaccccaagagcggcggcaaccagggcgccaagatcatccagagcttcctgtggtacctgaacccccggcaggtgtttgacctgagccagggcggccccaaggaggccctggagatgtacaggaaggtgcacaacctgcgcatcctggcctgtggaggagatggcaccgtgggctggatcctgagcaccctggaccagctgcggctgaagcccccacctcctgtggccatcctgcccctgggcactggaaatgacctggcccggaccctgaactggggcggcggctacacagatgagcctgtgtccaagatcctgagccacgtggaggagggcaatgtggtgcagctggaccgctgggacctgcatgctgagcccaaccctgaggccggccctgaggacagagatgaaggagccacagaccggctgcccctggatgtgttcaacaactacttcagcctgggctttgatgcccacgtgaccctggagttccacgagagccgggaggccaaccctgagaagttcaacagccgcttcaggaacaagatgttttatgccggcacagccttcagtgacttcctgatgggcagcagcaaggacctggccaagcacatccgggtggtgtgtgatggcatggacctgacccccaagatccaggacctgaagccccagtgtgtggtgttcctgaacatcccccgctactgtgccggcaccatgccctggggccaccctggagagcaccacgactttgagccccagagacatgatgatggctacctggaggtgattggcttcaccatgaccagcctggccgccctgcaggtgggcggccatggagagcggctgacccagtgccgggaggtggtgctgaccaccagcaaggccatccctgtgcaggtggatggagagccctgcaagctggccgccagccgcatcagaattgccctgaggaaccaggccaccatggtgcagaaggccaagagaagatctgctgcccccctgcacagcgaccagcagcctgtgcctgagcagctgcgcatccaggtgtcccgggtgtccatgcatgactatgaggccctgcactatgacaaggagcagctgaaggaggcctctgtgcccctgggcaccgtggtggtgcctggggacagcgacctggagctgtgccgggcccacatcgagcggctgcagcaggagccagatggagctggggccaagagccccacctgccagaagctgagccccaagtggtgcttcctggatgccaccacagccagccgcttctacagaattgaccgggcccaggagcacctgaactacgtgacagagatcgcccaggatgagatctacatcctggaccctgagctgctgggcgccagcgcccggccagacctgcccacccccaccagccccctgcccaccagcccctgcagccccacccccaggagcctgcagggagatgctgccccaccccagggcgaggagctgattgaagctgccaagagaaatgacttctgcaagctgcaggagctgcaccgggccggcggggacctgatgcacagagatgagcagagcaggaccctgctgcaccacgctgtgtccacaggcagcaaggatgtggtgcgctacctgctggaccacgcccctcctgagatcctggatgctgtggaggagaatggagagacctgcctgcaccaggccgccgccctgggccagaggaccatctgccactacatcgtggaggccggggccagcctgatgaagacagaccagcagggcgacaccccccggcagagagctgagaaggcccaggacacagagctggccgcctacctggagaaccggcagcactaccagatgatccagcgggaggaccaggagacagctgtgtag

SEQ ID NO: 77419 - DNA, 2721 bp, Artificial Sequence
  derived and/or modified sequence
atggagccccgggacggcagccccgaggcccggagcagcgacagcgagagcgcaagtgctagttcaagcgggtcggaaagagatgcagggcccgaacccgataaggcacctcggaggctgaataaaagaaggttccctggcctgaggttattcgggcaccgaaaggccataactaaatcaggtcttcaacatctggcaccaccgcctccaacgccaggcgccccgtgttctgagagcgaacggcagatcagatctactgtggactggagtgagtccgccacctacggggagcatatttggttcgagaccaacgtatcaggcgatttctgttacgtgggcgagcagtactgtgtagcaagaatgctgcagaaaagcgtgagccggcgaaagtgtgctgcttgcaaaatcgtggtccatacaccctgcatcgagcagctggagaagatcaattttcggtgtaagccctctttcagggaatcaggatccagaaatgttcgggaaggctttcaacaaaaatttacattccacagtaaagagatagtggccattagttgcagctggtgtaagcaagcttatcactccaaggtgagttgtttcatgttgcagcaaatcgaggagccatgttcgttaggggttcatgccgccgtcgttattccacctacatggatcttgcgggcaagacgccctcaaaatacactgaaagcctcaaagaagaagaaacgggcatccttcaaaaggaagagctccaaaaagggacctgaggaaggacgttggcggcccttcattataagaccaacccccagcccgcttatgaagcctctcttagtatttgtgaatccaaagagcggcggaaatcaaggggcgaagattatccagagttttctctggtacctgaatcctaggcaggtgttcgatttatcgcagggcgggccgaaggaggctctagaaatgtaccgcaaggtgcataacctgagaattttggcatgcggaggagacggaacggtgggctggatccttagcacgctcgatcagctcagactaaagcccccgccacctgtcgccatcctcccactgggtactgggaatgatcttgcgcggacattaaactggggcggaggctatacagatgagcctgtgagcaagatactgtcccatgtggaggaagggaatgtggtccagttagaccggtgggatttacacgcagagcctaatcccgaggctgggccggaagacagggatgaaggcgccaccgatcgccttcctctcgacgtcttcaataattatttctccttaggctttgacgcccatgttaccctggagttccatgaatcccgggaggctaaccccgaaaagttcaactcaaggtttcgcaacaagatgttttacgcaggaactgcgttctccgactttttgatggggagctccaaagatctggccaagcatattagagtggtctgcgacgggatggatcttacacctaaaattcaagacctgaaaccacagtgcgtcgtatttttaaacatcccacggtattgtgccggtaccatgccttggggacatcccggagagcaccacgacttcgagccacaacgacatgacgatggctacctggaagtaattggattcacaatgacgtctttagcagcattacaggtcggcgggcatggggaacgcctgacccagtgtcgggaagtcgtgctcactaccagtaaagctattccagtccaagtggatggggaaccatgtaaactggctgcctcccgtatccgaatcgctttgcgcaaccaggcaaccatggtccagaaggcgaagcggagaagcgccgcccccctccattcggatcagcagcccgtcccagaacaacttcgcatccaggtaagcagagtctccatgcatgattacgaagctttacactatgacaaggagcagctgaaggaagcgtctgttccactgggtaccgtcgttgttccaggcgactccgatctagagttgtgccgagctcacatcgaacggctccagcaggagcctgacggtgctggagctaagagtcctacttgtcagaagctgtcacccaagtggtgtttcctggatgctactaccgccagtaggttttacagaattgatcgcgctcaggagcacttgaactacgtcactgaaattgcacaggatgaaatttacattctggaccctgaactgttgggagcgagtgcaaggcctgacctccccaccccaacatctcctctcccaaccagtccctgctccccaactccacgctcccttcagggggatgctgcccccccacagggcgaagagctgatcgaagctgcaaaacggaatgacttctgtaagctccaggaactgcatcgcgcaggaggcgacttgatgcaccgggacgagcagtcacgaacactgttgcatcacgctgtctccacaggctcaaaagatgtggtgcgttacttactcgaccatgcacctcccgagattctggacgccgtggaagaaaatggggaaacctgcttacatcaggcagccgccctagggcagcgcaccatatgtcactatatcgtagaagctggcgcttctcttatgaagaccgatcagcaaggggatacacccagacagagagcagaaaaagcccaagacactgaactggccgcctatttggagaatcgccaacactaccagatgatccagcgggaggatcaagaaacggcagtgtag

SEQ ID NO: 77420 - DNA, 2721 bp, Artificial Sequence
  derived and/or modified sequence
atggaacccagggatgggagccccgaggctaggtctagcgattcagagtcggcgtccgcatcaagttccggctctgagcgtgacgcaggccctgaacccgataaagccccacgccgtctgaacaagcgaagattccctgggctacgcctcttcggccatcggaaggccatcactaagtccggactgcagcacttagcaccccctccgccaacaccaggtgctccctgttctgaatctgaacggcaaatacgatcaactgtggactggtcagagtccgcgacctacggcgagcacatctggttcgagacgaacgtcagcggagatttctgctacgttggggagcagtactgcgtggccaggatgctgcaaaagtccgtgtcacgtaggaaatgcgccgcttgcaagatcgtggtgcacacaccgtgtattgaacagttagagaagataaactttaggtgcaagccgtctttccgggagtctggaagtaggaacgttcgcgaggggttccagcaaaagttcactttccatagcaaggaaatagtggcaatctcatgctcatggtgcaagcaagcgtatcatagcaaagtgagttgttttatgctgcaacagattgaagagccttgtagtctaggtgtgcacgctgccgtcgtgataccaccaacttggatcctgcgcgctcgcaggcctcagaacactctgaaggcaagtaaaaagaagaagagggctagtttcaaaaggaaaagcagcaagaaagggccagaagaaggcaggtggcgcccatttatcatacgaccaacgcccagccccctgatgaagcccctcctggtattcgtgaaccccaaatccggaggcaaccaaggggctaaaattattcagtcattcctctggtatctcaaccctcgacaagtgtttgacctgtcacaaggaggacccaaagaggctctggagatgtacaggaaggtgcacaacctccgcattttggcatgcggtggagacggcacagttggttggatccttagcacgctggatcagctaagacttaagcctcccccacctgtggccatcctccccctcggcacagggaacgatcttgccagaaccctgaactggggcggtggttacacagacgagcctgtctctaagatactctcacacgtggaggaaggcaacgtggtgcaattagacagatgggatctgcacgccgaaccaaatcccgaggcgggacccgaggatcgggatgagggagccactgataggctgccactcgatgtgtttaataactacttctcgctgggcttcgacgcacacgtaacgttagagtttcacgaaagtcgcgaagctaacccagaaaaatttaattctcgattccggaacaaaatgttttacgctggcaccgcattcagtgatttcttgatgggttcatcgaaagacttggccaaacacattcgcgtggtctgcgatggaatggacctcacccccaaaatccaagacctcaagccccagtgtgtagtcttcctaaatatccctcggtactgcgcaggtacgatgccctggggccatcccggtgagcatcacgactttgaaccacagcggcatgacgacggctacttggaggttattggtttcacaatgactagcttggccgctctgcaggtggggggacatggcgaaagactgacccaatgcagggaagtggtgttgaccaccagcaaagcgattccagtccaggtcgatggagaaccctgtaaattagccgcatcgcgcatcagaattgccctgcggaatcaggcaacaatggtccagaaagccaaaagacgatcagcagcacctcttcacagcgaccagcagccagtccctgagcagctgcgcatccaagtgagccgcgtttcaatgcacgattacgaagctctccactacgacaaggaacagctgaaggaggccagcgtgccactcgggacagtcgtcgtgcccggtgactccgatctggagttatgccgagctcacattgaacgcctgcagcaagagcccgacggagctggagcaaagagccctacttgccagaagctgagccccaaatggtgcttcctggacgctacgactgctagcagattctaccgtatcgatcgcgcacaagagcatttgaactacgtaaccgagatcgcccaggacgagatttatatactagaccctgagctgcttggagcgtctgcgaggcccgacctgcccactccgacttctccactgccaactagtccttgttctcccacccccaggtctctccagggcgatgccgcaccccctcagggcgaagagctcattgaagctgccaagaggaatgacttctgcaaactgcaggagttacacagggctggtggagacctgatgcaccgagatgagcagagccgtacactcctccaccacgccgtaagtacaggatccaaggatgttgtaagatatctgttagaccatgcacccccagagattctcgatgctgtggaagagaacggagagacctgcctacatcaggctgccgctctgggacaacgtaccatatgccactatatcgtggaagccggtgccagcctcatgaagacagaccaacagggagataccccaaggcagcgcgcagagaaagcccaagacacagagcttgctgcgtacctggagaaccggcagcattaccagatgatacaacgagaagatcaggaaacggcagtgtag

SEQ ID NO: 77421 - protein, 479 aa, Artificial Sequence
  derived and/or modified sequence
MLTSKGQGFLHGGLCLWLCVFTPFFKGCVGCATEERLFHKLFSHYNQFIRPVENVSDPVTVHFEVAITQLANVIWNDYKLRWDPMEYDGIETLRVPADKIWKPDIVLYNNAVGDFQVEGKTKALLKYNGMITWTPPAIFKSSCPMDITFFPFDHQNCSLKFGSWTYDKAEIDLLIIGSKVDMNDFWENSEWEIIDASGYKHDIKYNCCEEIYTDITYSFYIRRLPMFYTINLIIPCLFISFLTVLVFYLPSDCGEKVTLCISVLLSLTVFLLVITETIPSTSLVVPLVGEYLLFTMIFVTLSIVVTVFVLNIHYRTPTTHTMPRWVKTVFLKLLPQVLLMRWPLDKTRGTGSDAVPRGLARRPAKGKLASHGEPRHLKECFHCHKSNELATSKRRLSHQPLQWVVENSEHSPEVEDVINSVQFIAENMKSHNETKEVEDDWKYVAMVVDRVFLWVFIIVCVFGTAGLFLQPLLGNTGKS

SEQ ID NO: 77422 - DNA, 1440 bp, Artificial Sequence
  derived and/or modified sequence
atgctcaccagtaaagggcaaggctttctccatgggggcctgtgcctgtggctttgtgttttcaccccatttttcaaggggtgtgtgggatgtgccactgaggagcggctcttccataagcttttttcacactacaatcagtttataaggcccgtggaaaacgtctctgacccagtgaccgtccattttgaggttgctataacgcaactagctaacgtgatatggaatgattacaagctgaggtgggatcctatggagtatgatgggattgagaccctgagggtgcctgcggacaagatttggaagccggacattgtgctttacaataacgcagtcggggacttccaggtcgaggggaagacaaaggccctgttgaaatacaacggcatgattacctggaccccccccgctatttttaagtctagttgtccaatggacatcactttttttccctttgaccatcagaactgtagtttaaagttcggctcctggacttacgacaaggcggaaatcgacttgctgattatcggcagcaaagtagatatgaacgacttttgggagaactcagagtgggagattatcgatgcctctgggtataaacacgacattaagtacaattgctgcgaggaaatctatacagatattacctacagtttctatattagacgcttacctatgttctatacaattaatttgattatcccatgtttgtttatatcctttctgacagtgctcgtgttttacctgccgagcgattgcggcgagaaggttaccctttgcataagtgtgttgcttagtttaactgtgtttcttctcgtcatcaccgaaactatacccagtacatctctcgtggtccctctggtgggtgagtacctattgtttacaatgatctttgttaccctttcgatcgtcgtgaccgtatttgtgcttaacattcactataggaccccgacgactcacaccatgccacgatgggtgaagaccgtattcctgaagttgcttccacaggtcttactgatgaggtggcctctggacaaaacgcggggtactggctcggatgccgtccccaggggattagcccgcagacccgccaaaggaaaattagcaagccatggtgagcctaggcatctaaaagagtgttttcactgccacaaatctaatgagctagccacatcaaaacgacggctgtcccatcagcctttgcagtgggtggtggagaattccgagcactcccctgaggtcgaagatgtgatcaatagcgtgcagtttatagccgaaaatatgaagagccataacgagaccaaggaagtggaggatgactggaaatacgtggctatggtggtagatcgagtgttcctgtgggttttcattattgtctgtgtgtttgggacagcaggtctgttcctccagcccctgctgggtaataccggtaagtcctag

SEQ ID NO: 77423 - DNA, 1440 bp, Artificial Sequence
  derived and/or modified sequence
atgctgaccagcaagggccagggcttcctgcatggaggcctgtgcctgtggctgtgtgtgttcacccccttcttcaagggctgtgtgggctgtgccacagaggagcggctcttccacaagctgttcagccactacaaccagttcatccggcctgtggagaatgtgtctgaccctgtgacagtgcactttgaggtggccatcacccagctggccaacgtcatctggaatgactacaagctgcgctgggaccccatggagtatgatggcatcgagaccctgcgggtgcctgctgacaagatctggaagccagacatcgtgctgtacaacaatgctgtgggggacttccaggtggagggcaagaccaaggccctgctgaagtacaacggcatgatcacctggaccccaccagccatcttcaagagcagctgccccatggacatcaccttcttcccctttgaccaccagaactgcagcctgaagtttggctcctggacctatgacaaggccgagattgacctgctgatcatcggcagcaaggtggacatgaatgacttctgggagaacagcgagtgggagatcattgatgccagcggctacaagcatgacatcaagtacaactgctgtgaggagatctacacagacatcacctacagcttctacatccggcggctgcccatgttctacaccatcaacctgatcatcccctgcctcttcatctccttcctgactgtgctggtgttctacctgcccagcgactgtggggagaaggtgaccctgtgcatctctgtgctgctgagcctgaccgtcttcctgctggtgatcacagagaccatccccagcaccagcctggtggtgcccctggtgggggagtacctgctcttcaccatgatctttgtgaccctgagcatcgtggtgacagtgtttgtgctgaacatccactaccgcacccccaccacccacaccatgccccgctgggtgaagacagtgttcctgaagctgctgccccaggtgctgctgatgcgctggcccctggacaagacccggggcaccggcagtgatgctgtgccccggggcctggcccggcggcctgccaagggcaagctggccagccatggagagcccaggcacctgaaggagtgcttccactgccacaagagcaatgagctggccaccagcaagaggcggctgagccaccagcccctgcagtgggtggtggagaacagcgagcacagccctgaggtggaggatgtgatcaacagcgtgcagttcatcgccgagaacatgaagagccacaatgagaccaaggaggtggaggatgactggaagtatgtggccatggtggtggacagagtcttcctgtgggtgttcatcatcgtgtgtgtgtttggaacagctggcctcttcctgcagcccctgctgggcaacacaggcaagagctag

SEQ ID NO: 77424 - DNA, 1440 bp, Artificial Sequence
  derived and/or modified sequence
atgctgaccagcaagggccagggcttcctgcacggcggcctgtgcctatggttgtgcgtattcaccccattttttaaaggttgcgtggggtgcgctaccgaggagcggctgttccacaagctgttcagccattataaccaattcatccgacccgttgagaacgtctccgatccggtgaccgttcatttcgaggtggccatcacccaactggctaatgtaatctggaatgactataagctccggtgggatccgatggagtatgacgggatcgagacccttcgcgttccagcagataagatctggaagcctgacattgtactctataataatgctgtcggcgacttccaggtcgagggtaaaacaaaagcccttctgaaatataacgggatgataacatggaccccccctgctatattcaaaagtagctgcccaatggatatcaccttctttccgtttgatcaccaaaattgtagcttaaagttcggctcctggacttacgacaaagcggagattgacttgttaattatcggatcaaaagtggacatgaacgatttttgggagaattcggagtgggagatcattgatgcctcgggatataaacatgatataaagtataattgctgtgaggagatttataccgacattacatattccttctatattagacgtctgccaatgttctacacgattaatctcatcatcccctgtctgtttatttcttttctaactgtgcttgttttctatttaccttcagattgtggcgagaaggtcaccctgtgcatctccgtgttgctgtccctgacagtctttttgttggtcatcacagagaccatacctagcacctccttagtggtgccactggtgggggaatacttgttatttacgatgattttcgtaaccctatccattgtggtgaccgttttcgttttgaatatccattacagaacgcctactactcacaccatgcctagatgggtgaagacagtgtttctgaaattactgccgcaagtgctgctcatgcgatggccactggacaagacccggggcaccggatccgacgccgtgccgagaggactcgcccgcagaccagccaaaggtaagctggcgtcacatggcgaacctagacacctcaaagaatgtttccactgtcacaagtctaatgaactcgccacatccaagaggcgactgtcccaccaaccactgcaatgggtagtcgaaaacagcgaacatagccccgaagtggaggacgtgatcaatagtgttcagtttatcgccgaaaacatgaagtcacataatgagacaaaggaagttgaagacgattggaaatatgtggcgatggttgtagaccgggtgttcctgtgggtattcattatcgtgtgcgtgttcggtaccgccgggctgtttctgcagcctctcctgggtaacacaggcaagagctag

SEQ ID NO: 77425 - DNA, 1440 bp, Artificial Sequence
  derived and/or modified sequence
atgcttacctcaaaaggccagggctttctgcacggcggattatgtctgtggctgtgcgtgttcacacccttctttaagggctgcgtgggatgtgcgacggaggagagattatttcataagctcttttcacactacaatcaatttatcaggccagtggagaatgttagcgatcccgtcaccgttcactttgaagtggccataactcagcttgccaatgtcatatggaacgactacaagctgcgctgggatcctatggagtacgatggcattgagactctgagggtgcccgctgataagatctggaaaccagatatcgtgttgtacaacaacgcagtcggagattttcaggtggaggggaagaccaaggcactgctgaaatataatgggatgatcacgtggacacctcccgcaatattcaaatcatcgtgccccatggacatcacgttctttccctttgatcatcagaactgctctctcaagtttggtagctggacctatgacaaggcagagattgacctcctcatcattggttccaaagtcgacatgaacgacttctgggagaactccgagtgggagattatcgacgcaagtggttacaagcacgacattaaatataactgctgtgaggaaatctatacggacattacatatagcttttacattaggcggttgcccatgttttatacgattaacctgattataccttgcctgttcatctcttttctgactgtgctggtgttctaccttccgtccgactgcggggagaaggtgacattgtgtatctcggttctgctctccctgactgtttttctcctggtgattaccgaaactatcccatccaccagcctcgtcgtaccccttgttggggagtatctcctgtttacaatgatctttgtcacactcagcatcgtggtgacagtgttcgtcctgaatattcactacagaactccaactactcacacaatgccaaggtgggtgaaaacagtttttcttaaactcttgccacaggtgcttctgatgcgatggccactggacaaaaccagggggacggggtcagacgctgttccgagaggcctggccagacgcccagccaagggaaaactggctagtcacggtgagccgagacacctgaaagaatgtttccattgtcataaaagcaatgagcttgctactagcaaacgacgactgtctcaccagcctttgcagtgggtcgtcgagaactcggaacatagtccagaggttgaagacgtgatcaatagcgttcaatttatcgcggaaaacatgaagtcacataatgagaccaaagaggtagaggacgattggaaatatgtagctatggtcgtggaccgtgtgtttttgtgggtgtttattatcgtgtgcgtgttcgggacagccggactgtttctgcagcctctgctcggaaatactggcaagtcctag

SEQ ID NO: 77426 - DNA, 1872 bp, Artificial Sequence
  derived and/or modified sequence
agtctctgatcctggtaataaccgtgtgaagtcccggggatgttttgatttctgagaagacacacacggattgcagtgggcttctgatgatgtcaaggttggatgcatgtggctgactgatagctctttgttttccacaatcctttgcctaggaaaaaggaatccaagtgtgttttaaccatgctgaccagcaaggggcagggattccttcatgggggcttgtgtctctggctgtgtgtgttcacacctttctttaaaggctgtgtgggctgtgcaactgaggagaggctcttccacaaactgttttctcattacaaccagttcatcaggcctgtggaaaacgtttccgaccctgtcacggtacactttgaagtggccatcacccagctggccaacgtgatctggaatgattataaattgcgctgggatccaatggaatatgatggcattgagactcttcgcgttcctgcagataagatttggaagcccgacattgttctctataacaatgctgttggtgacttccaagtagaaggcaaaacaaaagctcttcttaaatacaatggcatgataacctggactccaccagctatttttaagagttcctgccctatggatatcacctttttcccttttgatcatcaaaactgttccctaaaatttggttcctggacgtatgacaaagctgaaattgatcttctaatcattggatcaaaagtggatatgaatgatttttgggaaaacagtgaatgggaaatcattgatgcctctggctacaaacatgacatcaaatacaactgttgtgaagagatatacacagatataacctattctttctacattagaagattgccgatgttttacacgattaatctgatcatcccttgtctctttatttcatttctaaccgtgttggtcttttaccttccttcggactgtggtgaaaaagtgacgctttgtatttcagtcctgctttctctgactgtgtttttgctggtcatcacagaaaccatcccatccacatctctggtggtcccactggtgggtgagtacctgctgttcaccatgatctttgtcacactgtccatcgtggtgactgtgtttgtgttgaacatacactaccgcaccccaaccacgcacacaatgcccaggtgggtgaagacagttttcctgaagctgctgccccaggtcctgctgatgaggtggcctctggacaagacaaggggcacaggctctgatgcagtgcccagaggccttgccaggaggcctgccaaaggcaagcttgcaagccatggggaacccagacatcttaaagaatgcttccattgtcacaaatcaaatgagcttgccacaagcaagagaagattaagtcatcagccattacagtgggtggtggaaaattcggagcactcgcctgaagttgaagatgtgattaacagtgttcagttcatagcagaaaacatgaagagccacaatgaaaccaaggaggtagaagatgactggaaatacgtggccatggtggtggacagagtatttctttgggtatttataattgtctgtgtatttggaactgcagggctatttctacagccactacttgggaacacaggaaaatcttaaaatgtattttcttttatgttcagaaatttacagacaccatatttgttctgcattccctgccacaaggaaaggaaagcaaaggcttcccacccaagtcccccatctgctaaaactgatggctacatggaaaaagaggactttcttgcacattaggaagcagaatatcctccagtgtagcacagggggagaagtgagaagtgttatgacattagtgccctgattgggcagcacccacggctacagtatcaggtc

SEQ ID NO: 77427 - DNA, 1440 bp, Artificial Sequence
  derived and/or modified sequence
atgctgaccagcaagggccagggcttcctgcacggcggcctgtgcctgtggctgtgcgtgttcacccccttcttcaagggctgcgtgggctgcgccaccgaggagagactgttccacaagctgttcagccactacaaccagttcatcagacccgtggagaacgtgagcgaccccgtgaccgtgcacttcgaggtggccatcacccagctggccaacgtgatctggaacgactacaagctgagatgggaccccatggagtacgacggcatcgagaccctgagagtgcccgccgacaagatctggaagcccgacatcgtgctgtacaacaacgccgtgggcgacttccaggtggagggcaagaccaaggccctgctgaagtacaacggcatgatcacctggaccccccccgccatcttcaagagcagctgccccatggacatcaccttcttccccttcgaccaccagaactgcagcctgaagttcggcagctggacctacgacaaggccgagatcgacctgctgatcatcggcagcaaggtggacatgaacgacttctgggagaacagcgagtgggagatcatcgacgccagcggctacaagcacgacatcaagtacaactgctgcgaggagatctacaccgacatcacctacagcttctacatcagaagactgcccatgttctacaccatcaacctgatcatcccctgcctgttcatcagcttcctgaccgtgctggtgttctacctgcccagcgactgcggcgagaaggtgaccctgtgcatcagcgtgctgctgagcctgaccgtgttcctgctggtgatcaccgagaccatccccagcaccagcctggtggtgcccctggtgggcgagtacctgctgttcaccatgatcttcgtgaccctgagcatcgtggtgaccgtgttcgtgctgaacatccactacagaacccccaccacccacaccatgcccagatgggtgaagaccgtgttcctgaagctgctgccccaggtgctgctgatgagatggcccctggacaagaccagaggcaccggcagcgacgccgtgcccagaggcctggccagaagacccgccaagggcaagctggccagccacggcgagcccagacacctgaaggagtgcttccactgccacaagagcaacgagctggccaccagcaagagaagactgagccaccagcccctgcagtgggtggtggagaacagcgagcacagccccgaggtggaggacgtgatcaacagcgtgcagttcatcgccgagaacatgaagagccacaacgagaccaaggaggtggaggacgactggaagtacgtggccatggtggtggacagagtgttcctgtgggtgttcatcatcgtgtgcgtgttcggcaccgccggcctgttcctgcagcccctgctgggcaacaccggcaagagctag

SEQ ID NO: 77428 - protein, 168 aa, Artificial Sequence [sequence omitted]

SEQ ID NO: 77429 - protein, 761 aa, Artificial Sequence
  derived and/or modified sequence
MVILEAPHLLRRKEPETPGLSSRIGPSLCPGFCRKRSVSCCFQNLCNNPMEKIISQCRFFVSMNDLGGDFKGVGKGSLAADKVVEEIRRRGGKAVANYDSVEEGEKVVKTALDAFGRIDVVVNNAGILRDRSFARISDEDWDIIHRVHLRGSFQVTRAAWEHMKKQKYGRIIMTSSASGIYGNFGQANYSAAKLGLLGLANSLAIEGRKSNIHCNTIAPNAGSRMTQTVMPEDLVEALKPEYVAPLVLWLCHESCEENGGLFEVGAGWIGKLRWERTLGAIVRQKNHPMTPEAVKANWKKICDFENASKPQSIQESTGSIIEVLSKIDSEGGVSANHTSRATSTATSGFAGAIGQKLPPFSYAYTELEAIMYALGVGASIKDPKDLKFIYEGSSDFSCLPTFGVIIGQKSMMGGGLAEIPGLSINFAKVLHGEQYLELYKPLPRAGKLKCEAVVADVLDKGSGVVIIMDVYSYSEKELICHNQFSLFLVGSGGFGGKRTSDKVKVAVAIPNRPPDAVLTDTTSLNQAALYRLSGDWNPLHIDPNFASLAGFDKPILHGLCTFGFSARRVLQQFADNDVSRFKAIKARFAKPVYPGQTLQTEMWKEGNRIHFQTKVQETGDIVISNAYVDLAPTSGTSAKTPSEGGKLQSTFVFEEIGRRLKDIGPEVVKKVNAVFEWHITKGGNIGAKWTIDLKSGSGKVYQGPAKGAADTTIILSDEDFMEVVLGKLDPQKAFFSGRLKARGNIMLSQKLQMILKDYAKL

SEQ ID NO: 77430 - DNA, 2286 bp, Artificial Sequence
  derived and/or modified sequence
atggtcatcctcgaagctccccatctcctgcgaaggaaagaaccagagacccccgggctgtcctcgaggatcggcccctctctatgtcccggattttgcaggaagcggtccgtctcctgctgttttcagaacctgtgcaataacccgatggaaaagataattagtcaatgtaggttctttgtgagcatgaacgaccttgggggggattttaagggggttggcaagggtagcctggcggcagacaaggtggtggaagagattcgccgcaggggaggcaaagcagtcgccaattacgactcggtcgaggaaggcgaaaaggtcgtcaaaaccgcattggacgctttcggccggatcgacgtcgtggtgaacaacgctggcatcctccgcgaccgcagtttcgcaagaataagcgacgaggattgggacataattcatagagtgcatttgagaggctcctttcaggtcacccgggccgcgtgggagcacatgaaaaagcagaaatatggtaggatcattatgacctcctctgcttccgggatttatggcaactttgggcaggctaactattctgccgctaagctgggactgctcgggctggctaactctttagccatagaagggaggaagtccaatatccactgcaatactatcgctcctaacgctggcagcaggatgactcagacagtgatgcccgaggatctggttgaggcactcaaaccagagtacgtcgccccccttgtgctgtggttgtgccacgagagctgcgaggaaaatggagggttgttcgaggtaggcgccgggtggatcggtaagctgcgctgggagagaaccctcggggctatcgtaagacagaagaaccatccaatgaccccggaggctgtaaaagccaactggaagaaaatctgtgactttgagaacgcctccaagccacagtccattcaggagagcaccgggagcattatcgaagtcttatccaagattgattccgaggggggagttagtgcaaatcatacttctagagccaccagcacagctacctccggcttcgccggggcaatcgggcagaagttgcctcctttcagctacgcctatacagagctggaggcaatcatgtacgctctgggagtgggcgccagtatcaaggatcctaaggacctcaaattcatctacgaagggtccagtgactttagctgtctgccaacgtttggcgtaataatcggacaaaagagtatgatggggggggggctcgcagaaattcctggcctctctatcaactttgctaaggtcttgcatggggagcaatatcttgaactgtacaagcctctccctcgcgcagggaaactgaaatgcgaggcggttgtggcggatgtgcttgataagggctcgggtgtggtgatcatcatggacgtgtacagttacagcgaaaaggagttgatttgtcataatcagttcagcctgtttcttgttggctccgggggcttcggaggtaagagaacctctgacaaggttaaagtggcagttgccatacctaacaggcccccagatgctgtgctgaccgacacaacttcccttaatcaagctgccctctatcgcctgagcggcgattggaatcccctgcacattgacccaaattttgcctccctggctggatttgataaacctatccttcacggactttgcacgttcggcttttcagcacggagggtgctccaacagtttgccgacaacgacgtcagtcgattcaaagctattaaggctagatttgcaaaacctgtttatcctggccagaccttgcagactgagatgtggaaggaaggtaatcggatccactttcagaccaaagtgcaggagacaggagatattgttatctctaatgcctacgttgacctcgctcctacaagtggtactagtgcgaagacacccagcgaaggggggaagctgcagagtacgttcgtcttcgaggaaattggcagaagactcaaagacattgggccagaggtggtgaagaaggtcaatgctgtgttcgaatggcacattaccaaaggggggaacataggggccaaatggactattgatctcaagtccgggagcgggaaggtgtatcaaggacctgccaagggcgcggcggacacaactattatactgagcgatgaagacttcatggaggtggtattaggaaaattggaccctcagaaggcattcttttcggggcggcttaaagcccgcggtaacatcatgctcagccagaaattacagatgattctgaaggattacgctaaactatag

SEQ ID NO: 77431 - DNA, 2740 bp, Artificial Sequence
  derived and/or modified sequence
ttattcatgggctcaccgctgaggttcgacgggcgggtggtactggtcaccggcgcgggggcaggtgagcatgcgaaggttggaggccgcgccccttgctgaggcgcagctggctgctcttttcgggccggcatacgcgcgcagccgcagctgaggtcaccccgctgaggtggtggggaggggaatggttattcttgaggcaccgcatctcttgaggaggaaagagccggaaacacctggtctctcaagcaggattgggccgagcctatgccctggcttttgcagaaagaggagcgttagttgttgctttcaaaatctatgcaataaccctatggagaagatcatttcacaatgcagattctttgtttcaatgaatgatttgggaggggacttcaaaggagttggtaaaggctccttagctgctgataaggttgttgaagaaataagaaggagaggtggaaaagcagtggccaactatgattcagtggaagaaggagagaaggttgtgaagacagccctggatgcttttggaagaatagatgttgtggtcaacaatgctggaattctgagggatcgttcctttgctaggataagtgatgaagactgggatataatccacagagttcatttgcggggttcattccaagtgacacgggcagcatgggaacacatgaagaaacagaagtatggaaggattattatgacttcatcagcttcaggaatatatggcaactttggccaggccaattatagtgctgcaaagttgggtcttctgggccttgcaaattctcttgcaattgaaggcaggaaaagcaacattcattgtaacaccattgctcctaatgcgggatcacggatgactcagacagttatgcctgaagatcttgtggaagccctgaagccagagtatgtggcacctcttgtcctttggctttgtcacgagagttgtgaggagaatggtggcttgtttgaggttggagcaggatggattggaaaattacgctgggagcggactcttggagctattgtaagacaaaagaatcacccaatgactcctgaggcagtcaaggctaactggaagaagatctgtgactttgagaatgccagcaagcctcagagtatccaagaatcaactggcagtataattgaagttctgagtaaaatagattcagaaggaggagtttcagcaaatcatactagtcgtgcaacgtctacagcaacatcaggatttgctggagctattggccagaaactccctccattttcttatgcttatacggaactggaagctattatgtatgcccttggagtgggagcgtcaatcaaggatccaaaagatttgaaatttatttatgaaggaagttctgatttctcctgtttgcccaccttcggagttatcataggtcagaaatctatgatgggtggaggattagcagaaattcctggactttcaatcaactttgcaaaggttcttcatggagagcagtacttagagttatataaaccacttcccagagcaggaaaattaaaatgtgaagcagttgttgctgatgtcctagataaaggatccggtgtagtgattattatggatgtctattcttattctgagaaggaacttatatgccacaatcagttctctctctttcttgttggctctggaggctttggtggaaaacggacatcagacaaagtcaaggtagctgtagccatacctaatagacctcctgatgctgtacttacagataccacctctcttaatcaggctgctttgtaccgcctcagtggagactggaatcccttacacattgatcctaactttgctagtctagcaggttttgacaagcccatattacatggattatgtacatttggattttctgccaggcgtgtgttacagcagtttgcagataatgatgtgtcaagattcaaggcaattaaggctcgttttgcaaaaccagtatatccaggacaaactctacaaactgagatgtggaaggaaggaaacagaattcattttcaaaccaaggtccaagaaactggagacattgtcatttcaaatgcatatgtggatcttgcaccaacatctggtacttcagctaagacaccctctgagggcgggaagcttcagagtacctttgtatttgaggaaataggacgccgcctaaaggatattgggcctgaggtggtgaagaaagtaaatgctgtatttgagtggcatataaccaaaggcggaaatattggggctaagtggactattgacctgaaaagtggttctggaaaagtgtaccaaggccctgcaaaaggtgctgctgatacaacaatcatactttcagatgaagatttcatggaggtggtcctgggcaagcttgaccctcagaaggcattctttagtggcaggctgaaggccagagggaacatcatgctgagccagaaacttcagatgattcttaaagactacgccaagctctgaagggcacactacactattaataaaaatggaatcattaaatactctcttcacccaaatatgcttgattattctgcaaaagtgattagaactaagatgcaggggaaattgcttaacattttcagatatcagataactgcagattttcattttctactaatttttcatgtatcattatttttacaaggaactatatataagctagcacataattatccttctgttcttagatctgtatcttcataataaaaaattttgcccaagtcctgtttc

SEQ ID NO: 77432 - DNA, 2589 bp, Artificial Sequence
  derived and/or modified sequence
tctgcttgttcgtgtgtgtgtcgttgcaggccttattcatgggctcaccgctgaggttcgacgggcgggtggtactggtcaccggcgcgggggcaggattgggccgagcctatgccctggcttttgcagaaagaggagcgttagttgttgctttcaaaatctatgcaataaccctatggagaagatcatttcacaatgcagattctttgtttcaatgaatgatttgggaggggacttcaaaggagttggtaaaggctccttagctgctgataaggttgttgaagaaataagaaggagaggtggaaaagcagtggccaactatgattcagtggaagaaggagagaaggttgtgaagacagccctggatgcttttggaagaatagatgttgtggtcaacaatgctggaattctgagggatcgttcctttgctaggataagtgatgaagactgggatataatccacagagttcatttgcggggttcattccaagtgacacgggcagcatgggaacacatgaagaaacagaagtatggaaggattattatgacttcatcagcttcaggaatatatggcaactttggccaggccaattatagtgctgcaaagttgggtcttctgggccttgcaaattctcttgcaattgaaggcaggaaaagcaacattcattgtaacaccattgctcctaatgcgggatcacggatgactcagacagttatgcctgaagatcttgtggaagccctgaagccagagtatgtggcacctcttgtcctttggctttgtcacgagagttgtgaggagaatggtggcttgtttgaggttggagcaggatggattggaaaattacgctgggagcggactcttggagctattgtaagacaaaagaatcacccaatgactcctgaggcagtcaaggctaactggaagaagatctgtgactttgagaatgccagcaagcctcagagtatccaagaatcaactggcagtataattgaagttctgagtaaaatagattcagaaggaggagtttcagcaaatcatactagtcgtgcaacgtctacagcaacatcaggatttgctggagctattggccagaaactccctccattttcttatgcttatacggaactggaagctattatgtatgcccttggagtgggagcgtcaatcaaggatccaaaagatttgaaatttatttatgaaggaagttctgatttctcctgtttgcccaccttcggagttatcataggtcagaaatctatgatgggtggaggattagcagaaattcctggactttcaatcaactttgcaaaggttcttcatggagagcagtacttagagttatataaaccacttcccagagcaggaaaattaaaatgtgaagcagttgttgctgatgtcctagataaaggatccggtgtagtgattattatggatgtctattcttattctgagaaggaacttatatgccacaatcagttctctctctttcttgttggctctggaggctttggtggaaaacggacatcagacaaagtcaaggtagctgtagccatacctaatagacctcctgatgctgtacttacagataccacctctcttaatcaggctgctttgtaccgcctcagtggagactggaatcccttacacattgatcctaactttgctagtctagcaggttttgacaagcccatattacatggattatgtacatttggattttctgccaggcgtgtgttacagcagtttgcagataatgatgtgtcaagattcaaggcaattaaggctcgttttgcaaaaccagtatatccaggacaaactctacaaactgagatgtggaaggaaggaaacagaattcattttcaaaccaaggtccaagaaactggagacattgtcatttcaaatgcatatgtggatcttgcaccaacatctggtacttcagctaagacaccctctgagggcgggaagcttcagagtacctttgtatttgaggaaataggacgccgcctaaaggatattgggcctgaggtggtgaagaaagtaaatgctgtatttgagtggcatataaccaaaggcggaaatattggggctaagtggactattgacctgaaaagtggttctggaaaagtgtaccaaggccctgcaaaaggtgctgctgatacaacaatcatactttcagatgaagatttcatggaggtggtcctgggcaagcttgaccctcagaaggcattctttagtggcaggctgaaggccagagggaacatcatgctgagccagaaacttcagatgattcttaaagactacgccaagctctgaagggcacactacactattaataaaaatggaatcattaaatactctcttcacccaaatatgcttgattattctgcaaaagtgattagaactaagatgcaggggaaattgcttaacattttcagatatcagataactgcagattttcattttctactaatttttcatgtatcattatttttacaaggaactatatataagctagcacataattatccttctgttcttagatctgtatcttcataataaaaaattttgcccaagtcctgtttccttag

SEQ ID NO: 77433 - DNA, 2286 bp, Artificial Sequence
  derived and/or modified sequence
atggtgatcctggaggccccccacctgctgcggaggaaggagcctgagaccccaggcctgagcagccgcatcggccccagcctgtgccccggcttctgcaggaagaggtctgtgtcctgctgcttccagaacctgtgcaacaaccccatggagaagatcatcagccagtgccgcttctttgtgtccatgaatgacctgggcggggacttcaagggcgtgggcaagggcagcctggccgctgacaaggtggtggaggagatcagaagaagaggaggcaaggctgtggccaactatgacagcgtggaggagggggagaaggtggtgaagacagccctggatgccttcggcagaattgatgtggtggtgaacaatgccggcatcctgcgggacaggagctttgcccgcatcagtgatgaggactgggacatcatccaccgggtgcacctgcggggcagcttccaggtgacccgggccgcctgggagcacatgaagaagcagaagtatggccgcatcatcatgaccagcagcgccagcggcatctacggcaactttggccaggccaactacagcgctgccaagctgggcctgctgggcctggccaacagcctggccatcgagggcaggaagagcaacatccactgcaacaccatcgccccaaatgccggcagcaggatgacccagacagtgatgcctgaggacctggtggaggccctgaagccagaatatgtggcccccctggtgctgtggctgtgccacgagagctgtgaagaaaatggaggcctgtttgaggtgggcgccggctggattggcaagctgcgctgggagaggaccctgggcgccatcgtgcggcagaagaaccaccccatgaccccagaggccgtgaaggccaactggaagaagatctgtgactttgaaaatgccagcaagccccagagcatccaggagagcacaggcagcatcatcgaggtgctgagcaagattgattctgagggcggcgtgtctgccaaccacaccagccgggccaccagcacagccaccagcggctttgctggggccatcggccagaagctgccccccttctcctatgcctacacagagctggaggccatcatgtatgccctgggcgtgggcgccagcatcaaggaccccaaggacctgaagttcatctatgagggcagcagtgacttcagctgcctgcccaccttcggggtcatcatcggccagaagtccatgatgggcggcggcctggccgagatccctggcctgagcatcaactttgccaaggtgctgcatggagagcagtacctggagctgtacaagcccctgcccagggctgggaagctgaagtgtgaggccgtggtggctgatgtgctggacaagggcagcggcgtggtgatcatcatggatgtgtacagctacagcgagaaggagctgatctgccacaaccagttcagcctcttcctggtgggcagcggcggctttggaggcaagaggaccagtgacaaggtgaaggtggccgtggccatccccaacagacctccagatgctgtgctgacagacaccaccagcctgaaccaggccgccctgtaccgcctgagcggggactggaaccccctgcacatcgaccccaactttgccagcctggccggctttgacaagcccatcctgcacggcctgtgcaccttcggcttcagcgccaggagagtgctgcagcagtttgctgacaatgatgtgagccgcttcaaggccatcaaggccaggtttgccaagcctgtgtacccaggccagaccctgcagacagagatgtggaaggagggcaaccgcatccacttccagaccaaggtgcaggagaccggggacatcgtcatcagcaatgcctacgtggacctggcccccaccagcggcaccagcgccaagacccccagcgagggcggcaagctgcagagcacctttgtgtttgaggagatcggccggcggctgaaggacatcggccctgaggtggtgaagaaggtgaatgctgtgtttgagtggcacatcaccaagggcggcaacattggagccaagtggaccatcgacctgaagagcggcagcggcaaggtgtaccagggccctgccaagggagctgctgacaccaccatcatcctgagtgatgaggacttcatggaggtggtgctgggcaagctggacccccagaaggccttcttcagcggccgcctgaaggcccggggcaacatcatgctgagccagaagctgcagatgatcctgaaggactatgccaagctgtag

SEQ ID NO: 77434 - DNA, 2286 bp, Artificial Sequence
  derived and/or modified sequence
atggtgatcctggaggccccccacctgctgcggcggaaggagcccgaaactcctggtttaagctcccgtatcggtccatcactctgccctggcttttgtcgcaagcgatccgtgtcctgttgtttccagaatctgtgcaacaaccctatggagaaaattatatcccaatgtaggtttttcgtttcaatgaatgatctcggtggcgattttaaaggcgtcggaaaaggctccctggccgctgataaggtagtagaggaaatacggagacgcggtggtaaagctgttgccaattacgatagtgtggaggagggtgagaaagtggttaaaactgcccttgatgcctttgggcgcattgatgtggttgttaacaatgctggaatcctgcgggatagatcatttgctagaatttccgatgaggactgggatatcattcatcgagtccatctaaggggcagtttccaggtgaccagggccgcctgggagcacatgaagaaacagaagtatggccgaataattatgaccagtagcgctagcggaatctacggaaactttgggcaagcaaactactctgcagctaagctaggtctacttgggctggccaattccctggccatcgagggtaggaagagcaacattcattgtaacacgatcgcccctaacgccgggtctaggatgacccagacagtcatgccagaggatctggtggaggccctcaagcccgagtacgtagctcctctggtgctctggctctgtcacgagagttgcgaagaaaacggcgggttattcgaggtgggcgcagggtggataggcaaacttcgctgggaacgtaccttaggtgccatcgtgcggcagaagaaccaccctatgacacccgaggctgttaaagccaactggaagaagatctgcgacttcgaaaacgcaagcaagccccaatccatccaggaatctacaggcagcattatcgaggtactgtcaaagatagacagcgagggcggagtctcagctaaccacacctcccgggctacatccaccgcaaccagtgggtttgctggcgccataggtcagaaattaccccctttctcttacgcttacacagagttagaagccatcatgtacgctctgggcgttggcgccagcatcaaagacccaaaggatctcaagtttatctacgaagggtcaagcgacttctcatgcttacctacctttggcgtgatcatcggacagaaatctatgatgggaggcggactagccgaaatcccagggctcagcatcaatttcgccaaagtcttgcacggtgagcaatacctggagttgtacaagcccctgcccagagctgggaagctcaagtgtgaggcagtggttgccgacgtgcttgacaagggtagcggcgtcgttataataatggacgtgtattcctatagcgagaaagagctgatatgtcacaaccaatttagcctcttccttgtgggaagcggtggctttggaggaaaaagaactagtgataaagtgaaggtggctgtggccatccctaacaggcccccagacgccgtcctgacggatacgacttcgctcaaccaggcagccctataccgtttgagtggggattggaacccgctgcatatcgaccctaacttcgcctctctggccgggttcgacaagccaattctgcatgggctgtgcacctttggattctcggcccggagagtgctccaacaattcgccgacaacgacgtttcacgattcaaagccattaaggcacgttttgcgaagcccgtgtatccggggcagaccctgcagactgaaatgtggaaggaaggcaatcgaatccacttccagacgaaggtgcaggagacaggtgatatcgtgatctccaatgcatacgttgatttagcacctaccagtggcacaagtgctaagaccccgagcgagggaggcaaactccagtcaacattcgtgttcgaagagatcggtcggaggttgaaagatattggccctgaagtggtgaaaaaggtcaatgccgtatttgagtggcacatcacgaagggcggcaatataggagccaaatggacgattgatctgaagagtgggagcggaaaggtctatcagggcccggctaagggggctgccgacactacaattatcctgtccgacgaggactttatggaagttgtactgggaaagctggacccgcagaaagcctttttttctggacgactcaaggctagggggaatatcatgctgtcgcagaagcttcagatgattctgaaggactacgccaaattgtag

SEQ ID NO: 77435 - DNA, 2286 bp, Artificial Sequence
  derived and/or modified sequence
atggtgattttagaagcgcctcacctccttcgcagaaaagagccagaaacaccaggcctgtcaagtcgaatcggtccaagcctgtgccctgggttttgccgcaagcggagcgtgtcctgctgttttcagaacctctgtaacaatccaatggaaaagattatcagccaatgtcggttttttgtgtccatgaacgacctggggggtgattttaagggagtggggaagggctcccttgcagcggataaggtcgtggaggagatcaggcgtcggggaggaaaagcagttgcaaattacgacagtgttgaggagggcgaaaaagtggtcaaaacagctctcgatgcctttggccgaattgacgtggtggtaaacaatgctggaatcctgagagatcgaagtttcgccagaatcagcgatgaagattgggatatcatccaccgggtgcatctgagagggtcttttcaggtgaccagagccgcttgggaacacatgaagaaacaaaaatatggaaggataattatgaccagctccgcttccggcatttatggcaatttcgggcaggcaaactacagcgcagccaaactgggattgctgggcctagctaactccttggcgatcgaaggcaggaagagcaacatccattgcaacacaatcgcccctaatgctggctcaaggatgacacagactgtgatgccagaagatttagtggaggccctgaagccggaatacgtggctcccctcgtcctctggctgtgccatgagtcctgcgaagagaatggaggactcttcgaggtgggagcaggctggattgggaagctccgctgggagcgaaccctgggggcaatagttcggcagaagaaccaccctatgacacccgaggcagtcaaggcaaactggaaaaaaatttgcgactttgagaatgcttccaaaccccagtccatacaggagagtaccggaagtattatagaagtcctatccaagatagattccgaaggaggcgtgtccgccaatcacacctctcgagccacatctaccgcgacttccggattcgctggtgccatcggccagaaacttcctccattctcatacgcatataccgaactggaggccatcatgtatgcacttggggtgggcgcatcaatcaaagaccctaaagacttgaagtttatctatgaggggagttcagacttctcctgcttacccacatttggggtgattatagggcagaaatctatgatggggggaggcctggcggagatcccgggactctcgatcaattttgccaaggtcctgcatggagagcagtatctggagctctataagccactgccccgtgcaggtaaattgaagtgcgaggctgtcgtcgctgacgtactcgacaagggctcgggggttgtgatcatcatggatgtctattcctatagtgaaaaggagctgatttgtcacaatcaattcagcctatttctggttggatccggcggattcggaggcaagcggacatcggacaaagtaaaagtggcggtagcgatccccaataggcccccagacgcagtgctcacagacaccacgagtctgaaccaagctgcattatatcgcctctcgggggattggaatccactccacatagacccaaacttcgcctcattggctgggttcgacaagcccattttgcatggactgtgcacattcggcttctctgcaagacgggtgctccagcagttcgctgacaacgatgtgtctagattcaaagcaattaaggcccgttttgctaagcctgtataccccggacagactctgcagaccgaaatgtggaaagagggtaatcgcattcacttccaaacaaaagttcaagagactggagatatcgtaattagcaatgcatacgtagaccttgctccaactagtggcacaagtgcgaaaactccatccgaggggggaaaactccagagtaccttcgtgttcgaggagatcggcaggagactgaaggatataggccctgaggtggttaaaaaagtgaatgctgttttcgagtggcatatcacaaaaggcggaaacatcggcgctaagtggactatcgaccttaaatctgggtcaggaaaggtttatcaggggcctgccaagggcgctgccgacaccacaattatcctgtccgatgaggacttcatggaggtcgtcctggggaagctggacccacagaaggccttcttcagcggaaggctgaaggcccgaggcaatattatgcttagtcagaagctgcagatgatcctgaaggattatgcaaagttatag

SEQ ID NO: 77436 - DNA, 2286 bp, Artificial Sequence
  derived and/or modified sequence
atggtgatcctggaggccccccacctgctgagaagaaaggagcccgagacccccggcctgagcagcagaatcggccccagcctgtgccccggcttctgcagaaagagaagcgtgagctgctgcttccagaacctgtgcaacaaccccatggagaagatcatcagccagtgcagattcttcgtgagcatgaacgacctgggcggcgacttcaagggcgtgggcaagggcagcctggccgccgacaaggtggtggaggagatcagaagaagaggcggcaaggccgtggccaactacgacagcgtggaggagggcgagaaggtggtgaagaccgccctggacgccttcggcagaatcgacgtggtggtgaacaacgccggcatcctgagagacagaagcttcgccagaatcagcgacgaggactgggacatcatccacagagtgcacctgagaggcagcttccaggtgaccagagccgcctgggagcacatgaagaagcagaagtacggcagaatcatcatgaccagcagcgccagcggcatctacggcaacttcggccaggccaactacagcgccgccaagctgggcctgctgggcctggccaacagcctggccatcgagggcagaaagagcaacatccactgcaacaccatcgcccccaacgccggcagcagaatgacccagaccgtgatgcccgaggacctggtggaggccctgaagcccgagtacgtggcccccctggtgctgtggctgtgccacgagagctgcgaggagaacggcggcctgttcgaggtgggcgccggctggatcggcaagctgagatgggagagaaccctgggcgccatcgtgagacagaagaaccaccccatgacccccgaggccgtgaaggccaactggaagaagatctgcgacttcgagaacgccagcaagccccagagcatccaggagagcaccggcagcatcatcgaggtgctgagcaagatcgacagcgagggcggcgtgagcgccaaccacaccagcagagccaccagcaccgccaccagcggcttcgccggcgccatcggccagaagctgccccccttcagctacgcctacaccgagctggaggccatcatgtacgccctgggcgtgggcgccagcatcaaggaccccaaggacctgaagttcatctacgagggcagcagcgacttcagctgcctgcccaccttcggcgtgatcatcggccagaagagcatgatgggcggcggcctggccgagatccccggcctgagcatcaacttcgccaaggtgctgcacggcgagcagtacctggagctgtacaagcccctgcccagagccggcaagctgaagtgcgaggccgtggtggccgacgtgctggacaagggcagcggcgtggtgatcatcatggacgtgtacagctacagcgagaaggagctgatctgccacaaccagttcagcctgttcctggtgggcagcggcggcttcggcggcaagagaaccagcgacaaggtgaaggtggccgtggccatccccaacagaccccccgacgccgtgctgaccgacaccaccagcctgaaccaggccgccctgtacagactgagcggcgactggaaccccctgcacatcgaccccaacttcgccagcctggccggcttcgacaagcccatcctgcacggcctgtgcaccttcggcttcagcgccagaagagtgctgcagcagttcgccgacaacgacgtgagcagattcaaggccatcaaggccagattcgccaagcccgtgtaccccggccagaccctgcagaccgagatgtggaaggagggcaacagaatccacttccagaccaaggtgcaggagaccggcgacatcgtgatcagcaacgcctacgtggacctggcccccaccagcggcaccagcgccaagacccccagcgagggcggcaagctgcagagcaccttcgtgttcgaggagatcggcagaagactgaaggacatcggccccgaggtggtgaagaaggtgaacgccgtgttcgagtggcacatcaccaagggcggcaacatcggcgccaagtggaccatcgacctgaagagcggcagcggcaaggtgtaccagggccccgccaagggcgccgccgacaccaccatcatcctgagcgacgaggacttcatggaggtggtgctgggcaagctggacccccagaaggccttcttcagcggcagactgaaggccagaggcaacatcatgctgagccagaagctgcagatgatcctgaaggactacgccaagctgtag

SEQ ID NO: 77437 - protein, 718 aa, Artificial Sequence
  derived and/or modified sequence
MGSPLRFDGRVVLVTGAGAVNDLGGDFKGVGKGSLAADKVVEEIRRRGGKAVANYDSVEEGEKVVKTALDAFGRIDVVVNNAGILRDRSFARISDEDWDIIHRVHLRGSFQVTRAAWEHMKKQKYGRIIMTSSASGIYGNFGQANYSAAKLGLLGLANSLAIEGRKSNIHCNTIAPNAGSRMTQTVMPEDLVEALKPEYVAPLVLWLCHESCEENGGLFEVGAGWIGKLRWERTLGAIVRQKNHPMTPEAVKANWKKICDFENASKPQSIQESTGSIIEVLSKIDSEGGVSANHTSRATSTATSGFAGAIGQKLPPFSYAYTELEAIMYALGVGASIKDPKDLKFIYEGSSDFSCLPTFGVIIGQKSMMGGGLAEIPGLSINFAKVLHGEQYLELYKPLPRAGKLKCEAVVADVLDKGSGVVIIMDVYSYSEKELICHNQFSLFLVGSGGFGGKRTSDKVKVAVAIPNRPPDAVLTDTTSLNQAALYRLSGDWNPLHIDPNFASLAGFDKPILHGLCTFGFSARRVLQQFADNDVSRFKAIKARFAKPVYPGQTLQTEMWKEGNRIHFQTKVQETGDIVISNAYVDLAPTSGTSAKTPSEGGKLQSTFVFEEIGRRLKDIGPEVVKKVNAVFEWHITKGGNIGAKWTIDLKSGSGKVYQGPAKGAADTTIILSDEDFMEVVLGKLDPQKAFFSGRLKARGNIMLSQKLQMILKDYAKL

SEQ ID NO: 77438 - DNA, 2157 bp, Artificial Sequence
  derived and/or modified sequence
atgggttccccactccggttcgatggcagggtcgtcctcgtcaccggcgccggtgcggttaacgatctggggggcgatttcaaaggcgtgggaaaggggagcttagctgctgataaggtggttgaggagatacgccggcgcggcggcaaggctgttgccaactatgacagcgtggaggagggagaaaaagtcgtcaagaccgcactcgacgcctttggcaggatcgatgttgttgtgaataacgccgggatcttgcgggatcggtctttcgcccggatctcagacgaggattgggatatcatccaccgagtgcatctgagagggtctttccaggtgacccgtgcagcctgggagcacatgaagaagcagaaatatggacgaattattatgacatcatccgccagcggaatatatgggaactttgggcaggccaattatagtgcggcgaagctggggttgctaggtcttgcaaatagtctggccattgaggggcggaagtccaatattcactgcaacaccatcgcccctaacgctggctcccgtatgacccagacagttatgccggaggacctggttgaagcactcaagccggagtacgtggcccctctggtgctctggctgtgtcatgagtcttgcgaggagaacgggggtctgtttgaagtaggcgcgggatggatcggcaagcttcgatgggagcggacgttgggagccatcgtgcgccagaaaaaccatccaatgacccctgaggctgttaaagccaattggaagaaaatctgtgattttgagaatgcatctaaaccacagagcattcaagaaagcactgggagcatcatagaggtgctgtcgaaaatcgatagcgagggcggtgtaagtgctaatcacacaagtcgtgccacttccaccgccacaagcggatttgctggggccattgggcaaaagcttcctccattttcttacgcttataccgagcttgaggctattatgtacgccctgggagtgggcgcgagcataaaagacccaaaagatctgaagttcatttatgaagggtcgtcagacttcagctgcctgcccacatttggtgtcataatcggtcaaaagagtatgatgggtggcgggctagctgagataccaggcctgtctataaactttgcgaaagtgcttcatggggagcaatatctggagctgtacaagcccctgccacgggcaggtaagcttaaatgcgaggctgtggtagcagatgtgcttgacaagggttccggcgtagtcattatcatggatgtatatagttacagtgagaaagaactcatttgtcacaaccagttttcactgtttctcgttggttccggcggctttggaggtaagaggaccagcgataaggtaaaggtcgcggtggctatcccaaatcgccctccagacgctgtcctgacagacaccacctccttgaaccaagctgccttgtatcggttgtcaggagactggaacccccttcacatagacccaaacttcgcatctttggcaggttttgacaagccaatcctgcatgggttatgtacatttggctttagtgcgagacgcgtcctgcagcagtttgccgacaacgacgtgtcaaggttcaaagccataaaagctcgatttgcaaaaccagtgtaccccgggcagaccctgcagacggagatgtggaaggagggaaaccgcatccacttccaaaccaaggtccaggaaaccggcgacattgtaatctccaacgcgtatgtggatctggctccgacctcgggtacttccgctaagaccccctctgagggaggaaagttgcagtccactttcgttttcgaggaaatcggcaggcgcctaaaggacattggccccgaagttgtaaaaaaggttaacgctgtctttgagtggcacattactaaggggggcaacattggtgccaagtggaccatcgaccttaaatctggttcagggaaggtctaccagggccctgccaaaggcgcagcagacacgaccatcatcctaagcgacgaagactttatggaggttgtacttgggaaactggacccccagaaggctttcttttctgggcgcctcaaagcccgcgggaacatcatgctatcacagaagcttcagatgatactgaaggactatgctaagctttag

SEQ ID NO: 77439 - DNA, 2494 bp, Artificial Sequence
  derived and/or modified sequence
attccccgcctcctcctgtcccgcagtcggcgtccagcggctctgcttgttcgtgtgtgtgtcgttgcaggccttattcatgggctcaccgctgaggttcgacgggcgggtggtactggtcaccggcgcgggggcagtgaatgatttgggaggggacttcaaaggagttggtaaaggctccttagctgctgataaggttgttgaagaaataagaaggagaggtggaaaagcagtggccaactatgattcagtggaagaaggagagaaggttgtgaagacagccctggatgcttttggaagaatagatgttgtggtcaacaatgctggaattctgagggatcgttcctttgctaggataagtgatgaagactgggatataatccacagagttcatttgcggggttcattccaagtgacacgggcagcatgggaacacatgaagaaacagaagtatggaaggattattatgacttcatcagcttcaggaatatatggcaactttggccaggccaattatagtgctgcaaagttgggtcttctgggccttgcaaattctcttgcaattgaaggcaggaaaagcaacattcattgtaacaccattgctcctaatgcgggatcacggatgactcagacagttatgcctgaagatcttgtggaagccctgaagccagagtatgtggcacctcttgtcctttggctttgtcacgagagttgtgaggagaatggtggcttgtttgaggttggagcaggatggattggaaaattacgctgggagcggactcttggagctattgtaagacaaaagaatcacccaatgactcctgaggcagtcaaggctaactggaagaagatctgtgactttgagaatgccagcaagcctcagagtatccaagaatcaactggcagtataattgaagttctgagtaaaatagattcagaaggaggagtttcagcaaatcatactagtcgtgcaacgtctacagcaacatcaggatttgctggagctattggccagaaactccctccattttcttatgcttatacggaactggaagctattatgtatgcccttggagtgggagcgtcaatcaaggatccaaaagatttgaaatttatttatgaaggaagttctgatttctcctgtttgcccaccttcggagttatcataggtcagaaatctatgatgggtggaggattagcagaaattcctggactttcaatcaactttgcaaaggttcttcatggagagcagtacttagagttatataaaccacttcccagagcaggaaaattaaaatgtgaagcagttgttgctgatgtcctagataaaggatccggtgtagtgattattatggatgtctattcttattctgagaaggaacttatatgccacaatcagttctctctctttcttgttggctctggaggctttggtggaaaacggacatcagacaaagtcaaggtagctgtagccatacctaatagacctcctgatgctgtacttacagataccacctctcttaatcaggctgctttgtaccgcctcagtggagactggaatcccttacacattgatcctaactttgctagtctagcaggttttgacaagcccatattacatggattatgtacatttggattttctgccaggcgtgtgttacagcagtttgcagataatgatgtgtcaagattcaaggcaattaaggctcgttttgcaaaaccagtatatccaggacaaactctacaaactgagatgtggaaggaaggaaacagaattcattttcaaaccaaggtccaagaaactggagacattgtcatttcaaatgcatatgtggatcttgcaccaacatctggtacttcagctaagacaccctctgagggcgggaagcttcagagtacctttgtatttgaggaaataggacgccgcctaaaggatattgggcctgaggtggtgaagaaagtaaatgctgtatttgagtggcatataaccaaaggcggaaatattggggctaagtggactattgacctgaaaagtggttctggaaaagtgtaccaaggccctgcaaaaggtgctgctgatacaacaatcatactttcagatgaagatttcatggaggtggtcctgggcaagcttgaccctcagaaggcattctttagtggcaggctgaaggccagagggaacatcatgctgagccagaaacttcagatgattcttaaagactacgccaagctctgaagggcacactacactattaataaaaatggaatcattaaatactctcttcacccaaatatgcttgattattctgcaaaagtgattagaactaagatgcaggggaaattgcttaacattttcagatatcagataactgcagattttcattttctactaatttttcatgtatcattatttttacaaggaactatatataagctagcacataattatccttctgttcttagatctgtatcttcataataaaaaattttgccc

SEQ ID NO: 77440 - DNA, 2157 bp, Artificial Sequence
  derived and/or modified sequence
atgggcagccccctgcgctttgatggccgggtggtgctggtgactggagctggagctgtgaatgacctgggcggggacttcaagggcgtgggcaagggcagcctggccgctgacaaggtggtggaggagatcagaagaagaggaggcaaggctgtggccaactatgattctgtggaggagggggagaaggtggtgaagacagccctggatgccttcggcagaattgatgtggtggtgaacaatgccggcatcctgcgggacaggagctttgcccgcatcagtgatgaggactgggacatcatccaccgggtgcacctgcggggcagcttccaggtgaccagggctgcctgggagcacatgaagaagcagaagtatggccgcatcatcatgaccagcagcgccagcggcatctacggcaactttggccaggccaactacagcgctgccaagctgggcctgctgggcctggccaacagcctggccatcgagggcaggaagagcaacatccactgcaacaccatcgccccaaatgccggcagcaggatgacccagacagtgatgcctgaggacctggtggaggccctgaagccagaatatgtggcccccctggtgctgtggctgtgccacgagagctgtgaggagaatggaggcctgtttgaggtgggcgccggctggattggcaagctgcgctgggagaggaccctgggcgccatcgtgcggcagaagaaccaccccatgaccccagaggccgtgaaggccaactggaagaagatctgtgactttgaaaatgccagcaagccccagagcatccaggagagcacaggcagcatcatcgaggtgctgagcaagattgacagcgagggcggcgtgtctgccaaccacaccagccgggccaccagcacagccaccagcggctttgctggggccatcggccagaagctgccccccttctcctatgcctacacagagctggaggccatcatgtatgccctgggcgtgggcgccagcatcaaggaccccaaggacctgaagttcatctatgagggcagcagtgacttcagctgcctgcccacctttggagtcatcatcggccagaagtccatgatgggcggcggcctggccgagatccctggcctgagcatcaactttgccaaggtgctgcacggggagcagtacctggagctgtacaagcccctgccccgggccggcaagctgaagtgtgaggccgtggtggctgatgtgctggacaagggcagcggcgtggtgatcatcatggatgtgtacagctacagcgagaaggagctgatctgccacaaccagttcagcctcttcctggtgggcagcggcggctttggaggcaagaggaccagtgacaaggtgaaggtggccgtggccatccccaaccggcccccagatgctgtgctgacagacaccaccagcctgaaccaggccgccctgtaccgcctgagcggggactggaaccccctgcacatcgaccccaactttgccagcctggccggctttgacaagcccatcctgcacggcctgtgcaccttcggcttcagcgcccggcgggtgctgcagcagtttgctgacaatgatgtgagccgcttcaaggccatcaaggccaggtttgccaagcctgtgtacccaggccagaccctgcagacagagatgtggaaggagggcaaccgcatccacttccagaccaaggtgcaggagactggagacatcgtcatcagcaatgcctacgtggacctggcccccaccagcggcaccagcgccaagaccccatctgagggcggcaagctgcagagcacctttgtgtttgaggagattggaagaaggctgaaggacatcggccctgaggtggtgaagaaggtgaatgctgtgtttgagtggcacatcaccaagggcggcaacatcggggccaagtggaccatcgacctgaagagcggcagcggcaaggtgtaccagggccctgccaagggagctgctgacaccaccatcatcctgagtgatgaggacttcatggaggtggtgctgggcaagctggacccccagaaggccttcttcagcggccgcctgaaggcccggggcaacatcatgctgagccagaagctgcagatgatcctgaaggactatgccaagctgtag

SEQ ID NO: 77441 - DNA, 2157 bp, Artificial Sequence
  derived and/or modified sequence
atgggcagccccctgcggttcgacggccgggtggtgctggtgaccggtgcaggcgccgtgaacgacctgggaggtgattttaagggggttggcaaaggttccctggccgccgataaggtggtcgaagaaatcagaaggcggggcggaaaagctgttgcaaattatgacagtgtagaggaaggggagaaggttgtgaaaaccgctctcgatgctttcggcaggattgacgtggttgtcaataatgccggtattctacgcgatagatcttttgccaggattagtgacgaagattgggatatcattcatcgcgtacaccttcgcgggtcattccaggtgacccgggccgcgtgggaacacatgaaaaaacagaagtatggaagaataattatgacctcctcagccagtggcatctacgggaattttgggcaagcaaattactccgccgccaaacttggcttactgggtctagccaatagcctagccatcgaaggtaggaagtctaatatacactgcaataccatcgccccaaatgccggatccaggatgacacagactgtaatgcctgaagatctggtcgaagccctgaagcctgaatacgttgcaccactggtgttatggctgtgccacgagagttgcgaagagaacggtggtcttttcgaggtgggcgctggctggattggcaagttgaggtgggagagaactcttggcgctattgttcgacagaaaaatcaccctatgactcccgaggccgtcaaggcaaattggaagaaaatctgtgatttcgagaatgcaagcaagccacaaagcattcaggaatctaccggcagtatcattgaggttctatctaagatcgattcagaaggaggggtgtccgcaaatcatacttcacgtgccaccagcactgctactagcgggtttgcaggagctatcggccagaaattgccgccttttagctatgcgtataccgaacttgaggccatcatgtacgccctcggagtcggagcttctattaaggatccaaaggatcttaagttcatatacgaaggtagctccgacttctcttgtctccccacctttggcgtcatcatcggacagaaaagtatgatgggtggcggattagctgagatccccggactctccattaatttcgccaaggtcttgcacggagaacagtacctggaactgtataagcccttaccccgggcaggcaaacttaaatgcgaggccgtcgtggccgacgtgctggacaaagggtccggagtggtgattattatggacgtgtactcctatagtgagaaggaactaatatgtcataatcagttctccctctttctagtgggcagtggtggattcggcggcaaaagaacatctgataaagtgaaagtagctgtggctattcctaacagacctcctgatgccgtcctgacagatacaacctccctgaatcaggccgcgctgtaccgcctatccggggattggaatcctcttcacatcgatccgaattttgcatcactcgcgggctttgacaagcccattttgcacggactgtgcacctttgggttcagcgcccgcagggtgctccagcagtttgcagacaacgatgtcagccgcttcaaggccattaaggcccgctttgcaaagcccgtgtatccaggtcagaccctccagaccgagatgtggaaggagggcaaccgcattcacttccagacgaaggtgcaggaaacaggagatattgtcatttctaatgcttacgtcgatctggcccccactagtgggacgtcagccaaaactccctcggaggggggaaagttgcagtccacctttgtgttcgaggagattggccggcgactgaaagatatcgggcctgaggttgtgaaaaaggtcaacgccgtatttgagtggcatattacaaaggggggcaacattggggctaaatggaccatcgatcttaaatcagggtctggcaaggtgtatcaggggccggcaaagggcgctgccgatacaacgatcattttatccgacgaagatttcatggaagtggtgttgggcaaactggatccacagaaggcattcttcagcgggcgcctcaaggcaagaggcaatatcatgctcagtcagaagctccagatgatacttaaagactatgccaaactgtag

SEQ ID NO: 77442 - DNA, 2157 bp, Artificial Sequence
  derived and/or modified sequence
atgggatccccactgcgtttcgacgggagagtagtgcttgtgacaggagctggagccgttaatgacctggggggtgatttcaaaggcgtcggcaaaggcagcctggctgccgataaagtggtagaggagattcggcgaagaggaggtaaagctgtggctaactacgacagtgtggaggagggcgaaaaagtcgtcaaaacagcgttagatgcatttggaagaattgacgtagttgttaacaacgccggtatcctcagggaccgatccttcgcacggatctccgacgaggattgggatataatacacagagtgcacctgcgcggttcatttcaggtcactcgcgctgcttgggaacacatgaagaagcagaagtatggcaggatcatcatgacatcctccgcctcggggatctatgggaacttcgggcaggccaactactcagccgctaaactggggctgctcggtttggcgaacagcttggccatagaaggcaggaagagcaacatacattgtaacaccattgcaccaaatgctggaagccgtatgacacagacagtgatgcccgaggatctcgtagaggcccttaaaccagagtatgttgcaccccttgtgctgtggctgtgccacgaaagttgtgaggagaacggcggactcttcgaggtgggcgctgggtggattgggaaactcaggtgggaaagaaccctgggagccatcgtccgtcaaaagaaccatccaatgactccggaggctgtcaaagcaaattggaaaaagatttgtgattttgagaacgctagtaagccacaatcaatccaggaatctactggctctataattgaggtgttgtccaaaattgactccgagggcggagtgagcgccaaccacacctcaagagccacttccacagcaacgtcgggtttcgccggtgcaattggtcaaaagttgccgcctttctcgtacgcatatacagagcttgaggcaatcatgtacgcacttggcgtgggtgcctctatcaaagatcctaaagatctgaagtttatttatgagggaagctctgacttctcctgccttcccaccttcggggtcattatcggacagaaaagcatgatggggggaggtctagccgagattcctgggctgtccatcaacttcgccaaagtgctccatggagagcaatatcttgagctctataagcctttgcccagggccggaaaactgaaatgtgaagctgtagtggccgatgttcttgacaagggcagtggagtggtgatcataatggatgtgtacagttacagtgaaaaagagctgatatgtcacaatcaattctcactgttcctggtagggtctggaggctttggcggtaagaggaccagtgacaaggtgaaagtagctgtggcaataccgaaccggccaccagatgcagtcctgacggacacaacctctttgaatcaggctgcactctatcgccttagtggcgattggaaccctctgcacatcgatccaaatttcgcctcactcgctggttttgataaaccgattcttcatgggctctgcacatttggcttttccgcacggagggtcctgcagcagttcgctgacaacgacgtctcgcgatttaaagcgatcaaggccagattcgcaaagcccgtgtaccctggtcagaccctgcaaactgaaatgtggaaggaggggaaccggatccattttcagactaaagtgcaagaaactggggacatcgtcatcagcaacgcgtacgtggaccttgcccctacctccgggaccagcgctaaaacaccgtctgaaggaggtaagctccagtctacctttgtgtttgaggaaataggacgtcgcctcaaagacattgggccagaggtcgtcaaaaaagtgaacgctgtattcgaatggcacattaccaagggtggcaatattggagctaagtggaccattgatttaaaaagcggctctggtaaggtatatcagggcccagctaaaggggcagccgatactacgattatcctgtcagatgaagacttcatggaggtggtgctggggaagctggatccacagaaggcctttttcagcggcagattaaaagcccgagggaacatcatgctcagccagaaactccaaatgatcctgaaggactacgccaagctgtag

SEQ ID NO: 77443 - DNA, 2157 bp, Artificial Sequence
  derived and/or modified sequence
atgggcagccccctgagattcgacggcagagtggtgctggtgaccggcgccggcgccgtgaacgacctgggcggcgacttcaagggcgtgggcaagggcagcctggccgccgacaaggtggtggaggagatcagaagaagaggcggcaaggccgtggccaactacgacagcgtggaggagggcgagaaggtggtgaagaccgccctggacgccttcggcagaatcgacgtggtggtgaacaacgccggcatcctgagagacagaagcttcgccagaatcagcgacgaggactgggacatcatccacagagtgcacctgagaggcagcttccaggtgaccagagccgcctgggagcacatgaagaagcagaagtacggcagaatcatcatgaccagcagcgccagcggcatctacggcaacttcggccaggccaactacagcgccgccaagctgggcctgctgggcctggccaacagcctggccatcgagggcagaaagagcaacatccactgcaacaccatcgcccccaacgccggcagcagaatgacccagaccgtgatgcccgaggacctggtggaggccctgaagcccgagtacgtggcccccctggtgctgtggctgtgccacgagagctgcgaggagaacggcggcctgttcgaggtgggcgccggctggatcggcaagctgagatgggagagaaccctgggcgccatcgtgagacagaagaaccaccccatgacccccgaggccgtgaaggccaactggaagaagatctgcgacttcgagaacgccagcaagccccagagcatccaggagagcaccggcagcatcatcgaggtgctgagcaagatcgacagcgagggcggcgtgagcgccaaccacaccagcagagccaccagcaccgccaccagcggcttcgccggcgccatcggccagaagctgccccccttcagctacgcctacaccgagctggaggccatcatgtacgccctgggcgtgggcgccagcatcaaggaccccaaggacctgaagttcatctacgagggcagcagcgacttcagctgcctgcccaccttcggcgtgatcatcggccagaagagcatgatgggcggcggcctggccgagatccccggcctgagcatcaacttcgccaaggtgctgcacggcgagcagtacctggagctgtacaagcccctgcccagagccggcaagctgaagtgcgaggccgtggtggccgacgtgctggacaagggcagcggcgtggtgatcatcatggacgtgtacagctacagcgagaaggagctgatctgccacaaccagttcagcctgttcctggtgggcagcggcggcttcggcggcaagagaaccagcgacaaggtgaaggtggccgtggccatccccaacagaccccccgacgccgtgctgaccgacaccaccagcctgaaccaggccgccctgtacagactgagcggcgactggaaccccctgcacatcgaccccaacttcgccagcctggccggcttcgacaagcccatcctgcacggcctgtgcaccttcggcttcagcgccagaagagtgctgcagcagttcgccgacaacgacgtgagcagattcaaggccatcaaggccagattcgccaagcccgtgtaccccggccagaccctgcagaccgagatgtggaaggagggcaacagaatccacttccagaccaaggtgcaggagaccggcgacatcgtgatcagcaacgcctacgtggacctggcccccaccagcggcaccagcgccaagacccccagcgagggcggcaagctgcagagcaccttcgtgttcgaggagatcggcagaagactgaaggacatcggccccgaggtggtgaagaaggtgaacgccgtgttcgagtggcacatcaccaagggcggcaacatcggcgccaagtggaccatcgacctgaagagcggcagcggcaaggtgtaccagggccccgccaagggcgccgccgacaccaccatcatcctgagcgacgaggacttcatggaggtggtgctgggcaagctggacccccagaaggccttcttcagcggcagactgaaggccagaggcaacatcatgctgagccagaagctgcagatgatcctgaaggactacgccaagctgtag

SEQ ID NO: 77444 - protein, 256 aa, Artificial Sequence
  derived and/or modified sequence
MKSDSSTSAAPLRGLGGPLRSSEPVRAVPARAPAVDLLEEAADLLVVHLDFRAALETCERAWQSLANHAVAEEPAGTSLEVKCSLCVVGIQALAEMDRWQEVLSWVLQYYQVPEKLPPKVLELCILLYSKMQEPGAVLDVVGAWLQDPANQNLPEYGALAEFHVQRVLLPLGCLSEAEELVVGSAAFGEERRLDVLQAIHTARQQQKQEHSGSEEAQKPNLEASPSSLHFLYKLAQLFRWIRKAAFSRLYQLRIRD

SEQ ID NO: 77445 - DNA, 771 bp, Artificial Sequence
  derived and/or modified sequence
atgaagtcagatagttctaccagcgcagctcccctgaggggattagggggccctctcagatcatccgaacccgtacgagctgtccccgcacgagcaccggctgtagacctgcttgaggaagccgcggaccttcttgtggtccacctggatttccgggccgccctcgagacttgcgagcgggcttggcaatcgctggccaaccatgcagttgcggaggagccagcgggcacttcactcgaggtgaagtgcagcttgtgcgtcgtgggcatacaggcacttgccgaaatggataggtggcaggaagtgctgagttgggtgctgcagtactaccaagtgccagaaaagttaccacccaaagtcctcgaattgtgtatcctgttgtactcgaaaatgcaggagccaggggctgtgctggatgtcgttggggcatggctgcaggacccagcaaatcaaaatctgcctgaatatggcgccctagctgaatttcacgtgcaaagggtgctgttgccgctggggtgcctgagcgaagcagaggaattggtggtgggatctgctgcgttcggtgaggaacgtagactggacgtgctgcaggcgatacatacagccaggcagcagcaaaagcaggagcattcgggcagcgaagaagcacagaagcccaacctcgaagcaagcccttcatccctgcatttcttatacaagttagcacaactgttcaggtggatcagaaaggcagccttcagcagactctaccaactccggattcgagactag

SEQ ID NO: 77446 - DNA, 771 bp, Artificial Sequence
  derived and/or modified sequence
atgaagagtgacagcagcaccagcgctgcccccctgcggggcctgggcggccccctgcggagcagcgagcctgtgcgggctgtgcctgcccgggccccagctgtggacctgctggaggaggccgctgacctgctggtggtgcacctggacttccgggccgccctggagacctgtgagcgggcctggcagagcctggccaaccacgctgtggccgaggagcctgctggcaccagcctggaggtgaagtgcagcctgtgtgtggtgggcatccaggccctggccgagatggaccgctggcaggaggtgctgtcctgggtgctgcagtactaccaggtgcctgagaagctgccccccaaggtgctggagctgtgcatcctgctgtacagcaagatgcaggagcccggggctgtgctggatgtggtgggcgcctggctgcaggaccctgccaaccagaacctgcctgaatatggagccctggccgagttccacgtgcagagggtgctgctgcccctgggctgcctgtctgaggccgaggagctggtggtgggcagcgctgcctttggagaggagcggcggctggatgtgctgcaggccatccacacagcccggcagcagcagaagcaggagcacagcggcagcgaggaggcccagaagcccaacctggaggccagccccagcagcctgcacttcctgtacaagctggcccagctgttccgctggatcaggaaggccgccttcagccggctgtaccagctgcgcatccgggactag

SEQ ID NO: 77447 - DNA, 771 bp, Artificial Sequence
  derived and/or modified sequence
atgaagagcgacagcagcaccagcgccgcccccctgcggggcctgggaggaccactgcggagctcagaaccagtgagggcagtgcccgcccgagcacccgccgtggatctgctggaggaggcagctgatctcctcgttgtccacctagacttccgcgcagccctcgagacatgtgagcgcgcctggcagtcactggctaatcatgccgtggcagaagagccagctgggacaagtttggaggtgaagtgttctttgtgcgtggtggggattcaggcactcgccgagatggatcgatggcaggaggtcctatcttgggtgctccagtactatcaggtccccgaaaagttaccacctaaagtgctcgagctatgtatactgctttatagtaaaatgcaagaaccaggagccgttctcgacgtggtcggtgcgtggctacaggaccctgcaaatcagaatctaccagagtatggggctctcgccgaatttcacgtccagcgggtcctccttcctcttggctgtctttcagaagccgaagaactggttgtcggttccgccgcttttggcgaagaacggcgcctcgatgtgttgcaggcgatccacacagccaggcagcagcaaaaacaggagcattctggcagcgaagaagcgcagaagcctaatctcgaagcctctccctcgagtctgcatttcctctacaaactggcacaactcttccggtggatccggaaggctgctttctcacggctttaccaactgcgcatccgcgattag

SEQ ID NO: 77448 - DNA, 815 bp, Artificial Sequence
  derived and/or modified sequence
atgaagagcgattcttcgacctctgcagcccccctcagggggctcgggggacccctgcgcagcagcgagccggtgcgcgcggtcccggcccgggcgccggccgtggaccttctggaggaggcggccgacctcctggtggtgcacctggacttccgggcggcgctggagacctgcgagcgggcctggcagagtctggccaaccacgccgtggcagaggaacccgcgggcacctcattggaggtgaagtgctccctgtgtgttgtggggatccaggccctggcagaaatggatcggtggcaagaagtcctctcctgggtccttcagtattaccaggtccctgaaaagctaccccccaaagtcctggagctgtgcattcttttatacagcaaaatgcaagagcctggagctgtgctggatgtggtgggtgcctggctccaagacccagccaatcaaaaccttccagaatatggagccttggcagaatttcacgtgcagcgggtgctgctgcctctgggctgcttatcggaggctgaggagctagtggtgggctctgcagcctttggtgaggagcggcgactggatgtacttcaggccattcacacagcgaggcagcagcagaaacaggaacactcaggctctgaggaggcccagaagccaaacctggaagcttccccttcctccctgcacttcctctacaagctggcccagctcttccgctggatccggaaggctgcattttctcgcctctaccagctccgcatccgtgactgagggtccctgcgcaccacagcctctctgctcctcacgtccgtggc

SEQ ID NO: 77449 - DNA, 771 bp, Artificial Sequence
  derived and/or modified sequence
atgaagtcagattcttccacctctgcagcccctctgcggggattgggtggcccactgaggtctagcgaacctgttagggccgtgcccgcaagggcccctgccgttgacctgctagaggaggccgctgacctgttagtggtacatcttgatttccgtgccgctctggagacttgtgaacgcgcttggcagtcgctggccaaccatgccgtcgccgaagaaccggcaggaactagtctggaggttaagtgttctctctgcgtagtaggcattcaggcccttgccgagatggaccgttggcaagaagtgttgagctgggtgctgcagtactatcaggtcccagagaaactccctcctaaggttctggagctgtgcatccttctgtactccaagatgcaggagccaggagcagtcctagatgtcgtgggagcatggctccaggaccctgctaatcagaacctccctgagtatggcgctctggccgagttccacgtccagagggtgctgctcccccttggttgtttatccgaagccgaggagttggtcgttggatctgctgcttttggagaagagaggaggctcgatgttttgcaggcgatccacaccgcacgacagcaacagaagcaggaacactctggatccgaagaagcccagaaacctaaccttgaggcttctccctcctctttgcactttctgtataaactcgcacaattatttcgctggataagaaaagcagccttctcacgtctgtatcaactacgcatccgcgattag

SEQ ID NO: 77450 - DNA, 771 bp, Artificial Sequence
  derived and/or modified sequence
atgaagagcgacagcagcaccagcgccgcccccctgagaggcctgggcggccccctgagaagcagcgagcccgtgagagccgtgcccgccagagcccccgccgtggacctgctggaggaggccgccgacctgctggtggtgcacctggacttcagagccgccctggagacctgcgagagagcctggcagagcctggccaaccacgccgtggccgaggagcccgccggcaccagcctggaggtgaagtgcagcctgtgcgtggtgggcatccaggccctggccgagatggacagatggcaggaggtgctgagctgggtgctgcagtactaccaggtgcccgagaagctgccccccaaggtgctggagctgtgcatcctgctgtacagcaagatgcaggagcccggcgccgtgctggacgtggtgggcgcctggctgcaggaccccgccaaccagaacctgcccgagtacggcgccctggccgagttccacgtgcagagagtgctgctgcccctgggctgcctgagcgaggccgaggagctggtggtgggcagcgccgccttcggcgaggagagaagactggacgtgctgcaggccatccacaccgccagacagcagcagaagcaggagcacagcggcagcgaggaggcccagaagcccaacctggaggccagccccagcagcctgcacttcctgtacaagctggcccagctgttcagatggatcagaaaggccgccttcagcagactgtaccagctgagaatcagagactag

SEQ ID NO: 77451 - protein, 123 aa, Artificial Sequence
  derived and/or modified sequence
MEKRGLREMRVLENLKNMIHETNEHTLPKCRDTMRDSLSQVLQRLQAANDSVCRLQQREQERKKIHSDHLVASEKQHMLQWDNFMKEQPNKRAEVDEEHRKAMERLKEQYAEMEKDLAKFSTF

SEQ ID NO: 77452 - DNA, 372 bp, Artificial Sequence
  derived and/or modified sequence
atggagaagcgcgggttgcgcgaaatgcgcgtgcttgagaacctgaagaacatgatccatgagaccaacgaacacacactgcccaaatgcagagacaccatgcgtgattcactgagccaggtattacaacgattacaggccgctaatgatagtgtctgtaggctccagcagcgcgaacaggagagaaaaaagattcacagcgatcacctcgtggcaagcgaaaagcagcacatgcttcagtgggataactttatgaaagagcaacctaacaagcgagccgaagtggatgaggaacacagaaaagcgatggagcgcctaaaggaacaatatgccgagatggaaaaagacctggcaaaattttcgaccttttag

SEQ ID NO: 77453 - DNA, 372 bp, Artificial Sequence
  derived and/or modified sequence
atggagaagaggggcctgcgggagatgagggtgctggagaacctgaagaacatgatccacgagaccaatgagcacaccctgcccaagtgccgggacaccatgagggacagcctgagccaggtgctgcagaggctgcaggccgccaatgattctgtgtgccgcctgcagcagcgggagcaggagaggaagaagatccacagcgaccacctggtggccagcgagaagcagcacatgctgcagtgggacaacttcatgaaggagcagcccaacaagagagctgaggtggatgaggagcacaggaaggccatggagcggctgaaggagcagtatgcagagatggagaaggacctggccaagttcagcaccttctag

SEQ ID NO: 77454 - DNA, 372 bp, Artificial Sequence
  derived and/or modified sequence
atggagaagcggggcctgcgggagatgcgggtgctggagaacctgaagaacatgatacacgaaaccaatgaacacaccctccccaagtgtcgggataccatgcgagacagtctgagccaggtcctgcaacggctacaggcagcgaatgacagcgtctgtagattacagcagcgcgagcaagaaagaaagaagatccattcagatcatctggtagcttctgagaaacagcacatgctgcaatgggacaactttatgaaggaacagcccaacaagcgtgccgaagttgacgaggagcataggaaagcaatggagcgtctcaaggagcagtacgccgaaatggaaaaggacctggcaaaattcagtactttttag

SEQ ID NO: 77455 - DNA, 372 bp, Artificial Sequence
  derived and/or modified sequence
atggaaaagaggggtctgcgggaaatgagagtgctggaaaacctaaaaaacatgatacacgagacgaacgagcacaccttacccaagtgtcgtgataccatgcgggatagcctttcccaagtgctgcagaggctgcaagctgctaacgactcggtctgtcgactgcaacaacgagaacaagaaaggaaaaagatccatagtgaccacctcgtggcttcagaaaagcaacatatgctgcagtgggataattttatgaaggaacaaccaaataagagggcggaggtggacgaagaacacaggaaggcgatggagaggttgaaggagcaatatgctgagatggaaaaagacctggccaagttctctaccttctag

SEQ ID NO: 77456 - DNA, 372 bp, Artificial Sequence
  derived and/or modified sequence
atggagaagagaggcctgagagagatgagagtgctggagaacctgaagaacatgatccacgagaccaacgagcacaccctgcccaagtgcagagacaccatgagagacagcctgagccaggtgctgcagagactgcaggccgccaacgacagcgtgtgcagactgcagcagagagagcaggagagaaagaagatccacagcgaccacctggtggccagcgagaagcagcacatgctgcagtgggacaacttcatgaaggagcagcccaacaagagagccgaggtggacgaggagcacagaaaggccatggagagactgaaggagcagtacgccgagatggagaaggacctggccaagttcagcaccttctag

SEQ ID NO: 77457 - DNA, 441 bp, Artificial Sequence
  derived and/or modified sequence
atgcacatcagaaaggccaccaagtacctgaaggacgtgaccctgcagaagcagtgcgtgcccttcagaagatacaacggcggcgtgggcagatgcgcccaggccaagcagtggggctggacccagggcagatggcccaagaagagcgccgagttcctgctgcacatgctgaagaacgccgagagcaacgccgagctgaagggcctggacgtggacagcctggtgatcgagcacatccaggtgaacaaggcccccaagatgagaagaagaacctacagagcccacggcagaatcaacccctacatgagcagcccctgccacatcgagatgatcctgaccgagaaggagcagatcgtgcccaagcccgaggaggaggtggcccagaagaagaagatcagccagaagaagctgaagaagcagaagctgatggccagagagtag

SEQ ID NO: 77458 - DNA, 441 bp, Artificial Sequence
  derived and/or modified sequence
atgcacatcagaaaggctaccaagtacctgaaagacgtgacactacaaaaacagtgtgtaccattcagacgatataatggcggagtaggccggtgtgcacaggccaaacagtggggatggacacaggggcggtggcccaagaagagcgctgagttcctgctccatatgttaaagaacgccgaaagcaacgctgagctgaagggactggatgtcgattctctcgttattgagcatatacaggtcaacaaagcgcccaagatgagacgcaggacttaccgggcacacggcaggattaatccttatatgtccagtccttgtcacattgaaatgattctgactgagaaggagcagattgtgccgaaaccagaggaggaggttgcacagaaaaaaaaaataagccagaagaaactcaaaaagcaaaagctaatggcaagggagtag

SEQ ID NO: 77459 - DNA, 441 bp, Artificial Sequence
  derived and/or modified sequence
atgcacatcaggaaggccaccaagtacctgaaggatgtgaccctgcagaagcagtgtgtgcccttccgccgctacaacggcggcgtgggccgctgtgcccaggccaagcagtggggctggacccagggccgctggcccaagaagtctgctgagttcctgctgcacatgctgaagaatgctgagagcaatgctgagctgaagggcctggatgtggacagcctggtgattgagcacatccaggtgaacaaggcccccaagatgagaagaaggacctaccgggcccacggccgcatcaacccctacatgagcagcccctgccacatcgagatgatcctgacagagaaggagcagatcgtgcccaagccagaggaggaggtggcccagaagaagaagatcagccagaagaagctgaagaagcagaagctgatggcccgggagtag

SEQ ID NO: 77460 - DNA, 441 bp, Artificial Sequence
  derived and/or modified sequence
atgcacatccggaaggccaccaagtacctgaaggacgtgaccctgcagaagcagtgcgtaccatttaggaggtacaatggaggcgtggggcgttgcgcccaggccaagcagtggggctggacacaaggccgctggccaaagaaatccgctgaatttctcctgcacatgcttaaaaacgccgagtccaacgctgagttaaaggggctggacgtggactccctagtcattgagcatatccaagtgaataaggctcctaagatgcgaagacgcacttaccgcgcgcacggacggatcaatccatacatgtccagtccttgtcatattgagatgatactcacggaaaaggaacaaatcgtgcctaaacccgaagaggaggtcgcccaaaaaaagaagatatcgcagaagaagctcaaaaaacagaagctgatggctcgggagtag

SEQ ID NO: 77461 - DNA, 441 bp, Artificial Sequence
  derived and/or modified sequence
atgcatatccgtaaggccacaaaatacttgaaagacgtcacactccagaaacagtgtgttccctttaggcgctacaatggaggggtcggtcggtgtgcacaagctaagcaatggggctggacacaaggcaggtggccaaaaaaatccgccgagttcttgcttcacatgctgaagaacgccgaatcaaatgctgagctcaaaggcttggacgtggactcgctcgtgattgagcacattcaggttaacaaggcaccaaaaatgcgcagaaggacttatagagcacatggaaggattaatccgtacatgtcttccccatgtcacattgaaatgattctcactgagaaagaacaaatcgtgcccaagcctgaggaggaggtcgctcagaagaagaagatctctcagaagaagctcaagaagcagaagctgatggcaagggaatag

SEQ ID NO: 77462 - DNA, 441 bp, Artificial Sequence
  derived and/or modified sequence
atgcatattcgcaaagccacgaaatatctaaaagatgtaaccttacaaaagcaatgcgtacccttcagacggtataatggaggggttggcagatgtgcccaagccaagcagtggggatggacccaaggtcgctggcccaagaaaagcgccgaattcctgttgcacatgctaaagaatgctgagtccaatgctgagttaaaggggctggatgtggatagcttggtgatcgagcacatccaggtcaataaggctcccaagatgcgccggcgcacctacagagcccatggacggattaacccgtatatgagttccccctgtcacatcgagatgattctcaccgagaaagagcagatcgttcccaaaccagaggaggaggtggctcaaaagaagaagatcagccaaaagaaacttaaaaagcagaagctgatggcgagggagtag

SEQ ID NO: 77463 - DNA, 441 bp, Artificial Sequence
  derived and/or modified sequence
atgcacatccggaaggccaccaagtacctgaaggacgtgaccctgcagaaacagtgtgtacctttcaggcggtacaatggtggcgtggggagatgtgctcaggcaaaacagtggggctggacacaggggagatggcccaaaaaatctgccgagttcttgctgcatatgctgaagaatgctgaatctaacgcagagctgaaaggattagatgtggactccctcgtaattgaacatatacaggtgaacaaggcccccaaaatgaggaggcggacctatcgcgcgcacggtcgcataaatccctatatgagctcaccatgtcatatcgaaatgattctcacagagaaggagcagattgtccccaaacccgaggaggaagtcgcccaaaaaaagaagatcagccagaaaaagttaaagaagcaaaaactgatggccagggagtag

SEQ ID NO: 77464 - DNA, 441 bp, Artificial Sequence
  derived and/or modified sequence
atgcacattcgcaaggcaactaagtacctgaaggatgtgacattgcagaaacagtgtgtgccatttcgcaggtacaatgggggtgtgggtcggtgtgcccaggccaagcagtggggatggacacaggggaggtggccgaagaagtccgccgaatttttacttcatatgctcaaaaacgccgaatcaaacgcagaactgaaaggattggacgtggatagtctggttatcgagcacatccaggtcaacaaggcaccgaagatgcgcagacgaacctatcgcgcacatggcagaattaacccctacatgagtagtccttgtcacatcgaaatgattctgactgagaaagagcaaatcgtgcctaaaccagaagaggaagtggcccagaaaaagaaaatttcccaaaaaaaactgaaaaaacaaaagcttatggccagggaatag

SEQ ID NO: 77465 - protein, 228 aa, Artificial Sequence
  derived and/or modified sequence
MVRYSLDPENPTKSCKSRGSNLRVHFKNTRETAQAIKGMHIRKATKYLKDVTLQKQCVPFRRYNGGVGRCAQAKQWGWTQGRWPKKSAEFLLHMLKNAESNAELKGLDVDSLVIEHIQVNKAPKMRRRTYRAHGRINPYMSSPCHIEMILTEKEQIVPKPEEEVAQKKKLRSSSLGKWCAFLVSSFQFCSGSTKNSWSHIYTLWFPPSLVVYGLRKQYKNPMIQTKAK

SEQ ID NO: 77466 - DNA, 687 bp, Artificial Sequence
  derived and/or modified sequence
atggttcggtattctcttgaccccgagaatcctactaaaagctgcaaaagtagaggttcaaacctgcgcgtgcattttaagaatactcgcgagaccgcccaggcgattaaaggcatgcacatccgaaaagccacaaaatacctcaaggatgtaaccctacagaagcagtgcgtgccattccgccgctataatggcggtgtgggccgctgtgctcaggccaaacagtgggggtggactcagggacgatggcccaagaaaagcgccgagttcctactccacatgctaaagaacgcagaatcgaacgctgagcttaagggcctcgatgtcgattccctggtcattgagcatatccaagtaaataaagccccgaaaatgaggcgtagaacctaccgagcccatggtcggataaatccctatatgtctagcccatgccacatcgagatgatactaaccgagaaagagcaaattgtccctaagcctgaggaggaagttgcgcagaagaagaagctgcgaagctcctcattgggcaaatggtgcgccttcttggtatcatcatttcagttctgctccgggagcacgaagaacagctggtctcatatctacactctgtggtttcctccttctcttgttgtgtacgggctgcggaagcagtataaaaaccctatgatccagacgaaagccaagtag

SEQ ID NO: 77467 - DNA, 687 bp, Artificial Sequence
  derived and/or modified sequence
atggtgcgctacagcctggaccctgagaaccccaccaagagctgcaagagccggggcagcaacctgcgggtgcacttcaagaacacccgggagacagcccaggccatcaagggcatgcacatcaggaaggccaccaagtacctgaaggatgtgaccctgcagaagcagtgtgtgcccttccgccgctacaacggcggcgtgggccgctgtgcccaggccaagcagtggggctggacccagggccgctggcccaagaagtctgctgagttcctgctgcacatgctgaagaatgctgagagcaatgctgagctgaagggcctggatgtggacagcctggtgattgagcacatccaggtgaacaaggcccccaagatgagaagaaggacctaccgggcccacggccgcatcaacccctacatgagcagcccctgccacatcgagatgatcctgacagagaaggagcagatcgtgcccaagccagaggaggaggtggcccagaagaagaagctgcggagcagcagcctgggcaagtggtgtgccttcctggtgtcctccttccagttctgcagcggcagcaccaagaacagctggagccacatctacaccctgtggttcccccccagcctggtggtgtatggcctgaggaagcagtacaagaaccccatgatccagaccaaggccaagtag

SEQ ID NO: 77468 - DNA, 687 bp, Artificial Sequence
  derived and/or modified sequence
atggtgcggtacagcctggaccccgagaaccccaccaagagctgcaaaagccgcggctccaaccttagggtccactttaaaaacacccgggaaaccgcgcaggctatcaaaggcatgcacattagaaaggccacaaagtacttgaaggatgtaactctccagaagcagtgcgtgccatttaggagatacaatggtggcgtcggaagatgtgctcaggctaagcaatgggggtggactcagggcagatggcctaaaaaatcagccgaattcctgctgcatatgctcaagaacgcagagtctaatgcagagttaaaaggtctggatgtcgatagccttgttatcgagcacatacaggtgaataaggcaccgaagatgcggcgtagaacctatcgggcccacggccgcatcaacccctacatgtcctctccgtgccacattgagatgatcctaaccgaaaaggaacaaatcgttcctaaaccggaagaggaagtggctcaaaagaaaaaactgcgaagcagttccttgggcaaatggtgtgcattcctcgtgtctagttttcagttttgtagcgggagcaccaagaactcatggtctcacatttataccttatggtttcccccaagcctggtcgtgtatggactgcgaaaacagtataaaaatccaatgattcagaccaaggcgaagtag

SEQ ID NO: 77469 - DNA, 687 bp, Artificial Sequence
  derived and/or modified sequence
atggtacgctatagtctggaccctgagaatcctactaagagttgtaaatcccggggttcgaatttgagggtgcactttaaaaacacccgtgagacagcccaggctatcaaaggaatgcatattagaaaggcgaccaaatatttgaaggacgtgaccctccagaaacagtgtgttccatttagaaggtacaatggtggcgtcggacgctgcgcccaagccaaacagtgggggtggactcagggcagatggccaaaaaagtccgccgaatttctgctgcacatgctgaaaaatgccgaatctaacgcagaacttaagggcctcgacgtggactctttggttattgagcacattcaggtcaacaaggccccaaaaatgagacgccgaacatacagggcacacgggagaattaacccctacatgtcctcaccctgtcatatcgagatgattttgacagagaaagagcagatagtgccaaagcccgaagaagaagtggctcaaaagaagaagcttcgcagttcctctcttgggaagtggtgtgcgttcctggtgtctagctttcagttttgttccggctccacaaaaaattcatggtcgcatatctataccctgtggtttccgccatccttggtggtgtatggcttacgcaaacagtacaagaaccccatgatccaaactaaggccaaatag

SEQ ID NO: 77470 - DNA, 1440 bp, Artificial Sequence
  derived and/or modified sequence
aggtgatctgtgaaaatggttcgctattcacttgacccggagaaccccacgaaatcatgcaaatcaagaggttccaatcttcgtgttcactttaagaacactcgtgaaactgctcaggccatcaagggtatgcatatacgaaaagccacgaagtatctgaaagatgtcactttacagaaacagtgtgtaccattccgacgttacaatggtggagttggcaggtgtgcgcaggccaagcaatggggctggacacaaggtcggtggcccaaaaagagtgctgaatttttgctgcacatgcttaaaaacgcagagagtaatgctgaacttaagggtttagatgtagattctctggtcattgagcatatccaagtgaacaaagcacctaagatgcgccgccggacctacagagctcatggtcggattaacccatacatgagctctccctgccacattgagatgatccttacggaaaaggaacagattgttcctaaaccagaagaggaggttgcccagaagaaaaagttgaggagctcaagcttgggaaaatggtgtgcattccttgtatcgtcattccagttctgctctggatctacaaaaaattcctggagccatatatataccctctggtttcccccttcgttagtcgtatatggcctaagaaagcaatacaagaatccaatgatacaaacaaaggcaaagtaaactttaagggtgcagacatgaatggattaccaacaaaaggaccaacagaaatctgtgataaaaagaaagactaaagaaattttcctaaaggaccccatcatttaaaaaatggacctgataatatgaagcatcttccttgtaattgtctctgacctttttatctgagaccggaattcaggataggagtctagatatttacctgatactaatcaggaaatatatgatatccgtatttaaaatgtagttagttatatttaatgacctcattcctaagttcctttttcgttaatgtagctttcatttctgttattgctgtttgaataatatgattaaatagaaggtttgtgccagtagacattatgttactaaatcagcactttaaaatctttggttctctaattcatatgaatttgctgtttgctctaatttctttgggctcttctaatttgagtggagtacaattttgttgtgaaacagtccagtgaaactgtgcagggaaatgaaggtagaattttgggaggtaataatgatgtgaaacataaagatttaataattactgtccaacacagtggagcagcttgtccacaaatatagtaattactatttattgctctaaggaagattaaaaaaagatagggaaaagggggaaacttctttgaaaaatgaaacatctgttacattaatgtctaattataaaattttaatccttactgcatttcttctgttcctacaaatgta

SEQ ID NO: 77471 - DNA, 687 bp, Artificial Sequence
  derived and/or modified sequence
atggtgagatacagcctggaccccgagaaccccaccaagagctgcaagagcagaggcagcaacctgagagtgcacttcaagaacaccagagagaccgcccaggccatcaagggcatgcacatcagaaaggccaccaagtacctgaaggacgtgaccctgcagaagcagtgcgtgcccttcagaagatacaacggcggcgtgggcagatgcgcccaggccaagcagtggggctggacccagggcagatggcccaagaagagcgccgagttcctgctgcacatgctgaagaacgccgagagcaacgccgagctgaagggcctggacgtggacagcctggtgatcgagcacatccaggtgaacaaggcccccaagatgagaagaagaacctacagagcccacggcagaatcaacccctacatgagcagcccctgccacatcgagatgatcctgaccgagaaggagcagatcgtgcccaagcccgaggaggaggtggcccagaagaagaagctgagaagcagcagcctgggcaagtggtgcgccttcctggtgagcagcttccagttctgcagcggcagcaccaagaacagctggagccacatctacaccctgtggttcccccccagcctggtggtgtacggcctgagaaagcagtacaagaaccccatgatccagaccaaggccaagtag

SEQ ID NO: 77472 - protein, 1286 aa, Artificial Sequence
  derived and/or modified sequence
MEKYVRLQKIGEGSFGKAILVKSTEDGRQYVIKEINISRMSSKEREESRREVAVLANMKHPNIVQYRESFEENGSLYIVMDYCEGGDLFKRINAQKGVLFQEDQILDWFVQICLALKHVHDRKILHRDIKSQNIFLTKDGTVQLGDFGIARVLNSTVELARTCIGTPYYLSPEICENKPYNNKSDIWALGCVLYELCTLKHAFEAGSMKNLVLKIISGSFPPVSLHYSYDLRSLVSQLFKRNPRDRPSVNSILEKGFIAKRIEKFLSPQLIAEEFCLKTFSKFGSQPIPAKRPASGQNSISVMPAQKITKPAAKYGIPLAYKKYGDKKLHEKKPLQKHKQAHQTPEKRVNTGEERRKISEEAARKRRLEFIEKEKKQKDQIISLMKAEQMKRQEKERLERINRAREQGWRNVLSAGGSGEVKAPFLGSGGTIAPSSFSSRGQYEHYHAIFDQMQQQRAEDNEAKWKREIYGRGLPERGILPGVRPGFPYGAAGHHHFPDADDIRKTLKRLKAVSKQANANRQKGQLAVERAKQVEEFLQRKREAMQNKARAEGHMGILQNLAAMYGGRPSSSRGGKPRNKEEEVYLARLRQIRLQNFNERQQIKAKLRGEKKEANHSEGQEGSEEADMRRKKIESLKAHANARAAVLKEQLERKRKEAYEREKKVWEEHLVAKGVKSSDVSPPLGQHETGGSPSKQQMRSVISVTSALKEVGVDSSLTDTRETSEEMQKTNNAISSKREILRRLNENLKAQEDEKGKQNLSDTFEINVHEDAKEHEKEKSVSSDRKKWEAGGQLVIPLDELTLDTSFSTTERHTVGEVIKLGPNGSPRRAWGKSPTDSVLKILGEAELQLQTELLENTTIRSEISPEGEKYKPLITGEKKVQCISHEINPSAIVDSPVETKSPEFSEASPQMSLKLEGNLEEPDDLETEILQEPSGTNKDESLPCTITDVWISEEKETKETQSADRITIQENEVSEDGVSSTVDQLSDIHIEPGTNDSQHSKCDVDKSVQPEPFFHKVVHSEHLNLVPQVQSVQCSPEESFAFRSHSHLPPKNKNKNSLLIGLSTGLFDANNPKMLRTCSLPDLSKLFRTLMDVPTVGDVRQDNLEIDEIEDENIKEGPSDSEDIVFEETDTDLQELQASMEQLLREQPGEEYSEEEESVLKNSDVEPTANGTDVADEDDNPSSESALNEEWHSDNSDGEIASECECDSVFNHLEELRLHLEQEMGFEKFFEVYEKIKAIHEDEDENIEICSKIVQNILGNEHQHLYAKILHLVMADGAYQEDNDE

SEQ ID NO: 77473 - DNA, 3861 bp, Artificial Sequence
  derived and/or modified sequence
atggagaaatacgtgcgcttgcagaaaataggtgaggggtcctttggtaaagcgatactggtgaagtcaaccgaggatgggcgacagtacgtcataaaggagataaacatcagccggatgtcgagcaaagagcgggaagaatcccgccgcgaagtagctgttttggctaacatgaagcatcccaatatagtgcagtatagggaatccttcgaggagaacggatctttgtacatcgttatggactattgtgagggaggagacctgtttaagcgaatcaacgcccagaagggagtcctgttccaggaggatcaaattctcgattggttcgtacagatctgcctggccctcaaacacgttcacgaccggaagatcctgcaccgggatattaagtctcagaacattttcctcactaaagacgggacagtgcaactgggggacttcgggatcgcacgcgtgctgaattcaacagtggagcttgctcgaacctgcataggtactccatactacctgagccctgaaatttgtgaaaacaagccttacaataataagagtgacatctgggctctggggtgcgtgctctatgagctctgcacactcaagcacgcctttgaggctggcagtatgaaaaatctcgtccttaagattatttccggctcctttcccccggtttcgctacattactcttacgatctacgcagcctcgttagtcaacttttcaagcgaaaccctagggataggccttcagtaaacagtatcttagagaaagggttcatcgcaaaacgaatcgagaagtttctgtctccgcagctcatagcagaagaattctgtctgaagacatttagcaaatttggatcgcaaccgattcccgccaaacgaccggcttcagggcaaaactctatctctgtgatgccagcgcagaagatcactaagcccgctgcaaagtatggcataccgttggcctacaaaaagtacggtgataaaaaactgcatgagaagaagcctcttcagaagcacaagcaggcgcaccagactccagagaaacgagtgaatactggagaagaaagaaggaagatctctgaggaagccgccaggaagagaagactcgagtttattgagaaggagaaaaagcaaaaggatcagatcatctctttaatgaaggccgaacagatgaagcgtcaagaaaaggaacggctcgagagaattaatcgcgcacgggaacagggctggcgaaacgtgttgagtgctggcggctccggcgaggtgaaagccccctttctggggagtggaggaaccatagcccccagctccttctcatcccgggggcaatatgaacactatcacgctatttttgatcagatgcaacaacaaagagctgaagacaacgaagctaagtggaaacgggagatatatggcaggggtctcccagagcgtgggattctgcccggcgtccgcccaggtttcccatacggagccgctggccaccaccatttccccgatgctgatgatattcgcaaaaccctgaagagactgaaggctgtgagcaagcaggccaacgcaaaccgccaaaaagggcagcttgctgtcgagagagctaagcaagtagaggagttcttgcaaaggaaacgagaagccatgcagaataaggctcgcgcagaggggcatatgggaattctccagaacctagcggcgatgtacggcggtagaccctcttcttctcggggtggcaagccccgcaacaaggaggaggaggtgtatctcgcacgactcagacagatcagactccaaaatttcaacgaacgccagcaaatcaaggctaaactacgaggcgagaaaaaggaagcaaaccattccgaagggcaggaaggatcagaggaagccgacatgcgaaggaagaagatagagtcactgaaggctcatgcaaacgcaagagccgccgtcctgaaggaacaactggaacggaaacgaaaagaagcttacgaaagggagaaaaaagtatgggaggagcacttggtggccaagggagttaaatcctctgacgtaagcccgcctttgggacagcacgagaccggtggctccccttccaaacagcagatgcggagtgtgatttccgtgacgagcgctctgaaggaggtcggggtagattcttcgctcacggacactcgtgaaactagtgaagaaatgcagaaaacaaacaatgcaatttcttctaaaagagagattttaagacggctaaatgagaatctaaaggcacaggaggatgaaaaaggtaagcaaaacctgtctgacacatttgagataaacgttcacgaggacgccaaagaacatgaaaaagagaagagtgtgagctccgatagaaagaaatgggaagctgggggacagctggtgattcccttagacgagttgacactagatacttctttcagcacaactgagcgacataccgtcggcgaggtcattaaactaggtccaaatggtagcccacgtcgcgcttggggcaaatctcctacagacagtgtgctgaagatccttggggaagcagagctacagcttcaaaccgagctactcgaaaatacaacaattcgatctgagatcagccccgagggtgagaagtacaaacccctcattactggagaaaagaaagttcagtgcatttctcatgagatcaatccttctgcaattgtcgattccccagttgagaccaagtcacctgagttttcggaggccagtccccaaatgtcactcaaacttgaagggaatctggaggaaccggatgacctcgaaactgagatccttcaagagcccagtggtactaataaggacgagagtttgccatgtaccatcacggatgtttggatctctgaggaaaaggaaacaaaagagactcagtcggctgaccgcataaccattcaggaaaatgaagtgtccgaggacggagtttcatctacggtggaccagctgagcgatattcacattgagcccggaaccaacgatagccagcattctaagtgcgatgtcgataagagcgtccagccggaaccattcttccacaaggtagttcattcagagcacctgaatcttgtacctcaggtccaatccgtacagtgctcaccggaggaaagtttcgctttcagaagccattcacacctgcctccaaagaacaagaataagaactcactccttatcggcctatctaccggactcttcgacgctaataaccctaaaatgttacgaacctgtagcctaccagatctgagcaaactattcaggaccttaatggatgtgccaacagtcggggatgtgcgacaggacaacctcgagattgatgagattgaggatgagaatattaaggaggggccaagcgatagtgaggacatagtatttgaagagaccgacaccgacctccaggaattacaagccagcatggagcaactactgagggaacagccgggggaggaatacagtgaagaagaggaatcagtgcttaagaattcagacgtggagcctacagcaaatggcactgatgtcgcagacgaggacgacaacccatcgagcgagagtgccctcaatgaggaatggcactcagataacagtgatggtgagatagcgagcgagtgcgagtgtgactccgttttcaatcacctggaagagctgaggttgcaccttgagcaggaaatggggttcgaaaagttcttcgaggtgtacgaaaagataaaagctatccatgaagatgaggacgaaaatattgaaatttgttcaaagatagtgcagaacatcttaggtaatgagcatcagcatctctacgcaaagatcttacaccttgtgatggctgacggggcctatcaggaagataatgacgagtag

SEQ ID NO: 77474 - DNA, 3861 bp, Artificial Sequence
  derived and/or modified sequence
atggagaagtatgtgcggctgcagaagatcggggagggcagctttgggaaggccatcctggtgaagagcacagaagatggccggcagtatgtgatcaaggagatcaacatcagcaggatgagcagcaaggagcgggaggagagcagaagagaggtggccgtgctggccaacatgaagcaccccaacatcgtgcagtaccgggagagctttgaggagaatggcagcctgtacatcgtgatggactactgtgagggcggggacctcttcaagaggatcaatgcccagaagggcgtgctcttccaggaggaccagatcctggactggtttgtgcagatctgcctggccctgaagcacgtgcatgacaggaagatcctgcaccgggacatcaagagccagaacatcttcctgaccaaggatggcaccgtgcagctgggggactttggaattgcccgggtgctgaacagcacagtggagctggcccggacctgcatcggcaccccctactacctgagccctgagatctgtgagaacaagccctacaacaacaagagtgacatctgggccctgggctgtgtgctgtatgagctgtgcaccctgaagcacgcctttgaagctggctccatgaagaacctggtgctgaagatcatcagcggcagcttcccccctgtgtccctgcactacagctatgacctgcggagcctggtgtcccagctgttcaagaggaacccccgggaccggcccagcgtgaacagcatcctggagaagggcttcatcgccaagagaattgagaagttcctgagcccccagctgattgctgaggagttctgcctgaagaccttcagcaagtttggcagccagcccatcccagccaagaggcctgccagcggccagaacagcatctctgtgatgcctgcccagaagatcaccaagccagctgccaagtatggcatccccctggcctacaagaagtacggggacaagaagctgcacgagaagaagcccctgcagaagcacaagcaggcccaccagaccccagagaagagggtgaacacaggagaggagaggaggaagatcagcgaggaggccgccaggaagaggcggctggagttcatcgagaaggagaagaagcagaaggaccagatcatcagcctgatgaaggccgagcagatgaagaggcaggagaaggagcggctggagcgcatcaacagagcccgggagcagggctggagaaatgtgctgtctgctgggggcagcggggaggtgaaggcccccttcctgggcagcggcggcaccatcgcccccagcagcttcagcagccggggccagtatgagcactaccacgccatctttgaccagatgcagcagcagagagcagaagataatgaggccaagtggaagcgggagatctacggccggggcctgcctgagcggggcatcctgcccggggtgcggcccggcttcccctatggagctgctggccaccaccacttcccagatgctgatgacatcaggaagaccctgaagaggctgaaggctgtgtccaagcaggccaatgccaaccggcagaagggccagctggccgtggagcgggccaagcaggtggaggagttcctgcagaggaagcgggaggccatgcagaacaaggcccgggcagagggccacatgggcatcctgcagaacctggccgccatgtatggaggccggcccagcagcagccggggcggcaagcccaggaacaaggaggaggaggtgtacctggcccggctgcggcagatccggctgcagaacttcaatgaaaggcagcagatcaaggccaagctgcggggggagaagaaggaggccaaccacagcgagggccaggagggcagcgaggaggccgacatgaggaggaagaagattgagagcctgaaggcccacgccaatgcccgggctgctgtgctgaaggagcagctggagaggaagaggaaggaggcctatgagcgggagaagaaggtgtgggaggagcacctggtggccaagggcgtgaagagcagtgatgtgagcccccccctgggccagcatgaaacaggaggcagccccagcaagcagcagatgaggagcgtcatctctgtgaccagcgccctgaaggaggtgggcgtggacagcagcctgacagacacccgggagaccagcgaggagatgcagaagaccaacaatgccatcagcagcaagcgggagatcctgcggcggctgaatgaaaacctgaaggcccaggaggatgagaagggcaagcagaacctgagtgacacctttgagatcaacgtgcatgaagatgccaaggagcacgagaaggagaagtctgtgtccagtgacaggaagaagtgggaggccggcggccagctggtgatccccctggatgagctgaccctggacaccagcttcagcaccacagagcggcacacagtgggggaggtgatcaagctgggccccaacggcagcccccggcgggcctggggcaagagccccacagacagcgtgctgaagatcctgggggaggccgagctgcagctgcagacagagctgctggagaacaccaccatccgctctgagatcagccctgagggggagaagtacaagcccctcatcaccggggagaagaaggtgcagtgcatcagccatgagatcaaccccagcgccatcgtggacagccctgtggagaccaagagccctgagttcagcgaggccagcccccagatgagcctgaagctggagggcaacctggaggagccagatgacctggagacagagatcctgcaggagcccagcggcaccaacaaggatgagagcctgccctgcaccatcacagatgtgtggatcagcgaggagaaggagaccaaggagacccagagcgctgaccgcatcaccatccaggagaatgaggtgtctgaagatggagtgagcagcacagtggaccagctgagtgacatccacatcgagcccggcaccaatgacagccagcacagcaaatgtgatgtggacaagtctgtgcagcctgagcccttcttccacaaggtggtgcacagcgagcacctgaacctggtgccccaggtgcagagcgtgcagtgcagccctgaggagagctttgccttccgcagccacagccacctgccccccaagaacaagaacaagaacagcctgctgattggcctgagcacaggcctgtttgatgccaacaaccccaagatgctgcggacctgcagcctgcctgacctgagcaagctgttccgcaccctgatggatgtgcccaccgtgggagatgtgcggcaggacaacctggagattgatgaaattgaagatgagaacatcaaggagggccccagcgacagtgaagatattgtgtttgaggagacagacacagacctgcaggagctgcaggcctccatggagcagctgctgcgggagcagcctggagaggagtacagcgaggaggaggagagcgtgctgaagaacagtgatgtggagcccacagccaatggaacagatgtggctgatgaagatgacaaccccagcagcgagagcgccctgaatgaggagtggcacagcgacaacagtgatggagaaattgcctctgaatgtgaatgtgacagcgtcttcaaccacctggaggagctgcggctgcacctggagcaggagatgggctttgagaagttctttgaggtgtatgagaagatcaaggccatccatgaagatgaagatgagaacatcgagatctgcagcaagatcgtgcagaacatcctgggcaatgagcaccagcacctgtatgccaagatcctgcacctggtgatggctgatggagcctaccaggaggacaatgatgaatag

SEQ ID NO: 77475 - DNA, 3861 bp, Artificial Sequence
  derived and/or modified sequence
atggagaagtacgtgcggctgcagaagatcggcgagggcagcttcgggaaagcaatcctagttaagtccacggaagatggacgccagtacgtgatcaaagaaattaatatatcacgaatgtcttcaaaagagcgagaggaatctcggagagaggtcgcagtgctggcaaatatgaaacatcctaacattgtccagtatagagaatccttcgaggagaatggttccctttacatagtgatggactactgcgaaggtggggacctgttcaaaaggattaacgcacagaagggcgtgctgttccaggaggaccaaatcctggactggttcgtgcagatttgcctggcgctgaaacatgtacatgatagaaagatcctccacagagatattaagtcccagaacattttcctgactaaggacggcaccgtccaactcggggactttgggatcgcccgggtcctcaatagtactgtggagctcgctcgaacatgcatcgggactccttattacctgagcccggaaatttgtgagaataagccatacaacaacaagagcgatatttgggccctgggatgtgtgctgtacgagttatgtacactgaagcatgctttcgaagctggcagtatgaaaaatctagtgctgaaaatcatctcaggctcctttccaccagtgagccttcactattcttatgatctccgctccttagtgtcgcagctgtttaaacggaatcctagggatcggcccagcgttaacagtatcctggaaaagggatttattgctaaacgcatcgaaaagtttctcagccctcagctgatcgcggaagaattttgtttgaagacattctcaaaatttggaagccaacccataccggcgaagcgccccgcctcaggccaaaactctatcagcgtgatgcctgcccaaaagatcaccaaaccagcagccaaatacggcattcctctggcatataagaaatacggcgacaaaaaactgcacgagaaaaaacccctgcagaagcataagcaagcccatcaaacccctgagaagagagtcaatactggcgaggaacgaagaaagatttcagaagaagctgccaggaagcggcggctggaatttatcgagaaggagaagaagcagaaggaccagattatctccctgatgaaggctgaacagatgaagagacaggaaaaagaacgattagagcgcattaaccgtgcgagagaacaggggtggcggaacgtgctttccgccggcggatcaggagaagttaaggccccgttcctcgggtcgggtggcaccatagccccttcatccttctccagccgggggcagtacgaacactatcacgccattttcgaccaaatgcagcaacagagagccgaggacaacgaggcaaagtggaagcgcgagatctatggccggggactgcctgagcgcggaattctgcccggagtccgcccaggattcccgtatggtgcagccggccatcaccacttcccagatgccgatgacatccgaaaaaccctgaagcggctgaaggctgtttctaagcaggccaatgcaaatagacagaagggccagcttgccgtcgaaagggcaaagcaggttgaggagtttttacagcggaaaagagaggcaatgcaaaataaggcgagggcagagggtcacatggggatcttgcagaacctggctgccatgtacggaggccgccccagtagctcccggggagggaaacctagaaacaaggaggaggaggtatatcttgcacgcttgaggcagattcgattacagaactttaatgaacgccagcagataaaggccaaattgagaggcgaaaagaaggaagccaatcattctgagggacaagaaggtagcgaagaggccgatatgaggcgtaaaaagatagaatctctgaaagcccatgctaacgcaagagcagccgtactgaaggaacagcttgaacgaaaacgtaaggaggcgtacgagcgggagaaaaaggtttgggaggagcatctggttgcaaagggcgtaaagtcatcggacgtttcaccgcccttgggccagcatgagacaggaggttcccccagcaaacagcagatgcgctccgtcatatctgtgacgtctgccctcaaagaggtgggtgttgattccagcctcacggatacccgtgaaacttccgaagagatgcagaaaactaacaatgccatctcatctaaacgagagattcttagacggctgaacgagaatttgaaagctcaggaggatgagaaaggtaagcagaacttaagcgatacgtttgagatcaacgtgcacgaggatgccaaggaacacgaaaaagaaaagtctgtcagcagcgaccggaagaagtgggaggccggaggacagttagttattcccctggatgagctaactctggacacttccttttccacgacggagcggcacaccgtcggtgaagtcatcaagctaggacccaatggatctccgcggcgggcctggggcaaatcacctacagatagcgtgttgaagattctgggggaggccgagctgcagttacagactgagctcctggagaacacaaccattcgctcagaaatttcgcctgaaggcgagaagtataagccacttattacaggcgaaaagaaagttcagtgcatctcacacgagataaatcccagcgcaatagtcgacagtcccgtggagaccaaaagtccagaatttagcgaggcttctccgcagatgtccctcaagctcgaggggaatttggaggaacctgatgacctggagactgagatattgcaggagccctccggtaccaataaagacgagagtctgccgtgcaccattactgacgtgtggatctctgaggagaaagagacaaaagaaacgcagtccgccgatcgtatcaccatccaggaaaacgaggtgagtgaagatggagtgagctccactgtggaccagctgtcggacatacacatcgagccggggacaaacgactctcagcacagcaagtgcgatgtagataagagcgtgcaacccgagccgttcttccacaaggtagtgcactccgagcacctgaacctcgttccccaggttcagtccgtgcagtgtagcccagaagagtctttcgcctttcgcagccactcccacttgccgccaaaaaacaaaaataagaactctctgctgattggtctctcgaccgggctttttgatgctaataatcccaagatgctgcgaacctgtagtctacccgatctaagtaagctctttagaactctgatggatgtgccaactgtgggggacgtgcgccaggataacctggagatcgatgaaattgaggatgagaacatcaaagaggggcccagcgattctgaggatattgtttttgaggagacagacactgatcttcaggagctgcaggcctcgatggagcagcttttgcgggaacagccaggcgaggaatatagcgaagaggaggaatccgtcctgaagaattccgacgttgagcccaccgccaatggaacggacgtcgcggacgaggacgacaacccgagttccgagtccgctctaaacgaggagtggcactcagataactctgatggagaaatagcctctgagtgtgaatgcgattccgtgttcaaccacctggaagagctccgtctacacctggaacaggagatgggctttgaaaagttctttgaggtttatgaaaaaataaaggccatccatgaggacgaggacgaaaacattgagatatgctctaaaatcgtgcagaacatcctcgggaatgaacaccagcatctgtacgccaaaatcctgcacctggtgatggccgatggtgcttatcaagaagacaatgatgaatag

SEQ ID NO: 77476 - DNA, 5556 bp, Artificial Sequence
  derived and/or modified sequence
gtcacacgccagcgccggtgacgcgccggccgctctcccttagtccgcattcgctccagggttttgggaccctaggttgcggagtccttaccctaccctggcctctcgagcagttgtccccataactcggaatctagagccgctgttgcgaggcaggagcacgtggcagtcaagtagcttcccagtcccgaacgccgcccgtccccaccccgccgtggccactagcaacgacctctgtgaagttggagaggcggtaacggaggcactccccctgctgcaccccgccgtttctacggggctcagaaaccagtttgtttgtttcgtcggggtagtgtcgacctgtcttacgggcgtcgcccgagacaggacggagtcaaacccgtggtatcaactgaagacgagtgtcaggatgtcattttcaaaatgcgggatggtacctctgctttattaagccccgtaggaagactgccacacctagactgatgcttattagtcatcaccgttattcctactaacgtcctgtgtcactgagttttttaaatgtctagcatatctgtaaagatgccttagaaaaagaatcatggagaagtatgttagactacagaagattggagaaggttcatttggaaaagccattcttgttaaatctacagaagatggcagacagtatgttatcaaggaaattaacatctcaagaatgtccagtaaagaaagagaagaatcaaggagagaagttgcagtattggcaaacatgaagcatccaaatattgtccagtatagagaatcatttgaagaaaatggctctctctacatagtaatggattactgtgagggaggggatctgtttaagcgaataaatgctcagaaaggcgttttgtttcaagaggatcagattttggactggtttgtacagatatgtttggccctgaaacatgtacatgatagaaaaattcttcatcgagacattaaatctcagaacatatttttaactaaagatggaacagtacaacttggagattttggaattgctagagttcttaatagtactgtagagctggctcgaacttgcatagggaccccatactacttgtcacctgaaatctgtgaaaacaaaccttacaataataaaagtgacatttgggctctggggtgtgtcctttatgagctgtgtacacttaaacatgcttttgaagctggcagtatgaaaaacctggtactgaagataatatctggatcttttccacctgtgtctttgcattattcctatgatctccgcagtttggtgtctcagttatttaaaagaaatcctagggatagaccatcagtcaactccatattggagaaaggttttatagccaaacgcattgaaaagtttctctctcctcagcttattgcagaagaattttgtctaaaaacattttcgaagtttggatcacagcctataccagctaaaagaccagcttcaggacaaaactcgatttctgttatgcctgctcagaaaattacaaagcctgccgctaaatatggaatacctttagcatataagaaatatggagataaaaaattacacgaaaagaaaccactgcaaaaacataaacaggcccatcaaactccagagaagagagtgaatactggagaagaaaggaggaaaatatctgaggaagcagcaagaaagagaaggctggaatttattgaaaaagaaaagaaacaaaaggatcagattattagtttaatgaaggctgaacaaatgaaaaggcaagaaaaggaaaggttggaaagaataaatagggccagggaacaaggatggagaaatgtgctaagtgctggtggaagtggtgaagtaaaggctccttttctgggcagtggagggactatagctccatcatctttttcttctcgaggacagtatgaacattaccatgccatttttgaccaaatgcagcaacaaagagcagaagataatgaagctaaatggaaaagagaaatatatggtcgaggtcttccagaaagaggaattctgcctggagttcgtccaggatttccttatggggctgcaggtcatcaccattttcctgatgctgatgatattagaaaaactttgaaaagattgaaggcggtgtctaaacaagccaatgcaaacaggcaaaaagggcagctagctgtagaaagagctaaacaagtagaagagttcctgcagcgaaaacgggaagctatgcagaataaagctcgagccgaaggacatatgggaatcctgcaaaacctggcagctatgtatggaggcaggcccagctcttcaagaggagggaagccaagaaacaaagaggaagaggtttatctggcaagactgaggcaaataagactacagaatttcaatgagcgccaacagattaaagccaaacttcgtggtgaaaagaaagaagctaatcattctgaaggacaagaaggaagtgaagaggctgacatgaggcgcaaaaaaatcgaatcactgaaggcccatgcaaatgcacgtgctgctgtactaaaagaacaactagaacgaaagagaaaggaggcttatgagagagaaaaaaaagtgtgggaagagcatttggtggctaaaggagttaagagttctgatgtttctccacctttgggacagcatgaaacaggtggctctccatcaaagcaacagatgagatctgttatttctgtaacttcagctttgaaagaagttggcgtggacagtagtttaactgatacccgggaaacttcagaagagatgcaaaagaccaacaatgctatttcaagtaagcgagaaatacttcgtagattaaatgaaaatcttaaagctcaagaagatgaaaaaggaaagcagaatctctctgatacttttgagataaatgttcatgaagatgccaaagagcatgaaaaagaaaaatcagtttcatctgatcgcaagaagtgggaggcaggaggtcaacttgtgattcctctggatgagttaacactagatacatccttctctacaactgaaagacatacagtgggagaagttattaaattaggtcctaatggatctccaagaagagcctgggggaaaagtccgacagattctgttctaaagatacttggagaagctgaactacaacttcagacagaactattagaaaatacaactattagaagtgagatttctcccgaaggggaaaagtacaaacccttaattactggagaaaaaaaagtacaatgtatttcacatgaaataaacccatcagctattgttgattctcctgttgagacaaaaagtcccgagttcagtgaggcatctccacagatgtcattgaaactggaaggaaatttagaagaacctgatgatttggaaacagaaattctacaagagccaagtggaacaaacaaagatgagagcttgccatgcactattactgatgtgtggattagtgaggaaaaagaaacaaaggaaactcagtcggcagataggatcaccattcaggaaaatgaagtttctgaagatggagtctcgagtactgtggaccaacttagtgacattcatatagagcctggaaccaatgattctcagcactctaaatgtgatgtagataagtctgtgcaaccggaaccatttttccataaggtggttcattctgaacacttgaacttagtccctcaagttcaatcagttcagtgttcaccagaagaatcctttgcatttcgatctcactcgcatttaccaccaaaaaataaaaacaagaattccttgctgattggactttcaactggtctgtttgatgcaaacaacccaaagatgttaaggacatgttcacttccagatctctcaaagctgttcagaacccttatggatgttcccaccgtaggagatgttcgtcaagacaatcttgaaatagatgaaattgaagatgaaaacattaaagaaggaccttctgattctgaagacattgtgtttgaagaaactgacacagatttacaagagctgcaggcctcgatggaacagttacttagggaacaacctggtgaagaatacagtgaagaagaagagtcagtcttgaagaacagtgatgtggagccaactgcaaatgggacagatgtggcagatgaagatgacaatcccagcagtgaaagtgccctgaacgaagaatggcactcagataacagtgatggtgaaattgctagtgaatgtgaatgcgatagtgtctttaaccatttagaggaactgagacttcatctggagcaggaaatgggctttgaaaaattctttgaggtttatgagaaaataaaggctattcatgaagatgaagatgaaaatattgaaatttgttcaaaaatagttcaaaatattttgggaaatgaacatcagcatctttatgccaagattcttcatttagtcatggcagatggagcctaccaagaagataatgatgaataatcctcaaaatgttttttaatcctcaactatatgaaagcatttgaatttggcttatcagaataacaagcttcagtgggaaatacagcaattatttatttaaaaaatcagatttaagatggactttcttattgcatgaaaaagatggagaaacatgccatttttcagtgaagattctaatattttatctattttgttcattgaattccatggttaaatctcataaaatatatactttattaaatcatccaaccaaagcataggaaacattgacccagaacctgacttaatggttttgaagatttactatgcaatagggtaactttgagtttcagcaaatgtctttaggttgaaggaattacctatgtcatgaaggacctgtctgtggtttttcaatggagtctttaagcatgatcttttttctgtctagtacttgttttcattctggccagcagttctacattaaatcaccttgtcaagggctctgtttacatctatacattttgaagatgaaatttttagccttaaagtttatattctcaagtccttttacaatcagtgtgtctcctgaactagcacacaggctgtagaaacagtcttagaaatcattgaaagatttgattatgaaagaatagcaaaattatatttcttgacatataaaaagttggtttaatgcctttatttctctttaaggaccagaaccaggaatactatatcgaaaaattagtctgtggatttaacactgacttagcatatagcttaaagttgctcttttggtttttaacttcctccatacataagcttcaaggacaataagatgttaaaaaggaggaaataattatttttattttgacactgtgacagttttggtaactaggatcctagggagggaaatgtttgcctgttgaacttctttctgttatgagaggatttagttaggtcattaagatgttgatcacacagcttcaatcacaatatgccaagtataacctggtttcgttagaggtgtctacagtccagatgttcttcgtaataaaagcaaagtttttgaacctctgagtccaaagcaggctggttggcataatatgtaatttgaaaaataaaatcttatcttgcag

SEQ ID NO: 77477 - DNA, 3861 bp, Artificial Sequence
  derived and/or modified sequence
atggaaaagtatgtgcggctgcagaaaatcggggagggtagtttcggaaaagcaatcctggtgaagtctacagaggacggcaggcagtatgtgataaaggagattaacatatctagaatgagttctaaagagcgggaggaatcaaggagagaggtggcggtgttagccaacatgaagcaccctaacatcgtgcagtatagggagagcttcgaagagaatgggtctttgtacatagtgatggactactgcgaaggcggagatttgtttaaaaggattaacgcccagaagggtgtgctctttcaggaagaccagatactagattggttcgtccagatatgtttagcgctaaaacatgttcacgatcggaagattctgcacagagatataaagtcccaaaacatattcctgacaaaagatggcacagtccagctgggggatttcggcatagctcgggtgctgaatagcaccgttgagctggccagaacgtgcattggcaccccatactacctatctcccgaaatttgcgaaaacaaaccctacaataacaagagtgacatctgggctctgggatgtgtcttgtatgagctctgtacattaaagcacgcttttgaggcagggtcaatgaagaacctagttctgaagataatttctggatcctttccacccgttagtctccattactcttacgacctacggtctttagtgtctcagctgttcaagaggaaccctagagacagacctagtgttaattcaatccttgagaagggctttatcgcaaaaagaatcgagaaattcctcagtccacagctcatagctgaagagttttgcctaaagacctttagtaaattcgggagtcagcccatccctgccaaaagaccggcttctggccagaacagtatatccgttatgcctgcacagaagatcactaaacccgcagccaagtatggtattcccttagcttataaaaaatacggtgacaagaagcttcacgagaagaaaccactccagaaacacaaacaggcacatcaaacccccgagaagagagtgaataccggagaggagcgccgaaaaattagcgaagaggcagcccgaaagcggcgactagaattcattgagaaggaaaagaaacaaaaagaccaaataatcagtctaatgaaggcagaacagatgaagcggcaggagaaggaaaggctggaaagaatcaatcgggctcgggagcaaggatggcggaacgtgctgtctgccggtggctcaggtgaggtgaaagctcctttccttggctctggtggtacgatcgccccaagcagctttagttctcggggacagtatgagcactatcacgcaatcttcgaccagatgcagcagcaaagagcagaagacaacgaagcaaagtggaaacgggaaatatatggcagagggctgccggagagaggaattctccccggtgtgcgacccggatttccttatggtgccgctggccaccaccattttccggatgctgatgatatcagaaaaactttaaaacgactcaaagccgttagcaagcaagcaaacgccaatcggcagaagggccagctggccgtagaacgtgcaaagcaggtggaagagttcttgcagcgcaaacgagaggccatgcaaaataaagcacgagctgagggccacatgggcattcttcaaaatctggcggctatgtatggcggtaggcctagctctagccgcggtgggaaaccgcgtaacaaggaagaagaggtgtatttggcccgactgagacagattagacttcagaatttcaacgaaagacagcaaattaaagctaagctgaggggcgaaaaaaaggaggccaaccattccgagggtcaagaggggagtgaggaggcagacatgagaagaaagaagatcgaaagcttgaaggctcacgccaacgctagggccgcagtgctgaaagagcagcttgaacgcaagagaaaagaagcctatgaacgcgagaagaaagtctgggaagaacaccttgtagcaaagggggtgaaatccagcgatgtgtccccaccgctgggccagcatgagaccgggggttccccctcgaaacagcaaatgaggagcgtgataagcgtgacatctgccctgaaggaagtgggcgtagattctagcctaacagacactcgggagacaagcgaagagatgcagaagactaacaatgccatcagcagcaaaagggagattctccggaggctgaatgagaacctcaaggcccaagaggatgagaagggtaagcagaatctctctgatacgttcgaaatcaatgtgcacgaagatgccaaggagcacgagaaagagaagtccgtgagctccgatcgtaaaaaatgggaggccggaggtcaattggtgatccctttggacgagttaaccctggacacctcatttagcactacagagcgtcataccgtgggcgaagtgattaagcttggcccaaatggatccccaaggagggcgtgggggaagtccccaacagatagcgtgctgaagattttaggtgaggcagaactccagctgcagaccgagctgctggagaatacaactatacgatctgaaatcagcccagaaggcgaaaaatataaaccactcattacgggcgagaagaaggtccagtgcataagccatgagatcaacccaagcgccatcgttgacagtcccgtggaaaccaagtcccccgaattttccgaggcgtcaccacagatgtctcttaagttggaaggaaatcttgaagaacctgatgatctagagacagagatcttgcaggaacccagcggcacaaacaaagatgagtctctgccttgcacgattacagacgtttggatatcagaagagaaagagactaaggagacccagtctgctgatcgcattacgattcaggagaacgaggtgagtgaagatggcgtgtcctccaccgttgatcagctttcggacattcacattgaaccagggaccaacgatagccaacatagtaaatgcgacgtggacaagtcagtccagccagaaccattctttcataaggtggtgcatagcgaacatttgaacctggtgcctcaagtgcagagcgtccagtgcagtccagaggaatctttcgcctttaggagtcattctcatctaccacccaagaataagaataaaaattcactgctcataggtctttctacaggactgtttgatgcaaacaaccctaagatgctgcgtacttgcagcttgcccgatttatccaaactgtttaggacgctgatggacgtgccaactgtaggggacgtgagacaagacaatttagagattgatgaaatcgaggatgagaacattaaagaaggcccaagtgattccgaagacatcgtcttcgaagagaccgatactgaccttcaggagctccaagcttccatggaacaactcctccgcgagcaacccggagaggaatactctgaggaggaggagagcgtgctcaaaaactctgatgtggaacccacagctaacggaaccgatgtcgctgacgaggacgacaacccatccagtgagagtgcattgaatgaggagtggcactctgataattcagacggcgaaattgccagtgagtgtgaatgcgacagcgtgtttaatcacctggaggaattgcgcctgcatctggagcaagaaatgggctttgagaaattcttcgaggtgtatgagaagattaaggctatccatgaggacgaagacgagaatatagagatctgcagtaagatcgtgcagaacatactgggaaacgagcaccaacacctgtacgccaaaatcctgcatctagttatggccgacggagcctatcaggaggacaatgatgaatag

SEQ ID NO: 77478 - DNA, 3861 bp, Artificial Sequence
  derived and/or modified sequence
atggagaagtacgtgagactgcagaagatcggcgagggcagcttcggcaaggccatcctggtgaagagcaccgaggacggcagacagtacgtgatcaaggagatcaacatcagcagaatgagcagcaaggagagagaggagagcagaagagaggtggccgtgctggccaacatgaagcaccccaacatcgtgcagtacagagagagcttcgaggagaacggcagcctgtacatcgtgatggactactgcgagggcggcgacctgttcaagagaatcaacgcccagaagggcgtgctgttccaggaggaccagatcctggactggttcgtgcagatctgcctggccctgaagcacgtgcacgacagaaagatcctgcacagagacatcaagagccagaacatcttcctgaccaaggacggcaccgtgcagctgggcgacttcggcatcgccagagtgctgaacagcaccgtggagctggccagaacctgcatcggcaccccctactacctgagccccgagatctgcgagaacaagccctacaacaacaagagcgacatctgggccctgggctgcgtgctgtacgagctgtgcaccctgaagcacgccttcgaggccggcagcatgaagaacctggtgctgaagatcatcagcggcagcttcccccccgtgagcctgcactacagctacgacctgagaagcctggtgagccagctgttcaagagaaaccccagagacagacccagcgtgaacagcatcctggagaagggcttcatcgccaagagaatcgagaagttcctgagcccccagctgatcgccgaggagttctgcctgaagaccttcagcaagttcggcagccagcccatccccgccaagagacccgccagcggccagaacagcatcagcgtgatgcccgcccagaagatcaccaagcccgccgccaagtacggcatccccctggcctacaagaagtacggcgacaagaagctgcacgagaagaagcccctgcagaagcacaagcaggcccaccagacccccgagaagagagtgaacaccggcgaggagagaagaaagatcagcgaggaggccgccagaaagagaagactggagttcatcgagaaggagaagaagcagaaggaccagatcatcagcctgatgaaggccgagcagatgaagagacaggagaaggagagactggagagaatcaacagagccagagagcagggctggagaaacgtgctgagcgccggcggcagcggcgaggtgaaggcccccttcctgggcagcggcggcaccatcgcccccagcagcttcagcagcagaggccagtacgagcactaccacgccatcttcgaccagatgcagcagcagagagccgaggacaacgaggccaagtggaagagagagatctacggcagaggcctgcccgagagaggcatcctgcccggcgtgagacccggcttcccctacggcgccgccggccaccaccacttccccgacgccgacgacatcagaaagaccctgaagagactgaaggccgtgagcaagcaggccaacgccaacagacagaagggccagctggccgtggagagagccaagcaggtggaggagttcctgcagagaaagagagaggccatgcagaacaaggccagagccgagggccacatgggcatcctgcagaacctggccgccatgtacggcggcagacccagcagcagcagaggcggcaagcccagaaacaaggaggaggaggtgtacctggccagactgagacagatcagactgcagaacttcaacgagagacagcagatcaaggccaagctgagaggcgagaagaaggaggccaaccacagcgagggccaggagggcagcgaggaggccgacatgagaagaaagaagatcgagagcctgaaggcccacgccaacgccagagccgccgtgctgaaggagcagctggagagaaagagaaaggaggcctacgagagagagaagaaggtgtgggaggagcacctggtggccaagggcgtgaagagcagcgacgtgagcccccccctgggccagcacgagaccggcggcagccccagcaagcagcagatgagaagcgtgatcagcgtgaccagcgccctgaaggaggtgggcgtggacagcagcctgaccgacaccagagagaccagcgaggagatgcagaagaccaacaacgccatcagcagcaagagagagatcctgagaagactgaacgagaacctgaaggcccaggaggacgagaagggcaagcagaacctgagcgacaccttcgagatcaacgtgcacgaggacgccaaggagcacgagaaggagaagagcgtgagcagcgacagaaagaagtgggaggccggcggccagctggtgatccccctggacgagctgaccctggacaccagcttcagcaccaccgagagacacaccgtgggcgaggtgatcaagctgggccccaacggcagccccagaagagcctggggcaagagccccaccgacagcgtgctgaagatcctgggcgaggccgagctgcagctgcagaccgagctgctggagaacaccaccatcagaagcgagatcagccccgagggcgagaagtacaagcccctgatcaccggcgagaagaaggtgcagtgcatcagccacgagatcaaccccagcgccatcgtggacagccccgtggagaccaagagccccgagttcagcgaggccagcccccagatgagcctgaagctggagggcaacctggaggagcccgacgacctggagaccgagatcctgcaggagcccagcggcaccaacaaggacgagagcctgccctgcaccatcaccgacgtgtggatcagcgaggagaaggagaccaaggagacccagagcgccgacagaatcaccatccaggagaacgaggtgagcgaggacggcgtgagcagcaccgtggaccagctgagcgacatccacatcgagcccggcaccaacgacagccagcacagcaagtgcgacgtggacaagagcgtgcagcccgagcccttcttccacaaggtggtgcacagcgagcacctgaacctggtgccccaggtgcagagcgtgcagtgcagccccgaggagagcttcgccttcagaagccacagccacctgccccccaagaacaagaacaagaacagcctgctgatcggcctgagcaccggcctgttcgacgccaacaaccccaagatgctgagaacctgcagcctgcccgacctgagcaagctgttcagaaccctgatggacgtgcccaccgtgggcgacgtgagacaggacaacctggagatcgacgagatcgaggacgagaacatcaaggagggccccagcgacagcgaggacatcgtgttcgaggagaccgacaccgacctgcaggagctgcaggccagcatggagcagctgctgagagagcagcccggcgaggagtacagcgaggaggaggagagcgtgctgaagaacagcgacgtggagcccaccgccaacggcaccgacgtggccgacgaggacgacaaccccagcagcgagagcgccctgaacgaggagtggcacagcgacaacagcgacggcgagatcgccagcgagtgcgagtgcgacagcgtgttcaaccacctggaggagctgagactgcacctggagcaggagatgggcttcgagaagttcttcgaggtgtacgagaagatcaaggccatccacgaggacgaggacgagaacatcgagatctgcagcaagatcgtgcagaacatcctgggcaacgagcaccagcacctgtacgccaagatcctgcacctggtgatggccgacggcgcctaccaggaggacaacgacgagtag

SEQ ID NO: 77479 - protein, 1242 aa, Artificial Sequence
  derived and/or modified sequence
MEKYVRLQKIGEGSFGKAILVKSTEDGRQYVIKEINISRMSSKEREESRREVAVLANMKHPNIVQYRESFEENGSLYIVMDYCEGGDLFKRINAQKGVLFQEDQILDWFVQICLALKHVHDRKILHRDIKSQNIFLTKDGTVQLGDFGIARVLNSTVELARTCIGTPYYLSPEICENKPYNNKSDIWALGCVLYELCTLKHAFEAGSMKNLVLKIISGSFPPVSLHYSYDLRSLVSQLFKRNPRDRPSVNSILEKGFIAKRIEKFLSPQLIAEEFCLKTFSKFGSQPIPAKRPASGQNSISVMPAQKITKPAAKYGIPLAYKKYGDKKLHEKKPLQKHKQAHQTPEKRVNTGEERRKISEEAARKRRLEFIEKEKKQKDQIISLMKAEQMKRQEKERLERINRAREQGWRNVLSAGGSGEVKAPFLGSGGTIAPSSFSSRGQYEHYHAIFDQMQQQRAEDNEAKWKREIYGRGLPERQKGQLAVERAKQVEEFLQRKREAMQNKARAEGHMGILQNLAAMYGGRPSSSRGGKPRNKEEEVYLARLRQIRLQNFNERQQIKAKLRGEKKEANHSEGQEGSEEADMRRKKIESLKAHANARAAVLKEQLERKRKEAYEREKKVWEEHLVAKGVKSSDVSPPLGQHETGGSPSKQQMRSVISVTSALKEVGVDSSLTDTRETSEEMQKTNNAISSKREILRRLNENLKAQEDEKGKQNLSDTFEINVHEDAKEHEKEKSVSSDRKKWEAGGQLVIPLDELTLDTSFSTTERHTVGEVIKLGPNGSPRRAWGKSPTDSVLKILGEAELQLQTELLENTTIRSEISPEGEKYKPLITGEKKVQCISHEINPSAIVDSPVETKSPEFSEASPQMSLKLEGNLEEPDDLETEILQEPSGTNKDESLPCTITDVWISEEKETKETQSADRITIQENEVSEDGVSSTVDQLSDIHIEPGTNDSQHSKCDVDKSVQPEPFFHKVVHSEHLNLVPQVQSVQCSPEESFAFRSHSHLPPKNKNKNSLLIGLSTGLFDANNPKMLRTCSLPDLSKLFRTLMDVPTVGDVRQDNLEIDEIEDENIKEGPSDSEDIVFEETDTDLQELQASMEQLLREQPGEEYSEEEESVLKNSDVEPTANGTDVADEDDNPSSESALNEEWHSDNSDGEIASECECDSVFNHLEELRLHLEQEMGFEKFFEVYEKIKAIHEDEDENIEICSKIVQNILGNEHQHLYAKILHLVMADGAYQEDNDE

SEQ ID NO: 77480 - DNA, 3729 bp, Artificial Sequence
  derived and/or modified sequence
atggaaaagtatgtgagacttcagaagatcggggagggctcatttggaaaggccattctggtgaagtcgactgaagatgggcgccagtacgtaatcaaagagattaacatttcgaggatgagcagcaaagagagggaggagtccaggcgggaggtggcagtcttggccaacatgaaacacccaaacatagttcaataccgagagtcattcgaagagaacggaagtctttatattgttatggattactgtgaggggggggatctgttcaaacgcattaatgctcaaaaaggagtgctatttcaggaagaccaaattctagattggtttgtgcaaatttgcctggcactcaagcacgtccatgaccgaaagatcttgcaccgggacatcaaaagtcagaatatatttttgactaaggatgggacagtccaactgggggatttcggcatcgcacgtgtgctgaactctaccgtcgagttagcccgaacatgtatcggaactccctactacctgtctcccgagatctgtgagaataaaccttacaacaataaatcagacatctgggcactcgggtgtgtattgtatgagctgtgcaccctgaaacacgcttttgaggctggttccatgaagaatttggtactcaaaatcattagcggttctttccctcccgttagtttacattactcatacgatcttcggagtcttgtgtcccagctgtttaaaaggaaccctagagacagaccatctgtgaactctattctcgaaaaggggttcatagccaagcggatcgagaaatttttaagtcctcaattaatagcggaagagttctgtctgaagacgttttcaaaatttggatcccagccaatccccgcgaagagaccagccagcggccaaaatagtatctccgtgatgcccgctcagaaaatcacgaaacctgcagctaagtatggcatccctctggcttacaagaaatacggtgataaaaagctgcacgaaaagaagcctctgcaaaaacacaaacaggcccaccagacccctgaaaagcgggtgaacaccggagaggaacgacgcaaaatcagtgaagaagccgcccggaaaagaaggctagagttcattgagaaagagaagaagcagaaagaccagataataagtctcatgaaagcagagcagatgaaaaggcaggagaaagagcgactggagaggatcaaccgggctagggagcagggatggcgcaatgttctcagcgcaggaggcagcggtgaagtcaaggcgccctttctgggcagtggagggacaatcgctccaagtagcttttcctctcgaggccagtacgagcactaccacgccatcttcgatcagatgcaacagcagcgcgccgaggataatgaagctaaatggaaaagagagatctacggccgcggcttacctgagcgccagaagggacagcttgctgtcgaacgcgcgaaacaggtcgaagagtttctgcagcgtaagagggaggcgatgcagaataaagctcgggccgaaggccatatgggaatactgcagaacctggcggcaatgtacgggggccgcccctccagctctcgggggggcaaaccacgtaacaaggaagaagaagtttatcttgcacggttaagacagatccgcttgcagaattttaacgagaggcagcagataaaggctaaattacgcggggagaagaaggaagctaaccactctgagggccaggaaggctctgaggaagctgacatgagacggaagaagatcgaatccctcaaagcgcatgcgaacgcccgggctgcagtactgaaggagcaattagagcggaagcgcaaggaggcttatgaaagggaaaaaaaagtctgggaagagcatttggtggccaaaggggtgaagtcaagcgatgtgtctccccccctgggccagcatgagacaggaggctccccaagtaagcagcaaatgcgctcagtgattagcgttactagcgccctgaaggaagtaggggtggactccagtctaacggatactagagaaacttccgaggaaatgcagaagaccaacaacgctatcagttctaagcgtgagattctgaggagattaaacgaaaacctgaaagctcaggaggatgagaaagggaagcaaaatttgtccgatacatttgaaattaacgtgcacgaggacgctaaggagcacgagaaagaaaagtcagtatcctctgaccggaaaaagtgggaggctgggggccaattagtaattcccttggacgagttaacgctggatacatcattttcgacaactgagagacataccgttggcgaggttattaagctgggtcccaacggctctccccgcagggcctggggcaaaagcccgaccgactcagtactcaaaatattgggcgaggcggagctacaattacagactgagcttttggaaaataccaccatcagatctgaaataagtccagagggtgagaagtataaacccctgatcaccggggagaaaaaggtgcagtgcatttcacacgaaatcaacccgtctgcaattgtagatagtccggtagagaccaagtcaccagagttcagcgaagcgagccctcagatgtccttaaaattggagggtaacctggaggagccagacgacttagagacggagattctgcaagaaccctccgggaccaacaaagacgaatccctgccctgtaccattacggatgtgtggatcagcgaggagaaggagacaaaggagacacaaagtgccgatagaattactattcaggagaatgaagtgtcagaggatggcgtgagtagcaccgttgatcaactgtctgatattcatatcgagcctggcacaaacgacagccagcattcgaaatgtgatgtggacaagtcagtgcagcccgagcctttttttcataaggtcgtacactccgagcatttgaacctggtgccccaggtgcaaagcgtgcagtgctcccccgaggaatcctttgccttccggtctcattctcatctgccgccaaaaaacaagaataagaattcgctcttaattgggctgtctacgggcctctttgatgccaacaatcccaagatgttaagaacatgtagcctgccagatttgtccaaactgtttcgtactttgatggatgtgcccacggtgggtgacgtacgacaagacaatctggagatcgatgaaatcgaggacgaaaacattaaggaggggccaagcgatagtgaagacattgtgttcgaggagaccgacactgaccttcaggagctgcaggctagcatggagcagctgttgagagaacagcccggtgaagagtattccgaagaggaggaatccgtcctaaaaaattctgacgtggagcctacggcgaatggaactgacgtggctgatgaggatgacaatcccagctccgagtccgcgctgaacgaagagtggcacagtgacaattctgatggagagattgcttcagagtgtgagtgtgattccgtgtttaatcatctggaagaacttcgtctccacctggagcaagaaatgggctttgaaaaatttttcgaagtgtacgaaaagatcaaagctatccacgaggatgaggacgagaacattgaaatatgcagtaagatcgtgcagaacatcctgggcaacgaacatcaacacctatatgccaaaattctgcacctcgtgatggcagatggggcctaccaggaagacaatgacgagtag

SEQ ID NO: 77481 - DNA, 3729 bp, Artificial Sequence
  derived and/or modified sequence
atggagaagtatgtgcggctgcagaagatcggggagggcagctttgggaaggccatcctggtgaagagcacagaagatggccggcagtatgtgatcaaggagatcaacatcagcaggatgagcagcaaggagcgggaggagagcagaagagaggtggccgtgctggccaacatgaagcaccccaacatcgtgcagtaccgggagagctttgaggagaatggcagcctgtacatcgtgatggactactgtgagggcggggacctcttcaagaggatcaatgcccagaagggcgtgctcttccaggaggaccagatcctggactggtttgtgcagatctgcctggccctgaagcacgtgcatgacaggaagatcctgcaccgggacatcaagagccagaacatcttcctgaccaaggatggcaccgtgcagctgggggactttggaattgcccgggtgctgaacagcacagtggagctggcccggacctgcatcggcaccccctactacctgagccctgagatctgtgagaacaagccctacaacaacaagagtgacatctgggccctgggctgtgtgctgtatgagctgtgcaccctgaagcacgcctttgaagctggctccatgaagaacctggtgctgaagatcatcagcggcagcttcccccctgtgtccctgcactacagctatgacctgcggagcctggtgtcccagctgttcaagaggaacccccgggaccggcccagcgtgaacagcatcctggagaagggcttcatcgccaagagaattgagaagttcctgagcccccagctgattgctgaggagttctgcctgaagaccttcagcaagtttggcagccagcccatcccagccaagaggcctgccagcggccagaacagcatctctgtgatgcctgcccagaagatcaccaagccagctgccaagtatggcatccccctggcctacaagaagtacggggacaagaagctgcacgagaagaagcccctgcagaagcacaagcaggcccaccagaccccagagaagagggtgaacacaggagaggagaggaggaagatcagcgaggaggccgccaggaagaggcggctggagttcatcgagaaggagaagaagcagaaggaccagatcatcagcctgatgaaggccgagcagatgaagaggcaggagaaggagcggctggagcgcatcaacagagcccgggagcagggctggagaaatgtgctgtctgctgggggcagcggggaggtgaaggcccccttcctgggcagcggcggcaccatcgcccccagcagcttcagcagccggggccagtatgagcactaccacgccatctttgaccagatgcagcagcagagagcagaagataatgaggccaagtggaagcgggagatctacggccggggcctgcctgagcggcagaagggccagctggccgtggagcgggccaagcaggtggaggagttcctgcagaggaagcgggaggccatgcagaacaaggcccgggcagagggccacatgggcatcctgcagaacctggccgccatgtatggaggccggcccagcagcagccggggcggcaagcccaggaacaaggaggaggaggtgtacctggcccggctgcggcagatccggctgcagaacttcaatgaaaggcagcagatcaaggccaagctgcggggggagaagaaggaggccaaccacagcgagggccaggagggcagcgaggaggccgacatgaggaggaagaagattgagagcctgaaggcccacgccaatgcccgggctgctgtgctgaaggagcagctggagaggaagaggaaggaggcctatgagcgggagaagaaggtgtgggaggagcacctggtggccaagggcgtgaagagcagtgatgtgagcccccccctgggccagcatgaaacaggaggcagccccagcaagcagcagatgaggagcgtcatctctgtgaccagcgccctgaaggaggtgggcgtggacagcagcctgacagacacccgggagaccagcgaggagatgcagaagaccaacaatgccatcagcagcaagcgggagatcctgcggcggctgaatgaaaacctgaaggcccaggaggatgagaagggcaagcagaacctgagtgacacctttgagatcaacgtgcatgaagatgccaaggagcacgagaaggagaagtctgtgtccagtgacaggaagaagtgggaggccggcggccagctggtgatccccctggatgagctgaccctggacaccagcttcagcaccacagagcggcacacagtgggggaggtgatcaagctgggccccaacggcagcccccggcgggcctggggcaagagccccacagacagcgtgctgaagatcctgggggaggccgagctgcagctgcagacagagctgctggagaacaccaccatccgctctgagatcagccctgagggggagaagtacaagcccctcatcaccggggagaagaaggtgcagtgcatcagccatgagatcaaccccagcgccatcgtggacagccctgtggagaccaagagccctgagttcagcgaggccagcccccagatgagcctgaagctggagggcaacctggaggagccagatgacctggagacagagatcctgcaggagcccagcggcaccaacaaggatgagagcctgccctgcaccatcacagatgtgtggatcagcgaggagaaggagaccaaggagacccagagcgctgaccgcatcaccatccaggagaatgaggtgtctgaagatggagtgagcagcacagtggaccagctgagtgacatccacatcgagcccggcaccaatgacagccagcacagcaaatgtgatgtggacaagtctgtgcagcctgagcccttcttccacaaggtggtgcacagcgagcacctgaacctggtgccccaggtgcagagcgtgcagtgcagccctgaggagagctttgccttccgcagccacagccacctgccccccaagaacaagaacaagaacagcctgctgattggcctgagcacaggcctgtttgatgccaacaaccccaagatgctgcggacctgcagcctgcctgacctgagcaagctgttccgcaccctgatggatgtgcccaccgtgggagatgtgcggcaggacaacctggagattgatgaaattgaagatgagaacatcaaggagggccccagcgacagtgaagatattgtgtttgaggagacagacacagacctgcaggagctgcaggcctccatggagcagctgctgcgggagcagcctggagaggagtacagcgaggaggaggagagcgtgctgaagaacagtgatgtggagcccacagccaatggaacagatgtggctgatgaagatgacaaccccagcagcgagagcgccctgaatgaggagtggcacagcgacaacagtgatggagaaattgcctctgaatgtgaatgtgacagcgtcttcaaccacctggaggagctgcggctgcacctggagcaggagatgggctttgagaagttctttgaggtgtatgagaagatcaaggccatccatgaagatgaagatgagaacatcgagatctgcagcaagatcgtgcagaacatcctgggcaatgagcaccagcacctgtatgccaagatcctgcacctggtgatggctgatggagcctaccaggaggacaatgatgaatag

SEQ ID NO: 77482 - DNA, 3729 bp, Artificial Sequence
  derived and/or modified sequence
atggagaagtacgtgcggctgcagaagatcggcgagggcagcttcggaaaagccatactagtgaaatccaccgaagacggtagacagtacgtgatcaaggagatcaacatcagtcggatgagctccaaagagagggaagagtctcggagggaggtcgcagtcctggccaatatgaaacatccaaacatagtgcagtatagggagtctttcgaggagaatggatctctctatattgtgatggactactgcgaaggcggtgacctctttaagcggattaacgcacaaaaaggcgtactttttcaggaggaccaaattctggattggtttgtgcagatttgtctcgcactgaaacacgtccacgaccgcaagatacttcatcgcgacatcaagagccagaatatttttcttacaaaagacggcaccgtgcagctcggggattttggcatcgccagggtgctcaacagtacggtggagctggctagaacgtgcattggcacgccttactacctctcaccggagatatgcgaaaataaaccatataataataagagcgacatttgggcgctgggttgcgtcttgtacgaactttgcacgttaaaacatgctttcgaagccggatccatgaaaaatctggtcttgaaaatcatatcgggttctttcccgcctgttagtctccattatagttacgacctcaggtccctcgtttctcagctcttcaaacggaaccctagggacagaccatccgtgaacagcatcttggagaaaggtttcatcgctaagaggattgagaagtttctgagcccccaactgatcgcagaggaattctgtctgaaaactttctctaaatttggttcgcagcctatcccagccaagaggccagcctcaggtcagaattcaatcagtgttatgccagcccagaagatcacaaagcccgcagctaagtacggcatcccactggcttataagaagtacggtgataagaaactccacgaaaagaagcccctgcagaagcacaaacaggcccatcaaacaccggagaaacgggtcaatactggtgaggagaggagaaagatctccgaggaagcggcacggaagcggcgcctcgagttcattgagaaggagaaaaagcagaaagatcagatcattagtttaatgaaggccgagcagatgaagaggcaggagaaggagagactggagaggatcaatcgggcccgggaacaggggtggcgcaacgtcctatcggcgggcgggtcaggtgaggtcaaggctcccttcttgggctccggcggcacaatcgctccctcctcattcagttcacggggccagtacgaacattatcatgcgattttcgatcagatgcaacaacagcgggccgaggacaacgaggcgaagtggaagagagagatctatggacgtgggctgcctgaacggcaaaaagggcagctagcggtagagagagcaaaacaagtggaagaattcttacagcggaagcgggaggctatgcaaaataaggccagggccgagggacacatgggaatactgcagaacttggccgcgatgtatggcggaagaccaagttccagccgcgggggaaaaccaaggaacaaagaggaagaggtatacctggctcggctgagacagattcgcctgcagaacttcaatgaacgtcagcagataaaggcaaagctgcggggggagaagaaggaagccaaccactccgaagggcaggaaggcagtgaagaggccgatatgagacgaaagaagattgagagtctcaaagcacatgctaacgcacgcgccgccgtgcttaaggaacagctggaacggaaaagaaaggaggcttacgagagggagaagaaggtctgggaagagcacctggttgcgaagggcgtcaaaagttcagatgtgagtccgccactcggccagcacgagaccgggggatcccccagcaagcaacagatgcgcagcgttatcagtgtaacaagcgcccttaaagaggttggcgttgacagctctctcaccgatactcgggaaacatcagaagaaatgcaaaagacaaataatgcaatctcctctaaacgggagatcctccgcagattgaatgaaaatcttaaagcccaggaagacgagaagggaaagcaaaatcttagtgacacatttgagattaatgtacacgaagacgctaaggagcacgaaaaggagaagagcgtgtcaagcgataggaagaagtgggaggcaggcggtcaacttgtgattccactggacgaattgactctcgatacctccttttcgacaactgaaaggcatacagtcggtgaggtaattaagctaggacctaatggttcgccccgcagagcatggggtaaaagtcctacggattccgtccttaagattctgggcgaagccgaactccagctgcagaccgagttattggagaacactaccattcgatctgagatttcgccggaaggtgagaaatataagcccctgattacaggggagaagaaggttcagtgtattagccatgaaatcaaccctagcgctattgttgactcaccagtcgagaccaagagtccagagttcagtgaggcatcacctcagatgtccctgaaactggagggcaacctagaagagcccgacgacctggagacagagatcctgcaggaaccttctgggacgaacaaggacgagagtctgccctgtaccattactgatgtgtggatctcggaggagaaagagactaaagagactcagagcgctgacaggattacaatacaggagaatgaggtctcagaggatggagtgtcatccactgtcgaccagctctctgatatccatatagagccgggaaccaacgactcacagcattctaagtgtgacgtggataaaagcgtccaaccagagccattctttcataaggtggtgcattccgagcacctgaatctggtaccccaggtgcagagcgtacagtgttccccggaggagtcctttgcattcaggtcccactcccacctcccacccaaaaataaaaacaagaattctctgctcataggcctgtcgaccggcctgtttgacgccaataatccaaagatgctgaggacctgctccctgcctgacctgagcaaactttttcggacattaatggatgtgcccactgttggcgacgtccgccaggacaatctggaaattgatgaaatcgaagatgaaaatatcaaagaaggcccctcggactcggaagatatagtatttgaagagaccgataccgacttgcaggaactgcaagcatccatggagcaactgctcagggaacagcctggggaggaatatagtgaagaagaggaaagcgttcttaagaacagtgacgtggagcctacagccaatggaacagatgtggctgacgaggacgataatccgtcctccgaatctgccctgaacgaagagtggcattctgacaattctgacggggagatcgcaagcgagtgcgaatgcgattcagtattcaaccacctggaggagctccgactgcatctcgaacaggagatggggtttgaaaagttttttgaggtctacgagaagattaaggcaatacatgaggacgaagatgagaatatcgaaatttgttcaaagatcgtccagaacatactgggcaatgagcatcaacacctatacgccaagattctgcatctggtcatggctgatggcgcttatcaggaagacaacgatgaatag

SEQ ID NO: 77483 - DNA, 5536 bp, Artificial Sequence
  derived and/or modified sequence
cacacgccagcgccggtgacgcgccggccgctctcccttagtccgcattcgctccagggttttgggaccctaggttgcggagtccttaccctaccctggcctctcgagcagttgtccccataactcggaatctagagccgctgttgcgaggcaggagcacgtggcagtcaagtagcttcccagtcccgaacgccgcccgtccccaccccgccgtggccactagcaacgacctctgtgaagttggagaggcggtaacggaggcactccccctgctgcaccccgccgtttctacggggctcagaaaccagtttgtttgtttcgtcggggtagtgtcgacctgtcttacgggcgtcgcccgagacaggacggagtcaaacccgtggtatcaactgaagacgagtgtcaggatgtcattttcaaaatgcgggatggtacctctgctttattaagccccgtaggaagactgccacacctagactgatgcttattagtcatcaccgttattcctactaacgtcctgtgtcactgagttttttaaatgtctagcatatctgtaaagatgccttagaaaaagaatcatggagaagtatgttagactacagaagattggagaaggttcatttggaaaagccattcttgttaaatctacagaagatggcagacagtatgttatcaaggaaattaacatctcaagaatgtccagtaaagaaagagaagaatcaaggagagaagttgcagtattggcaaacatgaagcatccaaatattgtccagtatagagaatcatttgaagaaaatggctctctctacatagtaatggattactgtgagggaggggatctgtttaagcgaataaatgctcagaaaggcgttttgtttcaagaggatcagattttggactggtttgtacagatatgtttggccctgaaacatgtacatgatagaaaaattcttcatcgagacattaaatctcagaacatatttttaactaaagatggaacagtacaacttggagattttggaattgctagagttcttaatagtactgtagagctggctcgaacttgcatagggaccccatactacttgtcacctgaaatctgtgaaaacaaaccttacaataataaaagtgacatttgggctctggggtgtgtcctttatgagctgtgtacacttaaacatgcttttgaagctggcagtatgaaaaacctggtactgaagataatatctggatcttttccacctgtgtctttgcattattcctatgatctccgcagtttggtgtctcagttatttaaaagaaatcctagggatagaccatcagtcaactccatattggagaaaggttttatagccaaacgcattgaaaagtttctctctcctcagcttattgcagaagaattttgtctaaaaacattttcgaagtttggatcacagcctataccagctaaaagaccagcttcaggacaaaactcgatttctgttatgcctgctcagaaaattacaaagcctgccgctaaatatggaatacctttagcatataagaaatatggagataaaaaattacacgaaaagaaaccactgcaaaaacataaacaggcccatcaaactccagagaagagagtgaatactggagaagaaaggaggaaaatatctgaggaagcagcaagaaagagaaggctggaatttattgaaaaagaaaagaaacaaaaggatcagattattagtttaatgaaggctgaacaaatgaaaaggcaagaaaaggaaaggttggaaagaataaatagggccagggaacaaggatggagaaatgtgctaagtgctggtggaagtggtgaagtaaaggctccttttctgggcagtggagggactatagctccatcatctttttcttctcgaggacagtatgaacattaccatgccatttttgaccaaatgcagcaacaaagagcagaagataatgaagctaaatggaaaagagaaatatatggtcgaggtcttccagaaaggcaaaaagggcagctagctgtagaaagagctaaacaagtagaagagttcctgcagcgaaaacgggaagctatgcagaataaagctcgagccgaaggacatatgggaatcctgcaaaacctggcagctatgtatggaggcaggcccagctcttcaagaggagggaagccaagaaacaaagaggaagaggtttatctggcaagactgaggcaaataagactacagaatttcaatgagcgccaacagattaaagccaaacttcgtggtgaaaagaaagaagctaatcattctgaaggacaagaaggaagtgaagaggctgacatgaggcgcaaaaaaatcgaatcactgaaggcccatgcaaatgcacgtgctgctgtactaaaagaacaactagaacgaaagagaaaggaggcttatgagagagaaaaaaaagtgtgggaagagcatttggtggctaaaggagttaagagttctgatgtttctccacctttgggacagcatgaaacaggtggctctccatcaaagcaacagatgagatctgttatttctgtaacttcagctttgaaagaagttggcgtggacagtagtttaactgatacccgggaaacttcagaagagatgcaaaagaccaacaatgctatttcaagtaagcgagaaatacttcgtagattaaatgaaaatcttaaagctcaagaagatgaaaaaggaaagcagaatctctctgatacttttgagataaatgttcatgaagatgccaaagagcatgaaaaagaaaaatcagtttcatctgatcgcaagaagtgggaggcaggaggtcaacttgtgattcctctggatgagttaacactagatacatccttctctacaactgaaagacatacagtgggagaagttattaaattaggtcctaatggatctccaagaagagcctgggggaaaagtccgacagattctgttctaaagatacttggagaagctgaactacaacttcagacagaactattagaaaatacaactattagaagtgagatttctcccgaaggggaaaagtacaaacccttaattactggagaaaaaaaagtacaatgtatttcacatgaaataaacccatcagctattgttgattctcctgttgagacaaaaagtcccgagttcagtgaggcatctccacagatgtcattgaaactggaaggaaatttagaagaacctgatgatttggaaacagaaattctacaagagccaagtggaacaaacaaagatgagagcttgccatgcactattactgatgtgtggattagtgaggaaaaagaaacaaaggaaactcagtcggcagataggatcaccattcaggaaaatgaagtttctgaagatggagtctcgagtactgtggaccaacttagtgacattcatatagagcctggaaccaatgattctcagcactctaaatgtgatgtagataagtctgtgcaaccggaaccatttttccataaggtggttcattctgaacacttgaacttagtccctcaagttcaatcagttcagtgttcaccagaagaatcctttgcatttcgatctcactcgcatttaccaccaaaaaataaaaacaagaattccttgctgattggactttcaactggtctgtttgatgcaaacaacccaaagatgttaaggacatgttcacttccagatctctcaaagctgttcagaacccttatggatgttcccaccgtaggagatgttcgtcaagacaatcttgaaatagatgaaattgaagatgaaaacattaaagaaggaccttctgattctgaagacattgtgtttgaagaaactgacacagatttacaagagctgcaggcctcgatggaacagttacttagggaacaacctggtgaagaatacagtgaagaagaagagtcagtcttgaagaacagtgatgtggagccaactgcaaatgggacagatgtggcagatgaagatgacaatcccagcagtgaaagtgccctgaacgaagaatggcactcagataacagtgatggtgaaattgctagtgaatgtgaatgcgatagtgtctttaaccatttagaggaactgagacttcatctggagcaggaaatgggctttgaaaaattctttgaggtttatgagaaaataaaggctattcatgaagatgaagatgaaaatattgaaatttgttcaaaaatagttcaaaatattttgggaaatgaacatcagcatctttatgccaagattcttcatttagtcatggcagatggagcctaccaagaagataatgatgaataatcctcaaaatgttttttaatcctcaactatatgaaagcatttgaatttggcttatcagaataacaagcttcagtgggaaatacagcaattatttatttaaaaaatcagatttaagatggactttcttattgcatgaaaaagatggagaaacatgccatttttcagtgaagattctaatattttatctattttgttcattgaattccatggttaaatctcataaaatatatactttattaaatcatccaaccaaagcataggaaacattgacccagaacctgacttaatggttttgaagatttactatgcaatagggtaactttgagtttcagcaaatgtctttaggttgaaggaattacctatgtcatgaaggacctgtctgtggtttttcaatggagtctttaagcatgatcttttttctgtctagtacttgttttcattctggccagcagttctacattaaatcaccttgtcaagggctctgtttacatctatacattttgaagatgaaatttttagccttaaagtttatattctcaagtccttttacaatcagtgtgtctcctgaactagcacacaggctgtagaaacagtcttagaaatcattgaaagatttgattatgaaagaatagcaaaattatatttcttgacatataaaaagttggtttaatgcctttatttctctttaaggaccagaaccaggaatactatatcgaaaaattagtctgtggatttaacactgacttagcatatagcttaaagttgctcttttggtttttaacttcctccatacataagcttcaaggacaataagatgttaaaaaggaggaaataattatttttattttgacactgtgacagttttggtaactaggatcctagggagggaaatgtttgcctgttgaacttctttctgttatgagaggatttagttaggtcattaagatgttgatcacacagcttcaatcacaatatgccaagtataacctggtttcgttagaggtgtctacagtccagatgttcttcgtaataaaagcaaagtttttgaacctctgagtccaaagcaggctggttggcataatatgtaatttgaaaaataaaatcttatcttgcagcactatcagtatgttgaatttattatgtatattatttctaatatccgaaactaaatacttgattttttaatatgtgtgtttattttatgatattgctattaaatttttattatc

SEQ ID NO: 77484 - DNA, 3729 bp, Artificial Sequence
  derived and/or modified sequence
atggaaaagtacgtgcgtctacaaaagattggagagggaagtttcggtaaagccattctggtgaagtctactgaagacggcaggcagtacgtaattaaggagattaacattagtcgaatgtcaagcaaggagcgggaagaatcccggagggaggtggcagtcctcgccaacatgaagcatcccaatatcgtccagtatcgtgaatcgttcgaagagaacggttcactctatatagtgatggattactgcgaaggcggagacctgtttaagagaattaatgcacaaaagggagtgctgtttcaggaagaccagatcctcgattggttcgtgcagatatgcttggcactgaagcacgtccacgaccgtaaaattctgcaccgagacattaagtcccagaacatttttcttacgaaagacggcactgtgcagttgggcgactttggaattgccagggtgctgaattcaacagtcgagctggcacggacctgtattggtacaccctattacttaagccccgagatttgcgaaaacaagccttacaacaacaagagtgatatatgggcgcttggctgcgtcctatacgagttgtgcacattgaagcatgcttttgaggctggcagtatgaagaacctggtgctcaagataatatcagggagttttccccctgttagcctgcactattcatacgatttgcgttcactggtcagtcagctgttcaagcgaaatccccgtgatcgcccatcagtgaatagcatcctggagaagggattcatcgccaaacgcattgaaaagtttctcagtccccaactcattgccgaggaattctgcctcaaaaccttttcaaagttcggttcccagccaatcccagccaaacgccctgcatccggccagaactctatttctgtgatgcccgcacaaaaaataacaaagccagccgctaaatacggcattcctctcgcctacaagaagtatggtgacaagaagctgcacgagaaaaagcccctccaaaagcataaacaagctcaccagaccccagaaaagagggtgaacaccggtgaagaacggcgtaaaatctctgaggaagctgcacggaagaggaggctggagtttatcgagaaggagaagaagcagaaggatcagatcattagtctaatgaaggccgagcagatgaaacgacaggaaaaagaacgacttgagcgcatcaatcgagcgagagagcagggctggcgcaatgtcttatcagctgggggatcaggcgaggtcaaggccccattcttggggtctggaggaactatcgctccttcaagttttagctcgagaggacagtatgagcattaccatgccatatttgatcaaatgcagcagcagcgggcagaagataatgaagctaagtggaagagagaaatatacggccgaggtttgccggagcggcaaaaagggcagctggcagtcgagcgggctaaacaagtcgaggaatttctgcagcgaaaaagggaagccatgcagaataaagcgagggccgagggacatatgggcatcctgcagaacttagcagcaatgtacggtgggagacctagcagttccagaggagggaaaccccgtaacaaggaggaggaggtttatctcgcccgtctgaggcagatcagactgcagaacttcaacgagcggcaacagattaaggccaaactccggggtgagaaaaaagaggcgaaccattccgagggccaagagggcagcgaagaagccgacatgagaagaaaaaaaattgaatcactcaaagcacacgccaatgctcgtgccgctgtattaaaggaacagctggagagaaaacgcaaggaggcctatgaacgcgagaaaaaggtatgggaggagcatctggtcgccaaaggtgttaagtcttctgatgtgtcgccacccttaggacaacatgaaactggtggctccccctctaagcagcaaatgcgatcagttatctcagtcacgagcgccctcaaggaggttggggttgactcttccttgaccgatacgagagaaacgagtgaagagatgcagaaaactaacaatgctatttccagcaaacgtgaaattctacgtaggttaaatgagaatctcaaagcacaggaagatgaaaaaggcaaacagaacctgtccgatactttcgagattaatgtgcatgaagacgccaaggagcatgaaaaggaaaagagcgtcagcagcgaccgcaaaaaatgggaagccggaggtcagctagtgatcccgttggacgagctgaccttggacacctctttttctaccaccgagaggcacacagtcggtgaggtgattaagctgggacctaacggcagccctagacgcgcatgggggaaaagccctactgattctgtgctcaaaatccttggcgaagctgagctgcagcttcagactgagctgctagaaaacacaacaattaggtccgagatatcgcctgaaggcgaaaaatacaagcccttaatcactggcgagaagaaggtgcaatgtatttcacacgaaattaaccccagtgccattgttgacagtcccgtagaaactaagtccccagagttttcagaggccagtccccagatgtcacttaaactggaaggcaacctagaggagcccgatgatctcgaaaccgaaattctgcaggagcctagtggaaccaacaaggatgagtcactgccttgtacaatcactgatgtatggatatcagaggaaaaagagactaaagaaacccagtcagctgatcgtatcacgatccaggaaaatgaggtgtctgaagacggagtgtcatctaccgtcgatcagctgtcagatattcacatagaaccaggtactaacgactcacagcatagcaaatgcgacgttgacaaaagtgtccagcccgaacctttttttcataaagtggtgcactcagagcaccttaacctggtgcctcaggtgcaaagcgttcagtgctcgcccgaggaaagtttcgcatttagaagccatagccacctccctcccaaaaataagaataaaaatagccttttaatagggttatctaccgggctgttcgatgcaaataatcccaaaatgctccggacttgctcccttcctgatctgagcaaattattcagaaccctgatggatgtgccgacagtgggagacgtgcggcaggacaacctcgagatcgacgagattgaggatgagaacattaaagaagggccttcggacagtgaggatatagtgttcgaggaaactgacaccgatctgcaggagctgcaagcttcaatggagcagttgctgcgtgagcagcctggtgaggagtactcagaggaggaggaaagtgttctgaaaaactccgatgttgaacccactgccaacgggactgacgtggctgatgaggatgataaccccagctctgagtccgctctcaatgaggaatggcattccgataacagcgatggtgaaatagccagcgaatgcgagtgtgatagcgtgttcaaccatctggaggagctgagacttcacttggagcaggagatgggttttgagaagtttttcgaggtgtatgagaaaattaaagctattcacgaggatgaggacgagaacatagaaatttgttccaagatcgttcagaacatcctggggaacgagcatcagcacctgtacgcgaagatcctccatctcgtgatggccgatggcgcataccaggaagacaacgatgaatag

SEQ ID NO: 77485 - DNA, 3729 bp, Artificial Sequence
  derived and/or modified sequence
atggagaagtacgtgagactgcagaagatcggcgagggcagcttcggcaaggccatcctggtgaagagcaccgaggacggcagacagtacgtgatcaaggagatcaacatcagcagaatgagcagcaaggagagagaggagagcagaagagaggtggccgtgctggccaacatgaagcaccccaacatcgtgcagtacagagagagcttcgaggagaacggcagcctgtacatcgtgatggactactgcgagggcggcgacctgttcaagagaatcaacgcccagaagggcgtgctgttccaggaggaccagatcctggactggttcgtgcagatctgcctggccctgaagcacgtgcacgacagaaagatcctgcacagagacatcaagagccagaacatcttcctgaccaaggacggcaccgtgcagctgggcgacttcggcatcgccagagtgctgaacagcaccgtggagctggccagaacctgcatcggcaccccctactacctgagccccgagatctgcgagaacaagccctacaacaacaagagcgacatctgggccctgggctgcgtgctgtacgagctgtgcaccctgaagcacgccttcgaggccggcagcatgaagaacctggtgctgaagatcatcagcggcagcttcccccccgtgagcctgcactacagctacgacctgagaagcctggtgagccagctgttcaagagaaaccccagagacagacccagcgtgaacagcatcctggagaagggcttcatcgccaagagaatcgagaagttcctgagcccccagctgatcgccgaggagttctgcctgaagaccttcagcaagttcggcagccagcccatccccgccaagagacccgccagcggccagaacagcatcagcgtgatgcccgcccagaagatcaccaagcccgccgccaagtacggcatccccctggcctacaagaagtacggcgacaagaagctgcacgagaagaagcccctgcagaagcacaagcaggcccaccagacccccgagaagagagtgaacaccggcgaggagagaagaaagatcagcgaggaggccgccagaaagagaagactggagttcatcgagaaggagaagaagcagaaggaccagatcatcagcctgatgaaggccgagcagatgaagagacaggagaaggagagactggagagaatcaacagagccagagagcagggctggagaaacgtgctgagcgccggcggcagcggcgaggtgaaggcccccttcctgggcagcggcggcaccatcgcccccagcagcttcagcagcagaggccagtacgagcactaccacgccatcttcgaccagatgcagcagcagagagccgaggacaacgaggccaagtggaagagagagatctacggcagaggcctgcccgagagacagaagggccagctggccgtggagagagccaagcaggtggaggagttcctgcagagaaagagagaggccatgcagaacaaggccagagccgagggccacatgggcatcctgcagaacctggccgccatgtacggcggcagacccagcagcagcagaggcggcaagcccagaaacaaggaggaggaggtgtacctggccagactgagacagatcagactgcagaacttcaacgagagacagcagatcaaggccaagctgagaggcgagaagaaggaggccaaccacagcgagggccaggagggcagcgaggaggccgacatgagaagaaagaagatcgagagcctgaaggcccacgccaacgccagagccgccgtgctgaaggagcagctggagagaaagagaaaggaggcctacgagagagagaagaaggtgtgggaggagcacctggtggccaagggcgtgaagagcagcgacgtgagcccccccctgggccagcacgagaccggcggcagccccagcaagcagcagatgagaagcgtgatcagcgtgaccagcgccctgaaggaggtgggcgtggacagcagcctgaccgacaccagagagaccagcgaggagatgcagaagaccaacaacgccatcagcagcaagagagagatcctgagaagactgaacgagaacctgaaggcccaggaggacgagaagggcaagcagaacctgagcgacaccttcgagatcaacgtgcacgaggacgccaaggagcacgagaaggagaagagcgtgagcagcgacagaaagaagtgggaggccggcggccagctggtgatccccctggacgagctgaccctggacaccagcttcagcaccaccgagagacacaccgtgggcgaggtgatcaagctgggccccaacggcagccccagaagagcctggggcaagagccccaccgacagcgtgctgaagatcctgggcgaggccgagctgcagctgcagaccgagctgctggagaacaccaccatcagaagcgagatcagccccgagggcgagaagtacaagcccctgatcaccggcgagaagaaggtgcagtgcatcagccacgagatcaaccccagcgccatcgtggacagccccgtggagaccaagagccccgagttcagcgaggccagcccccagatgagcctgaagctggagggcaacctggaggagcccgacgacctggagaccgagatcctgcaggagcccagcggcaccaacaaggacgagagcctgccctgcaccatcaccgacgtgtggatcagcgaggagaaggagaccaaggagacccagagcgccgacagaatcaccatccaggagaacgaggtgagcgaggacggcgtgagcagcaccgtggaccagctgagcgacatccacatcgagcccggcaccaacgacagccagcacagcaagtgcgacgtggacaagagcgtgcagcccgagcccttcttccacaaggtggtgcacagcgagcacctgaacctggtgccccaggtgcagagcgtgcagtgcagccccgaggagagcttcgccttcagaagccacagccacctgccccccaagaacaagaacaagaacagcctgctgatcggcctgagcaccggcctgttcgacgccaacaaccccaagatgctgagaacctgcagcctgcccgacctgagcaagctgttcagaaccctgatggacgtgcccaccgtgggcgacgtgagacaggacaacctggagatcgacgagatcgaggacgagaacatcaaggagggccccagcgacagcgaggacatcgtgttcgaggagaccgacaccgacctgcaggagctgcaggccagcatggagcagctgctgagagagcagcccggcgaggagtacagcgaggaggaggagagcgtgctgaagaacagcgacgtggagcccaccgccaacggcaccgacgtggccgacgaggacgacaaccccagcagcgagagcgccctgaacgaggagtggcacagcgacaacagcgacggcgagatcgccagcgagtgcgagtgcgacagcgtgttcaaccacctggaggagctgagactgcacctggagcaggagatgggcttcgagaagttcttcgaggtgtacgagaagatcaaggccatccacgaggacgaggacgagaacatcgagatctgcagcaagatcgtgcagaacatcctgggcaacgagcaccagcacctgtacgccaagatcctgcacctggtgatggccgacggcgcctaccaggaggacaacgacgagtag

SEQ ID NO: 77486 - protein, 1189 aa, Artificial Sequence
  derived and/or modified sequence
MEKYVRLQKIGEGSFGKAILVKSTEDGRQYVIKEINISRMSSKEREESRREVAVLANMKHPNIVQYRESFEENGSLYIVMDYCEGGDLFKRINAQKGVLFQEDQILDWFVQICLALKHVHDRKILHRDIKSQNIFLTKDGTVQLGDFGIARVLNSTVELARTCIGTPYYLSPEICENKPYNNKSDIWALGCVLYELCTLKHAFEAGSMKNLVLKIISGSFPPVSLHYSYDLRSLVSQLFKRNPRDRPSVNSILEKGFIAKRIEKFLSPQLIAEEFCLKTFSKFGSQPIPAKRPASGQNSISVMPAQKITKPAAKYGIPLAYKKYGDKKLHEKKPLQKHKQAHQTPEKRVNTGEERRKISEEAARKRRLEFIEKEKKQKDQIISLMKAEQMKRQEKERAPFLGSGGTIAPSSFSSRGQYEHYHAIFDQMQQQRAEDNEAKWKREIYGRGLPERQKGQLAVERAKQVEEFLQRKREAMQNKARAEGHMVYLARLRQIRLQNFNERQQIKAKLRGEKKEANHSEGQEGSEEADMRRKKIESLKAHANARAAVLKEQLERKRKEAYEREKKVWEEHLVAKGVKSSDVSPPLGQHETGGSPSKQQMRSVISVTSALKEVGVDSSLTDTRETSEEMQKTNNAISSKREILRRLNENLKAQEDEKGKQNLSDTFEINVHEDAKEHEKEKSVSSDRKKWEAGGQLVIPLDELTLDTSFSTTERHTVGEVIKLGPNGSPRRAWGKSPTDSVLKILGEAELQLQTELLENTTIRSEISPEGEKYKPLITGEKKVQCISHEINPSAIVDSPVETKSPEFSEASPQMSLKLEGNLEEPDDLETEILQEPSGTNKDESLPCTITDVWISEEKETKETQSADRITIQENEVSEDGVSSTVDQLSDIHIEPGTNDSQHSKCDVDKSVQPEPFFHKVVHSEHLNLVPQVQSVQCSPEESFAFRSHSHLPPKNKNKNSLLIGLSTGLFDANNPKMLRTCSLPDLSKLFRTLMDVPTVGDVRQDNLEIDEIEDENIKEGPSDSEDIVFEETDTDLQELQASMEQLLREQPGEEYSEEEESVLKNSDVEPTANGTDVADEDDNPSSESALNEEWHSDNSDGEIASECECDSVFNHLEELRLHLEQEMGFEKFFEVYEKIKAIHEDEDENIEICSKIVQNILGNEHQHLYAKILHLVMADGAYQEDNDE

SEQ ID NO: 77487 - DNA, 3570 bp, Artificial Sequence
  derived and/or modified sequence
atggagaagtatgtgaggctgcagaaaatcggagaaggctcgtttggcaaggccattcttgttaaatccacagaagacggcagacagtacgtcattaaggagatcaatatctcacggatgtcttccaaagagagagaagaaagtcggagggaggtggccgttctagctaatatgaaacaccctaatattgtccagtatcgagaatccttcgaggagaacggaagcctgtacatcgtgatggactattgtgagggtggcgacttgttcaaacgcataaatgcccagaagggggtgctctttcaggaggatcagatcctagactggtttgttcaaatctgtctggccctaaaacacgtacacgacagaaaaattcttcaccgcgacatcaagagtcagaacatatttctcactaaggacggaactgtccaactgggcgactttggaatcgcacgtgtcctgaattcaactgtagagttagcacgtacctgtatcggcaccccctactacttgtcccccgagatctgtgaaaataaaccttataataacaaatccgatatttgggcgctgggctgtgtattatacgaactgtgtacactcaagcacgctttcgaagccggatccatgaaaaacctcgtgctcaaaataatttctggctcattccccccggtgtccttgcactattcctacgatctacggtctctggtgtcccagctatttaaaaggaatcctcgcgacagaccctctgtgaactctattttggaaaaaggatttattgccaagcggattgagaagttcttgagtccacaattgatcgcggaagaattttgcttgaaaacattttctaagttcgggtcccagcccattcccgcaaaaaggcccgcgtcaggacagaactcaataagtgtaatgccagcgcaaaaaatcaccaagcccgccgcaaaatacggaatcccactggcttacaaaaagtacggagataagaaattgcatgagaagaaaccgttacaaaagcacaaacaggctcaccagacacccgaaaagcgcgtaaatacaggggaggaacgcaggaagatctcagaagaagcggcaaggaagcgtagactggagttcatagaaaaagagaagaagcagaaggaccagattatttccctcatgaaggctgagcagatgaagcgccaggaaaaggagcgtgctccattcctgggaagcgggggtactattgcacccagttcatttagctctcggggacagtatgaacactaccatgctatctttgaccaaatgcagcagcaacgggctgaggataatgaagccaaatggaaacgcgaaatctacgggagaggactgcctgagcgccagaagggacagttagccgtggaacgggcaaagcaagtagaagaatttcttcagagaaaaagggaggcaatgcagaacaaggccagagccgagggccacatggtatatctggcacgcttgcgccagatccgcctccaaaattttaacgaacgccagcagatcaaggccaaattgagaggagaaaaaaaagaagctaaccactctgaggggcaagagggcagcgaggaagccgacatgcgacgtaagaaaattgagtccttaaaagcccacgcgaatgctcgcgccgccgttctgaaggaacagctcgagcggaaaaggaaagaagcttacgagagggagaagaaagtgtgggaggagcaccttgttgccaaaggtgtgaagagctctgacgtgagcccacccctgggtcaacacgaaacaggcggatcaccttcaaagcagcaaatgaggtccgtcatctcagttaccagcgcattaaaagaggtgggcgtcgatagctctttgaccgacacccgcgaaacaagcgaagagatgcagaagacgaataacgcaatcagctctaaaagggaaattctgcgcagactcaacgagaatctgaaggcccaggaagatgaaaagggtaaacaaaatctgagcgatacattcgaaattaatgtccatgaagatgcaaaagagcatgaaaaggaaaaaagcgtctccagcgaccgtaagaaatgggaagccggcgggcagctcgtcattcccttggacgagctgaccctggatacatccttctccaccacagaaaggcacacggtcggagaagttatcaaactcgggcccaacggctcaccccggagggcgtggggtaagagccccacggatagcgtacttaagattctaggggaagctgagctccaactgcagacagaactcctagagaacacgactattaggagtgagataagccctgaaggagagaaatacaagcctctcataaccggagaaaagaaagtgcagtgcattagtcacgaaattaatcccagcgccatcgtcgactcaccagtggaaaccaagtctcctgaattcagcgaggctagcccgcagatgtcactgaagcttgagggaaacctagaagagccagatgatcttgagacagaaattctccaggaaccctccggtaccaataaggatgaatccttaccttgcacgatcaccgacgtatggattagtgaggagaaggagaccaaggaaactcagagtgccgatcgtatcactattcaggagaatgaagtgtccgaggacggcgtgtcatctacagtggatcagcttagtgatattcatatcgaaccaggaaccaatgattctcaacatagcaaatgcgacgttgacaaaagcgtgcagccagagccgttctttcacaaggtagtccactccgagcaccttaatctggtcccccaagtgcagtcggtgcaatgctctccagaggagtccttcgcatttaggtcccattcccacctgccccctaaaaacaaaaacaagaacagtttacttattgggttaagcaccggcctgtttgacgccaacaacccaaaaatgctccggacctgctcactgccggatctgtcgaagctgttcagaaccctaatggatgtccccaccgtgggcgacgtgcggcaggataatctggagatcgacgaaatagaggatgagaatataaaggaaggcccaagtgactccgaggatatagtcttcgaagagactgacaccgacttgcaggagctccaggcatccatggaacagctgcttcgggagcaaccaggcgaggaatattctgaagaggaggagagcgtgctcaagaactcagatgttgagcctacagccaacgggaccgacgtagctgacgaggacgacaatccctcctctgagagcgctctaaacgaagagtggcactctgataacagcgacggagagattgcctccgagtgtgagtgtgactcagtgtttaaccacctggaggagctgagactccatttggaacaggagatggggttcgagaagttcttcgaagtgtatgagaagatcaaagcgattcatgaggatgaggatgagaatatagagatatgctctaaaatcgttcagaatatcttaggaaacgaacaccaacatttgtatgccaagattttgcacctcgtgatggcagacggcgcctaccaggaggacaatgacgagtag

SEQ ID NO: 77488 - DNA, 3570 bp, Artificial Sequence
  derived and/or modified sequence
atggagaagtatgtgcggctgcagaagatcggggagggcagctttgggaaggccatcctggtgaagagcacagaagatggccggcagtatgtgatcaaggagatcaacatcagcaggatgagcagcaaggagcgggaggagagcagaagagaggtggccgtgctggccaacatgaagcaccccaacatcgtgcagtaccgggagagctttgaggagaatggcagcctgtacatcgtgatggactactgtgagggcggggacctcttcaagaggatcaatgcccagaagggcgtgctcttccaggaggaccagatcctggactggtttgtgcagatctgcctggccctgaagcacgtgcatgacaggaagatcctgcaccgggacatcaagagccagaacatcttcctgaccaaggatggcaccgtgcagctgggggactttggaattgcccgggtgctgaacagcacagtggagctggcccggacctgcatcggcaccccctactacctgagccctgagatctgtgagaacaagccctacaacaacaagagtgacatctgggccctgggctgtgtgctgtatgagctgtgcaccctgaagcacgcctttgaagctggctccatgaagaacctggtgctgaagatcatcagcggcagcttcccccctgtgtccctgcactacagctatgacctgcggagcctggtgtcccagctgttcaagaggaacccccgggaccggcccagcgtgaacagcatcctggagaagggcttcatcgccaagagaattgagaagttcctgagcccccagctgattgctgaggagttctgcctgaagaccttcagcaagtttggcagccagcccatcccagccaagaggcctgccagcggccagaacagcatctctgtgatgcctgcccagaagatcaccaagccagctgccaagtatggcatccccctggcctacaagaagtacggggacaagaagctgcacgagaagaagcccctgcagaagcacaagcaggcccaccagaccccagagaagagggtgaacacaggagaggagaggaggaagatcagcgaggaggccgccaggaagaggcggctggagttcatcgagaaggagaagaagcagaaggaccagatcatcagcctgatgaaggccgagcagatgaagaggcaggagaaggagcgggcccccttcctgggcagcggcggcaccatcgcccccagcagcttcagcagccggggccagtatgagcactaccacgccatctttgaccagatgcagcagcagagagctgaggacaatgaggccaagtggaagcgggagatctacggccggggcctgcctgagcggcagaagggccagctggccgtggagcgggccaagcaggtggaggagttcctgcagaggaagcgggaggccatgcagaacaaggcccgggcagagggccacatggtgtacctggcccggctgcggcagatccggctgcagaacttcaatgaaaggcagcagatcaaggccaagctgcggggggagaagaaggaggccaaccacagcgagggccaggagggcagcgaggaggccgacatgaggaggaagaagattgagagcctgaaggcccacgccaatgcccgggctgctgtgctgaaggagcagctggagaggaagaggaaggaggcctatgaaagagagaagaaggtgtgggaggagcacctggtggccaagggcgtgaagagcagtgatgtgtccccacccctgggccagcacgagaccggcggcagccccagcaagcagcagatgaggagcgtcatctctgtgaccagcgccctgaaggaggtgggcgtggacagcagcctgacagacacccgggagaccagcgaggagatgcagaagaccaacaatgccatcagcagcaagcgggagatcctgcggcggctgaatgaaaacctgaaggcccaggaggatgagaagggcaagcagaacctgagtgacacctttgagatcaacgtgcatgaagatgccaaggagcacgagaaggagaagtctgtgtccagtgacaggaagaagtgggaggccggcggccagctggtgatccccctggatgagctgaccctggacaccagcttcagcaccacagagcggcacacagtgggggaggtgatcaagctgggccccaacggcagcccccggcgggcctggggcaagagccccacagattctgtgctgaagatcctgggggaggccgagctgcagctgcagacagagctgctggagaacaccaccatccgctctgagatcagccctgagggggagaagtacaagcccctcatcactggagagaagaaggtgcagtgcatcagccatgagatcaaccccagcgccatcgtggacagccctgtggagaccaagagccctgagttcagcgaggccagcccccagatgagcctgaagctggagggcaacctggaggagccagatgacctggagacagagatcctgcaggagcccagcggcaccaacaaggatgagagcctgccctgcaccatcacagatgtgtggatcagcgaggagaaggagaccaaggagacccagagcgctgaccgcatcaccatccaggagaatgaggtgtctgaagatggagtgagcagcacagtggaccagctgagtgacatccacatcgagcccggcaccaatgacagccagcacagcaaatgtgatgtggacaagtctgtgcagcctgagcccttcttccacaaggtggtgcacagcgagcacctgaacctggtgccccaggtgcagagcgtgcagtgcagccctgaggagagctttgccttccgcagccacagccacctgccccccaagaacaagaacaagaacagcctgctgattggcctgagcacaggcctgtttgatgccaacaaccccaagatgctgcggacctgcagcctgcctgacctgagcaagctgttccgcaccctgatggatgtgcccaccgtgggagatgtgcggcaggacaacctggagattgatgaaattgaagatgagaacatcaaggagggccccagcgacagcgaggacatcgtgtttgaggagacagacacagacctgcaggagctgcaggcctccatggagcagctgctgcgggagcagcccggggaggagtacagcgaggaggaggagagcgtgctgaagaacagtgatgtggagcccacagccaacggcacagatgtggctgatgaagatgacaaccccagcagcgagagcgccctgaatgaggagtggcacagcgacaacagtgatggagagatcgcctctgaatgtgaatgtgacagcgtcttcaaccacctggaggagctgcggctgcacctggagcaggagatgggctttgagaagttctttgaggtgtatgagaagatcaaggccatccatgaagatgaagatgaaaatattgagatctgcagcaagatcgtgcagaacatcctgggcaatgagcaccagcacctgtatgccaagatcctgcacctggtgatggctgatggagcctaccaggaggacaatgatgaatag

SEQ ID NO: 77489 - DNA, 3570 bp, Artificial Sequence
  derived and/or modified sequence
atggagaagtacgtgcggctgcagaagatcggcgagggcagcttcggaaaagcaatcctggttaagtctacagaagatggtcgccagtacgtgatcaaagaaataaatatctctagaatgagctcaaaagagcgggaagagagcagacgcgaagtggctgtgctcgcgaatatgaaacaccctaatattgttcaatatagagagagttttgaagaaaatggctccctgtatattgtcatggactactgtgagggcggggacctattcaaacgcatcaacgcccagaaaggagtgctcttccaggaagatcagatactggattggtttgtccagatttgcctagccctaaaacatgttcacgataggaagatcctgcatagggacatcaaaagtcaaaacatcttcctcaccaaagatggcaccgtgcagctcggagacttcgggatcgctcgggtgctgaactcaacagtggagctggcccgcacctgcataggcacaccgtactatctgtcacccgagatatgcgagaataagccatataacaacaaaagtgacatttgggctttggggtgtgtgctgtacgaactgtgtacccttaagcacgccttcgaagccggtagcatgaaaaacctggtgctcaagataatttcaggctccttccccccggtctctctccattacagttacgatctgaggagtctggtcagtcaactattcaaaaggaatcctcgtgatcgaccatccgtgaactctatcctggaaaaggggtttattgcgaaaaggattgagaagttcttgtcaccacagctcatcgctgaagagttttgcctgaaaacattctctaaatttggatctcagcctatcccagctaagaggccagcctctggccaaaactccatatctgtcatgccagcgcaaaaaatcaccaaaccggccgcaaagtacgggattcctcttgcctacaaaaaatatggggataagaaactgcatgagaagaaaccgctgcaaaaacacaaacaggcacaccagaccccggaaaagagggtgaacaccggggaggaacgaagaaagatcagcgaggaggcagcccgaaagagacggctcgaattcatcgaaaaagagaagaagcagaaagaccagattattagcttaatgaaagcagaacagatgaaacgccaagaaaaagaacgcgctcctttcctcggctccgggggtaccatagccccctcctccttctccagtcgaggccagtacgaacattaccatgcgatatttgaccaaatgcagcagcagcgggccgaagataatgaggcaaagtggaaaagggaaatctatggacgtggcttgcccgaacgccagaaagggcagctggccgtagaacgggcaaagcaagttgaggaatttctccagagaaaacgtgaggccatgcaaaacaaagcacgagcggaaggccacatggtctacctggcacggttaagacagataaggctgcaaaactttaatgagcggcagcagatcaaggctaaactacgcggggagaagaaggaggccaatcattctgaggggcaggaggggtctgaggaggctgacatgagaagaaaaaagatcgagagtctgaaagctcatgctaatgcccgagccgcagtgctcaaggaacaactggaacggaagcgaaaggaagcatacgagagggagaagaaagtgtgggaggaacatctagtggctaaaggggtgaagagtagcgacgtctcccctcctttgggtcagcatgagaccggagggtctccctctaagcagcagatgcgttcggtaattagcgtcacctcagccctgaaagaagtgggcgtggattcctccctaaccgatacacgagaaacaagcgaagagatgcaaaaaaccaataacgctatcagctctaaaagagaaatccttagaaggcttaatgagaacctgaaggcacaggaagatgagaagggtaaacagaacttgtctgacactttcgaaatcaatgtccatgaagacgcaaaggaacacgagaaagaaaaaagtgttagctccgatcgaaagaagtgggaggccggagggcagctcgtgattcctctggacgaactgactctggacacgagtttcagcaccaccgaacgacacacagtaggcgaggttattaaactggggcctaacggaagccccagacgtgcatgggggaagtctcccaccgacagcgtgttgaagatcctcggtgaggccgaattacagctgcaaacagaactgttagagaacaccactatccgctctgagataagccctgagggcgagaagtataagcccctgattaccggtgaaaagaaagtacagtgtatcagtcacgagatcaatccctccgctatcgttgattctcctgttgagactaagtcaccagagttcagcgaagcgagccctcagatgtcacttaagctcgagggcaacctcgaggagcccgacgatctcgagaccgagatactgcaggagccctctggcacaaacaaagatgagtcactgccttgcaccattacagacgtctggatctccgaggagaaggagaccaaagagacacaatcggccgataggatcacgattcaggaaaatgaagtatctgaagacggggtgagttccactgtcgatcagctatcagacatccatatcgaaccagggacaaacgactctcagcacagtaagtgcgacgtagataagtccgtgcaaccagagcctttctttcacaaagtcgttcattctgagcacctgaatctggtgcctcaagtccagtcagtacagtgcagcccagaagagtcttttgcctttagaagtcatagtcatctgcccccaaagaataagaataagaattccctcctgatcggcctgagcactggcctgttcgatgccaacaacccaaaaatgttgagaacttgttcacttcctgacttatcaaaactgttccgaacgctgatggacgttcccacggtgggggatgtccgccaggacaacctcgaaatagacgagatcgaagacgaaaatattaaagaaggtccctctgactctgaagacattgtgtttgaagagactgacactgaccttcaagagttgcaggcaagtatggaacagctgttaagggaacagcccggtgaggagtattcagaggaggaggagagtgttctgaaaaactctgatgtcgagcctacggctaatggtactgatgtggctgacgaagatgacaatccctccagcgagagtgccctgaacgaggagtggcacagcgataactcagacggggagatcgccagcgagtgtgaatgcgacagcgtgtttaatcacttggaggaactacggctacacctggaacaggaaatgggattcgaaaagttctttgaagtgtacgaaaagataaaagcaatccacgaagatgaagatgagaatatagagatttgctcaaagatcgtacagaatattctcggcaatgaacatcagcacctctatgctaagatccttcacctggttatggctgacggagcctatcaggaggataatgacgagtag

SEQ ID NO: 77490 - DNA, 4430 bp, Artificial Sequence
  derived and/or modified sequence
cacacgccagcgccggtgacgcgccggccgctctcccttagtccgcattcgctccagggttttgggaccctaggttgcggagtccttaccctaccctggcctctcgagcagttgtccccataactcggaatctagagccgctgttgcgaggcaggagcacgtggcagtcaagtagcttcccagtcccgaacgccgcccgtccccaccccgccgtggccactagcaacgacctctgtgaagttggagaggcggtaacggaggcactccccctgctgcaccccgccgtttctacggggctcagaaaccagtttgtttgtttcgtcggggtagtgtcgacctgtcttacgggcgtcgcccgagacaggacggagtcaaacccgtggtatcaactgaagacgagtgtcaggatgtcattttcaaaatgcgggatggtacctctgctttattaagccccgtaggaagactgccacacctagactgatgcttattagtcatcaccgttattcctactaacgtcctgtgtcactgagttttttaaatgtctagcatatctgtaaagatgccttagaaaaagaatcatggagaagtatgttagactacagaagattggagaaggttcatttggaaaagccattcttgttaaatctacagaagatggcagacagtatgttatcaaggaaattaacatctcaagaatgtccagtaaagaaagagaagaatcaaggagagaagttgcagtattggcaaacatgaagcatccaaatattgtccagtatagagaatcatttgaagaaaatggctctctctacatagtaatggattactgtgagggaggggatctgtttaagcgaataaatgctcagaaaggcgttttgtttcaagaggatcagattttggactggtttgtacagatatgtttggccctgaaacatgtacatgatagaaaaattcttcatcgagacattaaatctcagaacatatttttaactaaagatggaacagtacaacttggagattttggaattgctagagttcttaatagtactgtagagctggctcgaacttgcatagggaccccatactacttgtcacctgaaatctgtgaaaacaaaccttacaataataaaagtgacatttgggctctggggtgtgtcctttatgagctgtgtacacttaaacatgcttttgaagctggcagtatgaaaaacctggtactgaagataatatctggatcttttccacctgtgtctttgcattattcctatgatctccgcagtttggtgtctcagttatttaaaagaaatcctagggatagaccatcagtcaactccatattggagaaaggttttatagccaaacgcattgaaaagtttctctctcctcagcttattgcagaagaattttgtctaaaaacattttcgaagtttggatcacagcctataccagctaaaagaccagcttcaggacaaaactcgatttctgttatgcctgctcagaaaattacaaagcctgccgctaaatatggaatacctttagcatataagaaatatggagataaaaaattacacgaaaagaaaccactgcaaaaacataaacaggcccatcaaactccagagaagagagtgaatactggagaagaaaggaggaaaatatctgaggaagcagcaagaaagagaaggctggaatttattgaaaaagaaaagaaacaaaaggatcagattattagtttaatgaaggctgaacaaatgaaaaggcaagaaaaggaaagggctccttttctgggcagtggagggactatagctccatcatctttttcttctcgaggacagtatgaacattaccatgccatttttgaccaaatgcagcaacaaagagcagaagataatgaagctaaatggaaaagagaaatatatggtcgaggtcttccagaaaggcaaaaagggcagctagctgtagaaagagctaaacaagtagaagagttcctgcagcgaaaacgggaagctatgcagaataaagctcgagccgaaggacatatggtttatctggcaagactgaggcaaataagactacagaatttcaatgagcgccaacagattaaagccaaacttcgtggtgaaaagaaagaagctaatcattctgaaggacaagaaggaagtgaagaggctgacatgaggcgcaaaaaaatcgaatcactgaaggcccatgcaaatgcacgtgctgctgtactaaaagaacaactagaacgaaagagaaaggaggcttatgagagagaaaaaaaagtgtgggaagagcatttggtggctaaaggagttaagagttctgatgtttctccacctttgggacagcatgaaacaggtggctctccatcaaagcaacagatgagatctgttatttctgtaacttcagctttgaaagaagttggcgtggacagtagtttaactgatacccgggaaacttcagaagagatgcaaaagaccaacaatgctatttcaagtaagcgagaaatacttcgtagattaaatgaaaatcttaaagctcaagaagatgaaaaaggaaagcagaatctctctgatacttttgagataaatgttcatgaagatgccaaagagcatgaaaaagaaaaatcagtttcatctgatcgcaagaagtgggaggcaggaggtcaacttgtgattcctctggatgagttaacactagatacatccttctctacaactgaaagacatacagtgggagaagttattaaattaggtcctaatggatctccaagaagagcctgggggaaaagtccgacagattctgttctaaagatacttggagaagctgaactacaacttcagacagaactattagaaaatacaactattagaagtgagatttctcccgaaggggaaaagtacaaacccttaattactggagaaaaaaaagtacaatgtatttcacatgaaataaacccatcagctattgttgattctcctgttgagacaaaaagtcccgagttcagtgaggcatctccacagatgtcattgaaactggaaggaaatttagaagaacctgatgatttggaaacagaaattctacaagagccaagtggaacaaacaaagatgagagcttgccatgcactattactgatgtgtggattagtgaggaaaaagaaacaaaggaaactcagtcggcagataggatcaccattcaggaaaatgaagtttctgaagatggagtctcgagtactgtggaccaacttagtgacattcatatagagcctggaaccaatgattctcagcactctaaatgtgatgtagataagtctgtgcaaccggaaccatttttccataaggtggttcattctgaacacttgaacttagtccctcaagttcaatcagttcagtgttcaccagaagaatcctttgcatttcgatctcactcgcatttaccaccaaaaaataaaaacaagaattccttgctgattggactttcaactggtctgtttgatgcaaacaacccaaagatgttaaggacatgttcacttccagatctctcaaagctgttcagaacccttatggatgttcccaccgtaggagatgttcgtcaagacaatcttgaaatagatgaaattgaagatgaaaacattaaagaaggaccttctgattctgaagacattgtgtttgaagaaactgacacagatttacaagagctgcaggcctcgatggaacagttacttagggaacaacctggtgaagaatacagtgaagaagaagagtcagtcttgaagaacagtgatgtggagccaactgcaaatgggacagatgtggcagatgaagatgacaatcccagcagtgaaagtgccctgaacgaagaatggcactcagataacagtgatggtgaaattgctagtgaatgtgaatgcgatagtgtctttaaccatttagaggaactgagacttcatctggagcaggaaatgggctttgaaaaattctttgaggtttatgagaaaataaaggctattcatgaagatgaagatgaaaatattgaaatttgttcaaaaatagttcaaaatattttgggaaatgaacatcagcatctttatgccaagattcttcatttagtcatggcagatggagcctaccaagaagataatgatgaataatcctcaaaatgttttttaatcctcaactatatgaaagcatttgaatttggcttatcagaataacaagcttcagtgggaaatacagcaattatttatttaaaaaatcagatttaagatggactttcttattgcatgaaaaagatggagaaacatgccatttttcagtgaagattctaatattttatctattttgttcattgaattccatggttaaatctcataaaatatatactttattaaatcatccaaccaaagcataggaaacattgacccagaacctga

SEQ ID NO: 77491 - DNA, 3570 bp, Artificial Sequence
  derived and/or modified sequence
atggagaagtacgtgaggctgcaaaagatcggcgaggggtcattcggtaaggcaattctcgttaagtccactgaggacggaaggcagtacgtgatcaaagagatcaatatttctagaatgtctagcaaagagcgggaggagtccagacgggaagtggccgtattagctaacatgaaacaccctaacatagtccaataccgcgagtcgttcgaggagaatggaagcttgtacatcgtgatggactactgtgaaggcggtgacctgttcaaacgcattaatgcgcagaagggagtactgttccaagaggaccagatactggattggttcgtacagatctgtctagcccttaaacacgtgcacgataggaagatcctccaccgtgacattaagtcgcagaacatattcctgacaaaggacggaactgttcagttgggcgacttcggcatagcccgtgttttaaacagtaccgtagaattggcacgaacttgtataggaaccccttattacttgtcaccagaaatatgcgagaacaaaccctacaacaataagagtgatatctgggcgctgggctgtgtgctttatgaactgtgcactttaaagcacgccttcgaggctggctcaatgaagaacctggtgctaaagattatctctgggtccttcccccctgtgtctcttcattactcatacgatctgcgctctctcgtgagccagctgttcaaacggaatcccagagataggccatcagtgaatagcatactcgagaaaggctttatcgccaagaggatcgaaaaattcctgtccccccagctcatcgctgaggaattctgcctgaagacattttctaaattcggctcacagcctatccctgccaaacgacctgcttccgggcaaaattcaatatccgtgatgcccgcacagaagatcaccaagccagctgctaagtatggaatcccactggcgtataagaagtacggcgacaaaaagctgcacgagaagaaacccctgcagaaacacaaacaagcccaccaaactcctgagaagagagtgaatactggggaagaacggagaaagatatccgaagaggccgcacggaagcgacgtctagagtttatcgagaaggagaaaaaacagaaagaccaaatcatttcccttatgaaggcagagcaaatgaaaaggcaagagaaggagagagctcctttcctgggtagtgggggaactatagccccttccagcttttcatctcgtggtcagtacgaacattatcatgccatattcgaccaaatgcagcagcagagagctgaagacaacgaggctaagtggaagcgcgaaatctatgggaggggactcccagagcggcaaaagggacaactggccgtggagcgtgccaagcaagtcgaagaatttttgcaaagaaagcgggaagctatgcaaaataaggctcgtgcagaggggcacatggtctacctggctaggctgcgccaaatccggctccagaatttcaacgagcggcagcagatcaaagccaagctgcgaggcgaaaaaaaggaggctaaccacagcgagggccaggagggcagcgaggaggccgacatgaggaggaaaaagatcgaatcactgaaggctcacgcgaatgcccgagccgctgtacttaaagagcagctggagagaaagagaaaggaagcatacgaacgtgagaaaaaggtctgggaggagcatctggtcgcgaagggagtgaaaagtagcgatgttagccctccgttagggcagcacgagacagggggatcgccatccaaacagcagatgcgttccgttatatccgttacttcagccctgaaagaggtgggagtcgacagcagtcttacagacacaagggaaacctcagaagagatgcagaagacaaacaatgccatttcctcaaagcgcgagatcctgcgacgccttaatgagaacctgaaagctcaggaagacgagaaaggaaagcaaaatctctcagatacattcgagattaacgtacacgaggatgccaaggaacacgagaaggagaaatcggtcagctcagataggaagaagtgggaggccggaggccagctggtgatcccactcgatgaattgaccctcgacacctcatttagtaccacggagaggcacacagtcggggaggtcattaagctggggccaaacggcagtccccgtagagcctggggtaaatcccctactgactctgtcttaaagattctcggtgaggccgaactccagttgcagaccgagctgctggagaacacaactattagatcagagatctcccccgaaggagagaagtacaagcccctgatcactggcgagaagaaagttcagtgtataagccacgaaataaatccttccgctattgtagattctcctgtggagacaaagtctcccgagttcagtgaggcttcaccccagatgagcctaaagctcgagggcaacctggaggagcccgacgacctggaaaccgagattctgcaggagccttcggggacgaacaaagatgagtccctgccctgtacgatcaccgacgtgtggatcagcgaagagaaagaaacaaaggaaacccagtccgccgaccgaatcaccatccaggaaaacgaggtttcagaggatggagtgagttctacagtcgatcagctgagtgacattcacatagaaccaggaacaaatgatagccagcacagcaagtgcgacgtggacaaatctgttcagcccgagcccttcttccacaaagtggttcacagcgaacacttaaacctggtaccgcaggtccagtccgttcaatgttccccagaagagagctttgctttccggagccattcccacctcccccctaaaaacaagaacaagaactctttactcatcggattatcaactgggcttttcgatgccaacaatcccaagatgctgaggacctgctccctacctgacctgtctaagctcttccggactttgatggatgttcccacagtcggggatgtgcgccaggataacctggagatagatgagatcgaagatgagaacattaaagaaggaccttccgatagcgaggacatcgtgttcgaagagaccgacactgacctgcaggagctgcaggcctctatggaacagctccttcgggaacaacctggtgaggagtatagtgaggaggaagagagcgttctcaaaaacagtgacgtggagcccacagcaaacgggactgacgtggcggatgaggacgataacccctcatccgagtctgcactgaatgaagagtggcactccgacaactcagatggtgagatcgcctccgagtgtgagtgcgattccgtctttaaccacctggaggagctgaggttacatctggaacaggaaatgggctttgagaaattctttgaggtgtacgagaagattaaggcaatccacgaagatgaagatgaaaatatcgagatttgtagtaagatcgtgcaaaatatccttggcaacgagcatcagcacctttatgcaaaaatcctgcacctagtgatggcagatggagcataccaggaggacaacgacgagtag

SEQ ID NO: 77492 - DNA, 3570 bp, Artificial Sequence
  derived and/or modified sequence
atggagaagtacgtgagactgcagaagatcggcgagggcagcttcggcaaggccatcctggtgaagagcaccgaggacggcagacagtacgtgatcaaggagatcaacatcagcagaatgagcagcaaggagagagaggagagcagaagagaggtggccgtgctggccaacatgaagcaccccaacatcgtgcagtacagagagagcttcgaggagaacggcagcctgtacatcgtgatggactactgcgagggcggcgacctgttcaagagaatcaacgcccagaagggcgtgctgttccaggaggaccagatcctggactggttcgtgcagatctgcctggccctgaagcacgtgcacgacagaaagatcctgcacagagacatcaagagccagaacatcttcctgaccaaggacggcaccgtgcagctgggcgacttcggcatcgccagagtgctgaacagcaccgtggagctggccagaacctgcatcggcaccccctactacctgagccccgagatctgcgagaacaagccctacaacaacaagagcgacatctgggccctgggctgcgtgctgtacgagctgtgcaccctgaagcacgccttcgaggccggcagcatgaagaacctggtgctgaagatcatcagcggcagcttcccccccgtgagcctgcactacagctacgacctgagaagcctggtgagccagctgttcaagagaaaccccagagacagacccagcgtgaacagcatcctggagaagggcttcatcgccaagagaatcgagaagttcctgagcccccagctgatcgccgaggagttctgcctgaagaccttcagcaagttcggcagccagcccatccccgccaagagacccgccagcggccagaacagcatcagcgtgatgcccgcccagaagatcaccaagcccgccgccaagtacggcatccccctggcctacaagaagtacggcgacaagaagctgcacgagaagaagcccctgcagaagcacaagcaggcccaccagacccccgagaagagagtgaacaccggcgaggagagaagaaagatcagcgaggaggccgccagaaagagaagactggagttcatcgagaaggagaagaagcagaaggaccagatcatcagcctgatgaaggccgagcagatgaagagacaggagaaggagagagcccccttcctgggcagcggcggcaccatcgcccccagcagcttcagcagcagaggccagtacgagcactaccacgccatcttcgaccagatgcagcagcagagagccgaggacaacgaggccaagtggaagagagagatctacggcagaggcctgcccgagagacagaagggccagctggccgtggagagagccaagcaggtggaggagttcctgcagagaaagagagaggccatgcagaacaaggccagagccgagggccacatggtgtacctggccagactgagacagatcagactgcagaacttcaacgagagacagcagatcaaggccaagctgagaggcgagaagaaggaggccaaccacagcgagggccaggagggcagcgaggaggccgacatgagaagaaagaagatcgagagcctgaaggcccacgccaacgccagagccgccgtgctgaaggagcagctggagagaaagagaaaggaggcctacgagagagagaagaaggtgtgggaggagcacctggtggccaagggcgtgaagagcagcgacgtgagcccccccctgggccagcacgagaccggcggcagccccagcaagcagcagatgagaagcgtgatcagcgtgaccagcgccctgaaggaggtgggcgtggacagcagcctgaccgacaccagagagaccagcgaggagatgcagaagaccaacaacgccatcagcagcaagagagagatcctgagaagactgaacgagaacctgaaggcccaggaggacgagaagggcaagcagaacctgagcgacaccttcgagatcaacgtgcacgaggacgccaaggagcacgagaaggagaagagcgtgagcagcgacagaaagaagtgggaggccggcggccagctggtgatccccctggacgagctgaccctggacaccagcttcagcaccaccgagagacacaccgtgggcgaggtgatcaagctgggccccaacggcagccccagaagagcctggggcaagagccccaccgacagcgtgctgaagatcctgggcgaggccgagctgcagctgcagaccgagctgctggagaacaccaccatcagaagcgagatcagccccgagggcgagaagtacaagcccctgatcaccggcgagaagaaggtgcagtgcatcagccacgagatcaaccccagcgccatcgtggacagccccgtggagaccaagagccccgagttcagcgaggccagcccccagatgagcctgaagctggagggcaacctggaggagcccgacgacctggagaccgagatcctgcaggagcccagcggcaccaacaaggacgagagcctgccctgcaccatcaccgacgtgtggatcagcgaggagaaggagaccaaggagacccagagcgccgacagaatcaccatccaggagaacgaggtgagcgaggacggcgtgagcagcaccgtggaccagctgagcgacatccacatcgagcccggcaccaacgacagccagcacagcaagtgcgacgtggacaagagcgtgcagcccgagcccttcttccacaaggtggtgcacagcgagcacctgaacctggtgccccaggtgcagagcgtgcagtgcagccccgaggagagcttcgccttcagaagccacagccacctgccccccaagaacaagaacaagaacagcctgctgatcggcctgagcaccggcctgttcgacgccaacaaccccaagatgctgagaacctgcagcctgcccgacctgagcaagctgttcagaaccctgatggacgtgcccaccgtgggcgacgtgagacaggacaacctggagatcgacgagatcgaggacgagaacatcaaggagggccccagcgacagcgaggacatcgtgttcgaggagaccgacaccgacctgcaggagctgcaggccagcatggagcagctgctgagagagcagcccggcgaggagtacagcgaggaggaggagagcgtgctgaagaacagcgacgtggagcccaccgccaacggcaccgacgtggccgacgaggacgacaaccccagcagcgagagcgccctgaacgaggagtggcacagcgacaacagcgacggcgagatcgccagcgagtgcgagtgcgacagcgtgttcaaccacctggaggagctgagactgcacctggagcaggagatgggcttcgagaagttcttcgaggtgtacgagaagatcaaggccatccacgaggacgaggacgagaacatcgagatctgcagcaagatcgtgcagaacatcctgggcaacgagcaccagcacctgtacgccaagatcctgcacctggtgatggccgacggcgcctaccaggaggacaacgacgagtag

SEQ ID NO: 77493 - protein, 1214 aa, Artificial Sequence
  derived and/or modified sequence
MEKYVRLQKIGEGSFGKAILVKSTEDGRQYVIKEINISRMSSKEREESRREVAVLANMKHPNIVQYRESFEENGSLYIVMDYCEGGDLFKRINAQKGVLFQEDQILDWFVQICLALKHVHDRKILHRDIKSQNIFLTKDGTVQLGDFGIARVLNSTVELARTCIGTPYYLSPEICENKPYNNKSDIWALGCVLYELCTLKHAFEAGSMKNLVLKIISGSFPPVSLHYSYDLRSLVSQLFKRNPRDRPSVNSILEKGFIAKRIEKFLSPQLIAEEFCLKTFSKFGSQPIPAKRPASGQNSISVMPAQKITKPAAKYGIPLAYKKYGDKKLHEKKPLQKHKQAHQTPEKRVNTGEERRKISEEAARKRRLEFIEKEKKQKDQIISLMKAEQMKRQEKERLERINRAREQGWRNVLSAGGSGEVKAPFLGSGGTIAPSSFSSRGQYEHYHAIFDQMQQQRAEDNEAKWKREIYGRGLPERQKGQLAVERAKQVEEFLQRKREAMQNKARAEGHMVYLARLRQIRLQNFNERQQIKAKLRGEKKEANHSEGQEGSEEADMRRKKIESLKAHANARAAVLKEQLERKRKEAYEREKKVWEEHLVAKGVKSSDVSPPLGQHETGGSPSKQQMRSVISVTSALKEVGVDSSLTDTRETSEEMQKTNNAISSKREILRRLNENLKAQEDEKGKQNLSDTFEINVHEDAKEHEKEKSVSSDRKKWEAGGQLVIPLDELTLDTSFSTTERHTVGEVIKLGPNGSPRRAWGKSPTDSVLKILGEAELQLQTELLENTTIRSEISPEGEKYKPLITGEKKVQCISHEINPSAIVDSPVETKSPEFSEASPQMSLKLEGNLEEPDDLETEILQEPSGTNKDESLPCTITDVWISEEKETKETQSADRITIQENEVSEDGVSSTVDQLSDIHIEPGTNDSQHSKCDVDKSVQPEPFFHKVVHSEHLNLVPQVQSVQCSPEESFAFRSHSHLPPKNKNKNSLLIGLSTGLFDANNPKMLRTCSLPDLSKLFRTLMDVPTVGDVRQDNLEIDEIEDENIKEGPSDSEDIVFEETDTDLQELQASMEQLLREQPGEEYSEEEESVLKNSDVEPTANGTDVADEDDNPSSESALNEEWHSDNSDGEIASECECDSVFNHLEELRLHLEQEMGFEKFFEVYEKIKAIHEDEDENIEICSKIVQNILGNEHQHLYAKILHLVMADGAYQEDNDE

SEQ ID NO: 77494 - DNA, 3645 bp, Artificial Sequence
  derived and/or modified sequence
atggagaaatacgtgaggctccagaagatcggggagggctcattcggtaaggcaattttggtgaagtccacagaggatggcagacaatacgtcattaaagaaatcaatattagcagaatgtccagtaaagaacgtgaagagagtcggcgggaggtggccgtcctcgccaatatgaaacacccgaatatcgtccagtatagggaaagcttcgaggagaacggcagcctgtatattgtgatggattattgcgagggaggtgacctgttcaaacgcatcaacgcccagaagggagttctctttcaggaagaccaaatcctggactggtttgtgcaaatctgcctggctctcaaacacgtgcacgatagaaagattcttcaccgcgatattaagtctcagaatatctttcttactaaagacgggactgttcaattgggcgactttgggatagcccgggtcctgaatagcacggtcgagctggcaaggacctgtatcggcaccccctattacttgagccccgagatctgcgagaataagccctacaataataagagcgatatttgggctctgggctgcgtattgtacgaactgtgtacactcaaacatgcctttgaagccggatctatgaaaaatctcgtgctgaagattattagtggaagttttcccccagttagtctccactactcttatgacctgaggtccctggtcagccagcttttcaagcgcaatcctcgggaccgccccagtgtgaatagtatcctggaaaaaggatttattgcaaaacgcattgaaaagtttctttccccgcagctgatcgcggaagagttctgcctgaaaacattttcaaagtttggctctcagccaatccccgccaagagacccgcatctggccagaactccattagcgttatgcccgcccagaagatcaccaaacctgctgccaagtacggaatccccctggcttataaaaaatatggagataaaaagctgcatgagaaaaagccgcttcaaaagcacaagcaggcccaccagacacctgagaagcgcgttaatactggagaagagagacgcaagatatccgaggaggctgcgaggaagcgtcgactcgagtttatcgaaaaggaaaagaagcagaaagatcagatcatctctctgatgaaagccgaacagatgaaacgccaggagaaggagcggctggagaggataaacagggctcgtgagcagggctggagaaacgtgttatccgctggcggctcaggggaggtgaaggccccattcctgggcagcggagggaccattgccccctcttccttctcctctcgggggcagtacgagcactatcacgctatcttcgaccaaatgcagcagcaacgtgccgaggataacgaagccaaatggaagagggagatatatggcagaggcctgccggagcggcagaaaggacagcttgcagtcgaaagggcaaagcaagtggaagaatttctgcagagaaaacgtgaagccatgcaaaataaggctagggccgaaggacacatggtctatctcgcccgactgcgacaaatacgcttgcagaattttaacgagcgacagcagattaaagccaaactgagaggagaaaaaaaggaggctaaccattccgagggccaggaggggagcgaggaggctgatatgcgtaggaaaaagatcgaatctctaaaggctcacgcaaacgcccgagcagccgtgctcaaggagcagctcgaacggaaacgcaaggaagcttatgagagagagaagaaagtgtgggaggaacacctcgtagctaaaggggtgaagtcatccgacgtgtctccacccctgggtcagcacgagacagggggtagtccatctaagcagcagatgagatctgtgattagcgtcacgtccgcactcaaggaggtcggggtggactctagcctgactgacacccgggagacatctgaggagatgcagaagaccaacaatgccatctctagcaaaagggagattctgagacgcctgaacgagaatctgaaggcacaagaggacgagaaggggaagcaaaatttatcagatacattcgagatcaacgtgcacgaagacgccaaagagcacgagaaggagaagtcagtatcgagtgacagaaagaaatgggaggccggcggccagctggtcataccacttgatgaactaactttggacaccagctttagcacgacagagcggcatacagtcggagaggtcataaagctcggccccaacgggtccccgcgtcgcgcgtggggtaagtctcctaccgactcggtcctgaagattctcggggaggccgaactgcaactgcagacggaactgctggagaataccaccataaggtcagaaatctcacccgagggagagaagtataaaccattgatcacaggggaaaagaaagtgcagtgcatctcacatgaaatcaacccctctgccatagttgacagcccggtggagacaaaaagcccagagttctctgaagctagcccgcagatgtccttaaaactagaggggaacctggaggagcccgatgacctggagaccgagatactacaggagccatctggtacaaataaagacgaatcgctgccctgtacaattactgatgtatggatctcggaagagaaagaaaccaaagagacacagtcagctgacaggattaccatccaagaaaatgaggtgtccgaagacggtgtgagcagtaccgtcgaccagctgtctgatatccatattgagccaggaacgaacgacagtcaacacagtaagtgtgatgtagataaatccgtccagcctgaacccttctttcataaagttgtccatagcgaacatctgaacctggtacctcaggtgcagtctgttcagtgcagtccagaagagtctttcgctttccgcagtcacagccatctgccacctaaaaataagaacaaaaactccctcctgatcggactgtcaacagggctattcgatgccaataatcctaagatgctgcgtacttgctctctcccagacctctcaaaacttttccgtactctgatggatgtccccaccgtcggagacgtgcgacaggataacctggagattgatgagattgaggatgaaaacatcaaggaggggcccagtgactctgaggatatagtcttcgaggagacagacaccgaccttcaagagttacaggctagtatggagcagctgctcagagaacagcctggagaggagtactccgaggaggaagaatccgtcctgaagaacagtgacgtagaacccactgcaaacggtacagatgttgctgacgaagacgacaacccatcttccgaaagtgccctcaacgaagagtggcatagtgacaactctgatggagagatcgcatctgaatgtgaatgcgactcagtgtttaatcatcttgaggagcttcgcctgcacttagaacaagaaatggggtttgaaaagttttttgaagtctacgaaaagatcaaggctatacacgaggatgaggatgaaaacatcgaaatttgcagcaaaattgtgcagaacatcctggggaatgaacaccaacatctctacgcaaaaattctccacctggtcatggccgatggagcataccaggaagacaacgatgagtag

SEQ ID NO: 77495 - DNA, 3645 bp, Artificial Sequence
  derived and/or modified sequence
atggagaagtatgtgcggctgcagaagatcggggagggcagctttgggaaggccatcctggtgaagagcacagaagatggccggcagtatgtgatcaaggagatcaacatcagcaggatgagcagcaaggagcgggaggagagcagaagagaggtggccgtgctggccaacatgaagcaccccaacatcgtgcagtaccgggagagctttgaggagaatggcagcctgtacatcgtgatggactactgtgagggcggggacctcttcaagaggatcaatgcccagaagggcgtgctcttccaggaggaccagatcctggactggtttgtgcagatctgcctggccctgaagcacgtgcatgacaggaagatcctgcaccgggacatcaagagccagaacatcttcctgaccaaggatggcaccgtgcagctgggggactttggaattgcccgggtgctgaacagcacagtggagctggcccggacctgcatcggcaccccctactacctgagccctgagatctgtgagaacaagccctacaacaacaagagtgacatctgggccctgggctgtgtgctgtatgagctgtgcaccctgaagcacgcctttgaagctggctccatgaagaacctggtgctgaagatcatcagcggcagcttcccccctgtgtccctgcactacagctatgacctgcggagcctggtgtcccagctgttcaagaggaacccccgggaccggcccagcgtgaacagcatcctggagaagggcttcatcgccaagagaattgagaagttcctgagcccccagctgattgctgaggagttctgcctgaagaccttcagcaagtttggcagccagcccatcccagccaagaggcctgccagcggccagaacagcatctctgtgatgcctgcccagaagatcaccaagccagctgccaagtatggcatccccctggcctacaagaagtacggggacaagaagctgcacgagaagaagcccctgcagaagcacaagcaggcccaccagaccccagagaagagggtgaacacaggagaggagaggaggaagatcagcgaggaggccgccaggaagaggcggctggagttcatcgagaaggagaagaagcagaaggaccagatcatcagcctgatgaaggccgagcagatgaagaggcaggagaaggagcggctggagcgcatcaacagagcccgggagcagggctggagaaatgtgctgtctgctgggggcagcggggaggtgaaggcccccttcctgggcagcggcggcaccatcgcccccagcagcttcagcagccggggccagtatgagcactaccacgccatctttgaccagatgcagcagcagagagcagaagataatgaggccaagtggaagcgggagatctacggccggggcctgcctgagcggcagaagggccagctggccgtggagcgggccaagcaggtggaggagttcctgcagaggaagcgggaggccatgcagaacaaggcccgggcagagggccacatggtgtacctggcccggctgcggcagatccggctgcagaacttcaatgaaaggcagcagatcaaggccaagctgcggggggagaagaaggaggccaaccacagcgagggccaggagggcagcgaggaggccgacatgaggaggaagaagattgagagcctgaaggcccacgccaatgcccgggctgctgtgctgaaggagcagctggagaggaagaggaaggaggcctatgagcgggagaagaaggtgtgggaggagcacctggtggccaagggcgtgaagagcagtgatgtgagcccccccctgggccagcatgaaacaggaggcagccccagcaagcagcagatgaggagcgtcatctctgtgaccagcgccctgaaggaggtgggcgtggacagcagcctgacagacacccgggagaccagcgaggagatgcagaagaccaacaatgccatcagcagcaagcgggagatcctgcggcggctgaatgaaaacctgaaggcccaggaggatgagaagggcaagcagaacctgagtgacacctttgagatcaacgtgcatgaagatgccaaggagcacgagaaggagaagtctgtgtccagtgacaggaagaagtgggaggccggcggccagctggtgatccccctggatgagctgaccctggacaccagcttcagcaccacagagcggcacacagtgggggaggtgatcaagctgggccccaacggcagcccccggcgggcctggggcaagagccccacagacagcgtgctgaagatcctgggggaggccgagctgcagctgcagacagagctgctggagaacaccaccatccgctctgagatcagccctgagggggagaagtacaagcccctcatcaccggggagaagaaggtgcagtgcatcagccatgagatcaaccccagcgccatcgtggacagccctgtggagaccaagagccctgagttcagcgaggccagcccccagatgagcctgaagctggagggcaacctggaggagccagatgacctggagacagagatcctgcaggagcccagcggcaccaacaaggatgagagcctgccctgcaccatcacagatgtgtggatcagcgaggagaaggagaccaaggagacccagagcgctgaccgcatcaccatccaggagaatgaggtgtctgaagatggagtgagcagcacagtggaccagctgagtgacatccacatcgagcccggcaccaatgacagccagcacagcaaatgtgatgtggacaagtctgtgcagcctgagcccttcttccacaaggtggtgcacagcgagcacctgaacctggtgccccaggtgcagagcgtgcagtgcagccctgaggagagctttgccttccgcagccacagccacctgccccccaagaacaagaacaagaacagcctgctgattggcctgagcacaggcctgtttgatgccaacaaccccaagatgctgcggacctgcagcctgcctgacctgagcaagctgttccgcaccctgatggatgtgcccaccgtgggagatgtgcggcaggacaacctggagattgatgaaattgaagatgagaacatcaaggagggccccagcgacagtgaagatattgtgtttgaggagacagacacagacctgcaggagctgcaggcctccatggagcagctgctgcgggagcagcctggagaggagtacagcgaggaggaggagagcgtgctgaagaacagtgatgtggagcccacagccaatggaacagatgtggctgatgaagatgacaaccccagcagcgagagcgccctgaatgaggagtggcacagcgacaacagtgatggagaaattgcctctgaatgtgaatgtgacagcgtcttcaaccacctggaggagctgcggctgcacctggagcaggagatgggctttgagaagttctttgaggtgtatgagaagatcaaggccatccatgaagatgaagatgagaacatcgagatctgcagcaagatcgtgcagaacatcctgggcaatgagcaccagcacctgtatgccaagatcctgcacctggtgatggctgatggagcctaccaggaggacaatgatgaatag

SEQ ID NO: 77496 - DNA, 3645 bp, Artificial Sequence
  derived and/or modified sequence
atggagaagtacgtgcggctgcagaagatcggcgagggcagcttcggtaaggccattctggtgaagtctacagaggacgggcggcaatatgtaatcaaagagattaatatcagccgcatgagcagcaaggagcgggaagagagccggcgggaagtggccgtgctggctaatatgaaacatcccaatatcgtgcagtacagggagagtttcgaagagaacgggagcttgtacattgtcatggactactgtgagggcggagatctctttaagcggatcaacgcccagaaaggcgtactattccaggaagatcagatcttggattggttcgttcagatttgtctggcactaaagcacgtccatgacagaaagatcctccaccgtgatatcaagtcccagaacattttcttgaccaaggacggaacggtccagttgggagattttggtatcgcaagagtgctgaattctacagttgagctggctcgcacctgcatcggcaccccctattacctgtcaccagaaatttgcgagaataagccttataacaacaaaagtgatatttgggccctcgggtgcgtgttgtatgaactgtgcaccctcaaacacgcctttgaggccgggtccatgaaaaacctggtactgaagatcatctccggaagctttccccctgtttcacttcattatagctatgatctgaggagcctagttagccaacttttcaaacgcaatcccagagatcggccaagcgtgaattctattctcgagaagggtttcattgccaagagaattgagaagttcctgtccccacaactgattgccgaagaattctgcctcaagacattcagcaaattcggctctcagccgatccccgccaagcggccggcaagtggccagaatagcatcagtgtgatgccagctcagaagatcacaaagcccgctgctaaatatggcattcccctggcttataagaagtatggggataaaaagttgcatgagaaaaagcccctgcagaaacataagcaagctcatcaaacccctgaaaaaagggttaacacaggcgaggaacggcgcaaaattagtgaagaggctgccagaaagcgacgcctggagtttattgaaaaagaaaaaaagcagaaggatcaaataatttccctaatgaaggctgagcaaatgaaaagacaagaaaaggaacgtctggagcgcataaatagggctcgcgagcagggctggcgcaatgtcctctcagcaggtggctcgggcgaagttaaggcccccttcttgggttctggaggcaccatcgctccatcctcgttctcatcgcgggggcagtacgagcattaccacgccatcttcgaccagatgcagcaacagagagctgaagataatgaagccaaatggaaacgtgagatatatggacgcggcctacctgaaagacagaagggacagttagcagtcgaaagagccaaacaggtcgaggagttcctgcagaggaagcgcgaagcaatgcagaataaggctcgagccgaaggacatatggtatatctcgctaggttgcgacagattaggcttcagaattttaacgaacgtcaacagataaaggctaaacttaggggtgagaaaaaggaggcgaatcacagcgagggccaggaaggatctgaggaggccgatatgcgccgtaaaaaaatcgaatccctcaaggcccacgcgaatgcccgcgccgctgtgctcaaggagcagctggaaagaaaaagaaaagaggcctacgaacgagagaaaaaggtctgggaggaacacctggtggccaagggggttaaatcctcagacgtgagtcccccattaggacagcacgaaaccgggggctcaccctccaaacagcagatgaggagcgttatcagtgtcacatcggctctgaaagaagtcggcgttgattcctccttgaccgatacacgcgagaccagcgaagagatgcaaaagaccaacaatgctatcagctcaaagcgcgaaattctgaggcgcctaaacgaaaacctgaaggcccaggaggatgagaaaggaaagcagaacctgagtgacaccttcgagattaatgtccacgaagacgctaaggagcacgagaaggagaaaagcgtttcaagcgacaggaagaaatgggaagccggcggacagcttgttattcccctagacgaattaactctggacacctctttctccacaaccgaacgtcataccgtgggagaagtgattaagcttgggcctaatggatccccgcggagggcttggggcaaatctcctaccgattcggtcctgaagatcctgggcgaagccgagctccagttgcagactgaactgttagaaaacaccacaatccgctctgagatctccccagaaggcgaaaagtacaaacccctcattacgggggagaagaaagtgcaatgtatttctcacgaaatcaacccctctgcaatcgtcgatagtccagttgagactaagtcacctgagttttctgaggcgtctccccaaatgagcctgaaactggaagggaatctggaagagccggacgatctcgagaccgaaattttgcaggagccctccggcaccaacaaggacgagagcctcccatgcactatcactgacgtgtggatctctgaagagaaagaaaccaaagaaacacagagcgccgacagaatcacgatccaggaaaacgaggtaagtgaggacggagtgtccagtacagtagaccagctgagcgatattcatatcgagcctggcaccaatgactctcaacatagcaagtgcgatgtcgacaaatcagtgcagccagaacccttcttccataaggtggtgcatagcgaacacttaaaccttgtgccacaggtacagtcagtgcaatgttccccagaagagtcctttgcattccggtcacacagccatcttccacctaagaataaaaacaagaattctctattaattgggctgagtacagggctattcgacgctaataaccccaaaatgttgaggacctgtagccttcctgatctgagtaagctgtttagaaccctcatggacgtcccaactgtgggagatgtgcggcaggacaatctggagatcgacgaaattgaagatgagaatatcaaagagggcccatccgatagcgaggatatagttttcgaggagacagacacagacctacaagaactgcaggctagtatggagcagctgctgcgggaacagcccggagaagagtacagtgaagaagaggagagcgtgctcaaaaactccgatgttgagccaacagctaatggtaccgacgtggcagacgaagatgacaatcccagctccgagagcgcactaaatgaagaatggcacagtgacaattctgacggcgaaatcgcctccgagtgtgaatgtgacagcgtgtttaatcatctagaggagctgagattgcacctggagcaagaaatgggcttcgagaaattttttgaagtatacgaaaagattaaagccattcacgaggatgaggatgagaacatcgagatttgttcaaaaattgtgcagaacatattgggaaacgaacaccagcacctttacgctaagatcctgcatctggtcatggcagatggagcctatcaggaggacaatgatgagtag

SEQ ID NO: 77497 - DNA, 5377 bp, Artificial Sequence
  derived and/or modified sequence
gcattcgctccagggttttgggaccctaggttgcggagtccttaccctaccctggcctctcgagcagttgtccccataactcggaatctagagccgctgttgcgaggcaggagcacgtggcagtcaagtagcttcccagtcccgaacgccgcccgtccccaccccgccgtggccactagcaacgacctctgtgaagttggagaggcggtaacggaggcactccccctgctgcaccccgccgtttctacggggctcagaaaccagtttgtttgtttcgtcggggtagtgtcgacctgtcttacgggcgtcgcccgagacaggacggagtcaaacccgtggtatcaactgaagacgagtgtcaggtgtggagagtctcagtgccccctttcagtctggactgtgagctgctgctggttagacagtcttggtttctctttcaggatgtcattttcaaaatgcgggatggtacctctgctttattaagccccgtaggaagactgccacacctagactgatgcttattagtcatcaccgttattcctactaacgtcctgtgtcactgagttttttaaatgtctagcatatctgtaaagatgccttagaaaaagaatcatggagaagtatgttagactacagaagattggagaaggttcatttggaaaagccattcttgttaaatctacagaagatggcagacagtatgttatcaaggaaattaacatctcaagaatgtccagtaaagaaagagaagaatcaaggagagaagttgcagtattggcaaacatgaagcatccaaatattgtccagtatagagaatcatttgaagaaaatggctctctctacatagtaatggattactgtgagggaggggatctgtttaagcgaataaatgctcagaaaggcgttttgtttcaagaggatcagattttggactggtttgtacagatatgtttggccctgaaacatgtacatgatagaaaaattcttcatcgagacattaaatctcagaacatatttttaactaaagatggaacagtacaacttggagattttggaattgctagagttcttaatagtactgtagagctggctcgaacttgcatagggaccccatactacttgtcacctgaaatctgtgaaaacaaaccttacaataataaaagtgacatttgggctctggggtgtgtcctttatgagctgtgtacacttaaacatgcttttgaagctggcagtatgaaaaacctggtactgaagataatatctggatcttttccacctgtgtctttgcattattcctatgatctccgcagtttggtgtctcagttatttaaaagaaatcctagggatagaccatcagtcaactccatattggagaaaggttttatagccaaacgcattgaaaagtttctctctcctcagcttattgcagaagaattttgtctaaaaacattttcgaagtttggatcacagcctataccagctaaaagaccagcttcaggacaaaactcgatttctgttatgcctgctcagaaaattacaaagcctgccgctaaatatggaatacctttagcatataagaaatatggagataaaaaattacacgaaaagaaaccactgcaaaaacataaacaggcccatcaaactccagagaagagagtgaatactggagaagaaaggaggaaaatatctgaggaagcagcaagaaagagaaggctggaatttattgaaaaagaaaagaaacaaaaggatcagattattagtttaatgaaggctgaacaaatgaaaaggcaagaaaaggaaaggttggaaagaataaatagggccagggaacaaggatggagaaatgtgctaagtgctggtggaagtggtgaagtaaaggctccttttctgggcagtggagggactatagctccatcatctttttcttctcgaggacagtatgaacattaccatgccatttttgaccaaatgcagcaacaaagagcagaagataatgaagctaaatggaaaagagaaatatatggtcgaggtcttccagaaaggcaaaaagggcagctagctgtagaaagagctaaacaagtagaagagttcctgcagcgaaaacgggaagctatgcagaataaagctcgagccgaaggacatatggtttatctggcaagactgaggcaaataagactacagaatttcaatgagcgccaacagattaaagccaaacttcgtggtgaaaagaaagaagctaatcattctgaaggacaagaaggaagtgaagaggctgacatgaggcgcaaaaaaatcgaatcactgaaggcccatgcaaatgcacgtgctgctgtactaaaagaacaactagaacgaaagagaaaggaggcttatgagagagaaaaaaaagtgtgggaagagcatttggtggctaaaggagttaagagttctgatgtttctccacctttgggacagcatgaaacaggtggctctccatcaaagcaacagatgagatctgttatttctgtaacttcagctttgaaagaagttggcgtggacagtagtttaactgatacccgggaaacttcagaagagatgcaaaagaccaacaatgctatttcaagtaagcgagaaatacttcgtagattaaatgaaaatcttaaagctcaagaagatgaaaaaggaaagcagaatctctctgatacttttgagataaatgttcatgaagatgccaaagagcatgaaaaagaaaaatcagtttcatctgatcgcaagaagtgggaggcaggaggtcaacttgtgattcctctggatgagttaacactagatacatccttctctacaactgaaagacatacagtgggagaagttattaaattaggtcctaatggatctccaagaagagcctgggggaaaagtccgacagattctgttctaaagatacttggagaagctgaactacaacttcagacagaactattagaaaatacaactattagaagtgagatttctcccgaaggggaaaagtacaaacccttaattactggagaaaaaaaagtacaatgtatttcacatgaaataaacccatcagctattgttgattctcctgttgagacaaaaagtcccgagttcagtgaggcatctccacagatgtcattgaaactggaaggaaatttagaagaacctgatgatttggaaacagaaattctacaagagccaagtggaacaaacaaagatgagagcttgccatgcactattactgatgtgtggattagtgaggaaaaagaaacaaaggaaactcagtcggcagataggatcaccattcaggaaaatgaagtttctgaagatggagtctcgagtactgtggaccaacttagtgacattcatatagagcctggaaccaatgattctcagcactctaaatgtgatgtagataagtctgtgcaaccggaaccatttttccataaggtggttcattctgaacacttgaacttagtccctcaagttcaatcagttcagtgttcaccagaagaatcctttgcatttcgatctcactcgcatttaccaccaaaaaataaaaacaagaattccttgctgattggactttcaactggtctgtttgatgcaaacaacccaaagatgttaaggacatgttcacttccagatctctcaaagctgttcagaacccttatggatgttcccaccgtaggagatgttcgtcaagacaatcttgaaatagatgaaattgaagatgaaaacattaaagaaggaccttctgattctgaagacattgtgtttgaagaaactgacacagatttacaagagctgcaggcctcgatggaacagttacttagggaacaacctggtgaagaatacagtgaagaagaagagtcagtcttgaagaacagtgatgtggagccaactgcaaatgggacagatgtggcagatgaagatgacaatcccagcagtgaaagtgccctgaacgaagaatggcactcagataacagtgatggtgaaattgctagtgaatgtgaatgcgatagtgtctttaaccatttagaggaactgagacttcatctggagcaggaaatgggctttgaaaaattctttgaggtttatgagaaaataaaggctattcatgaagatgaagatgaaaatattgaaatttgttcaaaaatagttcaaaatattttgggaaatgaacatcagcatctttatgccaagattcttcatttagtcatggcagatggagcctaccaagaagataatgatgaataatcctcaaaatgttttttaatcctcaactatatgaaagcatttgaatttggcttatcagaataacaagcttcagtgggaaatacagcaattatttatttaaaaaatcagatttaagatggactttcttattgcatgaaaaagatggagaaacatgccatttttcagtgaagattctaatattttatctattttgttcattgaattccatggttaaatctcataaaatatatactttattaaatcatccaaccaaagcataggaaacattgacccagaacctgacttaatggttttgaagatttactatgcaatagggtaactttgagtttcagcaaatgtctttaggttgaaggaattacctatgtcatgaaggacctgtctgtggtttttcaatggagtctttaagcatgatcttttttctgtctagtacttgttttcattctggccagcagttctacattaaatcaccttgtcaagggctctgtttacatctatacattttgaagatgaaatttttagccttaaagtttatattctcaagtccttttacaatcagtgtgtctcctgaactagcacacaggctgtagaaacagtcttagaaatcattgaaagatttgattatgaaagaatagcaaaattatatttcttgacatataaaaagttggtttaatgcctttatttctctttaaggaccagaaccaggaatactatatcgaaaaattagtctgtggatttaacactgacttagcatatagcttaaagttgctcttttggtttttaacttcctccatacataagcttcaaggacaataagatgttaaaaaggaggaaataattatttttattttgacactgtgacagttttggtaactaggatcctagggagggaaatgtttgcctgttgaacttctttctgttatgagaggatttagttaggtcattaagatgttgatcacacagcttcaatcacaatatgccaagtataacctggtttcgttagaggtgtctacagtccagatgttcttcgtaataaaagcaaagtttttgaacctctgagtccaaagcaggctggttggcataatatgtaatttgaaaaataaaatcttatcttgcagcacta

SEQ ID NO: 77498 - DNA, 3645 bp, Artificial Sequence
  derived and/or modified sequence
atggaaaagtatgtcagactgcagaaaataggcgagggatccttcgggaaagcaattctggtaaagagtaccgaggatgggaggcaatatgtgattaaggagattaacatttctagaatgtctagtaaggagcgagaggaaagtcggagggaggttgccgtgctggccaacatgaagcatcccaatatcgtccagtacagggaatcgttcgaagaaaacggatctctgtacatagtgatggattactgcgaaggtggcgaccttttcaaaagaatcaacgctcagaagggcgtgctgttccaggaggaccagatacttgattggttcgtccagatttgcctcgcgctgaagcacgtgcacgaccggaaaatactccacagggatattaagagtcagaatatctttctgaccaaagatggaaccgttcagctgggagatttcggcatcgcccgtgtgctgaactcaacggtagagttggccaggacctgtattgggaccccgtactacttgagccctgaaatctgtgagaataagccctataataataagtcggatatttgggcattaggatgcgtcttatacgaactgtgtacccttaaacatgccttcgaggcaggctctatgaaaaatcttgtgttgaaaattatatcggggagcttccctcccgtgtctttacattactcctacgatctgaggagcctggtgtctcagctgtttaaacgaaatcccagagatagaccaagtgtcaattcaattctagagaagggatttattgctaaacgcatcgaaaaattcctctctcctcagctcattgcagaggagttttgcctcaaaacatttagcaagttcggatcacagcctattcctgccaaacgtcctgcctcgggccagaacagtattagtgtgatgccggcacagaagatcaccaagcccgcagcaaagtacgggatcccccttgcttacaaaaagtacggcgacaaaaaactgcatgagaagaaacccctacagaagcataagcaggctcatcaaacccctgaaaaacgggtgaataccggcgaggaaaggcgcaagatttctgaggaggctgccaggaagaggcgcttggagtttattgagaaagagaaaaaacagaaggatcagatcatcagccttatgaaagctgagcaaatgaagagacaagaaaaagaacgcttagagcggatcaaccgggctcgagaacaggggtggcgaaatgtcctaagtgctggtggcagtggcgaagtcaaagcccctttcctcgggtccggcggaaccatcgctccaagttcattttcttctaggggtcaatatgagcattaccacgctatattcgaccagatgcagcagcaacgggcagaagacaacgaggccaagtggaaacgagaaatttacgggagaggtctgccggagcggcaaaagggccagttggccgtggagagagccaagcaggtcgaggaatttctccaaaggaagagagaggcgatgcagaataaagcaagggccgagggtcacatggtgtatttggccagacttcggcagatccgcttgcagaattttaatgaacggcagcagatcaaggccaaattgcggggagaaaagaaagaggccaatcacagcgagggccaggaaggatctgaggaagcagatatgcgcaggaaaaagatcgaatctctgaaggcccatgccaatgccagggcagccgtgttgaaagagcagctggagcgcaagcggaaagaggcctatgaaagggagaagaaagtgtgggaagaacatctcgttgccaagggagtgaagtcctccgacgtttctccacctctaggacagcacgagaccggaggttccccctcaaagcagcagatgagatccgtgattagcgtgacttctgcgctgaaagaggtgggggtcgactctagtctcactgacacacgggagacaagcgaagaaatgcaaaagactaacaacgccatttctagcaagagggagatactacgacgtctgaacgagaacctaaaggcccaggaggatgaaaagggcaagcaaaacctctcagacacatttgagatcaacgtccatgaagatgcaaaggaacatgaaaaagagaaaagtgtgtccagcgaccgtaaaaaatgggaagcaggcggtcagctggtcattcccctagacgagctgacactggacacatccttctccactactgagagacacaccgtaggcgaagtgataaaacttggccctaacggaagtccaaggcgggcttgggggaagagcccgaccgactcagtcctcaaaattctaggggaggccgaacttcagttgcagaccgaactgctggagaataccacgataaggtcagaaatctcccccgagggcgagaagtacaagcctcttatcactggagaaaagaaggtgcagtgcatatcacacgagattaacccctccgcaattgtggactcgccagtggagaccaaatcacctgaattttcagaggcttctcctcaaatgtccctcaaactggaggggaacctggaagaaccagacgacctcgagacggagatacttcaggagcccagcgggaccaacaaggatgagtctctcccctgtaccattaccgacgtgtggatttccgaggagaaggaaacaaaagagactcagtccgctgaccgcatcaccatccaagaaaatgaagttagcgaagatggggtgagcagtacagtggaccagctgagcgacatacatatcgaaccagggaccaacgactcccagcattccaaatgtgacgtcgacaagtctgtgcagcctgagccgtttttccacaaggtggtgcactcagagcatctcaacctggtcccgcaagtccagagcgtacagtgctcgcctgaggaaagcttcgcattccgtagccattctcatctcccacccaagaataaaaataagaatagcctactaattggcctctcaactgggttgttcgatgcaaacaacccgaagatgttgcgtacctgttccctccctgacctatctaagctctttcgaactctcatggatgtacctacggttggtgacgtcaggcaggataacctggagatcgacgaaatagaagatgaaaacataaaggaaggccctagcgacagcgaggatatcgtctttgaggaaacagacactgacctccaagaactacaggcctcaatggagcagctgttgcgggaacagcccggagaggagtactctgaggaggaggagagcgtactgaagaattcagacgtggagccaactgccaatgggaccgatgtggcagatgaggacgacaatcccagctctgaatctgcacttaacgaagagtggcattctgacaattccgacggcgagatagccagcgaatgtgagtgtgattctgtgtttaaccacctggaggagctgaggctgcaccttgaacaggaaatgggttttgaaaaatttttcgaagtgtatgaaaaaatcaaggccatccacgaggacgaagatgagaacatcgaaatctgttcgaagatcgttcagaacatactgggaaacgaacaccagcacctttatgccaagattctgcatttagtgatggccgacggtgcataccaggaggataatgatgaatag

SEQ ID NO: 77499 - DNA, 3645 bp, Artificial Sequence
  derived and/or modified sequence
atggagaagtacgtgagactgcagaagatcggcgagggcagcttcggcaaggccatcctggtgaagagcaccgaggacggcagacagtacgtgatcaaggagatcaacatcagcagaatgagcagcaaggagagagaggagagcagaagagaggtggccgtgctggccaacatgaagcaccccaacatcgtgcagtacagagagagcttcgaggagaacggcagcctgtacatcgtgatggactactgcgagggcggcgacctgttcaagagaatcaacgcccagaagggcgtgctgttccaggaggaccagatcctggactggttcgtgcagatctgcctggccctgaagcacgtgcacgacagaaagatcctgcacagagacatcaagagccagaacatcttcctgaccaaggacggcaccgtgcagctgggcgacttcggcatcgccagagtgctgaacagcaccgtggagctggccagaacctgcatcggcaccccctactacctgagccccgagatctgcgagaacaagccctacaacaacaagagcgacatctgggccctgggctgcgtgctgtacgagctgtgcaccctgaagcacgccttcgaggccggcagcatgaagaacctggtgctgaagatcatcagcggcagcttcccccccgtgagcctgcactacagctacgacctgagaagcctggtgagccagctgttcaagagaaaccccagagacagacccagcgtgaacagcatcctggagaagggcttcatcgccaagagaatcgagaagttcctgagcccccagctgatcgccgaggagttctgcctgaagaccttcagcaagttcggcagccagcccatccccgccaagagacccgccagcggccagaacagcatcagcgtgatgcccgcccagaagatcaccaagcccgccgccaagtacggcatccccctggcctacaagaagtacggcgacaagaagctgcacgagaagaagcccctgcagaagcacaagcaggcccaccagacccccgagaagagagtgaacaccggcgaggagagaagaaagatcagcgaggaggccgccagaaagagaagactggagttcatcgagaaggagaagaagcagaaggaccagatcatcagcctgatgaaggccgagcagatgaagagacaggagaaggagagactggagagaatcaacagagccagagagcagggctggagaaacgtgctgagcgccggcggcagcggcgaggtgaaggcccccttcctgggcagcggcggcaccatcgcccccagcagcttcagcagcagaggccagtacgagcactaccacgccatcttcgaccagatgcagcagcagagagccgaggacaacgaggccaagtggaagagagagatctacggcagaggcctgcccgagagacagaagggccagctggccgtggagagagccaagcaggtggaggagttcctgcagagaaagagagaggccatgcagaacaaggccagagccgagggccacatggtgtacctggccagactgagacagatcagactgcagaacttcaacgagagacagcagatcaaggccaagctgagaggcgagaagaaggaggccaaccacagcgagggccaggagggcagcgaggaggccgacatgagaagaaagaagatcgagagcctgaaggcccacgccaacgccagagccgccgtgctgaaggagcagctggagagaaagagaaaggaggcctacgagagagagaagaaggtgtgggaggagcacctggtggccaagggcgtgaagagcagcgacgtgagcccccccctgggccagcacgagaccggcggcagccccagcaagcagcagatgagaagcgtgatcagcgtgaccagcgccctgaaggaggtgggcgtggacagcagcctgaccgacaccagagagaccagcgaggagatgcagaagaccaacaacgccatcagcagcaagagagagatcctgagaagactgaacgagaacctgaaggcccaggaggacgagaagggcaagcagaacctgagcgacaccttcgagatcaacgtgcacgaggacgccaaggagcacgagaaggagaagagcgtgagcagcgacagaaagaagtgggaggccggcggccagctggtgatccccctggacgagctgaccctggacaccagcttcagcaccaccgagagacacaccgtgggcgaggtgatcaagctgggccccaacggcagccccagaagagcctggggcaagagccccaccgacagcgtgctgaagatcctgggcgaggccgagctgcagctgcagaccgagctgctggagaacaccaccatcagaagcgagatcagccccgagggcgagaagtacaagcccctgatcaccggcgagaagaaggtgcagtgcatcagccacgagatcaaccccagcgccatcgtggacagccccgtggagaccaagagccccgagttcagcgaggccagcccccagatgagcctgaagctggagggcaacctggaggagcccgacgacctggagaccgagatcctgcaggagcccagcggcaccaacaaggacgagagcctgccctgcaccatcaccgacgtgtggatcagcgaggagaaggagaccaaggagacccagagcgccgacagaatcaccatccaggagaacgaggtgagcgaggacggcgtgagcagcaccgtggaccagctgagcgacatccacatcgagcccggcaccaacgacagccagcacagcaagtgcgacgtggacaagagcgtgcagcccgagcccttcttccacaaggtggtgcacagcgagcacctgaacctggtgccccaggtgcagagcgtgcagtgcagccccgaggagagcttcgccttcagaagccacagccacctgccccccaagaacaagaacaagaacagcctgctgatcggcctgagcaccggcctgttcgacgccaacaaccccaagatgctgagaacctgcagcctgcccgacctgagcaagctgttcagaaccctgatggacgtgcccaccgtgggcgacgtgagacaggacaacctggagatcgacgagatcgaggacgagaacatcaaggagggccccagcgacagcgaggacatcgtgttcgaggagaccgacaccgacctgcaggagctgcaggccagcatggagcagctgctgagagagcagcccggcgaggagtacagcgaggaggaggagagcgtgctgaagaacagcgacgtggagcccaccgccaacggcaccgacgtggccgacgaggacgacaaccccagcagcgagagcgccctgaacgaggagtggcacagcgacaacagcgacggcgagatcgccagcgagtgcgagtgcgacagcgtgttcaaccacctggaggagctgagactgcacctggagcaggagatgggcttcgagaagttcttcgaggtgtacgagaagatcaaggccatccacgaggacgaggacgagaacatcgagatctgcagcaagatcgtgcagaacatcctgggcaacgagcaccagcacctgtacgccaagatcctgcacctggtgatggccgacggcgcctaccaggaggacaacgacgagtag

SEQ ID NO: 77500 - protein, 1491 aa, Artificial Sequence
  derived and/or modified sequence
MNGVAFCLVGIPPRPEPRPPQLPLGPRDGCSPRRPFPWQGPRTLLLYKSPQDGFGFTLRHFIVYPPESAVHCSLKEEENGGRGGGPSPRYRLEPMDTIFVKNVKEDGPAHRAGLRTGDRLVKVNGESVIGKTYSQVIALIQNSDDTLELSIMPKDEDILQLAYSQDAYLKGNEPYSGEARSIPEPPPICYPRKTYAPPARASTRATMVPEPTSALPSDPRSPAAWSDPGLRVPPAARAHLDNSSLGMSQPRPSPGAFPHLSSEPRTPRAFPEPGSRVPPSRLECQQALSHWLSNQVPRRAGERRCPAMAPRARSASQDRLEEVAAPRPWPCSTSQDALSQLGQEGWHRARSDDYLSRATRSAEALGPGALVSPRFERCGWASQRSSARTPACPTRDLPGPQAPPPSGLQGLDDLGYIGYRSYSPSFQRRTGLLHALSFRDSPFGGLPTFNLAQSPASFPPEASEPPRVVRPEPSTRALEPPAEDRGDEVVLRQKPPTGRKVQLTPARQMNLGFGDESPEPEASGRGERLGRKVAPLATTEDSLASIPFIDEPTSPSIDLQAKHVPASAVVSSAMNSAPVLGTSPSSPTFTFTLGRHYSQDCSSIKAGRRSSYLLAITTERSKSCDDGLNTFRDEGRVLRRLPNRIPSLRMLRSFFTDGSLDSWGTSEDADAPSKRHSTSDLSDATFSDIRREGWLYYKQILTKKGKKAGSGLRQWKRVYAALRARSLSLSKERREPGPAAAGAAAAGAGEDEAAPVCIGSCLVDISYSETKRRHVFRLTTADFCEYLFQAEDRDDMLGWIRAIRENSRAEGEDPGCANQALISKKLNDYRKVSHSSGPKADSSPKGSRGLGGLKSEFLKQSAARGLRTQDLPAGSKDDSAAAPKTPWGINIIKKNKKAAPRAFGVRLEECQPATENQRVPLIVAACCRIVEARGLESTGIYRVPGNNAVVSSLQEQLNRGPGDINLQDERWQDLNVISSLLKSFFRKLPEPLFTDDKYNDFIEANRIEDARERMRTLRKLIRDLPGHYYETLKFLVGHLKTIADHSEKNKMEPRNLALVFGPTLVRTSEDNMTDMVTHMPDRYKIVETLIQHSDWFFSDEEDKGERTPVGDKEPQAVPNIEYLLPNIGRTVPPGDPGSDSTTCSSAKSKGSWAPKKEPYAREMLAISFISAVNRKRKKRREARGLGSSTDDDSEQEAHKPGAGATAPGTQERPQGPLPGAVAPEAPGRLSPPAAPEERPAADTRSIVSGYSTLSTMDRSVCSGASGRRAGAGDEADDERSELSHVETDTEGAAGAGPGGRLTRRPSFSSHHLMPCDTLARRRLARGRPDGEGAGRGGPRAPEPPGSASSSSQESLRPPAAALASRPSRMEALRLRLRGTADDMLAVRLRRPLSPETRRRRSSWRRHTVVVQSPLTDLNFNEWKELGGGGPPEPAGARAHSDNKDSGLSSLESTKARAPSSAASQPPAPGDTGSLQSQPPRRSAASRLHQCL

SEQ ID NO: 77501 - DNA, 4476 bp, Artificial Sequence
  derived and/or modified sequence
atgaatggcgttgccttctgtttagtaggtattccaccccggcccgagccccgccctccccagttgccactcgggcctagagatggatgttccccccgccgcccgtttccctggcagggaccccgcaccctgctgctttataagagccctcaagatggctttggcttcacactgagacattttattgtgtaccctccggagagcgcagtccactgttctctcaaggaagaagaaaacggtggaaggggaggcgggccctctccacgataccgccttgagccaatggacacaattttcgtaaaaaatgttaaggaggatggcccagctcaccgcgctgggcttaggactggtgaccggctcgtgaaagttaacggggaaagcgtcattggtaagacatactcgcaagtgatcgccctgatacagaattccgatgacaccctcgagttaagcataatgcctaaagatgaagacattctgcagcttgcttattcgcaggatgcttatctcaaaggtaatgaaccttacagtggagaggccagatcaattcccgagccccctcctatttgctacccacgcaagacatacgctcctcctgcccgagcgtctactagagcgaccatggtaccagaacccaccagtgcgctgccatccgatccacgctcgcctgccgcctggtccgacccggggttgcgcgttcctcccgcggcacgagcacatctggataacagcagtctgggcatgagccagcctaggccctcccccggcgcctttccacatctgtcatcggagccaaggacccctagggcttttccagaaccaggttccagggttcccccctctcggttggagtgccagcaggccctgagtcactggctgagcaaccaggttccacgaagagctggggaaagacgatgtccagctatggctcctagagcacggtcagcttcgcaggaccgccttgaggaggtggccgcaccaagaccctggccctgtagtacatcccaagacgcactttcgcagctcggccaggagggttggcatagagctcgctccgatgattacttgtcacgagccaccagatctgccgaagccctggggccgggcgcccttgtatctccccggttcgagcgctgtggatgggctagtcagcgcagctctgcccggactcctgcatgccctaccagggaccttcctgggccccaagcaccacctccttccggcctccagggccttgacgacttaggatacataggatatcgcagctactccccttctttccagaggcgtacaggattattacacgccctgtcctttagggatagcccgttcggagggttgcccaccttcaatctcgctcagtctcccgcttcatttcctcctgaagccagtgaaccaccgagagtggtcaggccggagccctccacacgggccttagaacctccagccgaggatcggggcgacgaagtcgtcctgcgccagaagcctccaacaggcaggaaggtgcaactgaccccggcacgtcaaatgaacctcggattcggcgatgagtctcccgaaccagaagccagtgggcgcggcgagaggctgggccgcaaggtcgcccctctagcaacaactgaagattctttggcttccatccccttcatagacgagccaaccagcccatctattgacctacaagctaagcacgtgcccgcgtctgccgtggtatcttccgccatgaatagtgcacccgtgttgggcactagccctagctcacctacttttaccttcaccctgggccgccactactcccaggactgtagctccataaaagccgggcggaggagctcatatctgttggcaatcaccactgaacgaagcaaatcttgcgatgacggattgaatacatttcgggatgaaggacgtgtgctgagacgtctccccaaccgaattccgagtctgagaatgcttcggagtttcttcacagacgggtctctcgactcttggggcacctcagaagatgcagacgcgcctagtaagagacacagcacttcagatctgagcgatgcaaccttctctgacattaggagggagggatggctttactataaacaaattttgaccaagaaagggaagaaagctggctccggactgcgacagtggaaacgtgtctatgccgccttacgagcaagatccttgagtttgtctaaggaacgcagggagcctgggcctgccgctgctggggccgcagccgccggggccggggaagacgaggccgccccagtatgtatcggctcatgccttgtggacatcagctattcggaaacaaaaagacgtcacgtgttcaggctcacaactgccgatttctgcgaatatctattccaagcagaagatcgagatgatatgctggggtggataagagctattagagagaatagccgcgcagagggcgaagaccccgggtgtgctaatcaggccctgatttcaaagaaactgaatgattatcggaaagtgagtcactcatcggggccgaaggcagactccagtccaaaaggatccagagggctcgggggactgaagtcagagttcctgaagcagtctgccgctcgcggcctgcggacccaggatcttccagctggctctaaggacgattctgcggccgcgcccaagactccctgggggatcaacattattaaaaagaataagaaggctgccccccgagccttcggcgtgcggctggaggagtgccagccagccactgagaaccagcgggtgcctctgattgtggctgcttgttgccggattgtcgaggcacggggactcgagagcaccggaatctatcgagtccccggtaacaatgctgtggttagctcactccaagagcagctgaaccggggtccgggggacattaatctccaagatgagcgatggcaggacttgaacgtaatttcatccttgctgaaatctttctttagaaagctccccgaacctctgtttaccgatgacaaatacaatgatttcatcgaggcaaacagaatcgaggatgctcgggaacgtatgcgaacgttgcggaagctaatccgggaccttccgggacattattacgaaacgttgaagtttctagttggccatctgaaaaccatagcagatcatagcgagaagaacaaaatggagcctagaaacctggccctagtgtttggccctacacttgtccgcacctctgaagacaacatgactgacatggtgactcacatgcctgatagatacaagatagtggagacgctgattcagcacagcgactggttcttctccgacgaagaagataagggggaaaggacgccggtgggggataaggagccacaggccgtacctaatatcgagtacttgcttcccaatataggcagaaccgtcccgcccggagaccccggcagcgatagtacaacttgttcttctgcaaaaagtaaaggcagctgggccccaaaaaaggagccctacgctcgcgaaatgttggcgatcagttttatcagcgcagtgaatcggaaaaggaaaaagagacgggaggctaggggcttgggttcttccaccgatgacgactctgagcaagaggcacataaaccaggtgcaggagcaactgcacccggtacccaagagcggcctcagggacctttgcctggagctgtggcccctgaagctcccggccgactgtcacctcccgctgcgccagaagaaagacccgccgcagacacccgctctatcgtgtctggttactcgacgctgtcaaccatggatcgttccgtctgtagcggggcgagtggacgcagggccggagccggagacgaggctgatgacgagcggagcgagctaagccacgtggagaccgacacggagggagctgcaggcgccggacctgggggcagactgactcggagaccatcgttttccagccatcatctcatgccgtgcgatacactggcccggcggcggctggcccggggccgccccgatggcgagggcgccggacggggagggccccgggctccagaacctcctggcagcgcttccagtagctcccaggagagcctgagaccccccgcggctgctcttgcatctcggccttctcggatggaggcactcagactcagactgcgcggcactgctgatgatatgcttgcggtgcggctccgccgaccactgtcccccgagaccaggcggagacggagctcatggcggcgacacacagttgtggtccagtcgccccttaccgatctgaatttcaacgagtggaaggagttagggggtgggggcccacccgagcctgccggcgctagagctcactccgataacaaggactcgggcctgagttcactagaatcaaccaaagccagagcaccgtcctccgcagccagtcagccccctgctccaggggacaccggtagtctccagtcccaaccacctcgccgttctgcggccagcagactgcatcagtgcctgtag

SEQ ID NO: 77502 - DNA, 4476 bp, Artificial Sequence
  derived and/or modified sequence
atgaatggagtggccttctgcctggtgggcatcccccccaggcctgagcccaggcctccccagctgcccctgggccccagagatggctgcagcccccggcggcccttcccctggcagggccccaggaccctgctgctgtacaagagcccccaggacggcttcggcttcaccctgcggcacttcatcgtgtacccacctgagagcgctgtgcactgcagcctgaaggaggaggagaatggaggccggggcggcggccccagcccccgctaccgcctggagcccatggacaccatctttgtgaagaatgtgaaggaggatggccctgcccaccgggccggcctgaggactggagaccggctggtgaaggtgaatggagagagcgtgattggcaagacctacagccaggtgattgccctgatccagaacagtgatgacaccctggagctgagcatcatgcccaaggatgaggacatcctgcagctggcctacagccaggatgcctacctgaagggaaatgagccctacagcggggaggcccggagcatccctgagcccccacccatctgctaccccaggaagacctacgcccccccagcccgggccagcacccgggccaccatggtgcctgagcccaccagcgccctgcccagcgaccccaggagccctgctgcctggagcgaccccggcctgcgggtgcccccagctgcccgggcccacctggacaacagcagcctgggcatgagccagccccggcccagccctggggccttcccccacctgagcagcgagcccaggaccccccgggccttccctgagcccggcagccgggtgccccccagccggctggagtgccagcaggccctgagccactggctgagcaaccaggtgccccggcgggccggggagcggcgctgcccagccatggccccccgggcccggagcgccagccaggaccggctggaggaggtggccgccccccggccctggccctgcagcaccagccaggatgccctgagccagctgggccaggagggctggcaccgggcccggagtgatgactacctgagccgggccaccaggtctgctgaggccctgggccctggggccctggtgagccccaggtttgagcgctgtggctgggccagccagaggagcagcgcccggaccccagcctgccccacccgggacctgcccggcccccaggcccccccacccagcggcctgcagggcctggatgacctgggctacatcggctaccgcagctacagccccagcttccagaggagaacaggcctgctgcacgccctgtccttccgggacagcccctttggaggcctgcccaccttcaacctggcccagagccctgccagcttccccccagaggccagcgagcccccccgggtggtgcggcctgagcccagcacccgggccctggagcccccagcagaagatagaggagatgaggtggtgctgcggcagaagcccccaactggaaggaaggtgcagctgaccccagcccggcagatgaacctgggctttggagatgagagccctgagcctgaggccagcggccgcggggagcggctgggcaggaaggtggcccccctggccaccacagaggacagcctggccagcatccccttcattgatgagcccaccagccccagcattgacctgcaggccaagcacgtgcctgccagcgctgtggtgagcagcgccatgaacagcgcccctgtgctgggcaccagccccagcagccccaccttcaccttcaccctgggccgccactacagccaggactgcagcagcatcaaggccggccgccgcagcagctacctgctggccatcaccacagagaggagcaagagctgtgatgatggcctgaacaccttcagagatgagggccgggtgctgcggcggctgcccaaccgcatccccagcctgaggatgctgcgctccttcttcacagatggcagcctggacagctggggcaccagtgaagatgctgatgcccccagcaagaggcacagcaccagtgacctgagtgatgccaccttcagtgacatccggcgggagggctggctgtactacaagcagatcctgaccaagaagggcaagaaggccggcagcggcctgcggcagtggaagagggtgtatgctgccctgcgggcccggagcctgagcctgagcaaggagcggcgggagcccggccctgctgctgctggagctgctgctgctggggccggggaggatgaagctgcccctgtgtgcatcggcagctgcctggtggacatctcctacagcgagaccaagagaagacatgtgttccggctgaccacagctgacttctgtgagtacctgttccaggctgaagatagagatgacatgctgggctggatccgggccatccgggagaacagcagagctgagggggaggaccccggctgtgccaaccaggccctgatcagcaagaagctgaatgactacaggaaggtgagccacagcagcggccccaaggctgacagcagccccaagggcagccggggcctgggcggcctgaagtctgagttcctgaagcagagcgctgcccggggcctgcggacccaggacctgcctgctggcagcaaggatgattctgctgctgcccccaagaccccctggggcatcaacatcatcaagaagaacaagaaggccgccccccgggcctttggagtgcggctggaggagtgccagcctgccacagagaaccagagggtgcccctcatcgtggccgcctgctgcagaattgtggaggcccggggcctggagagcacaggcatctacagagtgcccggcaacaatgctgtggtgagcagcctgcaggagcagctgaacagaggccctggggacatcaacctgcaggatgagcgctggcaggacctgaatgtcatcagcagcctgctgaagagcttcttcaggaagctgcctgagcccctcttcacagatgacaagtacaatgacttcatcgaggccaacagaattgaagatgcccgggagaggatgaggaccctgaggaagctgatccgggacctgcccggccactactatgagaccctgaagttcctggtgggccacctgaagaccatcgctgaccacagcgagaagaacaagatggagcccaggaacctggccctggtgtttggccccaccctggtgaggaccagcgaggacaacatgacagacatggtgacccacatgccagaccgctacaagatcgtggagaccctcatccagcacagcgactggttcttcagtgatgaagaagataaaggagagaggacccctgtgggggacaaggagccccaggccgtgcccaacatcgagtacctgctgcccaacattggaagaacagtgcccccaggggaccccggcagtgacagcaccacctgcagcagcgccaagagcaagggctcctgggcccccaagaaggagccctatgcccgggagatgctggccatctccttcatctctgctgtgaacaggaagaggaagaagagaagagaggcccggggcctgggcagcagcacagatgatgattctgagcaggaggcccacaagccaggggccggggccacagcccctggcacccaggagcggccccagggccccctgcccggggctgtggcccctgaggcccctggccgcctgagccccccagctgcccctgaggagaggcctgctgctgacaccaggagcatcgtgtctggctacagcaccctgagcaccatggacagatctgtgtgcagcggggccagcggcagaagagctggagctggagatgaagcagatgatgagaggtctgagctgagccacgtggagacagacacagaaggagctgctggagctggccctgggggccgcctgacccggcggcccagcttcagcagccaccacctgatgccctgtgacaccctggcccggcggcggctggcccggggccgcccagatggagagggcgccggccggggcggcccccgggcccctgagcccccaggcagcgccagcagcagcagccaggagagcctgcggcccccagctgctgccctggccagccggcccagcaggatggaggccctgcggctgcggctgcggggcacagcagatgacatgctggccgtgcggctgcggcggcccctgagccctgagaccaggagaagaagaagctcctggaggaggcacacagtggtggtgcagagccccctgacagacctgaacttcaatgagtggaaggagctgggcggcggcggccccccagagcctgctggggcccgggcccacagcgacaacaaggacagcggcctgagcagcctggagagcaccaaggcccgggcccccagcagcgctgccagccagcccccagcccctggggacaccggcagcctgcagagccagcccccccggcgctctgctgccagccggctgcaccagtgcctgtag

SEQ ID NO: 77503 - DNA, 4476 bp, Artificial Sequence
  derived and/or modified sequence
atgaacggcgtggccttctgcctggtgggcatccccccccggcccgagcccagaccgcctcagctgccccttggacctcgggatggttgttcaccccgaagaccttttccctggcagggccctaggacacttttgctgtacaaatcaccacaggatgggtttgggtttactctccggcacttcatcgtgtaccccccggagagcgcggtccactgctcattaaaggaagaagagaacggcggtaggggaggcgggcctagcccgaggtatcgcctggagccaatggacacgatctttgttaagaacgtgaaagaggatggtcccgcccatcgggcaggtctgagaaccggggatcgcctcgtcaaggttaacggagaatcagtgatcggaaagacgtatagtcaagttatcgccctcatccaaaactccgacgatacactcgaactgtcgatcatgcccaaagacgaggacatcctgcagctggcttattcccaagatgcatatctcaaagggaatgaaccttatagcggcgaggcccgatccataccggaaccgccaccgatctgttaccctcggaagacctatgcccctcccgcacgcgcttcaaccagagctacaatggtccccgaaccaacatcggcgctgcccagcgatcctcgcagtccagctgcctggagtgaccccggtcttcgcgtgccccccgccgctcgagcccatctggacaactcctccttaggaatgagccaaccacggccttccccaggtgctttcccacacctcagctctgagcctcggaccccaagggcctttcctgaacccgggtctagggttcctccatcgcgcttagagtgtcagcaggctttatctcattggttaagtaatcaggtgcccaggcgcgccggtgagcgcagatgcccagcaatggccccccgcgcaagaagcgcgtctcaggatcgtctcgaagaagtagcagccccacggccctggccttgctctacatctcaagatgccctgagtcaactcggccaagaagggtggcatcgcgcccgctcagatgactatttgagcagggctacgcggtcggccgaggcgctcgggccaggcgccctcgtaagcccccgttttgagcgctgcgggtgggcgtcccagagaagctcagcaagaacacccgcttgccctactcgagacctacctggcccccaggccccccctccctctggacttcagggactggacgacctgggatatatcggttataggagttattcccctagtttccagagaagaaccgggctgctgcacgctcttagctttagggatagtccctttggcgggctgcccacctttaacctggcccagtctcctgcaagtttcccacccgaggcgtccgagcccccccgagtggtgaggccagaaccttcaacgcgagctctcgagccgcctgctgaagatcggggcgacgaggtggttttgaggcagaagccaccaacaggcagaaaagtgcaactgacacctgcccggcagatgaacctcggtttcggcgacgaatcgcctgagccagaggcaagtggacgaggagagcgtctcgggaggaaggtggcaccactggcaactacagaggatagtctggcttccattccatttatagatgaacctacatctcctagtatcgatttgcaggccaaacacgtccctgcttccgctgtagtcagttccgccatgaacagtgcccctgtcctcggtactagtcccagcagtcctacatttacattcaccctcggccgccactattcacaggactgctctagtatcaaggctgggcggcggtcatcctacttgcttgcaataaccactgagcgcagtaaaagttgcgatgacggactcaataccttcagggatgaggggagggttctcagacgtctgcccaatcgaatcccatctctccggatgttgcggtcatttttcacggatgggtccttggatagctggggcacatcggaagatgcagatgcgccctccaaacgacatagcacctcagatctgagcgacgcaacattctccgatatccgcagggaaggctggttgtactataagcaaattctgacaaagaaaggaaagaaggctggatctggtctgaggcagtggaaaagggtgtacgctgctctcagggcccggtcactcagcctcagtaaggaacgtcgcgagcctggacccgctgcagccggtgcggcagctgctggggccggtgaggacgaggccgctccagtttgcattggaagctgtctggttgatatttcttattctgagacaaaacgacggcatgtgtttcggctgaccactgccgatttctgcgagtatctgttccaggccgaggatcgggacgatatgttgggttggattcgggcgatccgcgagaattcccgagctgagggcgaggaccctggctgtgctaaccaggccctgattagcaaaaaactgaatgattaccgtaaagtgtctcattctagtggacccaaggccgactcctccccaaagggctcaaggggtctcggcgggctgaagtctgagtttcttaaacagtccgcagctagaggactgcggacacaagacttaccagcaggctctaaggacgactcagcagccgctcccaaaacgccatggggaattaatattattaagaagaacaagaaggccgctccaagggccttcggcgtccgcttggaggaatgccagccagcgacagagaatcagcgcgtgccacttattgtggccgcctgctgcagaatagtggaagcaagaggactagagtcgactggaatctatcgggtccccggcaataatgccgttgtctcctctttacaggagcagcttaacagaggccctggtgacattaacttacaggacgagcgttggcaggatctaaacgtcatctcctctcttcttaagagtttctttcgtaagctacctgagccactttttacagatgacaagtacaatgattttatcgaggccaaccgaatagaggacgcgagggaacgaatgcgcactcttcgcaagctgatccgtgaccttccgggacattactacgaaacactgaagtttttggtgggacacctgaagacaatcgcagaccattccgagaagaacaagatggagcctaggaacctggccttggtgtttgggcctaccctggtgagaaccagcgaggacaatatgacagatatggtgacacacatgccagatcggtataagattgtggagaccctaatccaacacagcgattggtttttttcagatgaggaggacaaaggcgagcggaccccagtaggggataaagagccgcaggctgtcccgaacattgagtacctgctccctaacatcggaagaaccgtgccacccggggatccgggatctgacagcacaacatgcagtagtgccaagagtaagggaagctgggccccaaaaaaagagccttacgcacgggagatgctcgcgatttctttcataagtgctgttaatcgtaagcgaaagaagcgccgcgaggctcggggcctcggctcatctacggatgacgacagtgagcaggaggctcacaaacctggggccggtgccactgcccctggaactcaggaacgaccacaaggccctctgcctggagccgtggctccagaggctccaggccgtctttctcccccagcagctccagaagagcgaccggccgcagacacccggagcatagtgtccggctatagtactctgagcactatggataggtccgtgtgctctggcgccagtggacgtcgagctggtgccggtgacgaggccgacgacgaaagatccgagctcagtcacgtcgaaactgacactgaaggtgcagcgggggccgggcccggcggcaggttaacaagacgcccaagcttcagttcacatcatctcatgccatgcgacacccttgctaggcgacgtctggcacgcgggcgcccagacggagaaggggctggacgaggagggcctcgcgctcctgaacctcccggaagcgccagtagcagtagccaggagtctctcagaccgcctgctgcagctttggcctctcgcccatcgaggatggaggcactgcggctacggctgcgggggaccgctgacgatatgttggcggtgcgacttcgaagaccactttcccccgagactagacgccgacgttcttcatggagacgccataccgtcgtagttcagtcgcctcttaccgacctgaattttaacgagtggaaagagctcggcggcggtggacctcctgaacccgcgggcgctcgcgcccacagcgacaataaggactcaggcttgtcgtcattggagtccaccaaagcccgggctccaagctctgccgcctcccagcctcctgccccaggcgacaccgggtctctgcaaagtcagcctccaagacggtcagccgcttcgaggctccatcagtgcttatag

SEQ ID NO: 77504 - DNA, 4476 bp, Artificial Sequence
  derived and/or modified sequence
atgaatggagtggctttctgtctggtgggaataccccctcgccctgaacctaggcccccacagctcccccttgggcctcgcgacggttgtagccctcgtagaccatttccatggcaggggcctcggactctcctactgtacaagagccctcaggacgggttcggatttaccctgaggcactttattgtgtacccccctgaatccgccgttcactgttctctcaaagaagaagagaatgggggaagagggggtggcccaagccctcggtacaggctcgagccaatggacactatcttcgtcaagaatgtcaaggaggatggcccagcccacagggccggactgagaaccggggatagactggtgaaggtaaacggcgaaagcgtaatcggaaagacatatagccaggtaattgcgctaatccaaaattcagacgatactctggaactctcgattatgccaaaagatgaggacatcctgcagctggcttacagccaggacgcatatcttaaggggaacgagccctattctggggaggcccgatcaataccagaacccccacccatctgttaccccaggaagacatatgctccgccagccagagctagtaccagggcaacaatggtgcccgagccgacaagcgcgctgccatctgacccacgctctcctgctgcgtggagcgaccccggacttagagtgcctcccgctgctcgcgctcatctcgacaattctagcttagggatgagccagcctaggccgagcccgggtgccttccctcatttgtccagcgaaccccgtaccccacgggcttttccggagcccggttccagagtacccccatcacgtctggaatgccagcaggcactctcacattggttaagtaaccaagtccccagacgtgccggagaaaggagatgccctgcaatggctcctagagcccgaagtgcaagtcaggaccggctagaagaggtggccgctccaagaccatggccctgctccacgagccaggacgccttgtcgcagcttgggcaggagggatggcatcgagcccgttccgacgattacttgtcccgtgctaccaggagtgcggaggccctgggacctggcgctctggtcagtcccaggtttgagcggtgtggctgggctagccaacggagttctgcacgcacgcccgcttgcccgacccgcgacctgcccggaccccaggcacctccccctagcggcctccaggggctggacgatctcggatacatagggtatagatcttacagcccaagttttcagagacgaaccgggcttttacacgcactgagcttccgagactcgccatttggcggactccctacttttaatcttgcgcaaagtcctgcatcatttccacctgaggccagcgagccacccagggtggtgagacccgaacctagtaccagggcgttagaaccccctgccgaggatcggggagacgaagtcgtgctgcggcagaaaccaccgaccgggcgtaaggtgcagctcacaccagctcgacagatgaacctcggattcggagatgagagcccagaaccagaagccagtggccgaggcgagaggcttggaaggaaggtggctccgcttgcaacaacagaggattccctggcctccatcccatttatcgatgagccaacttccccatccatagatctgcaagccaagcatgtcccagccagcgccgtggtctcatcagccatgaactccgcacctgtgttgggcacaagcccaagctctccaacgttcaccttcacactcggtcgacattacagtcaagactgctcatcaattaaggcgggtcggaggtcttcctacctcctggctatcacgaccgaacgttctaagtcctgcgatgacggtcttaatacctttcgggatgaagggagggtcctgcgacgcctcccaaacaggatccccagcctacgcatgcttagatcgttcttcaccgatggctctcttgacagctggggcacctcagaggacgccgacgctcccagcaagaggcactccaccagcgatctctcagacgcaacctttagcgacattcggagagagggttggctgtactacaagcagattctcacaaagaagggcaaaaaagccggatcagggctgcggcagtggaagagggtgtacgccgcactccgggctcggtccctgagtctgtctaaagaaaggcgcgagcctggacctgccgctgcgggtgctgctgctgctggagctggggaggacgaagcggctcccgtttgcatcggttcttgcctcgtggacattagttatagcgagacaaagcggagacacgtcttcaggctaaccaccgcagacttttgcgagtacctgttccaagcagaggacagagatgatatgctagggtggatacgggcaatcagagagaattcccgggctgaaggagaagatcctggatgcgcaaatcaggctttgatcagcaagaaacttaatgactaccggaaggtgtctcacagctcaggaccaaaggctgattcctcgcctaagggctcacgcggactgggcggactcaaaagcgagttcttgaagcagtcggctgcgagagggctgcggacccaagaccttccagctggatcgaaagacgatagtgccgcagccccaaagactccatggggcatcaacattataaaaaagaataagaaggcggctccacgggctttcggcgtgcgactcgaagagtgtcaaccggctactgagaaccagagagtgcccctcatcgtggccgcttgttgtcgcatcgtggaagctagaggcctcgagtccacaggaatataccgcgtgcccggtaacaatgccgtggtgtccagtctacaggagcagcttaaccgaggcccaggcgatataaatctgcaggacgagcgctggcaagacctgaacgtcatttcttcccttctgaagagctttttccgcaaattgcctgaaccgttgtttactgacgacaagtacaacgatttcatagaagcgaacagaattgaagatgcccgagaaagaatgcgaacactccggaagttgatcagggatctgcccggtcactactatgagacgttgaagttcctcgtgggtcacttaaaaaccattgcagaccacagcgaaaagaataagatggaacccagaaatctcgcgttggtatttgggcctacactcgtcaggaccagtgaagacaacatgaccgatatggtgactcacatgccagacagatataagattgtggagactctcatccagcactccgattggttctttagtgatgaggaggataagggagagcggacccccgtcggtgacaaggagcctcaggcggtccccaatatagagtacttgctgcccaatatcggccgaaccgttcctcccggagacccagggagcgactccacgacctgctcctcagccaagtcgaagggctcatgggctccaaaaaaggagccatacgctagggaaatgctggccatatcgttcattagcgccgtcaacaggaagcgcaagaagagaagggaagcccgagggcttggttctagcactgatgacgatagtgaacaggaggcccacaaacctggtgccggtgctaccgcccctggaacacaggaaaggccacagggtcctctaccaggagccgtcgcacctgaggcccctgggagactgtcacctcctgcagccccagaagaaagacccgcagccgacacacgttccattgtatcgggatactccacactgagtaccatggatcggtctgtgtgttccggagcttcaggacggcgagctggagcaggcgatgaagctgatgacgaaaggtccgagctttcccacgtggagacagacacggaaggagccgctggagccggacccggaggtcgccttaccagaaggccgtccttcagttcacatcacctgatgccttgtgacacactcgctaggagacgccttgcccgaggtaggcctgatggcgagggcgcagggagaggtgggcctcgggctcctgagccacctggcagcgctagcagtagcagtcaggagagcctccggccaccagctgcggctctggcctccaggccgtcaagaatggaggccctgcgccttcgcttgcgaggaacagctgacgatatgttagcggtgcgtctccgcaggcctttgtcaccggagactagacgcaggcggtcgagttggcgcaggcataccgtggtcgttcaatctccactgaccgatcttaacttcaatgagtggaaagagctcggcggtggaggtcctcctgaaccagctggggctagagctcactcagacaacaaggacagcggactgtccagcctggaatcaaccaaggctcgggctccatctagcgccgctagccagccccctgcacctggtgatacaggaagccttcagagccagcctccaagaagaagcgccgcttctcgcctgcatcagtgtctctag

SEQ ID NO: 77505 - DNA, 5896 bp, Artificial Sequence
  derived and/or modified sequence
atgaatggagtcgccttctgcctggtcgggatcccgccccgcccggagccccggcccccacagctgccactgggcccaagagatgggtgctctcctaggcgccccttcccctggcaggggccgaggacgctgctgctgtacaaaagtccccaggacggctttggcttcactctgcgccacttcatcgtgtacccacccgagtcggccgtgcactgcagcctgaaggaggaagagaatggaggccgtggaggaggaccctccccccggtaccgcctggagcccatggacaccatctttgtcaagaatgtgaaggaagacggccctgcccatagggcggggcttcgcacaggagaccggctggtaaaggtgaatggggaaagcgtcattgggaagacctactctcaggtcatagctctgatccagaatagtgatgacactctggagctgtctatcatgcccaaggacgaggacatcctccagctggcctactcccaggatgcctacctgaaagggaacgagccgtattctggagaggcccgcagcatcccagagccaccgccgatctgctacccccgcaagacctacgcccctcctgcccgggcctccaccagggccactatggtgcctgagcccacctcagcactgcccagtgacccccggagtcctgctgcctggagtgacccggggctccgtgtgccacctgctgcccgtgcccacctggacaactcttccttggggatgagccagccccgccccagccctggtgccttcccccacctctcctcggagccccggacgccccgtgccttcccagagcctggcagccgggtgccccccagcagactggagtgccagcaggccttgtcacactggctgtcaaaccaggtaccccgccgggcgggggagagacggtgcccagccatggccccccgggcccgcagcgcctcccaggaccggttggaggaggtggctgccccccgcccgtggccctgctccacctcccaggatgctttgagccagctgggccaggagggctggcaccgagctcgctcagatgactacttgagccgggccacccgttctgccgaggcactggggccaggggcactggtgtcaccccgctttgagcggtgtggctgggcttcccagcgttcgtctgcccgcacccccgcctgcccaactcgggacctgccagggccccaggccccacccccgtctggcctgcagggcctggatgacctcgggtacatcggctaccggagctacagcccatcattccagcgccggaccggcctcctccatgcgctctccttccgggactcaccctttggggggctgcctaccttcaacctggcccagtcccctgcgtcattcccaccagaggcctccgagccacccagggttgtacggccggaacccagcacccgggccctggagcctcctgcggaggatcgcggcgatgaggtggtcctgaggcagaagcccccgacgggccgcaaggttcagctgacccccgcaagacagatgaaccttggatttggtgacgagtccccagagccagaggccagtgggcgaggggaacgcctgggcaggaaggtggcccctttggccaccaccgaagactctctggcttccatcccctttattgatgagcccaccagccccagcattgacctccaagccaagcacgtccctgcctctgctgtggtctccagtgccatgaactcagcccctgtcctgggcaccagcccatcttccccgaccttcactttcaccctcggacgccattactcgcaggactgcagcagcatcaaggctggccgccgctcctcctacctgctggccatcaccacggagcgctccaagtcctgcgatgatggactcaacaccttccgcgacgagggccgggttctgcggcgcctgccaaaccgcatacccagcctgcggatgctccggagcttcttcaccgacgggtccttggatagctggggcacctctgaagatgctgacgctccttctaagcgacactcaacctctgacctctcagatgcgaccttcagcgatatcaggagagaaggctggttgtattataagcagattctcaccaagaaggggaagaaagcgggcagcggcctgcgccagtggaagcgggtgtacgccgcgctgcgggcgcgctcgctctcgctgagcaaggagcggcgggagcccgggccggcggcggcgggggctgcggcggccggcgcaggtgaggacgaggcggcgcccgtctgcatcggctcctgcctcgtggacatctcctacagcgagaccaagaggaggcacgtgttccggctgaccaccgctgacttctgtgaatatctctttcaggctgaggaccgggatgacatgctgggctggatcagagcgatccgggagaacagcagggccgagggcgaggaccccggctgtgccaaccaagctctgatcagcaagaagcttaacgattatcgcaaagtgagccatagctctgggcccaaagctgattcctcccccaaaggctctcgcggcctggggggcctcaagtctgagttcctcaagcagagtgcggcacgtggcctcaggactcaggacctgcccgcagggagcaaggatgacagtgctgcagcccccaaaaccccctggggcatcaacatcatcaagaaaaataagaaggccgctccgagggcgtttggggtcaggctggaggagtgccagccagccacggagaaccagcgcgtccccttaatcgtggctgcatgctgtcgcattgtggaggcacgagggctggagtccacaggcatttaccgagtgcccggcaacaatgcagtggtgtccagcctacaggagcagctcaaccgcgggcctggtgacatcaacctgcaggatgagcgctggcaagacctcaatgtgatcagcagcctgctcaagtccttcttccgaaagctgcccgagcctcttttcactgatgacaaatacaacgacttcatcgaggccaaccgcattgaggacgcacgggagcgaatgaggacgctgcggaagctgatccgggatctcccaggacactactatgaaacgctcaaattccttgtgggccatctcaagaccatcgctgaccactctgagaaaaacaagatggaaccccggaacctggccctggtctttgggccgacactggtgaggacgtctgaggacaacatgacagacatggtgacccacatgcctgaccgctacaagatcgtggagacactgatccagcactcagactggttcttcagtgacgaagaggacaagggagagagaacccctgtgggcgacaaggagcctcaggcagtgcccaacattgagtacctcctgcccaacattggcaggacagtgccccctggcgacccggggtcagattctaccacctgtagttcagccaagtccaagggttcgtgggcccccaagaaggagccgtacgcccgggagatgctggcgatctccttcatctcggccgtcaaccgcaagcgcaagaagcggcgggaggcgcgggggctgggcagcagcaccgacgacgactcggagcaggaggcgcacaagcctggggcgggggccacagcgccggggactcaggagcggccgcaggggccgctgcctggcgccgtcgcccccgaggcccccggacgcctcagtcccccggcggcgccggaggagcggccggccgcggacacgcgctccattgtgtcgggctactccaccctgtccaccatggaccgcagcgtgtgctcgggcgctagcggtcggcgggcaggggcgggggatgaggcggacgacgagcgtagcgagctgagccacgtggagacggacactgagggcgcggcgggcgcggggcctggggggcgcctgacacgccggccgtccttcagctcgcaccacctcatgccctgcgacactctggcgcgccgccgcctggcccggggccgcccagacggcgagggcgcgggccggggcggtccccgcgccccggagccgcccggctcggcgtcgtccagcagccaggagtcgctgcggcccccggcggcggcgctggcctcccggccctcgcgcatggaggcgctgcgtctaaggctccgcggcacggcggacgacatgctcgccgtgcgcctgcggcggccgctgtcgcccgagacccggcggcgccggagcagctggcgccgccacaccgtggtggtgcagagcccgctgactgacctcaacttcaacgagtggaaggagctgggcggagggggccccccggagcctgcgggcgcgcgggcgcacagtgacaacaaggactccggactcagcagcctggagtccaccaaggcgcgggccccgtcgtccgctgcctcgcagccgcccgcgcccggggacacggggtccctgcagagccagcccccgcgccgctcggccgcctcccgcctgcatcagtgtctgtgatccccacctcccgcgccgctcgggcgccacccctccctagagcccctttggaaccaggaggcttcaccagcctgcacctcctcttctgtggcccctgggtgcatggtgtgggtggagggcgcagcaggcagtgtctctagttggtgtgctggaactggcagggcagaggagaaggctggggccggactaattgaatggaagggggttccagaggtgatgagcagaagaggagggggcgtgggctgctggggtctgtgtccctgcacacatgcgcccgataggtccttctgagcctttctgtggctgcacttggggacccttgtggaccatggggtgtggctagggaacccctaagtttcagactaaaggaaagatcctgggtgatgctggctttttgcttctttcttctgccctcccacctcagcttgtaagcggggatgtgtgtatgtctggggagaggaggtgtagggtgcgtatgtccatggggggaggggcttgtgtgtgcagtcattgtcccaaggtgtttccagtagcgacttctgtccccctatccccaccctggtccccactttgcgcccccgggctccctgcctttggtgcacacaggatcctgcccgccccccttgccagagccagagaagggggttggggccattccaaggaggcaggactgaaaccctcaccagggttactccccaacatccttttgcctgagtcaccctctaagcgctttaaccacgggcagctgcctgttccccagacagtttttggtggggggggtccagggtcccccttgctggtacctccctcacccctctttttgtttttccatctgtgcctgttccttccacagcccaggcacacagaagcccaccttcttccccttaggaggagggatagtcaacacccctgctgtctctctgtcactcacacactgatttatggggtctgagctgggctgttcctgcaggatggacaggacccagcgccctcttctccccacaggctgtaaatagacttccaatcaccaggccagcccccacacaccctcactcattccagggaagcccaggtaggtggtgaacccgctgccacgtctatcagtcctcttgttttatgcaaagatttactgtaaagtagatttctttccctccctcccccattcttttattgtaaatattgtctctaaatgtgtaacatattataaagaatttataaggatttttaaagatgttttgctcatttacaaaagtgttgtaacagtgttggacaaagccttccaccccatgtccgcatggctcctttcactgtgtccttgacacacctctctggcaacaactaaaatttcctgcttctgaaaagtcctgtcttaaaagtacagtctatatcttggaaataaatagctttcctcaaggcatga

SEQ ID NO: 77506 - DNA, 4476 bp, Artificial Sequence
  derived and/or modified sequence
atgaacggcgtggccttctgcctggtgggcatcccccccagacccgagcccagacccccccagctgcccctgggccccagagacggctgcagccccagaagacccttcccctggcagggccccagaaccctgctgctgtacaagagcccccaggacggcttcggcttcaccctgagacacttcatcgtgtacccccccgagagcgccgtgcactgcagcctgaaggaggaggagaacggcggcagaggcggcggccccagccccagatacagactggagcccatggacaccatcttcgtgaagaacgtgaaggaggacggccccgcccacagagccggcctgagaaccggcgacagactggtgaaggtgaacggcgagagcgtgatcggcaagacctacagccaggtgatcgccctgatccagaacagcgacgacaccctggagctgagcatcatgcccaaggacgaggacatcctgcagctggcctacagccaggacgcctacctgaagggcaacgagccctacagcggcgaggccagaagcatccccgagcccccccccatctgctaccccagaaagacctacgccccccccgccagagccagcaccagagccaccatggtgcccgagcccaccagcgccctgcccagcgaccccagaagccccgccgcctggagcgaccccggcctgagagtgccccccgccgccagagcccacctggacaacagcagcctgggcatgagccagcccagacccagccccggcgccttcccccacctgagcagcgagcccagaacccccagagccttccccgagcccggcagcagagtgccccccagcagactggagtgccagcaggccctgagccactggctgagcaaccaggtgcccagaagagccggcgagagaagatgccccgccatggcccccagagccagaagcgccagccaggacagactggaggaggtggccgcccccagaccctggccctgcagcaccagccaggacgccctgagccagctgggccaggagggctggcacagagccagaagcgacgactacctgagcagagccaccagaagcgccgaggccctgggccccggcgccctggtgagccccagattcgagagatgcggctgggccagccagagaagcagcgccagaacccccgcctgccccaccagagacctgcccggcccccaggcccccccccccagcggcctgcagggcctggacgacctgggctacatcggctacagaagctacagccccagcttccagagaagaaccggcctgctgcacgccctgagcttcagagacagccccttcggcggcctgcccaccttcaacctggcccagagccccgccagcttcccccccgaggccagcgagccccccagagtggtgagacccgagcccagcaccagagccctggagccccccgccgaggacagaggcgacgaggtggtgctgagacagaagccccccaccggcagaaaggtgcagctgacccccgccagacagatgaacctgggcttcggcgacgagagccccgagcccgaggccagcggcagaggcgagagactgggcagaaaggtggcccccctggccaccaccgaggacagcctggccagcatccccttcatcgacgagcccaccagccccagcatcgacctgcaggccaagcacgtgcccgccagcgccgtggtgagcagcgccatgaacagcgcccccgtgctgggcaccagccccagcagccccaccttcaccttcaccctgggcagacactacagccaggactgcagcagcatcaaggccggcagaagaagcagctacctgctggccatcaccaccgagagaagcaagagctgcgacgacggcctgaacaccttcagagacgagggcagagtgctgagaagactgcccaacagaatccccagcctgagaatgctgagaagcttcttcaccgacggcagcctggacagctggggcaccagcgaggacgccgacgcccccagcaagagacacagcaccagcgacctgagcgacgccaccttcagcgacatcagaagagagggctggctgtactacaagcagatcctgaccaagaagggcaagaaggccggcagcggcctgagacagtggaagagagtgtacgccgccctgagagccagaagcctgagcctgagcaaggagagaagagagcccggccccgccgccgccggcgccgccgccgccggcgccggcgaggacgaggccgcccccgtgtgcatcggcagctgcctggtggacatcagctacagcgagaccaagagaagacacgtgttcagactgaccaccgccgacttctgcgagtacctgttccaggccgaggacagagacgacatgctgggctggatcagagccatcagagagaacagcagagccgagggcgaggaccccggctgcgccaaccaggccctgatcagcaagaagctgaacgactacagaaaggtgagccacagcagcggccccaaggccgacagcagccccaagggcagcagaggcctgggcggcctgaagagcgagttcctgaagcagagcgccgccagaggcctgagaacccaggacctgcccgccggcagcaaggacgacagcgccgccgcccccaagaccccctggggcatcaacatcatcaagaagaacaagaaggccgcccccagagccttcggcgtgagactggaggagtgccagcccgccaccgagaaccagagagtgcccctgatcgtggccgcctgctgcagaatcgtggaggccagaggcctggagagcaccggcatctacagagtgcccggcaacaacgccgtggtgagcagcctgcaggagcagctgaacagaggccccggcgacatcaacctgcaggacgagagatggcaggacctgaacgtgatcagcagcctgctgaagagcttcttcagaaagctgcccgagcccctgttcaccgacgacaagtacaacgacttcatcgaggccaacagaatcgaggacgccagagagagaatgagaaccctgagaaagctgatcagagacctgcccggccactactacgagaccctgaagttcctggtgggccacctgaagaccatcgccgaccacagcgagaagaacaagatggagcccagaaacctggccctggtgttcggccccaccctggtgagaaccagcgaggacaacatgaccgacatggtgacccacatgcccgacagatacaagatcgtggagaccctgatccagcacagcgactggttcttcagcgacgaggaggacaagggcgagagaacccccgtgggcgacaaggagccccaggccgtgcccaacatcgagtacctgctgcccaacatcggcagaaccgtgccccccggcgaccccggcagcgacagcaccacctgcagcagcgccaagagcaagggcagctgggcccccaagaaggagccctacgccagagagatgctggccatcagcttcatcagcgccgtgaacagaaagagaaagaagagaagagaggccagaggcctgggcagcagcaccgacgacgacagcgagcaggaggcccacaagcccggcgccggcgccaccgcccccggcacccaggagagaccccagggccccctgcccggcgccgtggcccccgaggcccccggcagactgagcccccccgccgcccccgaggagagacccgccgccgacaccagaagcatcgtgagcggctacagcaccctgagcaccatggacagaagcgtgtgcagcggcgccagcggcagaagagccggcgccggcgacgaggccgacgacgagagaagcgagctgagccacgtggagaccgacaccgagggcgccgccggcgccggccccggcggcagactgaccagaagacccagcttcagcagccaccacctgatgccctgcgacaccctggccagaagaagactggccagaggcagacccgacggcgagggcgccggcagaggcggccccagagcccccgagccccccggcagcgccagcagcagcagccaggagagcctgagaccccccgccgccgccctggccagcagacccagcagaatggaggccctgagactgagactgagaggcaccgccgacgacatgctggccgtgagactgagaagacccctgagccccgagaccagaagaagaagaagcagctggagaagacacaccgtggtggtgcagagccccctgaccgacctgaacttcaacgagtggaaggagctgggcggcggcggcccccccgagcccgccggcgccagagcccacagcgacaacaaggacagcggcctgagcagcctggagagcaccaaggccagagcccccagcagcgccgccagccagccccccgcccccggcgacaccggcagcctgcagagccagccccccagaagaagcgccgccagcagactgcaccagtgcctgtag

SEQ ID NO: 77507 - protein, 485 aa, Artificial Sequence
  derived and/or modified sequence
MESSKKMDSPGALQTNPPLKLHTDRSAGTPVFVPEQGGYKEKFVKTVEDKYKCEKCHLVLCSPKQTECGHRFCESCMAALLSSSSPKCTACQESIVKDKVFKDNCCKREILALQIYCRNESRGCAEQLMLGHLLVHLKNDCHFEELPCVRPDCKEKVLRKDLRDHVEKACKYREATCSHCKSQVPMIALQVSLLQNESVEKNKSIQSLHNQICSFEIEIERQKEMLRNNESKILHLQRVIDSQAEKLKELDKEIRPFRQNWEEADSMKSSVESLQNRVTELESVDKSAGQVARNTGLLESQLSRHDQMLSVHDIRLADMDLRFQVLETASYNGVLIWKIRDYKRRKQEAVMGKTLSLYSQPFYTGYFGYKMCARVYLNGDGMGKGTHLSLFFVIMRGEYDALLPWPFKQKVTLMLMDQGSSRRHLGDAFKPDPNSSSFKKPTGEMNIASGCPVFVAQTVLENGTYIKDDTIFIKVIVDTSDLPDP

SEQ ID NO: 77508 - DNA, 1458 bp, Artificial Sequence
  derived and/or modified sequence
atggagagcagcaagaagatggacagccccggcgccctgcagaccaacccccccctgaagctgcacaccgacagaagcgccggcacccccgtgttcgtgcccgagcagggcggctacaaggagaagttcgtgaagaccgtggaggacaagtacaagtgcgagaagtgccacctggtgctgtgcagccccaagcagaccgagtgcggccacagattctgcgagagctgcatggccgccctgctgagcagcagcagccccaagtgcaccgcctgccaggagagcatcgtgaaggacaaggtgttcaaggacaactgctgcaagagagagatcctggccctgcagatctactgcagaaacgagagcagaggctgcgccgagcagctgatgctgggccacctgctggtgcacctgaagaacgactgccacttcgaggagctgccctgcgtgagacccgactgcaaggagaaggtgctgagaaaggacctgagagaccacgtggagaaggcctgcaagtacagagaggccacctgcagccactgcaagagccaggtgcccatgatcgccctgcaggtgagcctgctgcagaacgagagcgtggagaagaacaagagcatccagagcctgcacaaccagatctgcagcttcgagatcgagatcgagagacagaaggagatgctgagaaacaacgagagcaagatcctgcacctgcagagagtgatcgacagccaggccgagaagctgaaggagctggacaaggagatcagacccttcagacagaactgggaggaggccgacagcatgaagagcagcgtggagagcctgcagaacagagtgaccgagctggagagcgtggacaagagcgccggccaggtggccagaaacaccggcctgctggagagccagctgagcagacacgaccagatgctgagcgtgcacgacatcagactggccgacatggacctgagattccaggtgctggagaccgccagctacaacggcgtgctgatctggaagatcagagactacaagagaagaaagcaggaggccgtgatgggcaagaccctgagcctgtacagccagcccttctacaccggctacttcggctacaagatgtgcgccagagtgtacctgaacggcgacggcatgggcaagggcacccacctgagcctgttcttcgtgatcatgagaggcgagtacgacgccctgctgccctggcccttcaagcagaaggtgaccctgatgctgatggaccagggcagcagcagaagacacctgggcgacgccttcaagcccgaccccaacagcagcagcttcaagaagcccaccggcgagatgaacatcgccagcggctgccccgtgttcgtggcccagaccgtgctggagaacggcacctacatcaaggacgacaccatcttcatcaaggtgatcgtggacaccagcgacctgcccgacccctag

SEQ ID NO: 77509 - DNA, 285 bp, Artificial Sequence
  derived and/or modified sequence
atggagagcagcaagaagatggacagccccggcgccctgcagaccaacccccccctgaagctgcacaccgacagaagcgccggcacccccgtgttcgtgcccgagcagggcggctacaaggagaagttcgtgaagaccgtggaggacaagtacaagtgcgagaagtgccacctggtgctgtgcagccccaagcagaccgagtgcggccacagattctgcgagagctgcatggccgccctgctgagcagcagcagccccaagtgcaccgcctgccaggagagctag

SEQ ID NO: 77510 - DNA, 1458 bp, Artificial Sequence
  derived and/or modified sequence
atggaatcatccaagaagatggacagcccaggagcactccagacgaatccgccacttaaacttcatacagacaggagcgccggcactcctgtatttgttcccgagcagggcggctacaaagaaaaattcgtcaagacggtcgaagacaaatacaagtgcgagaagtgccacctggtgctttgttcaccaaaacagacagaatgcggccatcggttctgcgaatcttgcatggcagctctattatcttccagttcccccaagtgtaccgcttgccaggaatccattgtgaaggacaaggtattcaaggacaattgttgtaaacgggagatcctggctctgcagatctattgtagaaacgagagccgcggttgtgcggaacagttgatgctggggcacctcttggtgcacctgaagaatgactgccactttgaagagctcccatgtgtcaggcccgactgtaaagagaaagtcctccgcaaggacctgcgggaccatgtagagaaggcctgcaagtaccgcgaagcgacatgtagccactgcaagtcacaggtgcccatgatcgcacttcaggtcagtctgttgcagaatgagagcgtcgaaaaaaacaagtctatccagtcgctccataatcagatatgctcttttgagatagaaatcgagaggcagaaagagatgctgaggaacaacgaatctaaaattctgcatctccagcgtgtgattgatagccaagccgagaaattgaaggaactggataaagagattcgacccttccgccagaattgggaggaagcagatagtatgaagtcaagtgtggaaagcctgcagaatagggtgactgaactcgaatccgtcgataagtccgctggacaggtggccagaaatacagggttgctggagtcccagctgagccggcacgaccagatgctctcggttcatgacatccggctcgccgatatggatttgaggttccaggtgttagaaacagcaagttacaacggagtgcttatctggaagatccgggattacaagcgacgcaaacaggaggccgtgatgggaaagactcttagcctctacagtcaacccttctatactgggtactttggctacaaaatgtgtgcccgtgtttatcttaacggggacggcatgggcaagggcacacatctctccctgttttttgtgatcatgcggggggagtacgacgcactcctaccatggcccttcaaacaaaaagtgactctgatgctgatggatcagggctctagtcggaggcacctgggggacgcctttaaacccgatcctaattcatcttcctttaagaaaccaaccggcgaaatgaatatcgcttccggttgccccgtctttgttgcgcagacagttctggagaacgggacatatattaaggatgacaccatcttcatcaaggtgatagtggatacatccgaccttcccgacccatag

SEQ ID NO: 77511 - DNA, 285 bp, Artificial Sequence
  derived and/or modified sequence
atggagagctcaaaaaaaatggattcaccaggtgcattgcagacaaatccacccctaaaacttcacaccgacaggtctgctggaacaccagtgttcgtgccagaacaggggggatacaaggagaagttcgtaaaaacagtcgaagacaaatataaatgtgagaagtgtcacctggtgctttgttcacctaaacagactgagtgcggccacaggttctgcgaaagttgcatggctgcccttctgtcttcgtcttcacccaagtgcactgcttgccaggagtcttag

SEQ ID NO: 77512 - DNA, 1458 bp, Artificial Sequence
  derived and/or modified sequence
atggagagcagcaagaagatggacagccctggggccctgcagaccaacccccccctgaagctgcacacagacagatctgctggcacccctgtgtttgtgcctgagcagggcggctacaaggagaagtttgtgaagacagtggaggacaagtacaagtgtgagaagtgccacctggtgctgtgcagccccaagcagacagaatgtggccaccgcttctgtgagagctgcatggccgccctgctgagcagcagcagccccaagtgcacagcctgccaggagagcatcgtgaaggacaaggtgttcaaggacaactgctgcaagcgggagatcctggccctgcagatctactgcagaaatgaaagccggggctgtgccgagcagctgatgctgggccacctgctggtgcacctgaagaatgactgccactttgaggagctgccctgtgtgcggccagactgcaaggagaaggtgctgaggaaggacctgcgggaccacgtggagaaggcctgcaagtaccgggaggccacctgcagccactgcaagagccaggtgcccatgattgccctgcaggtgtccctgctgcagaatgaatctgtggagaagaacaagagcatccagagcctgcacaaccagatctgcagctttgaaattgaaattgagcggcagaaggagatgctgagaaataatgaaagcaagatcctgcacctgcagagggtcatcgacagccaggccgagaagctgaaggagctggacaaggagatccggcccttccggcagaactgggaggaggccgacagcatgaagagctctgtggagagcctgcagaacagagtgacagagctggagagcgtggacaagtctgctggccaggtggccaggaacacaggcctgctggagagccagctgagcagacatgaccagatgctgtctgtgcatgacatccggctggccgacatggacctgcgcttccaggtgctggagacagccagctacaacggggtgctgatctggaagatccgggactacaagaggaggaagcaggaggccgtgatgggcaagaccctgagcctgtacagccagcccttctacacaggctacttcggctacaagatgtgtgcccgggtgtacctgaatggagatggcatgggcaagggcacccacctgagcctcttcttcgtcatcatgagaggagaatatgatgccctgctgccctggcccttcaagcagaaggtgaccctgatgctgatggaccagggcagcagccgccgccacctgggagatgccttcaagccagaccccaacagcagcagcttcaagaagcccaccggggagatgaacatcgccagcggctgccctgtgtttgtggcccagacagtgctggagaatggcacctacatcaaggatgacaccatcttcatcaaggtgattgtggacaccagtgacctgcctgacccctag

SEQ ID NO: 77513 - DNA, 285 bp, Artificial Sequence
  derived and/or modified sequence
atggagagcagcaagaagatggacagccctggggccctgcagaccaacccccccctgaagctgcacacagacagatctgctggcacccctgtgtttgtgcctgagcagggcggctacaaggagaagtttgtgaagacagtggaggacaagtacaagtgtgagaagtgccacctggtgctgtgcagccccaagcagacagaatgtggccaccgcttctgtgagagctgcatggccgccctgctgagcagcagcagccccaagtgcacagcctgccaggagagctag

SEQ ID NO: 77514 - DNA, 1458 bp, Artificial Sequence
  derived and/or modified sequence
atggagagcagcaagaagatggacagccccggcgccctgcagaccaacccgcccctgaagttgcataccgaccgcagcgctgggactcccgtctttgttcctgagcaaggcggttacaaagagaagttcgtcaaaacagtggaggataaatataagtgcgaaaagtgtcacttagtgctatgttcccccaaacaaactgaatgcggccacagattctgtgagtcctgcatggccgccctattgagttctagctctccaaagtgcaccgcctgccaggaatcaatcgtgaaggacaaggtcttcaaagacaattgttgtaagagagaaatactagccctgcagatttactgccgaaatgagtcccgcggctgcgccgagcagctgatgctcggacatttactggtgcatttgaagaacgactgtcatttcgaagaactgccttgcgtgcgccccgattgtaaagaaaaggtgcttaggaaagatctgcgtgaccatgtggaaaaggcttgcaagtatcgggaagccacttgctctcactgtaaatcgcaggtccccatgatcgcgctgcaggtttcactgctgcagaatgaaagcgtagagaaaaataaaagcattcagtctctccataatcagatttgcagctttgagatcgagatagagagacaaaaggaaatgctgaggaataacgaatctaagatactgcatttgcagcgagtcattgatagtcaggctgagaaactgaaggaactggataaggaaattcggcctttccgccagaattgggaagaagccgattcaatgaaaagttccgttgagagccttcagaatcgcgtgacagagttagaatctgttgacaaatctgcagggcaggtggctcgtaacaccgggttactggaaagtcagctgtctagacacgatcagatgctctcagtgcacgacatccggctagcagacatggatctgcgttttcaggtgcttgagaccgcgtcgtataacggtgtgctgatctggaagatcagagactacaagcgccgaaaacaggaggccgttatgggaaaaacactgagcctatacagccagccattttacactgggtatttcggctacaaaatgtgcgctcgcgtatacctgaacggcgacggcatggggaagggcacacatctcagtttgttctttgtcatcatgcggggcgaatatgatgctcttctgccctggcccttcaaacagaaggtcacactaatgctgatggaccaaggtagtagtaggcggcacctgggcgacgccttcaaacccgacccaaattccagctcttttaagaaaccgaccggggaaatgaatatagcttccggttgccctgtgttcgtcgcccagaccgtattagagaatggtacctatattaaggacgatactatcttcattaaagttatcgtagatacttctgacctcccagacccctag

SEQ ID NO: 77515 - DNA, 285 bp, Artificial Sequence
  derived and/or modified sequence
atggagagcagcaagaagatggacagccccggcgccctgcagaccaatcctccactgaagctacacacagaccgcagcgccggtacgccagttttcgtgcccgagcagggcggctacaaagaaaagtttgtgaaaaccgttgaggataagtataagtgcgaaaaatgtcaccttgttctgtgttctccaaagcagacagagtgcggtcacagattctgcgagtcttgtatggcagcattgctgtcttcctctagcccaaagtgcactgcatgccaggagtcatag

SEQ ID NO: 77516 - DNA, 1458 bp, Artificial Sequence
  derived and/or modified sequence
atggagtcttctaagaagatggactcaccgggtgcgcttcagacgaacccccctctcaaactccacactgatcggtctgccggaaccccagttttcgtgcctgagcaagggggatataaagagaagttcgtcaaaactgtagaagataaatacaaatgcgagaagtgtcatctcgtactgtgttcacctaagcagactgagtgtggccatcgattttgcgaatcttgtatggctgccttactgtcaagcagttcccccaagtgtacagcctgtcaggagtctatcgtgaaggacaaggtgttcaaggacaattgttgcaagcgggaaatcttagcactccagatctattgtaggaatgaatcaagggggtgtgcagagcagcttatgttgggccacctgctggtccatttgaagaacgattgtcattttgaggaactgccgtgcgtgcgacccgactgtaaggaaaaagtcttgaggaaggatctgagagatcatgtggagaaggcttgcaagtaccgcgaagctacctgttctcactgcaagtctcaagtgcctatgatcgctttgcaggtctcactcctgcagaacgagagtgtggagaaaaacaagtcaatccaaagtctgcacaaccagatctgttcttttgaaatcgagatcgagaggcagaaggagatgttgcgcaacaacgagtctaaaattcttcaccttcaacgcgtgattgatagtcaggccgagaagctcaaggaacttgataaggagatacgaccattccgccagaattgggaagaggccgactccatgaagagcagcgttgaaagccttcagaaccgcgtaaccgaactcgagtctgtggacaaaagcgctggccaggtggccagaaacaccgggctgttggagagtcagctatcccggcatgatcagatgctaagcgtgcatgatataaggttagccgacatggacttacgctttcaggtcctggaaactgcctcctacaatggagtgctgatctggaagattcgcgactacaagaggaggaaacaggaggccgtaatgggaaagactctttccctctactctcagcccttctacaccggctacttcggatataaaatgtgtgccagagtgtacttgaatggagatggcatggggaagggaactcatctgagcctgttctttgtaatcatgcgtggtgagtatgacgcgctactgccgtggccattcaagcagaaggtgaccttgatgctgatggaccaggggtcttctaggcgccacctcggcgacgcattcaagcctgacccaaatagctctagttttaagaaaccaacgggagagatgaatatcgctagtgggtgtccagtgtttgtggcacaaactgtgctcgagaatgggacatatattaaggacgacacaattttcattaaggttatcgttgacacatccgatctgccggacccttag

SEQ ID NO: 77517 - DNA, 285 bp, Artificial Sequence
  derived and/or modified sequence
atggagagttctaaaaagatggactcccctggggcactccaaacaaaccccccactcaagcttcatacagaccgttcagctgggaccccagtcttcgtgccagaacaggggggttataaggagaagtttgtgaagaccgtggaggacaaatataagtgtgagaaatgccacctggttttgtgttcacctaagcagactgaatgtggccacagattttgcgagagttgcatggcagctttgcttagcagttcttcacccaagtgcactgcttgtcaagaatcatag

SEQ ID NO: 77518 - DNA, 1786 bp, Artificial Sequence
  derived and/or modified sequence
agcagaacgctgcggaccgcggcggaggacgcgcccggcgcccctgagccggccgagcggcgacggaccgcgagaactcctctttcctaaaatggagtcgagtaaaaagatggactctcctggcgcgctgcagactaacccgccgctaaagctgcacactgaccgcagtgctgggacgccagtttttgtccctgaacaaggaggttacaaggaaaagtttgtgaagaccgtggaggacaagtacaagtgtgagaagtgccacctggtgctgtgcagcccgaagcagaccgagtgtgggcaccgcttctgcgagagctgcatggcggccctgctgagctcttcaagtccaaaatgtacagcgtgtcaagagagcatcgttaaagataaggtgtttaaggataattgctgcaagagagaaattctggctcttcagatctattgtcggaatgaaagcagaggttgtgcagagcagttaatgctgggacatctgctggtgcatttaaaaaatgattgccattttgaagaacttccatgtgtgcgtcctgactgcaaagaaaaggtcttgaggaaagacctgcgagaccacgtggagaaggcgtgtaaataccgggaagccacatgcagccactgcaagagtcaggttccgatgatcgcgctgcaggtttccttgttgcagaatgaaagtgtagaaaaaaacaagagcatacaaagtttgcacaatcagatatgtagctttgaaattgaaattgagagacaaaaggaaatgcttcgaaataatgaatccaaaatccttcatttacagcgagtgatagacagccaagcagagaaactgaaggagcttgacaaggagatccggcccttccggcagaactgggaggaagcagacagcatgaagagcagcgtggagtccctccagaaccgcgtgaccgagctggagagcgtggacaagagcgcggggcaagtggctcggaacacaggcctgctggagtcccagctgagccggcatgaccagatgctgagtgtgcacgacatccgcctagccgacatggacctgcgcttccaggtcctggagaccgccagctacaatggagtgctcatctggaagattcgcgactacaagcggcggaagcaggaggccgtcatggggaagaccctgtccctttacagccagcctttctacactggttactttggctataagatgtgtgccagggtctacctgaacggggacgggatggggaaggggacgcacttgtcgctgttttttgtcatcatgcgtggagaatatgatgccctgcttccttggccgtttaagcagaaagtgacactcatgctgatggatcaggggtcctctcgacgtcatttgggagatgcattcaagcccgaccccaacagcagcagcttcaagaagcccactggagagatgaatatcgcctctggctgcccagtctttgtggcccaaactgttctagaaaatgggacatatattaaagatgatacaatttttattaaagtcatagtggatacttcggatctgcccgatccctgataagtagctggggaggtggatttagcagaaggcaactcctctgggggatttgaaccggtctgtcttcactgaggtcctcgcgctcagaaaaggaccttgtgagacggaggaagcggcagaaggcggacgcgtgccggcgggaggagccacgcgtgagcacacctgacacgttttataatagactagccacacttcactctgaagaattatttatccttcaacaagataaatattgct

SEQ ID NO: 77519 - DNA, 701 bp, Artificial Sequence
  derived and/or modified sequence
ccgcggcggaggacgcgcccggcgcccctgagccggccgagcggcgacggaccgcgagatggcgtctcgctctgtcacccaggctggagtgcagtggcgcgatccctgcttactgcagcttctgcctcccaggttcgagagattctcctgcctcagcctcccaagtagctgggactacagcagctgacatctgtgaagcctcagtgatcctataaattgaggaacctgagagaatcaagagaaagacaacaattcttgctgatatgaggaaaatgaggcccaaagaagtgatgccacttggttaaggtcccagagcaggtcagaatcagacctaggatcagaaacctggctcctggctcctggctccctactcttctaaggatcgctgtcctgacagaagagaactcctctttcctaaaatggagtcgagtaaaaagatggactctcctggcgcgctgcagactaacccgccgctaaagctgcacactgaccgcagtgctgggacgccagtttttgtccctgaacaaggaggttacaaggaaaagtttgtgaagaccgtggaggacaagtacaagtgtgagaagtgccacctggtgctgtgcagcccgaagcagaccgagtgtgggcaccgcttctgcgagagctgcatggcggccctgctgagctcttcaagtccaaaatgtacagcgtgtcaagagagc

SEQ ID NO: 77520 - protein, 836 aa, Artificial Sequence
  derived and/or modified sequence
MLQNVTPHNKLPGEGNAGLLGLGPEAAAPGKRIRKPSLLYEGFESPTMASVPALQLTPANPPPPEVSNPKKPGRVTNQLQYLHKVVMKALWKHQFAWPFRQPVDAVKLGLPDYHKIIKQPMDMGTIKRRLENNYYWAASECMQDFNTMFTNCYIYNKPTDDIVLMAQTLEKIFLQKVASMPQEEQELVVTIPKNSHKKGAKLAALQGSVTSAHQVPAVSSVSHTALYTPPPEIPTTVLNIPHPSVISSPLLKSLHSAGPPLLAVTAAPPAQPLAKKKGVKRKADTTTPTPTAILAPGSPASPPGSLEPKAARLPPMRRESGRPIKPPRKDLPDSQQQHQSSKKGKLSEQLKHCNGILKELLSKKHAAYAWPFYKPVDASALGLHDYHDIIKHPMDLSTVKRKMENRDYRDAQEFAADVRLMFSNCYKYNPPDHDVVAMARKLQDVFEFRYAKMPDEPLEPGPLPVSTAMPPGLAKSSSESSSEESSSESSSEEEEEEDEEDEEEEESESSDSEEERAHRLAELQEQLRAVHEQLAALSQGPISKPKRKREKKEKKKKRKAEKHRGRAGADEDDKGPRAPRPPQPKKSKKASGSGGGSAALGPSGFGPSGGSGTKLQAGVQWRDLGLLQPPLLGFKRFSCLSLPSSQDYRLPKKATKTAPPALPTGYDSEEEEESRPMSYDEKRQLSLDINKLPGEKLGRVVHIIQAREPSLRDSNPEEIEIDFETLKPSTLRELERYVLSCLRKKPRKPYTIKKPVGKTKEELALEKKRELEKRLQDVSGQLNSTKKPPKKANEKTESSSAQQVAVSRLSASSSSSDSSSSSSSSSSSDTSDSDSG

SEQ ID NO: 77521 - protein, 648 aa, Artificial Sequence
  derived and/or modified sequence
MLQNVTPHNKLPGEGNAGLLGLGPEAAAPGKRIRKPSLLYEGFESPTMASVPALQLTPANPPPPEVSNPKKPGRVTNQLQYLHKVVMKALWKHQFAWPFRQPVDAVKLGLPDYHKIIKQPMDMGTIKRRLENNYYWAASECMQDFNTMFTNCYIYNKPTDDIVLMAQTLEKIFLQKVASMPQEEQELVVTIPKNSHKKGAKLAALQGSVTSAHQVPAVSSVSHTALYTPPPEIPTTVLNIPHPSVISSPLLKSLHSAGPPLLAVTAAPPAQPLAKKKGVKRKADTTTPTPTAILAPGSPASPPGSLEPKAARLPPMRRESGRPIKPPRKDLPDSQQQHQSSKKGKLSEQLKHCNGILKELLSKKHAAYAWPFYKPVDASALGLHDYHDIIKHPMDLSTVKRKMENRDYRDAQEFAADVRLMFSNCYKYNPPDHDVVAMARKLQDVFEFRYAKMPDEPLEPGPLPVSTAMPPGLAKSSSESSSEESSSESSSEEEEEEDEEDEEEEESESSDSEEERAHRLAELQEQLRAVHEQLAALSQGPISKPKRKREKKEKKKKRKAEKHRGRAGADEDDKGPRAPRPPQPKKSKKASGSGGGSAALGPSGFGPSGGSGTKLQAGVQWRDLGLLQPPLLGFKRFSCLSLPSSQDY

SEQ ID NO: 77522 - protein, 363 aa, Artificial Sequence
  derived and/or modified sequence
  misc_feature (1)..(1): Xaa can be any naturally occurring amino acid
XAKSSSESSSEESSSESSSEEEEEEDEDEEEEESESSDSEEERAHRLAELQEQLRAVHEQLAALSQGPISKPKRKREKKEKKKKRKAEKHRGRAGADEDDKGPRAPRPPQPKKSKKASGSGGGSAALGPSGFGPSGGSGTKLQAGVQWRDLGLLQPPLLGFKRFSCLSLPSSQDYRLPKKATKTAPPALPTGYDSEEEEESRPMSYDEKRQLSLDINKLPGEKLGRVVHIIQAREPSLRDSNPEEIEIDFETLKPSTLRELERYVLSCLRKKPRKPYTIKKPVGKTKEELALEKKRELEKRLQDVSGQLNSTKKPPKKANEKTESSSAQQVAVSRLSASSSSSDSSSSSSSSSSSDTSDSDSG

SEQ ID NO: 77523 - protein, 836 aa, Artificial Sequence
  derived and/or modified sequence
MLQNVTPHNKLPGEGNAGLLGLGPEAAAPGKRIRKPSLLYEGFESPTMASVPALQLTPANPPPPEVSNPKKPGRVTNQLQYLHKVVMKALWKHQFAWPFRQPVDAVKLGLPDYHKIIKQPMDMGTIKRRLENNYYWAASECMQDFNTMFTNCYIYNKPTDDIVLMAQTLEKIFLQKVASMPQEEQELVVTIPKNSHKKGAKLAALQGSVTSAHQVPAVSSVSHTALYTPPPEIPTTVFNIPHPSVISSPLLKSLHSAGPPLLAVTAAPPAQPLAKKKGVKRKADTTTPTPTAILAPGSPASPPGSLEPKAARLPPMRRESGRPIKPPRKDLPDSQQQHQSSKKGKLSEQLKHCNGILKELLSKKHAAYAWPFYKPVDASALGLHDYHDIIKHPMDLSTVKRKMENRDYRDAQEFAADVRLMFSNCYKYNPPDHDVVAMARKLQDVFEFRYAKMPDEPLEPGPLPVSTAMPPGLAKSSSESSSEESSSESSSEEEEEEDEEDEEEEESESSDSEEERAHRLAELQEQLRAVHEQLAALSQGPISKPKRKREKKEKKKKRKAEKHRGRAGADEDDKGPRAPRPPQPKKSKKASGSGGGSAALGPSGFGPSGGSGTKLQAGVQWRDLGLLQPPLLGFKRFSCLSLPSSQNYRLPKKATKTAPPALPTGYDSEEEEESRPMSYDEKRQLSLDINKLPGEKLGRVVHIIQAREPSLRDSNPEEIEIDFETLKPSTLRELERYVLSCLRKKPRKPYTIKKPVGKTKEELALEKKRELEKRLQDVSGQLNSTKKPPKKANEKTESSSAQQVAVSRLSASSSSSDSSSSSSSSSSSDTSDSDSG

SEQ ID NO: 77524 - DNA, 2511 bp, Artificial Sequence
  derived and/or modified sequence
atgctgcagaacgtgacacctcacaataagttacccggggaaggcaacgcaggtctgctgggactgggccccgaggcagcagcccctggcaaacgcatccgcaaacctagcctcctctatgaaggcttcgaatcgccaaccatggccagtgtgcctgctctccagcttacaccggccaacccaccacctcctgaagtgagtaacccgaaaaagcctggacgcgtcacaaatcaattacaatatttgcacaaggtcgtcatgaaagccttgtggaagcatcagttcgcttggcccttccggcagccggtggacgccgtaaagctcggattaccggattatcacaaaatcattaagcagcctatggacatgggaacaatcaagagacgcttggagaataactattactgggccgccagcgagtgcatgcaggacttcaataccatgttcaccaactgctatatctataacaaacccactgatgacattgtgctgatggcccagacactcgagaagattttcctgcaaaaggtcgcttccatgcctcaggaagagcaggagctcgttgtcacaatcccgaagaactcccacaagaagggagccaagctcgctgcactgcaaggaagcgtgacctcggcacaccaggttcctgccgtgtcttctgtgagtcatacagccctgtataccccaccacctgagatacctaccactgtactcaatatccctcaccccagcgtgatttcatcccccctcctaaaatcactgcactctgccggccccccactcctggccgtcaccgccgccccacccgctcagcctctggctaagaagaagggagttaaacggaaggccgatacgaccacaccaactcccaccgcgatcctggcccccggatcaccagccagtccccccggaagcctcgagcccaaggcggcgcggctgccacccatgagacgtgaatccggacggcctataaagccgcccaggaaagacctgccagattcacagcagcagcaccagtcctcgaaaaagggaaaactcagcgaacagttaaaacattgcaatggcattctgaaagaactcctctctaagaagcatgccgcttacgcctggcctttctataaacctgtggacgccagtgctctgggtttgcacgattatcatgacattatcaagcatcccatggatctttcaaccgtgaaacggaagatggaaaaccgggactaccgggatgcccaggaatttgccgcagacgtcaggttaatgttttcaaactgctataaatacaacccacccgatcacgatgttgttgctatggcgcgcaagttacaggatgttttcgagtttagatacgctaaaatgcctgatgagcccctcgagcctggtcctctgcccgtgtctaccgccatgccccccggcttggccaagagctccagtgagtcttccagcgaagagtcatcctccgagtcatcttcggaggaggaggaggaggaggacgaagaagatgaagaagaagaggaatccgagagctccgactcggaggaggagagggcgcatcgcctcgccgagctacaggaacagctgagggccgtacacgagcagcttgcagctctgtcccagggcccaatctcgaagccaaaacggaaaagagagaagaaggagaagaagaaaaagcgaaaagcagagaaacatagggggcgcgcaggtgccgatgaagacgacaaaggtcctcgggccccgcggccaccacagcccaaaaagagcaaaaaagcttccgggtctggggggggatctgcagcactgggaccttctggttttggcccatccggaggctcgggtacaaagcttcaggccggggtgcagtggagagacctcggtctcctgcagccgcctctgctgggattcaaacgatttagctgtctctcccttccctcctctcaagattaccggcttcctaagaaggcaaccaagactgcacccccagccctccccacaggctacgactcggaagaagaagaggagagcaggcccatgagctacgacgaaaagcgccagctgagcctggatatcaataagctaccaggagagaaactgggtcgggtagttcacataatccaggctcgcgagccatctctgagagactcaaaccctgaggaaatcgagatcgatttcgaaaccttaaagccctcaacactgcgagaattggaacgatatgttctgtcttgcttgcgcaagaaacctagaaaaccctatacaatcaaaaaaccagtgggcaagaccaaggaagagcttgccctggaaaagaaaagggagctggagaagcgtctgcaagacgtatccggacagctgaactccaccaaaaaacctcctaaaaaggcaaatgagaagaccgaatcaagcagcgcccagcaagtggctgttagccgcttgtctgctagcagctctagctctgattccagcagttctagtagcagttcttcatcatccgacacatcggacagcgattcaggatag

SEQ ID NO: 77525 - DNA, 2511 bp, Artificial Sequence
  derived and/or modified sequence
atgctgcaaaatgtaacgccacataataagttgccaggtgaaggcaatgcaggactcctgggacttggcccagaggccgccgccccaggcaagcgaattagaaagccatcattactttacgaagggttcgagagcccgaccatggctagtgtgcccgcacttcagctgacccctgccaaccctcctcctcccgaagtgagcaaccctaaaaagcccggccgagtgacaaaccagttgcaatatttgcacaaggtcgtgatgaaagcattgtggaaacaccaatttgcatggccattcagacagccggtcgacgccgttaagctggggctccctgattatcataaaataataaagcagcccatggacatgggaacgatcaaaaggaggctcgaaaacaattattactgggcagccagtgagtgtatgcaggattttaatacaatgtttaccaactgctatatttataacaagcctacagatgacatcgtgctcatggcacaaactctcgagaaaatattcttgcagaaagtcgctagtatgcctcaggaggagcaagaattggttgtcacgatcccaaaaaattcacataagaagggagcaaagttggcagctttgcaagggtccgtgaccagtgctcatcaggtgcccgccgtgtcttccgtgtctcacacagcgctgtataccccgcctcctgagatcccaaccactgtactcaacatccctcacccatcggtcattagtagccctctcctgaagtcactccattccgccggccctcctttgctcgctgtgacagccgcaccacctgctcaacctttggctaaaaaaaagggggtaaagagaaaggcggatacaacaacgccgacgccgacagcaatccttgcgcccgggtctcctgccagtccgccaggttccctggagcctaaagcagctagactcccacctatgcgacgcgagtcaggccgcccaatcaagcctccacgcaaggatttacctgattcgcagcagcagcaccagtctagcaagaagggaaagcttagcgagcagctgaaacattgcaatggcatcctcaaggaactcctgtccaaaaaacacgctgcttatgcatggcctttctacaagcctgtcgacgcctccgctcttgggttacatgactaccacgacatcattaagcatccaatggacctgtctactgtgaaacgaaagatggagaatcgggactaccgtgacgcccaggagttcgctgccgacgtgagactgatgttttctaactgttacaagtacaatccacccgatcacgatgttgtggcaatggcccgcaagctgcaagatgtcttcgaatttaggtatgctaagatgccggacgagcctctcgagcccggacctttgcccgtgtctacagcaatgccacccggcctggccaagtcttccagcgagagttcctccgaggagagttcaagcgaaagtagtagcgaggaggaggaggaggaggacgaagaggacgaggaggaggaggagagcgagtcgtctgacagtgaagaagagagagctcaccgtttggccgaacttcaagaacagttacgcgccgttcacgagcaattagccgctctctcacagggcccaattagcaaaccaaagcggaagcgagagaaaaaggagaaaaaaaagaaaaggaaggcggaaaaacaccgggggcgggcgggcgctgacgaagatgacaagggtccccgtgccccaaggcccccccagccaaaaaagtctaaaaaagcgtccgggtccgggggggggtctgccgcccttggcccatccggctttggcccgagcggagggtccggaacaaagctccaggcaggcgtgcagtggcgggatctcggcctgctccagccaccactgttaggcttcaagaggttttcttgccttagtctgccgagtagccaagactaccgcctccccaagaaggcaactaaaacggctcctccggcgcttccaaccggatacgattcagaagaggaggaggaaagtcgccccatgtcctatgatgaaaaacgccagctctctctcgatattaataagctgcccggagaaaagctgggcagggtggttcatatcattcaggcccgtgaacccagcctccgggatagtaaccctgaggagattgagatcgatttcgagaccctgaaaccatctaccttgcgcgagctcgagagatatgtcctgtcttgtctgaggaagaaaccccggaaaccctatacaatcaagaagcccgttggtaaaactaaggaggagctagctttggagaagaaaagggaattggagaaaaggttacaggacgtgtctggccagctgaactctaccaagaagcctcctaagaaggccaatgagaaaacagagtcatcgtcagctcaacaggttgctgtatctcgcctgtctgccagctcaagttcatcggactctagttccagcagctcttcctcttcctcgagcgatacatccgactctgatagcggctag

SEQ ID NO: 77526 - DNA, 2511 bp, Artificial Sequence
  derived and/or modified sequence
atgcttcagaatgtaaccccgcataacaaactacctggtgaaggcaatgcgggccttttgggattgggacctgaggcagccgctccggggaaaaggatccgcaagccgtctctgttatatgagggtttcgaatccccaacaatggcaagcgtgccagccttgcagttaactcctgctaatccaccgcctcccgaagtgagcaatccaaagaaacctggcagagttactaatcagctgcagtacctccacaaggtagtcatgaaggcgctttggaagcaccagtttgcttggcctttccggcagccagtcgacgctgtcaaattggggttgcccgactaccacaagattatcaaacagccaatggatatggggactattaaacgaaggctggagaacaattattattgggcagccagcgaatgcatgcaggactttaatactatgtttactaactgctacatatataacaaacccacagatgatatcgtccttatggcacagaccctggaaaagatatttctgcagaaggtcgcctccatgccacaggaggaacaggaattggtggtaacaattcctaagaactctcataagaagggcgcgaagctcgcagctcttcaaggcagtgtgacatctgcacaccaggtgcctgcagtgagcagtgtgtctcacacagcactttacacacccccccctgagatcccgacaacagtgctcaatatcccacatcctagcgtgataagcagccccctgctcaagtcactgcattccgcagggcctccactcctggctgttactgcagcacctccagcccagcctcttgctaaaaaaaaaggtgtcaaaaggaaggccgacaccacaacgcccactcctaccgccatcttagcaccagggtcacctgcatcgcctccggggtcactggagcctaaggcagcgcgcctccccccgatgaggagagagagtgggcgccctatcaaacccccacggaaagatctgccagattcacaacagcaacaccagtcctccaaaaagggaaagttgtccgagcagttaaaacactgtaacggcatcttaaaagaattactgtctaaaaagcatgccgcttacgcctggcctttttacaaaccagtggatgcgtccgccttggggcttcacgattatcacgacatcattaaacatcccatggatttatctacggtgaaacgaaagatggaaaaccgcgactatcgggacgcccaggagtttgccgcagacgtgcgcctaatgttctctaactgctacaagtacaaccctccggatcacgatgtggttgcgatggcacgcaagctgcaggatgtttttgagttcagatacgctaagatgcccgacgaaccactcgaacctgggccccttccggtgagcactgctatgccgcctggcctggcgaaaagctccagtgaatcctccagcgaagagtcgtcctctgagagcagcagtgaggaggaggaggaggaggacgaggaggatgaggaggaagaggagtctgaatcatccgattcagaggaagagcgagcacatcggctggcagaactgcaggaacagctcagagctgtgcacgaacagctcgctgctttgtcccagggacccataagcaaacctaaaaggaagcgggagaagaaggaaaaaaaaaaaaagcggaaagccgagaagcatcgcggcagggccggcgctgacgaagacgacaagggtccgcgcgcgcccaggccaccccagcccaagaagtctaaaaaggcctcgggttccgggggcggatccgcagccctcggccctagcgggtttggcccaagcggggggtctggtaccaagctgcaggccggggtacaatggagagatctcggcctgctgcagccccctctcctggggtttaaaagattctcctgcctgtctcttccatcctcccaggactacagactgccaaagaaggccaccaagacggctcctcctgctcttccaaccggatatgacagcgaagaagaagaggagagtcggccaatgtcctacgatgaaaagcgccagctgtctctggacatcaacaaacttcccggggaaaaactcggacgcgtggtccacattatccaggcgagagaaccgagtctgcgcgattccaatccagaggaaattgagatcgatttcgagaccctcaagccttccacattgagagagctcgaacgctacgtcttgagctgtctacgcaagaagcccagaaaaccctacaccataaagaaaccggtcgggaagacgaaagaggaactggcactcgagaagaaacgtgagctggaaaagcgcctacaggatgtctctgggcagctcaatagtactaagaaacctccgaagaaagctaatgagaagaccgagtcctccagcgcgcagcaagttgccgtctccaggctctccgcttcctcaagctcatccgatagctccagttcaagttcgtcttcatcatcctccgacacgtctgatagtgactctggttag

SEQ ID NO: 77527 - DNA, 1947 bp, Artificial Sequence
  derived and/or modified sequence
atgttgcagaatgtgactccgcacaacaaactgccaggtgaggggaacgctggcctgctggggcttggcccagaggcagcagcgcctgggaaaagaattcgaaagccgtcattgctgtatgaggggttcgagagccccacgatggcctcagttccagcactgcagctgacacccgcaaatccccctccacctgaagtatccaaccccaaaaaacctggacgcgtgaccaaccaactccagtacctgcataaggtagtgatgaaggctctctggaaacaccagttcgcatggccctttaggcagccagtggacgcagtcaagcttggcctccctgattaccacaaaatcatcaaacagcctatggatatggggacaatcaaacgccgcctcgagaacaactactactgggccgcctccgaatgcatgcaggatttcaacaccatgttcactaactgttatatctacaacaagcctaccgacgatatagtattaatggcccagactctcgagaagatctttttacagaaagtagcctctatgccacaagaagaacaggagcttgtggttaccatcccaaaaaacagtcacaaaaagggggcgaagctcgctgcacttcagggatctgttactagtgcccatcaggtgccggctgtgtcaagcgtatctcacactgcgctttacactccccctcccgaaatcccaacgactgtactgaatattccgcatcccagcgtgatctcgtcaccgctcctgaagagtcttcacagcgccggacccccattactcgcagtgacagcagccccccctgcccaacctctcgccaaaaagaagggagtaaaacggaaagccgacaccactactcccactccaacagccatcctcgcccctgggtccccagccagtccacctggttctctcgagccaaaagcggcgagactgccccccatgagacgtgaatctggccgcccaattaaacctccacgaaaggacctgcctgattcacagcagcagcatcaatctagcaagaagggaaagctgtcagagcagcttaagcactgtaacggaatcctaaaggagttattgagcaagaaacacgcggcatatgcctggcccttctataagcccgtagatgcaagtgcactcgggctccacgactaccacgacattatcaagcatcccatggacctgagcaccgtgaagaggaagatggaaaaccgggactatcgggacgctcaggagttcgccgcggatgtgcggctgatgttttcaaattgctacaagtacaatcctcccgatcacgacgtagtcgcaatggcacgcaaacttcaagacgtcttcgagttccgatatgcgaagatgcctgatgaacccctggagcccggcccattgcccgtgtccaccgcgatgccgcccggtttggcaaagtcatcgtctgaatcctcaagcgaggagtcatccagtgaatcatcctcggaggaggaggaagaggaggatgaggaggatgaggaagaagaggaaagcgaatcaagcgacagcgaggaggaacgggcccacaggcttgctgagcttcaggagcagttaagagccgttcatgagcagctggcggctctgtcgcaggggcctattagtaagccaaaacggaaacgcgagaaaaaggaaaaaaagaaaaagagaaaagcagaaaaacacaggggccgtgccggagcggatgaggatgataagggtcctagggcacctaggccaccccagccaaaaaagtccaagaaagctagcggtagtggaggcggatcagcagctctcggaccaagtggcttcgggccatccggagggtctggtaccaaactccaggcgggagtgcagtggagagacctaggtctcttgcagcctcccctgctggggttcaagcggttctcctgcctgagccttccaagttcccaggactactag

SEQ ID NO: 77528 - DNA, 1092 bp, Artificial Sequence
  derived and/or modified sequence
tgagcgaagagtagtagcgagtctagcagtgaggagtcttcctctgaaagcagtagtgaggaggaggaggaagaagacgaggacgaagaagaagaagaatccgagtcctccgatagtgaggaagagcgtgcacacaggctcgccgagcttcaagagcagttaagagcagtgcacgaacaacttgctgctctgtcccaggggcccatctccaagcccaaacgtaaacgagaaaaaaaagaaaagaaaaaaaaacggaaggctgaaaagcatagaggaagagccggggccgatgaagacgacaagggccctcgggccccccgtccccctcagccaaagaaatccaaaaaggcttcaggatccgggggaggtagcgcagcacttggtccatcggggttcggtccatccggaggatctgggaccaagttgcaggcgggcgtgcagtggagagacttaggcctgctccaaccaccactcttagggttcaagcggttttcgtgtctgtcgctgccctcctcgcaggactaccggttgccaaaaaaggccactaagacagctccccctgcacttcctaccggctacgactctgaggaggaagaggaatcaaggcccatgtcctatgatgagaaacgacagctgtccctcgacatcaataagctaccaggagagaaactcgggagggtggtgcatattatacaggcccgcgagccatccctgagggattccaaccctgaggagattgagattgacttcgagaccctgaaaccatccactctccgggagctcgagcgatacgttctcagctgcctaaggaagaagccgcgcaaaccatacacaataaagaagccagtaggcaaaaccaaagaagaactggcactggagaagaagcgtgagcttgaaaagcggttgcaggacgtatcgggtcaactgaatagtaccaagaagccgcccaagaaggccaatgaaaaaaccgaaagcagttctgctcagcaggtcgcagtcagtcgcctgtccgctagctccagctcatccgacagcagtagcagctcttcatcgtccagtagcagcgacacttctgactccgacagtggttag

SEQ ID NO: 77529 - DNA, 2511 bp, Artificial Sequence
  derived and/or modified sequence
atgctgcagaacgtgactcctcacaataaactgcccggtgaaggaaacgcaggcctgcttgggctaggacccgaggcagctgctccaggcaagcggatcagaaagccatcactgctgtacgagggcttcgaatccccaacgatggcatctgtgcctgctttacaactcacgcctgctaaccctccaccaccagaagtatccaatccaaaaaagcctggacgagttacaaatcagctacagtatcttcacaaggtagtgatgaaggctctgtggaagcaccagtttgcctggcctttcaggcaaccagttgatgcagttaagcttggactgcccgactaccacaagatcataaagcagcctatggatatggggaccattaaacgccgcctcgagaataactactactgggcagcctcggagtgtatgcaagactttaacacgatgtttaccaactgctacatttataacaaacccaccgatgacatagtgctaatggctcagaccctggaaaagatttttttgcaaaaggtcgccagtatgccacaggaggaacaggagcttgttgtaactattcccaaaaactcccacaagaagggagctaagctggcagcgttgcagggttctgtaacctcggctcaccaggtgccggcagttagcagtgtctcacatactgcactgtacacaccgccacctgaaataccgactacggtgctgaatatcccccacccctcagtgatcagcagcccacttttaaagagcctccactctgccggaccacctctgctggcggtcactgctgccccacccgcgcaacccctggctaagaagaaaggagtaaagagaaaggccgacaccaccaccccaacacctaccgcgattctggcacccgggagtcccgcttcccctccgggatccctcgagcccaaagccgctaggctaccgccaatgcggcgggaaagcggtcggccgatcaaacccccacgaaaggatttgcccgattcgcaacaacagcaccaaagttcgaaaaagggtaagctgtcagagcagctgaaacattgcaacggcattttgaaggaacttctgagtaagaagcatgcggcctacgcgtggcctttctacaagcccgtggacgctagtgccttagggctccacgattaccatgatattatcaaacacccgatggacttgagcaccgtaaagaggaagatggagaatagagattacagggacgctcaagaattcgcggcagatgtgaggctcatgtttagcaattgttataagtacaatccaccggatcatgatgttgtcgcaatggcaaggaagctgcaggatgtatttgagtttcgttacgccaaaatgcccgacgaaccactggagcccggtcctctgcccgtctctaccgcgatgccacctgggctggccaaaagctcgagcgagtcgtcttcggaggaatcttccagcgagagcagttcggaagaggaggaagaggaggatgaggaggatgaagaagaggaagagtccgagtctagcgattctgaggaggagcgggcgcatcgcctggccgagcttcaggagcaactgagagccgtgcacgagcagctggccgccctgtcacagggccccattagtaagcccaagcggaagcgagaaaaaaaagagaagaaaaagaaaaggaaggccgagaagcatcgtggtcgggccggggccgatgaagatgataagggcccacgtgctccaaggccgcctcagccgaagaagagtaaaaaagcatctgggtctggtgggggatcagcggcgttaggtccctccggcttcgggcccagtgggggaagcggtacgaaattgcaagcaggggtgcaatggcgggatctcggcttactgcagcccccactgctaggctttaaaaggttctcgtgtttatccctgccctcgtcccaagattatagactccctaaaaaggccacgaagaccgcccctccggctctgcctaccggatacgacagcgaggaagaggaagaatctagaccaatgtcatatgatgaaaagagacagctgtctctggacattaataagctgccaggggagaagctaggtagagtcgttcatatcattcaagctagagagcctagtctgagggacagcaacccagaggagattgaaatcgacttcgaaacgctcaaaccaagtacactgagagagctggaacggtacgttctgtcctgtcttcgaaaaaaacctcgaaagccttacaccatcaagaagccagtcggtaaaacgaaagaggagctggccctcgaaaaaaaacgggaactcgagaagagactgcaggatgtctctggtcagctgaacagcacaaaaaaaccacccaaaaaggccaacgaaaagaccgaatcttcatctgcccagcaggtagccgtttcgcgactgagcgcttcatcttcttctagtgattcaagttcttcctccagctcctcttcctcaagcgacaccagcgatagcgattctggttag

SEQ ID NO: 77530 - DNA, 2511 bp, Artificial Sequence
  derived and/or modified sequence
atgctccagaacgtgactcctcacaacaaattgcctggcgaggggaatgcaggactactgggtctaggacctgaggcggccgctcctggaaaaagaatcagaaagccttccttgctctatgagggcttcgagtcaccaaccatggctagcgtccctgctctccagttaactcctgctaacccaccaccacccgaggtctcgaaccccaagaaacctggccgcgtcacaaatcaattgcagtacttgcacaaggtggtcatgaaagctctctggaaacaccagtttgcttggccctttagacagccggtggatgctgtcaagctagggctgcctgactaccacaaaatcattaagcaacctatggatatgggcaccattaaacggcggctggagaacaattattattgggctgcttctgaatgcatgcaggacttcaacacgatgtttaccaactgttatatttataataaaccgacagatgatatcgtgctgatggctcaaacccttgaaaaaatattcctccagaaggtcgcctccatgccacaggaggagcaagagctagttgtaacaatcccaaagaattcacacaaaaagggggccaaactagctgccctgcaagggtccgtcacaagtgcccaccaggtgcctgcagtgtcctcagtttctcatactgctctgtatactccaccgcctgagatccctaccaccgtcctaaatattccccaccctagcgttatatcctctcctttgctgaaaagcctgcattcagcgggccctccactgctcgctgtgacggcagctccccccgcacagcccctggccaaaaagaagggtgtaaagcgcaaagccgacaccactactcccacacctaccgcaatcctggccccaggctcaccagcaagcccgcctgggtccctcgagcctaaagccgctcgacttcctccaatgcggcgcgaaagcggtcgtcccatcaagccccccagaaaagacctgcctgacagtcagcagcagcatcagtcttccaagaagggtaaactttctgagcagctgaaacattgcaacggtatccttaaagagctgcttagcaagaaacatgcagcctacgcctggcctttctacaaacccgtcgatgccagtgcactcggcctgcacgactaccatgatattattaagcacccaatggatcttagcacagtcaagcggaaaatggagaacagagattatcgggacgctcaggagtttgctgcagatgtgaggctcatgttttccaattgctacaagtataaccctcctgaccatgatgttgtggccatggcccgtaagcttcaagacgtgttcgagtttaggtacgctaagatgcctgacgagccattggagcctggaccgctacctgtttcgacagcaatgccgcccgggctggctaagtccagctccgaatcaagcagcgaagaaagctcaagcgaatctagtagtgaagaggaagaggaggaggatgaagaagacgaggaagaggaggaaagcgagagctccgattccgaagaggagcgggcccaccgtttggctgagctgcaggagcaactacgcgctgttcatgagcagctcgctgccctgtctcagggacctatctccaagcctaagcgcaagcgcgaaaagaaggaaaaaaagaagaaacgcaaggctgaaaagcacaggggccgggcaggagccgatgaagacgacaagggccccagagcccctcggccaccgcagcccaagaagagcaagaaagcttccggtagtggcggcggcagcgccgctctcggaccatctggctttgggccaagtggaggcagtgggactaagctgcaagccggagtgcagtggcgggatcttgggcttttgcagccaccactgcttggcttcaagcgattctcctgtctcagcctacctagcagccaggattacaggcttccaaagaaggctacaaagacggcacccccagcactgcctactggctatgattcagaagaggaggaggaaagccggcccatgtcctacgacgaaaaaaggcaactgtccctcgacatcaataagttaccgggagaaaagctgggacgagtggtccacatcattcaggcaagggagccatcgctccgcgactcaaatccggaggaaatcgagatcgattttgagaccctgaagccatctactctgcgcgaactggaacgctacgtgctaagttgcctgcgtaagaagccccggaagccatacactatcaagaagcccgtggggaagactaaagaggaacttgccctagagaaaaaacgcgagcttgaaaagcgactgcaagacgtgtctggccagctcaacagcaccaaaaaacccccaaagaaagcaaatgagaagaccgaatctagtagcgcccagcaagtagcagtgtcacggctgagcgcctcctcaagcagcagcgactcctcttcaagttcatcatctagctcctcctcagataccagcgactccgactctggatag

SEQ ID NO: 77531 - DNA, 2511 bp, Artificial Sequence
  derived and/or modified sequence
atgctccaaaatgtgacaccgcacaacaagctcccaggcgaaggcaatgctgggcttctgggtttgggacccgaggcagctgcacctggaaaaaggatccggaagccatcactcttgtatgaagggtttgagagtcctactatggcatctgtgcctgctctacagctgactcccgccaatcctccaccgcccgaagtctcaaacccaaagaaacctgggagggtaaccaatcagttgcagtatcttcacaaggtggttatgaaggctctctggaagcaccagttcgcatggccatttcgccagcctgtggatgccgtgaagctcgggctccccgactaccataagataatcaaacaaccgatggacatgggcacgatcaagcgacggctcgaaaacaactactattgggctgcttcagaatgtatgcaagacttcaatacaatgttcacaaattgttatatctacaataagcccaccgacgacatcgttctgatggctcagactctggaaaaaatctttctccagaaggtggcttcaatgcctcaagaggaacaagagctcgtggttacaatccctaagaattcccacaagaaaggggctaagttggccgctctgcagggaagcgtaacgtctgctcatcaggtccctgccgtttcaagcgtgagtcacactgccctctacaccccacccccagagattccaacaacagtctttaatataccccacccctcggtgatctcctcacctctcctcaagtcgctgcatagcgccgggccaccgctgttagccgtaaccgccgccccccccgcgcaaccccttgctaaaaagaaaggcgtcaagagaaaagccgacactacaacccctactcccacggccatacttgcccctggctcacctgcaagcccgccaggctcgctcgaacctaaagcagcccggttgccccctatgcgcagggaatccggtcggcccattaagccccctcggaaggatttacccgacagccagcagcagcatcagtcgtcaaagaaagggaagttgtcagagcaactgaaacattgcaacggaattctcaaggaactgctgagcaagaagcacgctgcgtacgcatggcctttctacaagccggtcgacgcgtctgcgctgggcctgcacgactatcacgatatcatcaaacatccaatggacctcagtactgtcaaaagaaaaatggagaaccgggattatcgggacgctcaggaatttgctgccgacgttagactgatgttctctaactgctataagtacaatccacctgaccatgacgtggttgctatggctaggaagctccaggatgtctttgagtttaggtatgcaaagatgcctgatgagcctcttgaaccaggccccctgccagttagcaccgccatgcctccaggccttgccaaaagttcttctgaaagtagttctgaggaaagctcatccgaatctagcagtgaagaggaggaagaagaggatgaggaggacgaggaggaagaagaatctgagagctccgattcggaggaggaacgcgcacacagactggccgagctccaggagcagctccgggcagtgcacgagcagctggctgctttgtcacagggccctatctcgaaacctaaaaggaagagggagaagaaagagaagaagaagaagcgtaaagccgagaagcataggggtcgagctggcgctgatgaagacgataaggggccacgcgcccctcgccccccgcagcccaagaagagcaaaaaggcttcgggcagcggtggggggagcgctgcactgggccctagcggcttcggaccctctggcggctccgggactaagctgcaagctggagtgcagtggcgggacctggggctgctgcagcctccactgctcggttttaagcgattctcatgcctgtcgctgccttcctctcaaaactataggctcccaaagaaagctaccaagaccgcacctccggccctgccaacaggctatgatagcgaggaggaggaggaatcgaggccaatgagttatgatgagaaacgtcagctgtccttggacatcaacaaacttccaggcgagaaacttggacgggtggtgcacattatccaggctagggaacccagcctgcgggattctaacccggaagagatcgagatcgacttcgagacactgaagcctagcacactgagagaattggaaaggtacgttctgtcttgcttacgcaaaaagcccagaaagccctacacaattaagaagcccgtcggcaaaacgaaagaggagctggccttggagaagaaacgggagttagagaaacgcctgcaggatgtctccggccaactgaacagcaccaagaagccccctaaaaaggccaatgaaaaaacagagagctcgtccgcccagcaagtcgccgtcagtcggttatccgcttcatcatccagcagtgatagctctagttcgtcctcctctagttcaagttctgacacaagtgactcagactcaggctag

SEQ ID NO: 77532 - DNA, 2511 bp, Artificial Sequence
  derived and/or modified sequence
atgcttcagaacgtcacccctcataataagctgcctggcgagggaaacgcaggcctacttgggctgggcccagaagctgcagctcccggtaagcgcatcagaaagcccagcctgctctacgaaggtttcgagtccccaacaatggcgtccgtgcctgctttgcagctcacccctgccaacccaccccccccagaagtgagtaaccccaaaaaaccaggacgcgtgaccaaccagttacagtatctccacaaggtcgtcatgaaagccctgtggaagcatcaattcgcctggcccttccgccagccggtggacgccgtgaagttagggttacccgattatcacaaaataatcaaacaacccatggatatgggcaccattaaacggcgcttagaaaacaattattattgggcagcatctgagtgtatgcaggatttcaataccatgttcaccaactgttacatatataataagccaaccgacgacatcgtgcttatggcccagacactagagaagatcttcctgcagaaagtagctagcatgcctcaggaagagcaagagcttgttgtgacaattccgaagaacagccataagaaaggtgctaaactggcagccctccaaggctcagtgaccagcgctcaccaagtgccagcagtcagcagcgtttctcacacagcactctatacaccaccgcctgagatccctacaaccgtgcttaacattccccaccctagcgtgattagtagcccactgctgaaatctttgcacagcgccggtcctcccctcttggccgttaccgccgccccccctgcccagcctctcgccaaaaagaagggagtcaaacggaaagctgacactactacaccaactccaaccgccatccttgcacctggatcacccgcctctcctccagggtcactggagcccaaggctgccagactaccccccatgcggagagagtccggacgcccaatcaaaccccccagaaaagatcttcctgactcacagcagcaacaccagagctcaaagaagggaaagttgtcagagcagctgaaacactgcaatggcattctgaaggagttgctgagtaagaagcatgctgcatacgcctggccgttttataaaccggtcgacgcaagcgccttgggcctccacgactatcacgacattatcaaacatcctatggacctgtcaaccgtgaaaagaaagatggagaatcgggactatcgtgacgcccaggaatttgcagccgacgtgcgccttatgttctcgaactgttacaagtacaatcctcctgatcacgacgtggttgccatggctcggaaactgcaggacgtgtttgagtttaggtatgcaaagatgcctgatgagccgctggagcccgggccacttcctgtgagcaccgccatgcccccagggctggccaaatcctcaagtgagagctcctccgaagaaagtagcagtgaaagcagcagcgaagaggaggaggaagaggacgaagaagacgaggaggaagaggagtccgagtcttccgattcagaggaagagagagcccacaggctggcggagctccaggagcagctcagggcagtacacgagcagctggcagctctcagccaggggccaatttcaaagcctaagcgtaaaagggaaaagaaagaaaagaaaaaaaagagaaaggccgaaaaacacagagggagagccggagccgacgaagacgataaagggcctagggccccgcggcctccccagcccaagaagagtaagaaggcgagtggctcaggggggggctcagccgctttaggtcctagtggattcggacccagcggcgggtccggaaccaagttgcaggccggtgtgcagtggcgggatttgggcttactacaaccacccttattgggtttcaaacggttctcttgcctcagcctcccctctagccaagattacagattacccaagaaagcgacaaaaacagctcccccggccctccctactggctatgattctgaagaagaggaggaatctaggcctatgtcctacgatgagaaacgccagctgtcattggatattaacaaactgccgggagaaaagctgggacgcgttgtgcatatcatacaggcaagggaaccatcactcagggatagcaaccccgaggaaatcgagatcgacttcgaaaccctcaagccgagcaccctgcgagaactcgaacgatatgttctctcatgtctccgaaagaagcccaggaagccttacactatcaagaagccagttggcaaaaccaaggaagaactggcgctcgaaaagaagcgcgagctcgagaaaaggctccaggacgtgagtggccagttaaacagcaccaagaagcctccaaagaaagcgaacgagaaaacggaatcgtcctctgcacagcaggttgcagttagtcgactttcggcttcctcatctagttccgactcctccagctcctcaagtagtagcagttcctcagacacctctgactcggacagtgggtag

SEQ ID NO: 77533 - DNA, 2511 bp, Artificial Sequence
  derived and/or modified sequence
atgctccagaatgtgacgccacataacaagcttcccggagaaggtaacgccgggttattggggctcggtcccgaagccgcggcacctgggaagaggatccggaaacccagcttgctttatgaagggtttgaaagtcccacgatggctagtgtgcccgcattgcaactaacgcctgctaaccctcctccgccagaggtttccaatcccaaaaaacctggcagggtgaccaatcaactgcagtatctccataaagttgtgatgaaggcactgtggaaacaccagttcgcctggccattcaggcaacccgtggacgccgtgaagttgggtctgcccgattaccacaagattattaaacagcctatggacatgggcacaatcaagaggcgcctagagaataattattactgggccgctagcgaatgcatgcaagatttcaacacaatgtttaccaactgctatatttataacaagccaaccgacgacatagtcctgatggcccagactttggaaaagatcttcctgcagaaagtcgcttcgatgccacaggaggagcaggagttggtggttaccattcccaaaaacagccataagaagggagccaaattggccgctttacagggatccgtaaccagcgcgcaccaggttcccgccgtgtcgagcgtctctcacaccgccctgtacacacccccacctgaaatccctacaaccgtgttgaacattcctcacccttcagtcataagctccccactgcttaagagtcttcattccgcgggaccccctttgctcgccgttaccgcggctcctcctgcccaacctctggctaaaaaaaaaggagtgaaacgtaaggctgataccaccacgccgacccccactgctattctggcacccggatcaccagcttcaccccctgggagcttggaacctaaagccgcccggctgccaccaatgagaagggagagcgggcgtcctattaaacctcctagaaaagaccttccagattcgcagcagcagcaccagagctccaagaagggtaaactgtctgaacagttgaaacactgtaacggaattctgaaagagctgctgtctaaaaagcacgccgcatacgcctggcctttctacaagcctgtggacgcttccgccctcggcctccacgactaccatgacattattaagcatcccatggatctgtccactgtcaagcggaaaatggagaaccgagactaccgggatgcacaggaatttgccgctgatgtacgacttatgttttcgaactgctacaagtataacccgccagaccatgacgtcgtcgcaatggcccggaaactgcaggacgtctttgagttcagatacgccaagatgccggacgaacctcttgaacccgggccactacctgtgagtacggccatgcccccagggctcgcaaagagcagcagtgaatctagttcagaggagagcagcagcgaaagctcttcggaggaggaggaagaagaagatgaagaggatgaagaagaagaagaaagcgagtcatccgacagcgaggaagagcgcgctcacagattagcagaactacaggaacaactcagggctgtgcacgagcagttagcagctctcagccaaggtcccatcagcaagcccaaacgaaaaagggaaaagaaggagaaaaaaaagaagagaaaggccgagaagcaccgtggaagagccggggcagatgaagacgacaagggtcctcgcgccccacgaccccctcaaccgaagaagagcaaaaaggccagtgggtcaggtggggggagcgccgccttggggccgagcggattcggaccaagcgggggctctggcacaaagttacaagctggcgtgcaatggcgggacttgggcctgttgcagcctcctctcttaggtttcaagaggttctcgtgcctgtccctgccttcatcccaggattatcgcctgcctaagaaggcgactaaaacagcccctccagccctacctaccggttacgattcggaggaggaggaggagtcccgcccgatgtcctacgacgagaaaagacaactgtcactggacataaacaaattaccgggagagaaactggggcgcgttgtacacattattcaagctcgggagccctcgcttcgggattccaaccctgaggagatcgaaatagacttcgagaccttaaaaccctcgacactccgggagctcgagaggtacgtcctgagttgtctgcggaaaaaaccgcgtaaaccatataccatcaaaaagccagttggtaagacaaaggaggaacttgccctggaaaaaaagcgggaacttgagaagcgcttgcaggatgtaagcgggcagctcaattcaaccaaaaagccccccaaaaaagccaacgagaagacagaatccagctctgcccagcaggtggccgttagtagactgagcgcctctagttcttctagtgactcctcttcttcttcttcatcatctagcagttccgacacgagcgatagcgactctgggtag

SEQ ID NO: 77534 - DNA, 2511 bp, Artificial Sequence
  derived and/or modified sequence
atgctccaaaacgtaacgcctcacaacaagcttcctggagagggcaatgccggactgcttggtctgggacccgaggctgcggctccaggaaaaagaattcgcaaaccaagtctactgtatgaaggattcgagtctcctacaatggcctctgtgcccgctttgcaactgacgcccgccaaccctccacctccggaagtcagcaacccaaaaaaaccagggcgagtcacgaaccaactacaatatctccacaaggtggtgatgaaggcactatggaaacaccagttcgcctggcctttcaggcaacccgtagacgccgttaagctggggctccctgactaccacaaaataatcaaacaacccatggatatgggaactatcaagaggcggttggagaacaactattactgggccgcctctgagtgtatgcaggatttcaacactatgttcacaaactgctatatatataacaaacccacagacgacattgtcctgatggcacaaactctggaaaagatatttctccaaaaggttgcgtctatgcctcaggaggagcaggagctcgtggtcacaatcccgaaaaactcccacaaaaagggtgctaaattggcggctctacaggggtctgtgaccagcgcccaccaggtccccgcagtttcaagcgtttcacacaccgcactttatacaccacctccagagatccccacaacagtgctgaatatccctcaccccagcgttatcagctccccacttctgaaaagcctccatagtgcaggacctccactcctcgctgtaactgccgctccacctgcccagccactcgcaaagaaaaaaggcgtgaagcgcaaagccgacacaacgactccgacaccaactgccattcttgcacctggaagccctgcgtctccccctggctctctggagccaaaagcagccagactgcctccaatgagacgtgagagtgggaggcccatcaaacctccgcgtaaggacctgcccgatagtcagcagcagcaccagagcagcaaaaaaggaaagttgagtgaacagttgaagcactgtaacggaatcctcaaagaactgctgagcaaaaagcacgccgcgtacgcctggccattttacaagccagtcgacgcatcagcactgggtctccacgactatcatgacatcataaagcacccaatggatctctctacagtgaagcggaagatggaaaatcgcgattaccgcgacgctcaggagttcgccgctgatgtgcgcctgatgttttctaactgctataagtataacccccctgatcatgacgtggtagccatggcccgaaagctgcaagacgtttttgagtttcgttatgctaaaatgccagatgaacctcttgagccggggcctctgccagtttccaccgcaatgccgcctggactggccaaatcaagttccgagtcctcttctgaggagtcttcttccgagtcaagtagtgaagaggaggaggaagaggatgaagaggatgaggaagaggaggaatccgaaagctcggactctgaggaagagagagcccacaggctggcagagctccaggagcagttgcgggctgttcacgaacagttggccgctctctctcagggccccataagtaaaccgaagcggaagcgtgaaaagaaggaaaagaaaaagaagagaaaagcggagaagcatagaggccgggcaggtgcagacgaggatgacaagggacctcgggccccgcggccgccccagcccaagaaatccaagaaggccagcggcagcggaggtgggtctgcagctctaggcccatctggctttgggccatccggcggatccgggactaagttacaggctggtgtgcagtggagggacttgggactgctgcagcccccactgcttgggttcaagagattctcatgcctctctcttccttcaagccaggactaccgattacctaaaaaggctactaagacagcccccccagcactgcctaccggatatgactctgaggaggaagaagaaagtaggcctatgtcatacgatgagaagcgccagctcagcctggatattaacaaactgccaggagagaaactcggtagagtcgttcacataattcaggccagggaaccctccctgcgggattccaaccccgaagaaatcgagatagactttgagactttgaaaccttcaacgctgagagaattggagagatatgtactctcttgtctccgcaagaaacctagaaaaccatatacaataaaaaaaccagttggaaaaacaaaggaagaactggcactcgaaaaaaagcgcgagctggagaaaagacttcaagatgtgtcaggtcagcttaactcaactaagaaacctccaaagaaagctaacgagaagactgagtcctcgtccgctcaacaggtggccgtttcacgcctgtccgcgtcttccagttcttcggattccagttcttcttcctcctcttcttcgtcgagcgacacttcagactccgactccggttag

SEQ ID NO: 77535 - DNA, 2511 bp, Artificial Sequence
  derived and/or modified sequence
atgctgcaaaacgtgacacctcacaataaactgccaggagaggggaacgccggactgctcggactgggaccagaggctgcggcccctggcaaaagaatacgaaaaccttctctgctctacgaagggttcgaaagccccactatggcaagtgtgcctgccctccagctcactccagccaaccctccaccccctgaagtctccaatccaaagaagcctggccgcgtaaccaatcagctccaatacctccataaggtggtgatgaaggccctctggaagcaccagtttgcatggccctttcgccagcctgtcgacgccgtcaaattaggtttgccggattatcataaaatcatcaaacagccaatggacatgggaaccatcaagcgacggcttgagaacaattattactgggctgcttcagagtgtatgcaggacttcaatacaatgtttaccaactgctacatctacaacaaaccaaccgacgacatcgtgttaatggcccagacactcgagaagatcttcttgcagaaagtcgcctcgatgccccaggaggagcaggagctcgtggtaaccatccctaagaactcccataagaaaggggcaaaactcgctgccttgcagggctccgttacaagcgcccatcaagtcccagctgtttcttccgtgtctcatacagccttatacacaccaccgccagagatccccaccactgtgttcaatatcccgcacccaagcgtcatttccagcccgctgctcaagagtctgcacagtgccggcccaccactgcttgccgttacagctgcccctccggcacaaccactcgcgaagaaaaagggagtgaagcgcaaagccgatacgaccaccccaacgcccaccgcgattctcgcacctggctcccctgctagcccacccggctctctcgagccgaaagccgcccgattgccccctatgagacgtgaaagtggaaggccaatcaagccaccccgcaaggatctcccagatagccagcaacagcaccagtcaagcaagaagggcaaactctctgaacagttaaagcactgtaatggcattctaaaagagctgctgtctaagaagcacgctgcctacgcttggccattttacaaacccgtggacgcctcagctctgggcctccatgattaccacgacatcattaagcacccgatggacctgtcaaccgtgaaaagaaagatggagaacagagactacagggacgcccaggagttcgctgccgacgtcagactgatgttttccaactgttacaaatataaccctcccgaccacgacgtggtggcaatggcccgaaaactgcaagacgtgtttgagttccgatatgccaaaatgccggacgagcctctggaaccgggacctctaccagtctcaactgccatgccacccggcctggctaaatctagctctgaatcttcttctgaagagagctcatctgagtcatccagcgaagaggaggaggaggaagacgaggaagatgaagaggaggaggaaagtgaatccagcgattctgaagaagaaagagcgcaccgcctggcagaactccaagagcagttgcgcgctgtgcacgaacaactcgccgctctgagccagggaccaatcagtaagcccaagagaaagagggagaagaaggagaaaaagaagaagcggaaggcagaaaaacacagaggacgcgccggcgcagacgaagacgacaaagggcctcgggcccctagacctccccagcccaagaagagcaagaaagcatcaggctccggaggtggctctgcagcactcggaccgtccggcttcggaccttccgggggaagcggaactaaattgcaggccggtgttcagtggagggacctggggctgctgcagccacccctgctagggttcaaaaggttcagttgcctctccctcccctcctctcagaactaccggctcccaaagaaggcaacaaaaacagcgccccccgctctccctacgggctacgactctgaggaggaggaggaatccaggcccatgtcttatgacgagaaaaggcagctttccctggatatcaacaagctccccggggaaaaattggggcgggtcgtgcacataattcaggccagagaacccagcctgagggactccaatcctgaggaaattgagatcgactttgagactctgaaacccagtacgctgcgggaacttgaacggtacgttctgtcctgccttaggaagaagccgaggaaaccatacaccattaagaaaccggttggaaagactaaagaggaactggcccttgaaaagaagagagagctggagaagcgcctgcaagacgtgagcgggcagctcaactctaccaagaagccacccaaaaaagccaacgagaaaacggaaagcagttccgcacagcaggtggccgtgtccaggctcagcgccagttcatcctcttcggatagttctagcagctcctctagttcgtcaagcagtgacacatccgactccgacagtggatag

SEQ ID NO: 77536 - DNA, 2511 bp, Artificial Sequence
  derived and/or modified sequence
atgctgcagaatgtgaccccccacaacaagctgcccggggagggcaatgccggcctgctgggcctgggccctgaggccgccgcccctgggaagaggatcaggaagcccagcctgctgtatgagggctttgagagccccaccatggcctctgtgcctgccctgcagctgaccccagccaaccccccacctcctgaggtgagcaaccccaagaagccaggccgggtgaccaaccagctgcagtacctgcacaaggtggtgatgaaggccctgtggaagcaccagtttgcctggcccttccggcagcctgtggatgctgtgaagctgggcctgcctgactaccacaagatcatcaagcagcccatggacatgggcaccatcaagaggcggctggagaacaactactactgggccgccagcgagtgcatgcaggacttcaacaccatgttcaccaactgctacatctacaacaagcccacagatgacatcgtgctgatggcccagaccctggagaagatcttcctgcagaaggtggcctccatgccccaggaggagcaggagctggtggtgaccatccccaagaacagccacaagaagggggccaagctggccgccctgcagggctctgtgaccagcgcccaccaggtgcctgctgtgtcctctgtgagccacacagccctgtacaccccacctcctgagatccccaccaccgtgctgaacatcccccaccccagcgtcatcagcagccccctgctgaagagcctgcacagcgctggcccccccctgctggccgtgacagctgcccccccagcccagcccctggccaagaagaagggcgtgaagaggaaggctgacaccaccacccccacccccacagccatcctggcccctggcagccctgccagccccccaggcagcctggagcccaaggccgcccggctgccccccatgagaagagagagcggccggcccatcaagccacccaggaaggacctgcctgacagccagcagcagcaccagagcagcaagaagggcaagctgtctgagcagctgaagcactgcaatggcatcctgaaggagctgctgagcaagaagcacgccgcctatgcctggcccttctacaagcctgtggatgccagcgccctgggcctgcatgactaccatgacatcatcaagcaccccatggacctgagcacagtgaagaggaagatggagaacagagactacagagatgcccaggagtttgctgctgatgtgcggctgatgttcagcaactgctacaagtacaaccccccagaccatgatgtggtggccatggccaggaagctgcaggatgtgtttgagttccgctatgccaagatgccagatgagcccctggagcccggccccctgcctgtgtccacagccatgcctcctggcctggccaagagcagcagcgagagcagcagcgaggagagcagcagcgagagcagcagcgaggaggaggaggaggaggatgaggaggatgaggaggaggaggagagcgagagcagtgacagcgaggaggagcgggcccaccggctggccgagctgcaggagcagctgcgggctgtgcatgagcagctggccgccctgagccagggccccatcagcaagcccaagaggaagcgggagaagaaggagaagaagaagaagaggaaggccgagaagcaccggggccgggccggggctgatgaagatgacaagggcccccgggcccccaggcctccccagcccaagaagagcaagaaggccagcggcagcggcggcggcagcgctgccctgggccccagcggcttcggccccagcggcggcagcggcaccaagctgcaggccggcgtgcagtggagggacctgggcctgctgcagccccccctgctgggcttcaagcgcttcagctgcctgagcctgcccagcagccaggactaccgcctgcccaagaaggccaccaagacagcccccccagccctgcccaccggctatgacagcgaggaggaggaggagagccggcccatgtcctatgatgagaagaggcagctgagcctggacatcaacaagctgcctggagagaagctgggccgggtggtgcacatcatccaggcccgggagcccagcctgcgggacagcaaccctgaggagattgaaattgactttgagaccctgaagcccagcaccctgcgggagctggagagatatgtgctgagctgcctgaggaagaagcccaggaagccctacaccatcaagaagcctgtgggcaagaccaaggaggagctggccctggagaagaagcgggagctggagaagaggctgcaggatgtgtctggccagctgaacagcaccaagaagccacccaagaaggccaatgagaagacagagagcagcagcgcccagcaggtggccgtgtcccggctgagcgccagcagcagcagcagtgacagcagcagcagcagcagcagcagcagcagcagtgacaccagtgacagcgacagcggctag

SEQ ID NO: 77537 - DNA, 1947 bp, Artificial Sequence
  derived and/or modified sequence
atgctgcagaatgtgaccccccacaacaagctgcccggggagggcaatgccggcctgctgggcctgggccctgaggccgccgcccctgggaagaggatcaggaagcccagcctgctgtatgagggctttgagagccccaccatggcctctgtgcctgccctgcagctgaccccagccaaccccccacctcctgaggtgagcaaccccaagaagccaggccgggtgaccaaccagctgcagtacctgcacaaggtggtgatgaaggccctgtggaagcaccagtttgcctggcccttccggcagcctgtggatgctgtgaagctgggcctgcctgactaccacaagatcatcaagcagcccatggacatgggcaccatcaagaggcggctggagaacaactactactgggccgccagcgagtgcatgcaggacttcaacaccatgttcaccaactgctacatctacaacaagcccacagatgacatcgtgctgatggcccagaccctggagaagatcttcctgcagaaggtggcctccatgccccaggaggagcaggagctggtggtgaccatccccaagaacagccacaagaagggggccaagctggccgccctgcagggctctgtgaccagcgcccaccaggtgcctgctgtgtcctctgtgagccacacagccctgtacaccccacctcctgagatccccaccaccgtgctgaacatcccccaccccagcgtcatcagcagccccctgctgaagagcctgcacagcgctggcccccccctgctggccgtgacagctgcccccccagcccagcccctggccaagaagaagggcgtgaagaggaaggctgacaccaccacccccacccccacagccatcctggcccctggcagccctgccagccccccaggcagcctggagcccaaggccgcccggctgccccccatgagaagagagagcggccggcccatcaagccacccaggaaggacctgcctgacagccagcagcagcaccagagcagcaagaagggcaagctgtctgagcagctgaagcactgcaatggcatcctgaaggagctgctgagcaagaagcacgccgcctatgcctggcccttctacaagcctgtggatgccagcgccctgggcctgcatgactaccatgacatcatcaagcaccccatggacctgagcacagtgaagaggaagatggagaacagagactacagagatgcccaggagtttgctgctgatgtgcggctgatgttcagcaactgctacaagtacaaccccccagaccatgatgtggtggccatggccaggaagctgcaggatgtgtttgagttccgctatgccaagatgccagatgagcccctggagcccggccccctgcctgtgtccacagccatgcctcctggcctggccaagagcagcagcgagagcagcagcgaggagagcagcagcgagagcagcagcgaggaggaggaggaggaggatgaggaggatgaggaggaggaggagagcgagagcagtgacagcgaggaggagcgggcccaccggctggccgagctgcaggagcagctgcgggctgtgcatgagcagctggccgccctgagccagggccccatcagcaagcccaagaggaagcgggagaagaaggagaagaagaagaagaggaaggccgagaagcaccggggccgggccggggctgatgaagatgacaagggcccccgggcccccaggcctccccagcccaagaagagcaagaaggccagcggcagcggcggcggcagcgctgccctgggccccagcggcttcggccccagcggcggcagcggcaccaagctgcaggccggcgtgcagtggagggacctgggcctgctgcagccccccctgctgggcttcaagcgcttcagctgcctgagcctgcccagcagccaggactactag

SEQ ID NO: 77538 - DNA, 1092 bp, Artificial Sequence
  derived and/or modified sequence
tgagccaagagcagcagcgagagcagcagcgaggagagcagcagcgagagcagcagcgaggaggaggaggaggaggatgaagatgaggaggaggaggagagcgagagcagtgacagcgaggaggagcgggcccaccggctggccgagctgcaggagcagctgcgggctgtgcatgagcagctggccgccctgagccagggccccatcagcaagcccaagaggaagcgggagaagaaggagaagaagaagaagaggaaggccgagaagcaccggggccgggccggggctgatgaagatgacaagggcccccgggccccccggcccccccagcccaagaagagcaagaaggccagcggcagcggcggcggcagcgctgccctgggccccagcggcttcggccccagcggcggcagcggcaccaagctgcaggccggcgtgcagtggagggacctgggcctgctgcagccccccctgctgggcttcaagcgcttcagctgcctgagcctgcccagcagccaggactaccgcctgcccaagaaggccaccaagacagcccccccagccctgcccaccggctatgattctgaggaggaggaggagagccggcccatgtcctatgatgagaagaggcagctgagcctggacatcaacaagctgcccggggagaagctgggccgggtggtgcacatcatccaggcccgggagcccagcctgcgggacagcaaccctgaggagattgaaattgactttgagaccctgaagcccagcaccctgcgggagctggagcgctacgtgctgagctgcctgaggaagaagcccaggaagccctacaccatcaagaagcctgtgggcaagaccaaggaggagctggccctggagaagaagcgggagctggagaagaggctgcaggatgtgtctggccagctgaacagcaccaagaagccacccaagaaggccaatgagaagacagagagcagcagcgcccagcaggtggccgtgtcccggctgagcgccagcagcagcagcagtgacagcagcagcagcagcagcagcagcagcagcagtgacaccagtgacagcgacagcggctag

SEQ ID NO: 77539 - DNA, 2511 bp, Artificial Sequence
  derived and/or modified sequence
atgctgcagaatgtgaccccccacaacaagctgcccggggagggcaatgccggcctgctgggcctgggccctgaggccgccgcccctgggaagaggatcaggaagcccagcctgctgtatgagggctttgagagccccaccatggcctctgtgcctgccctgcagctgaccccagccaaccccccacctcctgaggtgagcaaccccaagaagccaggccgggtgaccaaccagctgcagtacctgcacaaggtggtgatgaaggccctgtggaagcaccagtttgcctggcccttccggcagcctgtggatgctgtgaagctgggcctgcctgactaccacaagatcatcaagcagcccatggacatgggcaccatcaagaggcggctggagaacaactactactgggccgccagcgagtgcatgcaggacttcaacaccatgttcaccaactgctacatctacaacaagcccacagatgacatcgtgctgatggcccagaccctggagaagatcttcctgcagaaggtggcctccatgccccaggaggagcaggagctggtggtgaccatccccaagaacagccacaagaagggggccaagctggccgccctgcagggctctgtgaccagcgcccaccaggtgcctgctgtgtcctctgtgagccacacagccctgtacaccccacctcctgagatccccaccaccgtcttcaacatcccccaccccagcgtcatcagcagccccctgctgaagagcctgcacagcgctggcccccccctgctggccgtgacagctgcccccccagcccagcccctggccaagaagaagggcgtgaagaggaaggctgacaccaccacccccacccccacagccatcctggcccctggcagccctgccagccccccaggcagcctggagcccaaggccgcccggctgccccccatgagaagagagagcggccggcccatcaagccacccaggaaggacctgcctgacagccagcagcagcaccagagcagcaagaagggcaagctgtctgagcagctgaagcactgcaatggcatcctgaaggagctgctgagcaagaagcacgccgcctatgcctggcccttctacaagcctgtggatgccagcgccctgggcctgcatgactaccatgacatcatcaagcaccccatggacctgagcacagtgaagaggaagatggagaacagagactacagagatgcccaggagtttgctgctgatgtgcggctgatgttcagcaactgctacaagtacaaccccccagaccatgatgtggtggccatggccaggaagctgcaggatgtgtttgagttccgctatgccaagatgccagatgagcccctggagcccggccccctgcctgtgtccacagccatgcctcctggcctggccaagagcagcagcgagagcagcagcgaggagagcagcagcgagagcagcagcgaggaggaggaggaggaggatgaggaggatgaggaggaggaggagagcgagagcagtgacagcgaggaggagcgggcccaccggctggccgagctgcaggagcagctgcgggctgtgcatgagcagctggccgccctgagccagggccccatcagcaagcccaagaggaagcgggagaagaaggagaagaagaagaagaggaaggccgagaagcaccggggccgggccggggctgatgaagatgacaagggcccccgggcccccaggcctccccagcccaagaagagcaagaaggccagcggcagcggcggcggcagcgctgccctgggccccagcggcttcggccccagcggcggcagcggcaccaagctgcaggccggcgtgcagtggagggacctgggcctgctgcagccccccctgctgggcttcaagcgcttcagctgcctgagcctgcccagcagccagaactaccgcctgcccaagaaggccaccaagacagcccccccagccctgcccaccggctatgacagcgaggaggaggaggagagccggcccatgtcctatgatgagaagaggcagctgagcctggacatcaacaagctgcctggagagaagctgggccgggtggtgcacatcatccaggcccgggagcccagcctgcgggacagcaaccctgaggagattgaaattgactttgagaccctgaagcccagcaccctgcgggagctggagagatatgtgctgagctgcctgaggaagaagcccaggaagccctacaccatcaagaagcctgtgggcaagaccaaggaggagctggccctggagaagaagcgggagctggagaagaggctgcaggatgtgtctggccagctgaacagcaccaagaagccacccaagaaggccaatgagaagacagagagcagcagcgcccagcaggtggccgtgtcccggctgagcgccagcagcagcagcagtgacagcagcagcagcagcagcagcagcagcagcagtgacaccagtgacagcgacagcggctag

SEQ ID NO: 77540 - DNA, 2511 bp, Artificial Sequence
  derived and/or modified sequence
atgctgcagaacgtgaccccccacaacaagctgcccggcgagggcaacgccggacttctaggtctgggcccagaagccgccgcacccggcaagcgaattagaaaaccctccctcctttatgaaggattcgaatctcctaccatggcatccgtcccggccctgcagctgacaccggcaaaccctcccccccctgaggtgtccaatccaaaaaagcccggtagagtgacaaaccagttacagtatctgcataaagtggtgatgaaggctctttggaaacaccagtttgcctggccattccggcagccggtcgacgcagtgaagctgggcctcccagattaccacaagatcatcaagcagcctatggatatgggaactatcaaacgtagactggaaaacaactattattgggccgcatcggaatgtatgcaggatttcaataccatgtttactaattgttatatctacaacaaacctacagacgatattgtcttaatggctcagactctggaaaagatatttcttcagaaggtggcgtccatgccacaagaggagcaggagcttgtcgtgaccattccaaagaacagccacaagaagggcgctaagctggccgcacttcaaggctccgtgacttccgcacatcaggttccagcagtatcttccgtttcacacaccgccttatatacccccccacctgaaatccccacgacagtcctgaatattccgcatccttctgtgatctcctccccgcttcttaaatcactgcattcagcgggaccaccgctgctcgccgtaactgccgccccacctgcgcaaccccttgccaagaagaagggcgtgaaaaggaaggccgatactactacccccacacccactgcgatcctcgcccctggatctcctgcctcacccccaggcagcctagagcccaaagctgcccgattacccccgatgagacgggaaagcggtaggcctattaaacccccaaggaaagatctgcccgattctcagcagcaacatcagtcgtctaagaaaggcaaattatccgaacagctcaaacattgtaatggcatactaaaggaactcctctcaaaaaagcatgccgcctacgcctggccgttttacaagcccgtcgatgccagcgctctggggttgcacgactatcacgacataatcaaacatcccatggatctgagtaccgtgaagaggaagatggagaatcgcgattaccgtgatgcccaagagttcgccgccgatgtgcgacttatgttcagtaactgctataaatataacccacccgatcacgacgtggtggcaatggcccgcaagttgcaggacgttttcgaatttcggtatgctaaaatgccagacgaaccgctggagcccggaccactgccggtgtctaccgcgatgccacctggtctggctaagagttcctctgagtccagcagcgaagaatcctcatcagagtcaagttccgaggaagaagaggaagaggatgaggaagatgaagaggaagaggagtcggagtcatctgactcagaggaggaacgtgcacaccggttagccgagctgcaagaacagctgagggcagtacatgaacaattggcagccctttcgcagggccctatatcaaaacctaagcgaaagcgggagaaaaaagaaaaaaagaagaagcgaaaggccgaaaagcatcgaggccgggctggcgcagatgaggacgataagggaccccgcgctccacggccaccccagccaaaaaagagtaaaaaggcttccgggtccggcggcggaagcgctgctctcggacctagtgggtttggcccatcaggagggagcggcacaaaactccaggctggcgtgcagtggagggacttgggcctgttacaaccgcctttattggggtttaagcggtttagctgcctgtccctgcccagttcacaggactacagacttcccaagaaggccactaagaccgcgccccccgcccttcccacagggtatgattcggaggaagaagaggaaagcagacccatgtcatacgatgaaaagagacagctgagcttggatatcaataagctgccaggagagaagctgggaagggtggtccacatcattcaggctagagaaccgtctctaagagattcaaatcccgaagaaattgagatagacttcgagaccttaaagcccagtacactgcgcgagctagaacgttatgttctcagttgcctgagaaaaaagccaagaaaaccatataccattaagaagcccgtgggcaaaacaaaagaggaattagccctcgagaagaagcgagagctggaaaagaggctccaggatgtctcaggacagttgaactctaccaagaaacccccaaaaaaggctaatgagaagacagaaagctccagcgcccagcaggtcgccgtcagccgcctgagcgcgagctccagttcctctgacagctccagcagctcctctagtagtagttcatcagacacctccgactcagattccggttag

SEQ ID NO: 77541 - DNA, 2511 bp, Artificial Sequence
  derived and/or modified sequence
atgctgcagaacgtgaccccccacaacaagctgcccggcgagggcaacgctgggctattgggactgggacccgaggctgccgcacctggcaagaggatcagaaagccatcgctgttgtatgaaggttttgaatctccaacgatggcctccgttcctgctttgcagctcacacctgcaaacccgccaccccccgaggtaagtaatccaaaaaagcctggtagggtgaccaaccagcttcagtacttgcataaagtggtcatgaaggccctctggaagcatcagttcgcatggcctttcaggcagccagttgacgcagtcaagctggggttaccagactaccataagatcatcaaacagcctatggacatggggacaatcaagcggaggctggaaaataactactactgggccgctagcgagtgcatgcaggattttaacaccatgttcaccaactgctatatctacaataagcccacggacgacatcgttctaatggcccagacgctggagaaaatttttctgcaaaaggtggcttccatgccccaggaggagcaggagctggtagtgacgatacctaagaacagccacaagaagggtgccaagctggcggctctccaaggtagcgtgacgagcgcccaccaggtcccagctgtctctagtgtgagccacacagccctctatacccctcctccagagataccgacaacagttctgaacatccctcacccaagtgttattagttcacctctcctgaaaagcttgcactctgccgggccgcccctcctggccgttacggccgcacccccagcccaaccactagctaagaaaaaaggtgtcaaacgcaaagccgatacaacaactcctacaccaacggctattttggctcccggatcgccggcaagcccaccagggtcgcttgaacctaaagccgctcggttaccccctatgcgtcgggagtccggaagaccaattaagcctcccaggaaagacctgcccgattcccagcagcagcaccagtccagcaagaagggtaagctttccgaacagctaaaacactgtaatggcattttgaaggagctactgtccaagaagcacgctgcgtatgcttggcccttttataagccggtggatgcctcagcactaggcctacatgattaccatgacattatcaagcatccaatggatttatccactgtcaagagaaaaatggaaaatagggactacagggacgcgcaggagtttgctgctgacgtgcgactgatgttctccaactgttataaatataatccacccgatcatgatgtcgtggccatggcacgaaagctccaggacgtgtttgagtttcgctacgccaagatgccagacgagcctctggagcccgggcctctgcccgtcagtactgccatgccacctgggttggccaagagcagctcagagtccagcagcgaggaatcctcatccgagtcctctagcgaagaggaggaggaggaggacgaggaggacgaggaggaagaagaatctgaatctagcgacagcgaggaagagcgggcacaccgactggccgagttacaggagcaactgcgtgccgtgcatgagcagttagctgcgttgtcgcaggggccaattagcaaacccaagaggaagcgggagaaaaaggaaaagaagaagaagcgtaaggccgagaagcaccgggggagagccggcgctgatgaggatgataaaggcccgagagcccccagacccccccaacccaaaaagagtaaaaaggcctcgggaagcggggggggatcagcagcactcggcccttccgggtttggccccagtggtggatccggtacgaaactgcaggctggtgttcagtggagggacttaggtctgctccagccacctttgctcgggtttaagcgcttcagttgcctgagcctgccatcttcacaggattatagactgcctaagaaggcgactaagactgcgccgccagccctgcccaccggctacgacagtgaggaggaagaggaaagcaggcccatgtcctatgatgagaagagacaactttctttagacatcaacaagttacctggagagaaactcggtcgggtggtccacattatccaggcgcgagagccgagcttaagggatagcaatcccgaagaaattgaaattgatttcgaaactctgaagccctccacgcttagagagctggagcgatatgtgctatcctgtcttaggaaaaaaccacgtaaaccgtacacaatcaagaagcctgtgggcaaaacgaaagaagagctagcattggagaaaaaaagggagctggagaagaggctccaggacgtgtctggccaactgaactcgactaagaagcctcctaaaaaggccaatgagaaaaccgagtcctcatcagctcagcaagtggccgtgagcaggctgtccgcctcaagtagttcttccgattcctcaagctcctcatcatcgtccagctccagtgatacatccgatagcgactcggggtag

SEQ ID NO: 77542 - DNA, 2511 bp, Artificial Sequence
  derived and/or modified sequence
atgctgcagaacgtgaccccccacaacaagctgcccggcgagggcaacgcgggtctgctgggacttggtccagaagccgcagcccccgggaagcgtatcaggaaaccttcgcttctgtacgaaggctttgagtctcctactatggcaagtgtgccagccctgcaattgacacccgcaaatccccccccgcctgaggtatccaaccccaaaaagcccggccgcgtaacgaatcagttgcagtatctgcacaaggttgtaatgaaagctttgtggaaacatcagttcgcatggccatttaggcagcctgtggacgccgtcaagttgggtctccctgattaccacaagattattaaacagcctatggacatggggactatcaagcgaagactggagaataactactattgggccgcctcggaatgcatgcaggattttaacaccatgttcacaaattgttacatctacaacaagccaaccgatgacattgtgctgatggcacagacattggaaaaaattttcctgcagaaagtggctagtatgccacaagaggagcaagagctcgtcgtgacgatcccgaaaaatagtcacaagaaaggcgccaagcttgctgccctacagggctcggtcacatctgctcatcaggtgcctgccgtctcttcagtcagccacacggctttgtatacacccccgcccgagattccaacaactgttctcaatatcccacacccgtctgtgatctcttcccccttgctgaagtcactacattctgccggcccaccacttcttgctgttaccgcggctccccctgcacagcctcttgcaaaaaaaaaaggagtcaagagaaaggccgatacgacaacacctacccccacagcgatcttagcaccagggtctccagcctcaccccctggctctctggagcccaaggccgcaaggctgcctccaatgcgacgagagagtggccggcccattaagcctccacgcaaggatttaccagacagccagcagcaacatcagtcatcaaaaaagggtaaactgagcgagcagcttaagcattgtaacggaatcctgaaggaacttctctcaaagaaacatgccgcctacgcctggcccttttacaaacctgtggacgcctctgcgttggggctccatgactaccacgatatcattaagcacccaatggatctgagcaccgtcaaacgtaaaatggagaatagggactatcgggacgcacaggagttcgcagctgatgtacgtctcatgttctccaactgctataaatataacccccctgatcacgatgtggtcgcgatggcaaggaagctacaggacgtctttgagttcagatacgccaagatgccagacgagccactggagcctggccccttgcctgtgagcaccgccatgccacctggactcgctaagtcaagttctgagagctcaagcgaagaatcatctagcgagtcttcctctgaagaggaagaagaggaggatgaggaggacgaggaggaggaggagagcgagagttccgattcagaagaggagcgggcacacagactggccgagctgcaggaacaattgagggcagtgcatgagcagttggccgctctgagtcagggccctatcagtaagcctaaaagaaagagggagaagaaggagaaaaagaagaaaagaaaggctgagaaacacaggggcagagctggcgccgatgaggacgataaaggtcccagagccccgcgccccccccagcccaagaagtccaaaaaagcgagtggatccggtggcggcagcgcggccttgggaccctccggctttggcccaagcggggggagcggcacgaagctccaggccggtgtccagtggagagatttgggcctgctacagccaccactgctgggatttaaacggttcagctgtttgtccttgccgtctagtcaggattatcggctgccaaagaaggcaacgaaaaccgcacctcctgcactgcctaccggttacgactctgaagaggaagaggagagtcgacctatgtcatatgacgagaaaaggcagctgtcgcttgacattaacaaactgcccggcgagaagctgggtcgggtcgtgcacataattcaggcgagggaacccagcctacgcgactctaacccagaggagatcgaaattgactttgaaacactgaagccatctacgctcagagaattggagcgctatgttctgtcctgccttaggaaaaaaccgcggaagccatacactatcaaaaaacccgtgggaaagaccaaagaagaactggcattagaaaaaaaacgggaactggagaaaaggcttcaggatgtcagtggccagcttaatagtaccaagaaacccccaaagaaagctaatgagaagaccgagtcatctagcgcgcagcaggtggccgtcagccgcttatctgcctcttcgagttcttcagacagctcatcgagttcatcctcttcgagcagcagcgatactagcgattcagactctggctag

SEQ ID NO: 77543 - DNA, 1947 bp, Artificial Sequence
  derived and/or modified sequence
atgctgcagaacgtgaccccccacaacaagctgcccggcgagggcaatgccggactactcgggctgggccccgaggcagctgcgcccggcaagaggatacgtaagccttccctgttatacgagggtttcgaaagtccaactatggcttctgtaccagccctgcagctcaccccggcgaatccaccgcccccagaagtgagtaaccccaagaaaccaggacgggtcaccaaccagctgcagtatctgcataaagttgtgatgaaagctctttggaagcaccagtttgcatggccattcagacaacccgtggacgccgtcaagctcggcctgcctgactatcacaaaatcataaagcagcccatggacatgggcacaattaaacgtcggctagaaaacaactactactgggccgcctctgaatgtatgcaggactttaacacaatgttcaccaactgctacatctacaataaacctaccgatgacatcgtgctcatggcacagactcttgaaaaaatcttcctacagaaggtcgcaagcatgccacaggaggaacaagaactggtggtgaccatccctaagaactcgcataaaaagggggctaagttggccgctttgcagggcagcgttactagcgcccaccaagtgcctgcggtgagttccgtgagccatacagctctgtacacgccaccccctgagatccctacaacagtgctgaacataccacatccatccgtgatatcctcaccacttttgaaatctttgcatagtgccgggccccccttactggccgtgacagcagctccgcctgcccagccgctggctaagaagaaaggagtcaaacggaaggcagacaccactacccctactccaacagctatcctcgcacccggtagtcctgcctccccccctggatccctcgagccaaaggcagctagactgccacctatgcgccgcgagtcaggaagaccaattaagcctcctagaaaagatctgcccgactcacagcagcaacatcagtcctccaagaaggggaaactgtccgaacaacttaaacattgcaatggcatcctgaaagagcttctgtcaaaaaagcacgccgcttacgcttggcccttttataaacctgtcgacgcctcagcactcggattacacgactaccacgatattattaagcatcctatggacctatccacggtgaagcggaagatggaaaatcgagattatcgcgacgcccaggagttcgccgctgacgtgcgcctcatgtttagtaactgttataagtataatccccccgaccacgacgtggtcgcaatggccagaaaactccaggatgtgtttgaattccgctacgcaaagatgcccgatgaaccgcttgagcctggacctctccccgtgtcaacggctatgccccctggtctggcgaagagtagcagtgaaagctcttctgaagagtcctcgtccgagtccagctctgaggaggaagaggaggaggacgaagaggatgaagaagaagaggaatctgaatcatctgatagcgaggaagaacgtgctcaccgcctggcagaacttcaggagcaactgcgggcggtgcacgaacagctggcggcactcagtcaggggccaatatccaagcccaagaggaaacgcgaaaagaaggagaaaaaaaagaaaaggaaggccgagaaacaccggggaagggctggggcagacgaagacgataaaggacctagggcaccccgtcctccgcaaccaaaaaagtccaagaaagcttctggcagcggcgggggaagcgcagccctgggcccctctggatttggcccgtccgggggtagtggaactaaactccaggctggcgtgcagtggcgtgacctggggctcttgcagccacctctacttggctttaaaaggttcagctgcttaagtctgcctagctcccaggattattag

SEQ ID NO: 77544 - DNA, 1092 bp, Artificial Sequence
  derived and/or modified sequence
tgagccaagagcagcagcgagagcagcagcgaggagagcagcagcgaatcatctagtgaggaagaggaggaggaggacgaggatgaagaggaggaagagtcagagtcgagcgacagtgaggaggaacgcgctcatagactcgccgaattgcaggagcagcttcgcgcagtgcacgaacagcttgctgcattgagccagggtcccatcagcaagcccaaaagaaagcgggaaaagaaagaaaagaaaaagaaacggaaggctgagaagcatagaggtcgcgctggcgctgacgaggatgataaaggtccccgcgctccccggccgccacagccgaagaagtctaaaaaggcttctggatccggcggtggaagcgccgcactgggaccctcagggtttggaccctccgggggttccggtaccaagctgcaagccggcgtgcagtggagggatctggggctccttcagcctcccctcctgggattcaaacggtttagttgtctctctttacccagttcccaggactaccgtcttcccaagaaggccacaaagacggcacccccggcccttcctaccggctacgatagcgaagaggaggaagagtcccgccccatgtcctatgacgagaagcgacagctgtcattagatatcaacaaactgcccggtgagaaattgggacgagtggtgcatattattcaagctagagagcccagcttgagagattccaatccggaagaaatcgagatcgacttcgagacgttaaagccgagcactcttcgcgagttagaaagatacgtgctgtcgtgtctcaggaaaaagccacgaaaaccttacacaattaagaagcctgtggggaaaaccaaggaggagctggcactggaaaaaaagagggagctggagaaaaggctccaggacgtctcagggcaactgaattccaccaagaaaccccctaagaaggccaatgagaaaaccgaaagttcatctgcccagcaggtcgctgtaagccggttgagcgcatcatccagcagctcggattcttctagcagtagcagctcatccagtagcagcgatacatcagatagcgattctggctag

SEQ ID NO: 77545 - DNA, 2511 bp, Artificial Sequence
  derived and/or modified sequence
atgctgcagaacgtgaccccccacaacaagctgcccggcgagggcaatgccgggctgcttggcctaggtcctgaggccgcggctcccgggaaaagaattcgcaagcccagcctgctctatgagggttttgaatctcctacaatggcttctgtacccgcattgcagctcactcctgccaatcccccccctcccgaagtatcaaatccgaagaaacctgggagagttacaaaccagctgcaatacctgcacaaagtggtcatgaaggctctgtggaaacaccagtttgcctggcctttcagacagcccgtcgatgccgtgaaattgggccttccggactatcataagatcatcaaacagcccatggatatgggcactatcaagagaaggctggaaaacaattattattgggccgctagcgaatgcatgcaggattttaacacgatgtttaccaattgctacatctacaacaagcctactgacgatattgtcctgatggcacaaacgctcgagaagattttcctccagaaagtagctagcatgccccaggaggaacaagagcttgtcgtgaccattccaaaaaatagtcacaagaagggagccaaactggcggccctacaaggtagcgtgaccagcgcccatcaagtccctgctgtaagtagtgttagccacactgccctctatactcctccgccagagatccctactaccgtcctgaacataccacatccgtcagtgatcagttccccgctcctcaaaagcttgcattccgccggccctcccctcttggctgttaccgctgctccgccggctcagccactagccaaaaagaagggggtgaagcgcaaggcagatacaacaaccccaactcccaccgccatactcgctcccggtagtcctgctagcccgcctggcagccttgagccaaaggccgcccggctaccccctatgcggagggaatccggcagacccatcaaaccaccacggaaagaccttcccgatagccaacagcagcaccaatcatccaagaaaggaaagctcagtgaacaactgaagcattgtaatggcatcctgaaggagctcctgagtaaaaaacacgcagcttatgcctggccattctataagcccgtggacgcctctgcgcttggtctccacgactaccatgatattatcaaacaccccatggatctctccacggtgaagcggaagatggagaatagagactatagggatgctcaggagtttgctgcggacgtgcgacttatgttcagtaactgctacaagtacaaccctccagatcacgacgtggtcgccatggcaaggaaactgcaggatgttttcgaattcagatacgctaaaatgccagatgagcctttagagcccgggcccttacctgtgtccacagcaatgccccctggccttgcaaagagctcttcagaaagctcctcggaagaatctagtagcgaatccagcagcgaagaggaagaggaagaggacgaggaagacgaggaggaggaggagtcggagagctccgactccgaagaggaacgcgcccaccgcctcgcagaactacaggagcagctgcgggcggtgcatgaacagctggctgcactctcacaaggccccatctctaagccaaagcgcaaaagggaaaaaaaagagaaaaagaagaagaggaaggccgagaagcataggggaagagctggcgcagatgaggatgataaaggaccaagggctccccgccctccacagcccaaaaaatccaagaaagcgtccggctccgggggagggagcgcagccctgggcccatctggtttcgggccctccggagggtccggtacaaagctgcaagccggggtccaatggcgggacctaggactgttacagccacctctcctgggattcaaaagatttagttgtctaagtctaccaagttcccaggactaccgactacctaaaaaagcaacgaagactgcgcctcccgctctgcccaccgggtacgattccgaggaggaagaggagtcccgtcctatgagctacgacgagaagcgccagctgtctctggatatcaataagctaccgggggagaagctggggagggtagtccatataattcaagctcgggaaccctccctccgagactctaaccccgaggagatagaaattgacttcgagactttgaagccctcgactctgcgggagttggagcggtatgtattgtcctgtctaagaaagaaacctcggaagccttatacaattaagaaacctgttgggaaaaccaaagaagaactggcccttgagaagaagagggagctggagaagaggttgcaggacgtcagtggacagctcaattccactaagaagccaccaaagaaggcgaacgagaagacggagtcttcttctgctcagcaggtggccgtcagccggctaagcgcctcatcctcttcgtctgactcttccagtagcagtagcagtagtagctcgtcggacacgtccgactcagattccgggtag

SEQ ID NO: 77546 - DNA, 2511 bp, Artificial Sequence
  derived and/or modified sequence
atgctgcagaacgtgaccccccacaacaagctgcccggcgagggcaacgctggcttgttgggtctcggacctgaggccgctgcccccggtaaacgcatacgtaaaccaagccttctgtacgagggtttcgaatcacccacaatggcatccgtgccggccctgcagctcacgcctgccaatccgccaccccctgaggtgtccaatccaaaaaaacctggacgggttacaaaccagctgcagtacctgcacaaggtcgtgatgaaagccctttggaagcatcagtttgcatggcccttccgccagcccgttgacgctgtgaaactggggctgcccgattaccataagattatcaagcagccaatggatatgggcacgatcaagcgacgcctagagaataactactactgggctgcctcagaatgtatgcaggactttaacactatgttcaccaattgctacatttataacaaaccaactgacgacattgtcctgatggcccagacactggaaaaaatcttcctccagaaggttgcgagcatgccccaggaagaacaggaactggtcgtgaccatacccaagaactctcacaaaaaaggggcaaaattggccgcccttcaggggtctgtgacatctgcccaccaggtcccagccgtgtcatctgtgagccatacagcactttacacccctccgcctgagattccaaccactgtgctcaatatcccccatccctcagtgatttcgtcaccacttctaaagagtctgcacagcgccggtccgcccttactggcagtcactgccgctccccccgcccagccactagctaagaagaagggagtgaagcgcaaggcagacaccacaacacctacacccacggcaattctggcccctggtagtcctgccagtcccccaggcagcctggaaccgaaagccgcacgcctgcctcccatgaggcgggaatcaggcaggcccattaaacctccaaggaaagacttgccggactcccagcaacaacatcaatcttcaaaaaaaggcaagctttccgagcagcttaaacactgcaacggcatcctgaaggagctgttaagcaagaagcacgccgcttacgcttggcctttctacaagccggtcgacgctagcgccctcggtctccacgattatcatgacataatcaaacaccctatggatctcagcaccgttaaacgtaaaatggaaaatcgagattatcgcgacgcccaagagttcgctgccgacgtccgcttgatgttttcaaactgctacaaatacaatcctccagaccatgatgtggtggccatggccaggaagctgcaagacgtgttcgagttcaggtacgccaaaatgcccgacgagcctctcgagcccggccctctgccagtgtcaactgctatgccccccgggttagcgaagagctcaagtgagtcaagttcagaagaatctagcagcgagagcagttcggaagaagaggaagaagaggacgaagaagacgaggaagaggaagagagcgaatcttccgacagcgaggaagagcgcgcccataggctcgccgagcttcaggagcaattaagggccgtgcatgagcaactggccgccctatcgcaggggcctatcagtaaacccaaacggaaacgtgagaaaaaagagaagaaaaagaagagaaaagccgagaagcaccgcgggagagccggggccgacgaggatgataaaggcccgagggctccaagacccccacaacctaagaagtcgaagaaggcttctggaagcgggggggggtcagctgcattaggcccatctggctttggtccaagcggggggagcgggacgaagctgcaggccggtgtccagtggcgcgacttgggtctgctgcagccgcctttactgggctttaagagattttcctgcctcagtctgcccagctctcaagattaccggctgcctaaaaaggccacaaagactgcaccacctgcattacccacggggtacgatagcgaagaggaggaggagtctagacctatgtcctatgacgagaagcgccagctttcactggacatcaataagctcccaggagagaagcttggtagagtcgtgcacattattcaggcccgtgagccaagcctcagggactcaaacccagaggagattgagattgacttcgagactctgaaaccctctacgctgagagagctggagagatatgtgctatcttgcctgaggaagaagcctagaaaaccgtatacgatcaaaaagcctgtggggaagaccaaggaagagctagcactggagaagaaacgcgaactggagaaacggctccaggacgtctctggccagcttaactcaactaagaagccccccaagaaggcaaatgaaaaaacagagtcctccagcgctcagcaggtcgccgtctctaggctctccgcaagttccagctcatccgattcctcttctagcagctcaagttcaagctcttcggacacatcagactcggatagcgggtag

SEQ ID NO: 77547 - DNA, 2511 bp, Artificial Sequence
  derived and/or modified sequence
atgctgcagaacgtgaccccccacaacaagctgcccggcgagggcaatgccgggctgctgggactgggtcccgaggccgccgcgccagggaagagaataagaaaacctagccttttgtacgaagggttcgagagccctacaatggctagtgtacctgccctacagctcactccagccaacccaccgccccctgaagtttccaatcccaagaaaccaggacgcgtgaccaaccagctgcagtacctccacaaggtggtgatgaaggctttatggaagcatcaattcgcgtggccgttcaggcaacccgtcgacgctgtcaaattaggtctccctgattatcacaagatcatcaaacagcctatggacatggggaccatcaaacggcggctggagaataattattattgggcagcttctgagtgcatgcaggacttcaacaccatgttcacaaactgttatatctacaataagcctaccgatgacatcgtactgatggcccagactctcgagaaaattttcttgcagaaggtggccagcatgccacaggaagagcaggagctggtcgtgaccatccctaagaactcgcacaagaagggtgctaagcttgcagccctgcagggttctgtgacgagtgcccatcaagtcccagccgtttcaagcgtctcccacacagccctgtacaccccccctccagagataccaactacagtttttaacatcccccacccaagtgtgatctcaagtcctttattgaagtcattgcactcagccgggccccccctgttggctgtgactgcggctcccccagcccaacctctcgcaaaaaagaagggggtcaaacggaaagctgacacgacaaccccaactccaaccgccatacttgcgccaggttctcctgcttcacccccgggttcgctggagccgaaggccgccagacttcctcctatgcgaagggaaagcggtcgtcctatcaagcctcctagaaaggacctgcccgattcacagcagcagcaccagtctagcaagaaggggaagctgtctgaacagctgaaacattgcaatggtatcctcaaagagttgcttagcaagaagcatgccgcctacgcctggccattttacaaaccagtcgatgcctccgccctgggtttgcacgactaccatgatatcatcaaacacccaatggacctgtccacagtgaaaaggaaaatggaaaacagggactaccgtgacgcccaggagttcgcagctgatgtacggctgatgttcagtaattgttacaagtacaatccaccagaccacgacgtagtcgcgatggctcgtaaactgcaggatgtgtttgaattcaggtacgcaaaaatgcccgatgaacccctcgaacccgggcctctgcccgtttccaccgctatgcccccagggttagccaaatccagcagcgagtcttcctctgaggagagtagcagcgagagtagttcagaagaggaggaggaggaggacgaggaagacgaggaagaagaggagtccgagtccagtgattccgaggaagaaagggcacatcgcctggctgaactccaggagcagctgcgagcagtccatgagcagctggccgcactgtcacagggacccatttcaaaacctaagagaaaacgggagaagaaggagaagaaaaagaagagaaaagctgagaaacacagagggagagccggagctgacgaggacgataagggtcctcgagcgcccagaccccctcaacccaaaaaaagtaagaaagcctcaggcagtggaggcgggtcagccgcgctaggacctagcggttttggaccatctggtggaagcggtacgaagcttcaggctggagtacagtggcgcgacctggggctccttcagccccccctgcttggattcaagcggttcagttgccttagcttaccttccagccagaattaccggctgccaaaaaaggccaccaagactgccccgccagccctacctacaggctatgacagcgaagaagaggaggaatccaggccgatgtcatatgatgagaagagacagctgtctctggacatcaacaagctgccaggtgaaaagctcgggcgggtggtgcatatcatccaagcccgcgaaccatccctgcgggattcaaaccctgaagagatcgaaatcgacttcgagaccctgaagccgagtacattgcgggagctcgagagatacgtcctgtcttgcctgcgcaaaaagccaagaaagccgtacactatcaagaagccggtggggaaaacaaaggaagagctcgcccttgaaaagaaacgcgaactggagaagagacttcaggatgtctccgggcagctaaatagcacaaagaagccccccaagaaggctaatgagaagacagagtcctcttccgcacagcaggtcgctgtgtctagactgtctgcctcttccagtagtagtgactcttcttcttcaagctcctcttcgagctcttctgacacgtccgatagcgactctgggtag

SEQ ID NO: 77548 - DNA, 2511 bp, Artificial Sequence
  derived and/or modified sequence
atgctgcagaacgtgaccccccacaacaagctgcccggcgagggcaacgctggtttactgggactgggacccgaagctgctgcacctggcaagcgcattcggaagcctagtctcctctacgaggggtttgagagccccaccatggcctctgtacctgctcttcagctgacccctgccaaccctccaccacctgaggtttctaaccccaagaagcccggacgagtaacgaaccaacttcaatatctccacaaggtggtaatgaaagctctgtggaaacaccaatttgcgtggccctttcggcaacctgtagacgcagtcaaactcggactgcctgattatcataaaataattaagcagcctatggatatgggcacaatcaagaggaggcttgaaaacaactactactgggctgcgtccgaatgcatgcaggactttaacacaatgttcacaaactgttacatttataacaaacctacggacgacattgttctgatggcccagactcttgaaaagatctttttgcagaaggtagcctctatgcctcaggaagaacaggaactggtcgtgacaataccaaagaatagccataagaaaggcgccaagctggccgctcttcagggctctgtgactagcgcccaccaagttcccgctgttagctcagtgtcgcatactgctttgtacactcctccgcctgagatcccaacaacggtcctgaacatccctcatccgagcgtgatctcttcccccttgctgaaatctctgcacagcgccgggccgcccttactcgcagtgacagctgcaccacctgctcaacccctagccaagaaaaagggggtgaagaggaaggccgacactacaacccctacccctaccgcgatcctagctcccggcagccccgcgtccccgcccggttctctggagcctaaggctgcccggttgccaccaatgcgccgcgagtctggcaggcctatcaagccccctcgcaaggatctgcccgactctcagcaacagcaccaaagctctaaaaagggcaagctgtccgagcagctcaagcactgtaatggcatactgaaggagctactgagcaaaaaacatgccgcgtacgcatggcccttttacaagcccgtagacgcatccgctttgggattgcatgattaccacgacattatcaaacacccaatggatctgtctactgtcaagaggaagatggaaaacagagattaccgggacgcccaagagtttgcagccgacgtgaggttgatgtttagcaactgttacaagtacaacccacccgaccacgatgtggttgcaatggcccgcaagcttcaggacgtatttgaatttagatacgctaagatgcccgacgagcctctcgaaccaggcccgctcccagtttccacagcgatgccaccgggtctggcaaaaagttcttccgaatcctcgtccgaggagtcttcctctgagtcctccagtgaggaagaggaggaggaggatgaagaggatgaggaggaagaagaatctgagtctagtgactcagaggaagaacgggcccatagacttgcggagttacaggagcaattaagagctgtccacgagcagctggctgccctgagccaaggtcccatctccaaaccgaagagaaaacgggagaaaaaggagaaaaagaaaaaacgcaaggcagagaagcaccgtggcagggctggcgctgatgaagatgataaggggccaagggccccaaggccaccccagcccaaaaaatccaagaaggcatcagggtcggggggcggcagtgccgcccttggcccaagtggattcggaccaagcgggggctctggtaccaaactgcaggctggcgtccagtggagggatctggggttgctgcagccaccactcctgggatttaaaagattcagttgcctgagtctgcccagttcacaggattaccgcctcccgaaaaaagctacaaagaccgctcctcccgctttgcccacgggctacgactcggaagaggaggaggagagcaggcctatgtcctatgacgagaagaggcagctcagtctggacataaacaagctcccaggagagaagctgggacgagtagtgcacatcatccaggcgagagagccatccctgcgtgatagcaaccctgaggagatcgaaattgatttcgagaccctgaaaccttctactctgcgggaattagagcgttacgtgttatcatgtctgcgcaagaagccgcgcaaaccatacacgatcaagaagcccgtgggaaagacgaaagaagagctcgctctggaaaagaaacgcgagctggagaagaggttgcaagacgtgtctggtcagttaaattccacaaagaaacctcccaagaaagcgaatgagaagaccgagtctagcagcgcccagcaggtcgcggtcagcaggctctctgcgtctagctcctcgagcgactcttcgtctagctcaagtagctcaagctcttctgacacaagtgatagtgactcaggctag

SEQ ID NO: 77549 - DNA, 2511 bp, Artificial Sequence
  derived and/or modified sequence
atgctgcagaacgtgaccccccacaacaagctgcccggcgagggcaatgctggccttttggggctgggcccagaggctgccgccccaggcaagcggatccgcaagccttcactcctgtatgagggattcgaaagccccaccatggccagcgtgcccgccctgcagttgaccccagcaaatccgcccccacccgaggtgtctaatccaaaaaagcccggcagagtgaccaatcagttgcaatatttgcataaagtcgtaatgaaggcgttatggaagcatcagtttgcctggccctttcgccagcccgtcgacgccgtaaagctggggttaccagattatcataagataattaagcagcccatggacatgggtaccataaagcgcaggttggagaataactactactgggcggcaagtgagtgcatgcaagattttaacactatgttcaccaactgctatatctacaataagccaacggatgatattgtcttgatggcgcagacactggaaaagatctttttgcaaaaggtggcatcaatgccacaagaggaacaggagttagtcgtaactattcccaagaatagccataaaaaaggtgccaaactggcagctctgcagggcagcgtgacaagtgcccatcaagttccagcggtctcttcagtgtcacacacagcactatacaccccccccccagagatacccactactgtactgaacattccccatccatcagtgatcagtagccccctactcaagtccctgcactcagccggcccacccctccttgctgtcaccgccgctccgccagctcagcctttggccaagaagaagggcgtgaaacgaaaggctgacacgacaactcccactcccaccgccatcctggcgcccggcagtcccgcatctccccctgggtccctggaacctaaagccgcacgcctgccacctatgaggagagagagcgggcgccccattaaacccccacgcaaagatctaccagattcccaacaacaacatcaaagcagtaaaaaaggaaaactgtcagagcagctgaagcattgcaatggcatcctgaaggagttactgtccaagaagcatgccgcttacgcttggccattctacaagccagtggacgcctcagctctaggcctgcatgactatcacgacatcatcaaacatcccatggacctatcaacggtaaagagaaaaatggagaatagggattacagggacgctcaggagttcgcagccgacgtcagactcatgttctctaactgctacaagtataatcccccagatcacgacgtcgttgctatggccagaaaactgcaggatgtatttgaattccggtatgcgaagatgccagatgaacctttagagccaggtcccctcccggtgtccacagccatgccgcccggcctcgccaagtcaagctccgaatcctcatcagaagagagttccagcgagtctagttcagaggaggaggaggaggaggatgaggaagatgaggaggaggaggaaagcgaatccagtgattctgaagaagaacgcgcccatcgccttgccgaactgcaagagcagcttagggccgtccatgagcagctggctgctttgtcccaggggcctatctccaagcctaagcgaaagcgcgaaaaaaaagagaaaaagaagaagaggaaggcggagaagcaccggggccgcgcaggagccgacgaggacgataaaggacctagagccccacggccgccacagcctaaaaagtcgaagaaggcttcaggatctggggggggttcagctgctctggggccaagtggtttcggcccaagtggcggttcgggcaccaaattgcaggctggcgtgcagtggcgggatctgggccttttgcagccacctctactgggctttaaaaggttttcatgtctgagtctgccctcctctcaggactatagactgcccaaaaaagccaccaagactgccccgcctgccctccctaccggctatgatagcgaagaagaggaagagagtaggccaatgtcctacgacgagaagcggcagttatctcttgatatcaataagctgccaggggaaaagctgggtcgggtcgtgcacattatccaggcccgtgagccatcactccgtgactccaatccggaggaaatcgaaattgactttgagaccttaaagcccagcacactacgagagctcgaaaggtacgttctgagctgtctgagaaagaagccacggaaaccttacactatcaagaagcccgtagggaaaaccaaagaagaactggcactggagaagaaaagagagctggaaaagcggctgcaggatgttagcggccagctgaatagcactaagaaaccgccaaaaaaagctaacgagaagacagagtcctccagtgcccagcaggtggcggtctctaggttgagtgcttcttcatctagtagcgattcatcttcctcatcctcaagttcatcaagcagtgacacttccgactctgacagcgggtag

SEQ ID NO: 77550 - DNA, 2511 bp, Artificial Sequence
  derived and/or modified sequence
atgctgcagaacgtgaccccccacaacaagctgcccggcgagggcaacgctggtctactgggactcggacccgaagcagctgccccagggaagcgcattcggaagcctagtctgctgtacgagggcttcgaaagccccacaatggcctctgtccctgcccttcaacttacacccgctaaccccccgccacccgaggtctccaacccaaagaagcctggtcgagtgactaaccagctgcaatatttgcataaagtagtgatgaaggccctgtggaaacatcaatttgcttggccattccgccaacccgtggacgcagttaaattgggcttgccagattatcacaagatcataaaacaacctatggacatgggtacgatcaagcgccgtctcgagaacaattactattgggccgcaagtgagtgcatgcaggacttcaatactatgtttaccaactgctacatttacaacaaacctacagatgacatcgtgttgatggctcagaccctggagaagatattcttacagaaggtcgcttcgatgccacaggaggaacaggagctggtagtcaccatacctaaaaacagccacaagaaaggagccaagctcgccgccctccaggggtccgttacctccgcacaccaagtccccgccgtgtcttctgttagccacactgccctgtacacaccaccgccggagatcccaactacagtactgaacattccccacccaagcgtgatatccagccccctgcttaaatccctacactctgctggcccaccattactcgccgtcacagcagccccccccgcccagcctttagccaagaaaaagggagtgaagagaaaggcagacactactacgcctaccccgaccgctatactcgcacccggcagcccagcatctcctccaggatccctcgagccaaaggccgctcggttaccacccatgagacgagaatctggacggccgattaagcctcctagaaaagaccttccagattcacaacagcagcaccagagcagcaagaagggcaagctgtccgagcagttgaaacattgcaacggaatcctaaaagagctgctgtctaagaagcacgcggcgtatgcctggcccttctacaagcccgtggacgccagcgcattaggacttcacgactatcatgacataataaaacacccgatggacctgtccaccgtaaaacggaagatggagaaccgagattacagagacgctcaagaattcgccgccgatgttaggctcatgttcagtaattgctacaaatacaaccccccagaccacgacgttgtggctatggcccgtaagctacaagacgtattcgagttccgctatgctaaaatgcccgacgagccacttgagcctggcccactgcctgtttctacagcaatgccgccagggttggctaagagttcttcagaatcatcttcagaagagtcatcttctgagagctcttcagaagaggaggaagaagaggacgaggaagatgaggaagaagaagagtctgaatcctcagattcggaggaggagcgggcgcacagactcgccgagctgcaggaacagctgagagctgtccacgaacagctcgccgcgctgagccagggcccaataagcaaaccaaagaggaagagagaaaaaaaggaaaagaaaaagaagcgtaaagctgagaagcacagaggccgtgccggagccgacgaagacgacaagggccccagagcgcctcggcctccacagcctaagaagtccaaaaaggcatcgggctctggtggcggaagtgctgcgctggggccttcgggattcggtccatccggcgggagcggaaccaagctccaggccggggtgcaatggagggatctgggactcctgcagcctcccttgttaggttttaagcggttctcttgcttaagcctcccctcttcccaggattataggctgccgaagaaggcaacaaagacggccccacccgctctacccactggatatgactctgaagaggaagaggagtcccggcccatgagttatgatgaaaaaaggcagttaagtctggacatcaacaagctgccgggagagaaattggggcgggttgtgcatatcatccaggctcgtgaaccctctctacgagacagcaaccctgaggagatagagatcgactttgaaaccctcaagccgagcacactgcgcgaactggaaagatacgtcctgagctgccttaggaagaagcctcgaaagccttatacgatcaagaagcccgtgggcaagacaaaggaggaactcgccctcgaaaagaagcgcgagcttgaaaaacggctgcaggacgtgtccgggcaattgaattcgactaagaagcctcccaaaaaagcgaacgaaaagactgaatcttcctcagcccagcaggtggctgtgagcaggctgagcgcctcgtcttcctcaagtgactcgagctctagttcatctagttctagctcctccgacacttccgattctgatagtgggtag

SEQ ID NO: 77551 - DNA, 2511 bp, Artificial Sequence
  derived and/or modified sequence
atgctgcagaacgtgaccccccacaacaagctgcccggcgagggcaacgcgggattactgggccttggcccagaagccgccgctcctggtaagcggatacgcaaacctagcctgctctatgaagggtttgaatcgccaactatggcctctgtgcccgcccttcaattaaccccagccaaccccccccctccagaggtgtccaaccctaagaaaccgggccgggtgactaatcaactgcaatacctccataaagtcgtgatgaaggccctttggaaacaccagtttgcttggccctttagacagccagtggacgcagtgaagctgggcctaccagactaccacaagattataaagcagcccatggatatgggtaccattaagcgccggctagaaaacaattattactgggccgccagtgaatgcatgcaggatttcaacaccatgttcacaaactgttatatctacaataaacccacggacgatatagtcttgatggcccaaacgttagaaaagatctttctgcagaaagtggcctcgatgccgcaggaagaacaggaattagtagttacgattccaaagaactcccacaagaagggcgccaaactggcggctctgcaagggtcagtgacaagcgcccaccaggttcctgctgtctcctccgtgtctcatactgcactatatactccccctccagaaatcccaactacagtgtttaatattccccatcccagcgtgatctcatctcccctcctcaaatccctccacagcgccggtccacccctactagctgtgacagcggcgcctcccgcccagcctctggcaaaaaaaaagggggtgaaacgcaaggcagacactactactccgacgcccaccgcgatcctggcgcctggctcccccgcctcacccccggggtctctggagccaaaagcggcaagactaccccccatgagacgggagtccggtcgccctattaagcccccgaggaaggacctacccgatagccagcagcagcaccagtcatcaaagaagggaaagctaagcgagcagctgaagcattgtaatggtattctcaaggagctgctttccaaaaagcacgcagcctacgcatggccattctataaaccagtggacgccagtgcattgggcttacacgactatcacgacatcattaagcaccctatggatctgtctacagtgaagaggaagatggagaatcgagactaccgagacgctcaggaatttgcagcggacgttcggttgatgttctcaaactgctataaatataaccctcccgatcatgacgtagttgccatggccaggaaattgcaggatgtctttgagtttcgctatgcgaagatgcccgatgagcctctggagcccggccccctgcccgtgtccacagcaatgcctcctggcctcgccaagtcatcctccgagagctccagcgaagaaagtagttctgagtccagttccgaggaggaagaggaagaggacgaggaagatgaggaggaagaggaatcagagtcctcagactccgaagaggaaagggctcataggctcgccgaattacaagaacagctgagggctgtccatgagcagttagctgccctgtctcaagggcctatctcgaaaccaaaaagaaagagagagaagaaggagaaaaaaaaaaagcggaaggccgagaagcatagggggcgagccggggccgacgaagatgacaaaggtccccgggcgcccagacctccacagcctaaaaaaagcaaaaaagctagcggatctggaggcggctctgccgccctgggaccttcagggtttggcccctcaggtgggtctgggacaaaactgcaggccggggtgcagtggagggatctcggactcctacagcccccactactcggattcaaaagattttcttgcctctcactacccagctcccagaactatagattacctaagaaagccaccaaaaccgccccacccgcccttcccactgggtatgactcagaggaagaagaggaaagtcgacctatgtcttatgatgagaagcgccagttgtcattagatattaacaaacttccaggggaaaagctgggcagagtcgtgcatatcatccaggccagggagcccagtctgagagactccaatcctgaggagattgagatcgacttcgagacccttaaaccttcaacactgcgagaactcgagagatacgtgctctcatgtctccggaaaaaacccaggaaaccatacacgataaagaaacctgtgggtaaaactaaggaagagctggctttagaaaaaaagcgagagctcgagaaacggctacaggatgtgtctgggcagttgaactccaccaagaagccacccaaaaaagcaaacgaaaagactgaatccagcagcgcccaacaggtggcagtgagtagactaagtgctagtagctcttcttcggactccagttctagctcctcgtcctcctcttccagtgacacaagtgactccgattctggctag

SEQ ID NO: 77552 - DNA, 2511 bp, Artificial Sequence
  derived and/or modified sequence
atgctccagaacgtgacacctcataataagctgccaggagaaggaaatgccggtctactgggcctgggccctgaagccgctgctcctggaaagcggattcggaaacctagcttgctgtatgagggctttgagtctccaaccatggcctcggtacccgctcttcagctaactcctgccaatccccctccccctgaagtcagcaaccctaagaagccgggacgcgtgacaaaccagctgcagtacctgcacaaagtagttatgaaggccctgtggaagcaccagtttgcgtggccctttcgtcaacccgtggatgcagtgaagctcggtttgcctgactatcataaaatcataaaacagcctatggatatgggtaccataaagagaagactggagaacaattattattgggctgcgtccgaatgcatgcaggattttaatactatgttcactaactgctacatctacaacaaacctactgatgacattgtgcttatggcacagactttagaaaagatttttttacaaaaggttgcaagcatgccccaggaggagcaggaattagtggtgaccattcccaaaaactcccataaaaagggagcaaaactggccgcactacagggaagtgttacaagtgcgcaccaggtgccagctgtgagcagcgtaagtcacaccgcactttacacaccacccccagagatacctacaaccgtgttgaacatcccacacccgagtgtgatctctagtccgctacttaagtccctgcactcagctggcccacccctgttggctgtgaccgcagccccaccagcccaaccattggcaaaaaagaaaggtgttaaacgcaaagcggacacaactacacctacccctactgctatccttgccccaggttccccggcaagcccaccaggctccttggaacccaaagcagctagattgccacccatgaggagagagtctggtcgcccaattaagcctccaagaaaggacttacctgactctcagcagcagcatcagagtagcaagaagggaaagctgtcagaacagctcaagcactgcaatggcatcttgaaggagctattgagcaaaaagcatgctgcatacgcctggcccttctacaaaccagttgacgccagtgctctgggcctccacgactaccatgatattatcaagcatccaatggacctcagcacagttaagaggaaaatggaaaatcgagactatagggatgcccaggaatttgccgcagatgtccgcttaatgttcagcaattgttacaaatataatccaccagatcacgatgttgtggctatggcacgaaaactgcaggatgtatttgagttccgctacgctaagatgcccgatgagcctttggaaccaggtcccttgcccgtttctaccgctatgccccctggcttagctaaatcctcaagtgaatcctcgtcagaagaatcatcatctgaatcctccagcgaagaggaagaagaagaggatgaggaagacgaggaagaggaagaatccgaatcatctgactccgaggaggagagagcccacaggctggccgaactccaggaacagctcagagcggtccacgaacaactcgctgccctgagtcagggccctatctccaaacctaagcggaaaagagagaaaaaggaaaagaaaaaaaagagaaaagccgaaaagcaccgtggcagagcaggagccgatgaggatgacaagggccctagagcccctcgccctcctcagccaaaaaagtcaaagaaggcttcaggatctggcggtggaagcgccgctttgggaccaagcggctttggacccagcggcggatcagggactaagcttcaggcaggcgtgcaatggcgggatttgggattactgcaacctcccctgctgggattcaagagattttcgtgcctatctctgcctagctcccaggactatcggcttcccaaaaaagccaccaagaccgcaccccctgccctccccactggttatgactctgaggaggaagaggagtctcggcctatgtcatacgacgagaagcgacagttgtcgctggacatcaataagctgcctggtgaaaagttgggtagagtggtgcatatcatccaagcccgagagcctagcctgagggacagcaatcccgaagagattgagatcgatttcgagaccctcaagccatccacgttacgggagcttgaacgttatgtcctcagctgtctaaggaagaagccacgtaagccctacacaatcaaaaagcccgtgggtaaaactaaggaagagctagccctcgaaaaaaagcgagagctagagaaacgcctgcaggatgtgtccgggcagctaaattcaactaaaaagcccccaaagaaagccaatgagaagaccgaatctagcagtgcccagcaggttgccgtaagtcgcttaagcgcttcctcttcctcatctgatagctcttcctccagttcttctagttcctcctctgatacaagtgactccgattcaggatag

SEQ ID NO: 77553 - DNA, 2511 bp, Artificial Sequence
  derived and/or modified sequence
atgttacaaaacgtaaccccgcacaataaattgccaggcgaaggcaacgccggattgctgggacttggtccggaagccgctgcccctggaaaacgaatccggaaaccttcgttactgtacgaagggtttgaaagcccaacaatggcgtctgtgcctgctctgcagctcacccccgctaaccctcccccaccggaggtgtctaaccccaagaaacctggcagagtgactaaccagcttcagtacttgcataaggttgtgatgaaggccctttggaagcaccagttcgcctggccttttcgacagccagtggatgctgttaaactaggtctcccagattaccataagatcataaaacagcccatggatatggggaccatcaagcgtaggttggagaataactattattgggccgcaagtgagtgcatgcaggattttaacactatgtttacaaactgctacatatacaacaagcctactgatgatattgtactgatggcccaaaccctggagaagatttttcttcaaaaggtagcctcaatgcctcaagaggagcaggaattagtggtaacaatcccaaagaactcgcacaagaagggtgctaagctggccgctctgcaaggttctgtgacttcggctcaccaggtcccagccgtgagttcggtatcacacaccgcgctctacacccccccaccagaaatccccactactgttcttaacatcccccatccatcagtgatctcgagtccgctccttaaaagtctgcattcagccggtcctcccctgctcgccgtgacggccgctcccccagcgcagccattagctaaaaagaaaggtgttaagagaaaagccgacacaactacgccgacccccacagccatcctggctcccggtagccctgcctcaccacccggaagtcttgagccaaaagccgctagactccctccgatgcggagggagagcggtcgccctatcaagccgccacgaaaagacctcccggactctcagcagcagcatcagtcatctaagaaagggaagttgagtgaacagctgaagcactgcaatggcattctcaaagagctgctgagcaaaaaacatgcagcttatgcctggccattttacaaacctgtggacgccagtgccctgggactgcacgattaccatgacatcatcaagcaccccatggacctatctacggtaaagcgaaagatggaaaaccgagattatagagacgcacaagagtttgctgccgatgtgcgactcatgttctcgaattgttacaagtacaatccgccagatcacgacgtagtggcgatggctcggaagctgcaggatgtttttgagttccgatatgccaagatgccagacgaacccctggagccaggcccactgcccgtaagcactgccatgcctcctggcctggctaaaagcagcagcgagagttcatcagaagagtcctccagcgagtcttcttccgaggaagaagaagaagaagatgaggaagacgaggaagaagaagagtcagagtctagtgattcagaagaagaacgggcacataggctcgcagagctccaagagcagctgagggccgtgcacgaacagctggccgcactgtcccaagggcctatctcaaagccaaagagaaagcgcgaaaaaaaagagaagaaaaaaaaacggaaagcggaaaaacacaggggcagagcgggtgcggacgaggatgataaagggcctcgcgcacccagaccaccccagcccaagaagtctaagaaagcttccggaagcggcggtggcagcgccgctttaggtccttccgggttcggcccatcaggaggcagcggaacaaaacttcaggccggagtgcagtggcgggacctgggactgttacagccgccactactagggttcaagaggttcagctgcttgtcactcccatcctctcaggactatcgcctcccaaagaaggctaccaagacggccccacccgctctgcctaccggttacgacagtgaggaagaggaggagtccagacccatgtcttacgacgagaaacggcagctgagcctggatatcaataagcttcccggtgagaaactaggcagggtggttcacattatccaggcgagggagccatccctgagagacagcaatccggaagagattgagatagatttcgaaacactgaaaccttcaacattgcgcgaactggagagatatgtgcttagctgccttcgtaagaagccgcgaaaaccatacacaattaaaaagcctgtaggaaagacaaaggaggagctggccctcgagaagaagagggaattggagaagcgcctacaggacgtgtctgggcagttgaatagtaccaagaaacctcccaagaaagctaatgagaagaccgaatcctctagcgcccaacaggtggctgttagccggttatcagcttcgagttcttcctccgactccagcagcagctcttcaagcagtagttcgtcggatacaagcgattccgattccgggtag

SEQ ID NO: 77554 - DNA, 2511 bp, Artificial Sequence
  derived and/or modified sequence
atgctccagaatgtgaccccgcataacaagctgcctggagagggtaatgccggactgctcggcctggggccagaagctgctgcgccaggaaagaggatccggaagccatcgttactgtacgaaggcttcgagagtcccaccatggcctcagtgcccgctctgcagttgacccccgctaaccccccacccccagaggtcagtaaccccaagaagcctggcagagtgacgaatcaactgcagtatcttcacaaggttgtcatgaaagcgctgtggaagcatcagtttgcctggcccttccgccagccagtggatgcagtcaagttggggctgcccgattaccacaaaatcatcaagcaacccatggacatgggcacaatcaagagacgcctggaaaataattactactgggccgcatcagaatgcatgcaagacttcaacacaatgttcactaattgctacatctacaataagccaactgacgacatcgtcctgatggctcagaccctcgagaagattttcctccaaaaggtggcttcaatgcctcaggaagaacaggaactcgtagtgaccattcccaaaaattcccacaaaaaaggcgcaaaattggccgcattgcaaggcagcgtgacaagtgctcatcaggtcccagcagtcagtagcgtgagccacacagccctatacacccctccacccgaaatccctacgaccgtgcttaatattccacatccatcagttataagcagtccgctcttaaagtctctgcacagtgccggacccccactgcttgccgtgacggcagccccacctgctcagcccctggccaagaaaaaaggggtgaagcggaaggcagacacaaccacgccaacccctactgccattctcgcaccgggtagtcccgcatccccacccggaagcttagagccaaaagcagctcgcctccctccaatgcgtagggagagtgggcgaccaatcaagcctcctcgcaaagatctgccagatagccagcagcaacaccagtcctccaagaagggtaagctctctgagcagttgaaacactgcaacggcattctgaaggagttgctgagcaagaaacatgcagcctacgcatggccattctataagcctgtcgacgcgtctgctctaggcctgcacgattatcacgatattatcaaacaccccatggatttaagcacggtgaagagaaagatggaaaatcgtgactatagagatgcccaagagtttgctgccgacgtgcggctgatgttcagcaactgttacaaatacaaccccccagaccatgatgtggtggcgatggcacgcaagctccaagacgtgttcgagttccggtatgccaagatgcctgatgaacctctcgagcccggtcctcttcccgttagtacagccatgccacctggcctcgctaagagcagttcggagtcttcctctgaggaatcatctagcgagagttcctctgaggaggaggaagaagaagacgaagaggacgaggaagaagaggagagcgaaagctccgactcagaagaagagagggcacaccgtcttgctgaattacaggaacagctgcgggcagtgcatgagcaattagctgctctgtcacagggccctatctcaaagccaaagcgcaagagggaaaaaaaagagaagaaaaagaagaggaaagcggagaaacatcgcggtcgggcaggcgctgatgaagatgataagggcccaagagctccaagaccaccacagcccaagaagagcaaaaaagcctccgggtccggagggggttcagccgctcttggccctagcgggtttggcccaagcgggggttcgggcactaagcttcaggccggagtgcagtggcgggatctcgggctgctgcagcccccacttctgggattcaagaggtttagctgcttatccttaccgtcctcacaggattacaggctgccaaaaaaggccacaaaaaccgcacctccagcgctcccaaccggctacgactccgaggaggaggaggaaagcagacctatgagttacgacgaaaaaaggcagctgtccctggatatcaataagctgcctggggaaaagttgggtcgggtggtgcatattatccaagccagagagccgtctctgcgcgactccaatccagaggagatcgagattgattttgaaactttaaagcctagcacactgcgcgagctggaacggtatgtgctgtcttgcttacgaaaaaagccgcgtaagccatacacaataaagaagcctgtcggcaaaacaaaagaagagttagcccttgagaaaaagcgagaactcgaaaaaagattgcaggatgtgtcaggacaactgaactctaccaagaaaccacccaagaaagctaatgagaaaacagaatcctcctcagcccagcaagttgcggtgagcaggctgtctgcaagcagcagttccagcgacagcagcagctcatcgtcctcgagctcctcctccgatacaagcgacagcgactccggttag

SEQ ID NO: 77555 - DNA, 1947 bp, Artificial Sequence
  derived and/or modified sequence
atgctgcagaacgtgacaccacacaataagctgcctggcgaggggaacgccggacttctcggccttggtccagaggccgcagctccaggtaaacggattcgcaaaccctcactgctgtatgagggctttgaatcgccgacaatggcctccgtgccagccctgcagctgacacccgctaatccacctcctcccgaggtgtccaaccctaaaaaaccaggaagagtgactaaccaactgcagtacctgcataaggtcgttatgaaagctctgtggaaacatcaattcgcctggccattccgtcagccagtggatgccgtgaagcttgggctgccagactaccataaaataatcaagcaacccatggatatgggtacgataaagaggcggttagagaataattactactgggcagcttccgagtgcatgcaggattttaacaccatgttcaccaattgctatatctacaacaagcccaccgatgatattgtccttatggcacagacactcgagaaaatatttctccagaaggtggcctctatgccacaggaggagcaagaattggtggtgactatccccaagaacagccacaagaaaggcgcaaagcttgcagcactgcagggatccgtaacgagcgcacaccaggtacccgctgtcagcagtgtttcccataccgcactctacactccacctcctgaaattcccacaacagtgttgaacattccccacccctccgtcatatcgtcccccctgctgaagtctctccattcagctggccctccactgctggcagttactgccgctccccctgcgcagccgctcgctaagaaaaaaggggtcaaaagaaaagctgatacaaccacccctactccaaccgcgattctcgcaccgggatcccctgcttccccacctggatcattagaacccaaggccgctaggctgccacctatgcggagagagtcaggaaggccaatcaaaccccctcggaaggacctcccagattcacagcaacagcatcaatcgagcaaaaagggaaaattgtctgagcagctgaagcactgtaatggcatactgaaggagctgctgagtaaaaaacatgctgcgtacgcctggccattttacaaacccgtcgacgccagcgctctaggccttcacgattaccatgatatcatcaagcatccaatggacctaagtacagtcaaaagaaagatggagaatagagactaccgggacgcccaggaattcgccgcagatgtgcgacttatgtttagcaactgttataagtacaaccctccagatcatgacgtggtggccatggctagaaaactccaggacgtctttgagttccggtacgccaagatgccggatgaacctcttgagcccggacctttgcccgtctcaactgccatgcctccaggactagctaagtcctcatctgaaagcagttcagaggaatcatcaagcgagtcaagttccgaagaagaagaggaggaggacgaagaggacgaggaagaggaagaatcagagtcctccgacagcgaagaggagcgcgctcaccgcttggctgagctccaggaacagctccgcgcagttcatgagcagctggctgctctgtctcaagggcctattagtaagcccaagcgaaagcgagagaagaaagagaaaaagaagaaacggaaagcagaaaagcatcggggtagagctggcgctgacgaggacgacaagggaccccgtgctcccagacctcctcaacctaaaaagtccaagaaagcttcagggtctggcggaggaagtgcggctctgggaccttccgggttcggtccttccggaggatccggaacaaaactccaggccggtgttcagtggcgcgatctgggcctccttcaaccacctttactcggatttaaaaggtttagctgtctgtcccttccgtctagccaggattactag

SEQ ID NO: 77556 - DNA, 1092 bp, Artificial Sequence
  derived and/or modified sequence
tgagcaaagtcctcctcagaaagcagttccgaagaaagcagctctgagagctcgtccgaggaggaagaagaagaagatgaggacgaagaggaagaggagtccgagtcaagcgattccgaagaagaaagagcccatagactcgctgaacttcaggagcaactgagagccgtgcacgagcagctggccgcactttcccaagggccaatctccaagccgaaacggaagagggaaaaaaaggaaaagaagaaaaagcggaaagccgaaaagcaccgagggagagctggtgccgatgaggatgacaagggccctcgggctccaaggccgcctcagcctaaaaagtcaaagaaggctagcggttctggtggcggaagcgcagccttaggcccatctggctttggcccatctggcggaagtgggaccaagctgcaagctggggtccagtggcgagatctgggtcttcttcagcccccactgctggggttcaagcggttttcctgccttagtttaccatcctctcaggactatcggctaccgaagaaggcaacaaagaccgctccacccgcactgccaactggctatgactctgaggaggaggaagaaagtcggccaatgagttatgacgaaaaacggcagctttcactcgacattaataagctgcccggagaaaaactggggagggtcgtacatatcatccaggccagggagcctagtctgagggatagcaatccagaggaaatcgagatcgatttcgagacactcaaacctagcactctccgggagctggagaggtatgtgttgtcctgtcttcgcaagaagccgcgtaagccctacactattaaaaagcccgtcggaaaaacaaaagaagagttggcactagagaaaaagcgagagctggagaaacgcttgcaagacgtgtcaggccagttgaactccaccaaaaagccaccaaagaaggctaacgaaaaaaccgagtcaagctccgcgcagcaggtggcggtgtctcgcctcagcgcaagctcatctagcagtgattcatcttctagctcctcgtcgtcaagtagttccgacacgagcgatagcgattccggctag

SEQ ID NO: 77557 - DNA, 2511 bp, Artificial Sequence
  derived and/or modified sequence
atgttacagaacgtaacaccgcataataaactgcccggagaagggaatgcagggcttctagggctggggccagaggctgccgctccaggtaaacgcatccggaaaccttccttattgtacgagggattcgagagccccacaatggcaagtgtgccagccctccagctgactccagcgaatccccctcctccagaggtttcaaatcccaaaaagcctggacgggtgactaatcagctgcagtacctgcacaaggtagttatgaaggccctttggaagcaccaatttgcttggccctttcggcaacctgtggacgctgtaaagttgggcctgccagattaccataaaatcattaaacagccaatggacatgggcactatcaagcggaggctcgaaaacaattattattgggcagcctctgaatgtatgcaggactttaataccatgttcaccaactgctatatctataataaaccaaccgacgacatcgtcctgatggcccagaccttggaaaaaatttttcttcagaaagtcgcctcgatgcctcaagaggagcaggagttagtagtaaccatacccaagaatagtcacaaaaagggcgcaaagctggcagccttgcagggttccgtcaccagcgcccaccaggtgcccgctgtgagcagcgtctcgcatacagctctatacacacctcctcccgaaattccgactacagttctgaatatcccccacccatctgtgatttcatcaccgctcctgaagtcattgcatagcgccggaccaccactgttggctgtgaccgccgctccccctgctcagcctctggcaaaaaagaaaggagtcaagcgcaaggcagatacgaccacccctaccccgaccgccattctagcacccggaagtccggcttctccgcctggtagtctcgaaccaaaagccgcacgcctgcctcctatgaggagagagagtgggcgacctatcaaacccccacgtaaagaccttcccgactctcagcagcagcatcagtcctccaagaaaggaaaactcagcgagcagcttaagcactgtaacggaatcttaaaggaactgctgtccaaaaagcatgccgcatatgcctggcctttttacaaaccagtcgatgcatctgcactcggactccatgattaccacgacatcatcaagcacccaatggacctctcgactgtcaaacgcaagatggaaaacagggactatcgggatgcgcaggagttcgctgcagacgtccggctgatgttcagcaattgctataaatacaatcccccagaccacgacgtggtggccatggctagaaagttgcaagatgtgtttgaattccggtacgcaaagatgccagatgagcctctggagcctggcccactcccagtttccacggccatgccccctggcttagcaaagtcgtcatcagagtcctcatccgaagaaagctcgtctgaatcgagcagtgaggaggaagaggaagaggatgaagaggacgaagaagaggaggaatcagaatcatctgactctgaagaggagcgcgctcatcgtcttgcggaacttcaagaacagctccgtgcagtacacgagcagctagctgcactgtcacaaggaccgattagtaagccgaagcgcaagagagagaagaaggagaaaaaaaaaaaacgtaaagccgagaagcataggggaagggccggagctgatgaggacgacaaaggacccagagctcccagaccacctcagcccaaaaagtctaaaaaggcatccggaagcggcggtggctcagcagccctgggcccaagtggatttggacccagcggaggcagtggaaccaaactccaggctggtgtgcagtggagagacctcggcctcttgcagcccccactcctgggattcaagaggttcagctgtctgtctcttccgagctctcaagactatcggctcccaaagaaggccactaagaccgcccctccggctctgcctactgggtacgacagcgaggaagaggaggagtccagacctatgtcatacgacgagaagcgacagctctcccttgacatcaacaaacttccaggggagaaactgggtagggtcgtccacatcattcaagctagggagccgtcattgagagatagtaatcccgaagagatcgaaatagacttcgagactctgaagccctctacacttagagagttggaaaggtatgtactgtcttgcttgcggaaaaaaccccgtaagccctacaccatcaaaaagccagtggggaaaacaaaagaggaactggccctggagaagaaacgggagcttgagaaacgactccaggacgtctctggacagctgaattctaccaaaaagccccctaaaaaggctaatgaaaaaaccgagagttcgtctgcccaacaagtggctgtgtccaggctgagcgcatcttcctccagtagcgactcatccagctccagctcaagtagctcatccagcgacacatcagactccgacagcggatag

SEQ ID NO: 77558 - DNA, 2511 bp, Artificial Sequence
  derived and/or modified sequence
atgcttcagaatgtgacgccgcacaacaagctgcctggtgagggaaatgcaggtcttctgggattaggcccagaggcagcagctcctggaaagagaatcaggaagccttcactgctgtacgaaggattcgagagtcccacaatggcaagtgtacctgctcttcaactgactcctgcaaatccaccccctcccgaggtgagcaaccctaaaaaacctggccgagtgaccaaccagctccaatatttgcacaaagtggtgatgaaggcgctctggaagcatcagtttgcctggccgtttcggcagcctgtggatgctgtcaaactcggcctgcccgactaccataaaatcatcaaacaacccatggacatgggaactatcaaacgacgcctagagaataattactactgggccgcatcggagtgcatgcaggactttaacaccatgttcacaaactgctacatctataataagccaaccgacgatattgtgttgatggctcagacgctggagaaaatctttcttcagaaagtggcctcaatgcctcaagaagagcaggagctcgtggtaacaatacccaagaacagccacaaaaagggagctaagttggcagctcttcagggctctgtgacctcagcacatcaggttcctgccgtatcttccgtgtctcacaccgcgctgtatacaccccctcccgagatccctactaccgtgttgaacatcccccatccatctgtcatcagctccccacttctgaaatcactccacagcgccggaccacccctcttagccgttactgctgcccctcccgcacagcccctcgcaaagaagaagggagtaaagaggaaggccgacaccacaacacctactccgacagcgatcctggctcctggcagcccagcatctccccctgggagcttggagcccaaggccgcacgccttcccccaatgaggcgcgaaagcggtcggcctatcaagccgccaagaaaggacctgccggactcacagcaacagcaccagtctagcaagaagggaaaattatctgagcaattgaagcactgcaacggcatcttgaaggagttgctgtcaaaaaagcacgctgcctacgcttggcctttctataaacccgtagacgcgagtgctctcggcctgcacgattaccacgatattataaaacacccaatggacctttctacagtcaaacgaaagatggagaaccgagattatcgcgacgctcaggagttcgcggctgacgtacgactgatgttctctaattgctataagtacaatccccctgaccacgatgtggtggctatggcacggaagcttcaggatgtcttcgaattccgatacgccaagatgcctgacgaaccccttgagccagggcctttacccgtgtctacagcgatgcctccaggcctggccaaaagctctagcgaatcctcatctgaggagtcttccagcgagtcctcttcagaggaggaggaagaagaagacgaggaggacgaggaagaagaagagtctgagagctccgatagtgaggaagaacgggcacacaggttggctgaactgcaggaacagctgagagctgtccatgaacagctcgccgcactgtcacagggacccattagcaaaccaaaacggaaaagggaaaaaaaggagaagaagaagaaacgtaaggcggaaaaacaccggggacgggctggagcagacgaggatgataagggaccacgcgctcctcgacctccccagccaaaaaagagtaagaaagcctccgggagcgggggtggaagtgctgcgttgggtccgagcgggtttggtccaagtggtggctcaggaaccaaactgcaggcaggcgtgcagtggcgggatctcgggcttttacagccgcctctgctggggttcaagcgcttctcttgtctatccttgccctcttctcaggactatcgtctgcccaagaaagctaccaaaacagcccctccagccctgcccacggggtatgatagcgaggaggaggaagaatctaggcctatgagctacgacgagaagaggcagctgtccctggacatcaataaactgcctggggagaagctcggacgcgtcgtgcacatcatccaggcgagagagccatctctgagggatagcaatcctgaagagattgaaattgattttgagacactgaaaccaagcacactccgagaactcgagaggtacgtgctgagctgcttgagaaagaaaccaaggaagccttacacaataaagaagcctgtgggcaagaccaaggaagaattggctctggaaaaaaaaagggagctggagaaacgactgcaagatgtatccggtcagctgaattcaaccaaaaaaccacccaaaaaagccaatgagaagactgaatccagttcagcgcagcaggtcgctgttagtaggctctctgcatccagctctagttctgactcctcgtccagctcgtcctctagctcttcttccgacacaagcgactccgactcaggatag

SEQ ID NO: 77559 - DNA, 2511 bp, Artificial Sequence
  derived and/or modified sequence
atgctccagaacgtgactccccacaataaactgcctggagagggaaacgccggactgttgggcttaggtccagaagccgcagcaccaggcaaaaggattcgaaaacccagcctgttgtatgaagggttcgaatcacctaccatggccagcgttcccgcactgcagttaacccccgctaaccccccacctccggaagtgtctaaccctaaaaagcctggccgagtgaccaatcaactgcagtacctccataaagttgtcatgaaagctctgtggaaacaccagttcgcgtggccgtttcgtcagccagtggacgccgtcaagctgggactgcctgactatcataagatcattaagcaacccatggacatgggcacaataaagcgaaggcttgagaataactattactgggccgcaagcgaatgcatgcaggactttaatacaatgtttacgaactgctacatttataacaagcccaccgatgacattgtgctgatggcccagactttagagaagatctttcttcagaaggtagcttctatgcctcaagaggagcaggaacttgtcgtcaccattcccaagaattcccacaagaagggcgcaaaacttgctgccttacagggttctgtaacctccgcccaccaagtgcccgctgtgagctcagtgtcccacaccgcgctctacactccaccaccggaaatccctaccaccgtcttcaatatcccccacccaagcgtaatttctagtcctctcttgaagtctctccatagcgccggaccacctctgctcgctgtgacagctgcgccacctgcgcagccactggcaaagaaaaaaggcgtgaagagaaaggcggacactaccacacccacccctactgccattctggctccaggaagtcccgctagtcctccaggcagtctggagcctaaagccgctagattgcctccaatgaggagagaaagcggcagacctataaagccacccagaaaggacctgcccgacagccagcagcagcaccagtcttctaagaaaggcaagctcagcgagcaactgaagcactgcaacggtatcctgaaggagcttctaagcaaaaagcatgccgcttacgcttggccattttacaaacccgtggacgcctcagcacttggcctacacgactaccacgatatcatcaagcatcccatggacctgagcacagtgaagcgcaagatggaaaaccgggattaccgcgacgctcaggagttcgctgctgacgttagactgatgttcagtaattgttacaagtataacccccctgatcatgatgtcgtcgccatggctcggaaactacaggacgtgttcgagtttcgctacgctaaaatgccagatgagcccttagaaccgggaccacttccggtttcaaccgctatgccacctgggctcgccaaatctagctctgagagcagtagcgaagaatcatcctcggaatcctcaagcgaagaggaggaggaggaggacgaagaggatgaagaagaagaagagagcgaaagctcagactctgaggaggagcgagcccatagactggccgagctgcaagagcaattgcgcgcagtgcacgagcagttggcggcattgtcccaggggcctatcagcaagcctaagcggaagcgggaaaaaaaagagaaaaaaaaaaaaagaaaggccgaaaagcacagggggcgtgcaggtgccgacgaggatgataaaggccctcgggcaccccgtcctccccagcctaaaaagtctaaaaaggcatctgggtcaggcggagggtcggcagccttgggaccaagtggatttggacccagtggaggatcgggaaccaaactgcaagctggggtccaatggcgtgacttgggtctgcttcagcccccactgttgggattcaagcgcttttcctgtctctcgctgccatcaagccaaaattatagactcccaaaaaaggcgaccaaaactgcgcctcctgcactgccgaccgggtatgacagcgaggaagaggaggaaagccgccctatgtcttacgacgaaaagagacaactgagcctggatatcaataaattgcctggagaaaagctcgggcgtgtggtgcatatcatccaggccagggagccatctctgagagactcaaacccggaggagatcgagatcgactttgaaactctcaagccatcaacgttaagggagctggagagatacgtgctctcctgcctgcggaaaaagccccgaaagccctatactatcaaaaagcctgtcggcaaaactaaggaggagttggcacttgaaaagaaacgtgaattagaaaagcggctacaggacgtgagcggccaactgaatagcacgaaaaagcccccaaagaaagcaaacgaaaagacagagtcgtccagtgcacagcaagtggctgtgagtagactgtcagcaagcagtagttcctccgatagcagcagttctagttcttcaagctcttcgagcgatacctccgattcggactccggatag

SEQ ID NO: 77560 - DNA, 2511 bp, Artificial Sequence
  derived and/or modified sequence
atgctacagaatgttaccccacacaacaagctgcctggagaggggaacgcgggactcctagggcttggacccgaggcggctgcccctggtaagaggattcggaagccctcgctgctttacgaaggcttcgaaagccctacaatggcgtctgtgccagccctacagctcacacctgccaaccccccacccccagaagtctccaatccgaagaaacctggtcgcgttactaaccagctccagtacctgcataaggtagtgatgaaggcgctgtggaagcaccaattcgcctggcccttcaggcagccggtggacgccgtaaaattggggttgccggactaccacaagattatcaagcagccgatggacatgggcacgattaaacggagattagaaaacaattattactgggctgcctccgagtgcatgcaggatttcaacacgatgtttaccaactgttacatatacaacaagccaaccgacgacattgtcctgatggctcagacgttggaaaagatttttttacagaaggtggcatccatgccacaggaagaacaagaactcgttgttaccatccctaaaaacagccacaaaaaaggagccaagctggctgctctccagggcagcgtgacctccgcacaccaggtccccgctgtgtctagcgttagtcacactgctctatacacgcctcccccagagatcccaaccacagtcctgaatatcccccatcccagtgttatctccagtcctttactgaaatctcttcactccgccggacctccactgctcgccgtgactgcggctccacccgctcaacccctggcaaagaagaagggggttaagcgaaaggccgatactaccaccccaacacctaccgctattctggcccctggaagtccagcttcccctcctggaagcctcgagccgaaggccgctaggctgcctcctatgcggagggaaagtgggcgacccatcaagccccctagaaaggacctccctgatagtcaacaacagcatcagtcttcgaagaaaggtaagctaagtgagcagttgaaacactgcaatggcatccttaaggaattgctcagcaagaagcacgcagcatatgcttggcctttttacaaaccagttgatgcttccgcccttggattgcatgactaccacgatattattaaacatcccatggatctctcaactgttaagaggaagatggagaaccgcgactatagagatgctcaagagttcgcagccgacgtgagactgatgttctctaattgctataagtataaccctccagatcatgacgtcgtggctatggccagaaagttacaggatgttttcgagttccgctacgcaaagatgccagatgaacctctagagcctggaccactacccgtaagcacagccatgccacctggattggcaaaaagtagttccgagtcatcaagcgaagagtcctcaagcgagtcttcctctgaggaggaagaggaagaggatgaggaggacgaggaagaagaagagagcgaatcatcagatagcgaggaggaacgtgctcatcgcctggctgaactccaggagcagcttagggccgtccacgagcaattagcggctctgtcacagggccctatcagcaaaccaaagcgcaaacgtgagaagaaggagaagaaaaagaaaaggaaggccgaaaaacaccggggtcgggctggcgctgatgaagatgataaaggtccgagagctccacgaccccctcagccaaaaaagtcaaagaaagcctcaggcagtggtggaggttcagctgccctcgggccttcaggctttgggccatccggcggtagcggcactaaactgcaggcaggagtccagtggagagacttgggtctacttcaaccccctttactaggctttaagcggttctcctgtctgtcactcccatctagtcaggattatcgactgccaaagaaagccaccaaaactgcccctcctgcactgcctacaggatacgattcagaggaagaggaggagtcgcggccaatgtcatatgatgagaagcgccagctgtcactggacatcaacaagctgcctggagagaagctcggtagagttgtacatattatccaggctagagaaccttctctccgtgacagcaatccggaggagatcgagatcgacttcgagacacttaagccgtccactttgcgcgaactcgaaaggtacgtactcagttgcttgcgcaaaaagcccagaaaaccttataccatcaagaagcccgtcgggaaaactaaggaggaattagcacttgaaaaaaagcgggaactggaaaagcggcttcaggatgtctcggggcagctgaacagcacgaagaagcctccaaaaaaagcaaacgagaaaaccgagtcctcgtcagctcaacaggtcgccgtttcacggctttctgcctcaagttccagttctgattcatccagctcctcctcgtctagtagcagtagcgatacgagtgacagcgacagtggttag

SEQ ID NO: 77561 - DNA, 2511 bp, Artificial Sequence
  derived and/or modified sequence
atgctccagaatgtcactcctcataacaagttgcctggggaaggcaacgccggtctgctgggattggggccagaagcagctgcgcctgggaaacggatccgcaaaccatcactgctttacgaaggcttcgaaagccctactatggcttcagtgccggctttgcagttgactccagccaaccctcctccaccagaagtttctaatcctaaaaaacctggcagagtaactaatcagttacagtatctgcacaaggtcgtaatgaaggccttgtggaagcaccaattcgcttggccattccgccagcctgttgacgccgtgaagttaggccttcccgattaccacaagattatcaagcagccgatggatatgggaactattaagcgacgattggagaataactattactgggccgcttcagagtgcatgcaggactttaacactatgtttaccaattgttacatatacaataagcccaccgatgatattgttttgatggctcagaccttggagaagatcttcctacagaaagtggctagtatgcctcaggaggagcaagagttagttgtgacaattccaaagaactcccacaaaaagggcgctaaactggctgcattacagggcagcgtgacctccgctcaccaggtgcccgctgtctcatccgtgagccatacagccctctacacgcccccacccgaaatccctaccaccgtccttaacattccccatccaagcgtgatcagtagtcctctcttgaagagcttacactccgccggaccccctcttctggctgtcactgcagccccaccggctcaaccgctcgctaagaaaaaaggcgtgaagcgtaaggccgatacaaccacccctactcctaccgccattcttgctcctggcagtcctgcgtccccacccggatccctggaacctaaagcagcccgactgcccccaatgaggagggaaagcggcaggcctatcaagccccctaggaaggacctacccgatagccagcagcagcaccagagtagtaagaaaggaaagctttccgagcaactgaaacactgtaacggcatccttaaggagctgctctcgaaaaagcatgccgcatatgcgtggcctttctataagccagtggacgctagcgccctgggtctgcatgactaccacgatatcatcaaacaccctatggacctgtcaaccgtgaagcgcaaaatggaaaacagagattatcgcgatgcacaggagtttgccgctgatgtgaggttaatgttctcaaattgttacaagtataaccccccagaccacgacgtggtcgctatggctaggaaacttcaagacgtcttcgaatttcgatacgccaagatgccggacgagcccctggagccaggccctctgcctgtgtctacggccatgcccccaggtctggcaaagtcaagctcagagtcaagctccgaggagtcaagtagtgagtcatcatctgaggaggaggaagaagaggacgaagaagatgaggaagaagaagagagtgaatcttcagattccgaggaagaacgggcacacaggctcgcagagttgcaggagcagcttagagcagtccacgaacaactagccgctttgagccagggccctatctccaagcccaagcgaaagcgagaaaaaaaagagaagaagaaaaaacgcaaagctgagaagcatagggggagggccggagcggacgaagacgacaagggtcccagagctccacggcctccccagcccaaaaaaagcaagaaagcctctgggtccgggggaggatccgcagctttaggaccttctggatttgggccatctggagggagcggcacaaagctacaggcaggagtacaatggagagacctgggtctcttgcagcctcccctgttaggcttcaaaagattcagctgtttgagcctgcctagctctcaagattacagacttccgaaaaaggccaccaaaacggcgcctccagcactgccaaccggctacgactccgaagaagaagaggaatcaagacccatgagctatgatgaaaagcgtcagctttctttggatattaataagcttcctggggagaagctcggaagagtggtacacataatccaggccagggagcctagtctgcgtgatagcaatcccgaggaaatcgaaatagactttgaaactttgaagcctagcacactgagggagctcgaaaggtatgtcctgtcctgtcttcggaagaagcccagaaagccatacacgattaagaagcctgtcggcaaaactaaggaggagctggccctggagaagaagcgggaactggagaagcgtctgcaggatgtctctggccaactcaactccacaaaaaaaccacccaaaaaggccaatgagaagaccgagagcagttctgcacaacaagtggcagtgtctcgattgtctgcatcttcaagctcgtccgacagctcaagcagctcatcgagctcttcctcttccgatactagcgattcagactctggttag

SEQ ID NO: 77562 - DNA, 2511 bp, Artificial Sequence
  derived and/or modified sequence
atgctccagaatgtgactccccacaataagctcccgggagagggaaacgccggtctactgggtctgggtccagaggcagccgctcctgggaaacggatcaggaagccatctctgctgtacgaaggctttgagtctccaacgatggcttctgtgcctgctctgcaattaacacctgccaatccaccacctccggaggtatcaaatcctaaaaaaccaggccgagtgaccaatcaactccagtacctccacaaagttgtcatgaaagcactgtggaagcaccagtttgcctggccctttcgccagcctgtcgatgcggtgaaactcgggctgcccgactatcacaagatcatcaagcagcctatggacatgggtacgatcaaacgcagactggagaataattattattgggccgcatccgaatgtatgcaggacttcaatactatgtttacaaactgttacatctacaataagcccaccgacgacatcgttttgatggcccagacgttagaaaagatctttctccaaaaagtggcaagcatgcctcaggaagaacaggagttggtggtcactattccgaaaaattcgcacaagaaaggtgcgaagctggcagccctgcaaggatccgtcaccagcgcacaccaggtgcccgcagtgtcttcagtttcgcatacggcgctttatacaccccctccagagattcctacaactgttttgaatatcccacacccttccgttataagcagtccattgctgaaaagtttacactctgctggacctcccctgcttgctgtgactgccgcacccccagcgcagccgttagcaaagaagaagggggtgaagcgaaaagccgataccacgacccctacgcctaccgctatcctagctcccggttcccccgctagcccgcctggcagtttagagcccaaagcggcaagactgcccccaatgaggcgcgaatctggccgacccataaagccaccccgaaaagacttgcctgatagtcaacaacagcatcagtcttcaaagaaaggtaaactaagtgagcagctcaaacattgtaacggcatcctgaaggagctgctgagcaagaagcacgctgcttacgcctggccgttctataaaccagtcgatgcctcagcactgggtctacatgactaccatgacatcatcaagcatcccatggatctatccactgtgaaacggaaaatggaaaaccgggattatcgagacgcgcaggaattcgcagctgacgtcaggcttatgttctctaattgttacaagtacaacccacctgatcatgacgttgttgccatggctcgtaaactgcaggacgtttttgaattccggtatgctaagatgcctgatgagccactggaaccaggtccactgccagtctctaccgccatgcctccaggcctagccaagtcctccagcgaaagctcatccgaggagtcatcaagtgagtcttctagtgaggaggaagaagaagaagacgaggaagatgaagaagaggaagagtctgagtctagcgactctgaagaagaacgcgcacataggctcgccgagctgcaggagcagctcagagcggtgcacgagcagctcgctgcattgagtcagggccctatatccaagcctaaacgcaagcgagaaaaaaaagaaaagaaaaagaagagaaaggccgagaagcataggggtcgcgctggggctgatgaagatgataaaggacccagggctccacgcccaccacagcctaaaaagtcgaaaaaggcctctggatccggcggtggctccgccgctctgggacccagtgggttcggacctagcgggggttccggcaccaagctgcaggccggtgtacagtggcgggatctggggcttcttcagccccctttgctgggctttaagcggttttcttgcctcagcctgccctccagccaggattacaggctgcccaagaaagctactaaaaccgctccacccgcactgcctacaggctatgacagtgaggaagaagaagaatcgcgccctatgtcatacgatgagaagaggcagttgagcctggatatcaataaattgcccggtgaaaagctcggccgagtcgtccatatcattcaggccagggagccttctctcagagacagcaatccagaagagatcgagattgattttgagacacttaaaccaagtacattgagagaactggagaggtatgtcctcagctgtttgagaaaaaagccacgtaaaccttacaccataaaaaagcctgtgggcaagactaaagaggagctggccttggaaaaaaaacgtgaattagagaagagactccaagatgtgtcaggacaattaaacagcacaaaaaagccccctaaaaaggccaatgaaaagaccgagtcctcctctgcccagcaggtggccgtgagcaggcttagtgcctcctcctcttcctcggatagctccagttcaagcagctcctcctcttcatctgacacatccgatagcgattctggatag

SEQ ID NO: 77563 - DNA, 2511 bp, Artificial Sequence
  derived and/or modified sequence
atgttgcaaaacgtaacaccccacaataaactgcccggagagggtaacgcgggattgctaggactggggcctgaagcggctgcccctggaaaacgaatccgcaagccatcccttttatatgaaggtttcgagtctccaacaatggcttccgtaccggctcttcagcttacgccggctaatccgccaccacctgaagtaagtaatccaaaaaagcctggccgagtcacaaatcaacttcagtacttacacaaggtggtaatgaaggccctctggaagcaccaattcgcctggcctttcagacagcctgtagacgccgtgaaactcgggctccccgattaccataaaataattaaacagccaatggatatgggcacaatcaaaaggcggttggagaacaattactactgggcggcatctgaatgtatgcaggactttaacaccatgtttaccaattgctacatatacaataaaccgactgacgatatcgtattaatggcacaaactctcgagaagatctttttgcagaaagtggcttccatgcctcaggaggagcaggaattagtcgtgactatccccaaaaacagtcataaaaaaggggcaaaactagccgcattgcaaggctcagtgaccagcgcccaccaggtgcctgcggtttccagcgtctcccacactgctctttatactcctcccccagaaatcccaacaacagtttttaatatcccccacccttctgttatctctagtccactattgaaatctctccactccgctggcccacctttactggccgtgacagccgctcctcctgcccagcccctggccaaaaagaaaggggtaaaaagaaaagccgacacgacaacacccacccccaccgcaatcctcgcacctgggagtcccgcaagccctccgggttcactggagccaaaagcagctcgcctgccgccaatgcgaagggaatccgggagaccgatcaagccacctaggaaggatctccccgacagtcagcagcagcatcagtcaagtaagaagggcaagctctctgaacagctcaaacattgtaacgggattctcaaagagctgctctcaaaaaaacatgcagcctacgcatggcccttttataagcccgtcgatgcgtctgcccttggactccacgattaccacgacatcattaagcaccctatggatctgagtacggtaaaacgtaagatggaaaatcgagactaccgcgatgcccaggaattcgctgctgatgtgcgcttgatgtttagcaattgttataaatataaccctcctgaccacgatgttgtagccatggcccgaaaactacaggacgtgtttgagttcagatacgccaaaatgccggacgagcccttggagcccggtcccctgcccgtgtcaaccgctatgccaccaggtctggctaaatcgtcatcagaaagcagctctgaagaatcctcctctgaatcctcttccgaggaggaagaagaggaagatgaggaagacgaggaggaggaagagagcgagagtagcgacagtgaggaggagcgagcccacagacttgctgagctgcaagagcagcttagagcagtacacgagcagctggctgcactgagccagggccctataagcaaaccgaaaagaaaacgtgagaaaaaggagaaaaagaaaaagcggaaggcggaaaaacaccggggtagggccggagctgatgaagatgacaagggccctcgggcaccaaggccaccccaaccgaaaaaaagcaagaaggcttctggaagcggtggtggctctgctgctttgggcccatcagggtttgggccatctgggggaagcggcacaaagctgcaggctggagtgcagtggcgagacctcggtttgctgcagccaccactgctgggtttcaagagatttagctgcctgtcactcccttccagtcagaactatcgtctgcccaaaaaagctactaagactgctcccccagcgcttccaactggctatgatagtgaagaagaggaagagagcagacctatgtcttacgacgaaaagcggcaactttcccttgatatcaataaactgccaggagaaaagctgggccgagtggtccacatcattcaggctagagagccttcactcagagactctaaccctgaagagatcgaaatagatttcgagacactgaaaccgagcactctgagagagttagagcggtacgtgctgtcctgcctgagaaagaagccgaggaaaccctacacgattaagaagcccgtggggaagaccaaggaggagctggctctggaaaagaaaagggagctcgaaaaacggctccaagacgtgagcggccagcttaactctacgaagaagcctcctaagaaagctaacgaaaagacagaaagctcaagcgctcaacaggtggccgtgtcaaggctgagcgccagttcaagttcatcggactcatctagcagcagtagctcaagcagtagctctgatactagtgattcggatagtggatag

SEQ ID NO: 77564 - DNA, 3467 bp, Artificial Sequence
  derived and/or modified sequence
cccaaagagactgctttcgtgccggccaggcagggggtttgtcgcctggaggcccaagaggaacggcctccccccaacttagcgggttatgctggaccgggcggtgaggggaaccgaggccacccggactttccgcggctgagggcagcgccggttccttgcggtcaagatgctgcaaaacgtgactccccacaataagctccctggggaagggaatgcagggttgctggggctgggcccagaagcagcagcaccagggaagaggattcgaaaaccctctctcttgtatgagggctttgagagccccacaatggcttcggtgcctgctttgcaacttacccctgccaacccaccacccccggaggtgtccaatcccaaaaagccaggacgagttaccaaccagctgcaatacctacacaaggtagtgatgaaggctctgtggaaacatcagttcgcatggccattccggcagcctgtggatgctgtcaaactgggtctaccggattatcacaaaattataaaacagcctatggacatgggtactattaagaggagacttgaaaacaattattattgggctgcttcagagtgtatgcaagattttaataccatgttcaccaactgttacatttacaacaagcccactgatgatattgtcctaatggcacaaacgctggaaaagatattcctacagaaggttgcatcaatgccacaagaagaacaagagctggtagtgaccatccctaagaacagccacaagaagggggccaagttggcagcgctccagggcagtgttaccagtgcccatcaggtgcctgccgtctcttctgtgtcacacacagccctgtatactcctccacctgagatacctaccactgtcctcaacattccccacccatcagtcatttcctctccacttctcaagtccttgcactctgctggacccccgctccttgctgttactgcagctcctccagcccagccccttgccaagaaaaaaggcgtaaagcggaaagcagatactaccacccctacacctacagccatcttggctcctggttctccagctagccctcctgggagtcttgagcctaaggcagcacggcttccccctatgcgtagagagagtggtcgccccatcaagcccccacgcaaagacttgcctgactctcagcaacaacaccagagctctaagaaaggaaagctttcagaacagttaaaacattgcaatggcattttgaaggagttactctctaagaagcatgctgcctatgcttggcctttctataaaccagtggatgcttctgcacttggcctgcatgactaccatgacatcattaagcaccccatggacctcagcactgtcaagcggaagatggagaaccgtgattaccgggatgcacaggagtttgctgctgatgtacggcttatgttctccaactgctataagtacaatcccccagatcacgatgttgtggcaatggcacgaaagctacaggatgtatttgagttccgttatgccaagatgccagatgaaccactagaaccagggcctttaccagtctctactgccatgccccctggcttggccaaatcgtcttcagagtcctccagtgaggaaagtagcagtgagagctcctctgaggaagaggaggaggaagatgaggaggacgaggaggaagaagagagtgaaagctcagactcagaggaagaaagggctcatcgcttagcagaactacaggaacagcttcgggcagtacatgaacaactggctgctctgtcccagggtccaatatccaagcccaagaggaaaagagagaaaaaagagaaaaagaagaaacggaaggcagagaagcatcgaggccgagctggggccgatgaagatgacaaggggcctagggcaccccgcccacctcaacctaagaagtccaagaaagcaagtggcagtgggggtggcagtgctgctttaggcccttctggctttggaccttctggaggaagtggcaccaaactccaggctggagtgcagtggcgtgatctcggcttactgcaacctccacttctcgggttcaagcgattctcctgcctcagcctcccaagtagccaggattacaggctccccaaaaaggccacaaagacagccccacctgccctgcctacaggttatgattcagaggaggaggaagagagcaggcccatgagttacgatgagaagcggcagctgagcctggacatcaacaaattacctggggagaagctgggccgagttgtgcatataatccaagccagggagccctctttacgtgattcaaacccagaagagattgagattgattttgaaacactcaagccatccacacttagagagcttgagcgctatgtcctttcctgcctacgtaagaaaccccggaagccctacaccattaagaagcctgtgggaaagacaaaggaggaactggctttggagaaaaagcgggaattagaaaagcggttacaagatgtcagcggacagctcaattctactaaaaagccccccaagaaagcgaatgagaaaacagagtcatcctctgcacagcaagtagcagtgtcacgccttagcgcttccagctccagctcagattccagctcctcctcttcctcgtcgtcgtcttcagacaccagtgattcagactcaggctaaggggtcaggccagatggggcaggaaggctccgcaggaccggacccctagaccaccctgccccacctgccccttccccctttgctgtgacacttcttcatctcacccccccccgcccccctctaggagagctggctctgcagtgggggagggatgcagggacatttactgaaggagggacatggacaaaacaacattgaattcccagccccattggggagtgatctcttggacacagagcccccattcaaaatggggcagggcaagggtgggagtgtgcaaagccctgatctggagttacctgaggccacagctgccctattcacttctaagggccctgttttgagattgtttgttctaatttattttaagctaggtaaggctggggggagggtggggccgtggtcccctcagcctccatggggagggaagaagggggagctctttttttacgttgatttttttttttctactctgttttccctttttccttccgctccatttggggccctgggggtttcagtcatctccccatttggtcccctggactgtctttgttgattctaacttgtaaataaagaaaatattattcaagttttgagttaccttaatatttgcttttgtagtgtttcaaaaggaacatcataagaattgtcttgataattttgagggaaatattactgcagtgagaaaaggcaatagctaacctataattggattgtcttaatttttaaaccagtaggcttttgctgtgtttttaataaagtaaatatgacttttgtaaattga

SEQ ID NO: 77565 - DNA, 4898 bp, Artificial Sequence
  derived and/or modified sequence
tagtctgagccgcagccgccgcctcctccgctcgccctcctccctggcgctgaccgatggaccagccgctccgtggggaggactccggaccctggtgggggggcgggggggttctttcgcccccgtggcggagggcccctgagaggcggatacgggtgtgcctttgggggtgatgtggcgtgtggggggaaaggtccgagctcgcctggagggggagggtttttcccttaagtcatccctcccaggacttgctttttctgctctgagccggacgccggaatggagtttgaggaagagattcttcgctgctgctgccttaccgccgagaaccaccacccgccaggcgtcttgcggccacacccctggcgggttcaggcaggctacgcccacgcgacccctcccgtttccctgctttggccaatggaggagctacgaatggcacgacctgctcgagcttggcagtctccagttgggctgtgcatggaagcttgggaagactttgttggaaggggaggcggggagagagtgctggaggctctggggcgatggcttccgcacctcttccaaccaccctctttccctggagtcggcggaccacagctcagccaattggcttggagatgtggcgggttgccacttccctgtgggtctctgcggcactcttctgcctggtgactgacaccttggaaatgaagtttatgacgtcatcgttgcggctggccaatagaaaaagctcccgcggagaggtgttccttccccttcgactcagcttcttcacccgcgtgagcgagcgcgcgcgcgcggagggggtggggaaaagctcaagcagggtggcgcgcatgagcggcgaagctcctcctccccgcctatatataaagggctggcgcggggctcggcggcgccatttcgtgctggagtggagcagcctctagaacgagctggaggattctgcctaccgatacagagccttcgagtcgtccggggccgccattacaatccacctccatccgcttggaaatggccttcgtcccggcctatgactggtcccagcgggcagtacagaccccctagaagcccctggagctcccctttttcgggccccgcccaatcctcggagtctgtccaccccctctactccgccctcaagaggatttcaaagatggaggcggcggctccctaaaccacttttcgtgttcatccgcctccatccgagatcgaaacgggacctcgtcggccccgtaggggcccgacaagaagagggaatccctgcagaccaacagcgggctatattgacgacggtgtctgagatcggggaccgtcttttgaagagtcagtccctccttagttgcccgcctcagctgaggccgccgccattttcttgctgtccgccgtctgcagagcgcgccaagctgcccggagctctccgagaggccccaaagagactgctttcgtgccggccaggcagggggtttgtcgcctggaggcccaagaggaacggcctccccccaacttagcgggttatgctggaccgggcggtgaggggaaccgaggccacccggactttccgcggctgagggcagcgccggttccttgcggtcaagatgctgcaaaacgtgactccccacaataagctccctggggaagggaatgcagggttgctggggctgggcccagaagcagcagcaccagggaagaggattcgaaaaccctctctcttgtatgagggctttgagagccccacaatggcttcggtgcctgctttgcaacttacccctgccaacccaccacccccggaggtgtccaatcccaaaaagccaggacgagttaccaaccagctgcaatacctacacaaggtagtgatgaaggctctgtggaaacatcagttcgcatggccattccggcagcctgtggatgctgtcaaactgggtctaccggattatcacaaaattataaaacagcctatggacatgggtactattaagaggagacttgaaaacaattattattgggctgcttcagagtgtatgcaagattttaataccatgttcaccaactgttacatttacaacaagcccactgatgatattgtcctaatggcacaaacgctggaaaagatattcctacagaaggttgcatcaatgccacaagaagaacaagagctggtagtgaccatccctaagaacagccacaagaagggggccaagttggcagcgctccagggcagtgttaccagtgcccatcaggtgcctgccgtctcttctgtgtcacacacagccctgtatactcctccacctgagatacctaccactgtcctcaacattccccacccatcagtcatttcctctccacttctcaagtccttgcactctgctggacccccgctccttgctgttactgcagctcctccagcccagccccttgccaagaaaaaaggcgtaaagcggaaagcagatactaccacccctacacctacagccatcttggctcctggttctccagctagccctcctgggagtcttgagcctaaggcagcacggcttccccctatgcgtagagagagtggtcgccccatcaagcccccacgcaaagacttgcctgactctcagcaacaacaccagagctctaagaaaggaaagctttcagaacagttaaaacattgcaatggcattttgaaggagttactctctaagaagcatgctgcctatgcttggcctttctataaaccagtggatgcttctgcacttggcctgcatgactaccatgacatcattaagcaccccatggacctcagcactgtcaagcggaagatggagaaccgtgattaccgggatgcacaggagtttgctgctgatgtacggcttatgttctccaactgctataagtacaatcccccagatcacgatgttgtggcaatggcacgaaagctacaggatgtatttgagttccgttatgccaagatgccagatgaaccactagaaccagggcctttaccagtctctactgccatgccccctggcttggccaaatcgtcttcagagtcctccagtgaggaaagtagcagtgagagctcctctgaggaagaggaggaggaagatgaggaggacgaggaggaagaagagagtgaaagctcagactcagaggaagaaagggctcatcgcttagcagaactacaggaacagcttcgggcagtacatgaacaactggctgctctgtcccagggtccaatatccaagcccaagaggaaaagagagaaaaaagagaaaaagaagaaacggaaggcagagaagcatcgaggccgagctggggccgatgaagatgacaaggggcctagggcaccccgcccacctcaacctaagaagtccaagaaagcaagtggcagtgggggtggcagtgctgctttaggcccttctggctttggaccttctggaggaagtggcaccaaactccaggctggagtgcagtggcgtgatctcggcttactgcaacctccacttctcgggttcaagcgattctcctgcctcagcctcccaagtagccaggattacaggctccccaaaaaggccacaaagacagccccacctgccctgcctacaggttatgattcagaggaggaggaagagagcaggcccatgagttacgatgagaagcggcagctgagcctggacatcaacaaattacctggggagaagctgggccgagttgtgcatataatccaagccagggagccctctttacgtgattcaaacccagaagagattgagattgattttgaaacactcaagccatccacacttagagagcttgagcgctatgtcctttcctgcctacgtaagaaaccccggaagccctacaccattaagaagcctgtgggaaagacaaaggaggaactggctttggagaaaaagcgggaattagaaaagcggttacaagatgtcagcggacagctcaattctactaaaaagccccccaagaaagcgaatgagaaaacagagtcatcctctgcacagcaagtagcagtgtcacgccttagcgcttccagctccagctcagattccagctcctcctcttcctcgtcgtcgtcttcagacaccagtgattcagactcaggctaaggggtcaggccagatggggcaggaaggctccgcaggaccggacccctagaccaccctgccccacctgccccttccccctttgctgtgacacttcttcatctcacccccccccgcccccctctaggagagctggctctgcagtgggggagggatgcagggacatttactgaaggagggacatggacaaaacaacattgaattcccagccccattggggagtgatctcttggacacagagcccccattcaaaatggggcagggcaagggtgggagtgtgcaaagccctgatctggagttacctgaggccacagctgccctattcacttctaagggccctgttttgagattgtttgttctaatttattttaagctaggtaaggctggggggagggtggggccgtggtcccctcagcctccatggggagggaagaagggggagctctttttttacgttgatttttttttttctactctgttttccctttttccttccgctccatttggggccctgggggtttcagtcatctccccatttggtcccctggactgtctttgttgattctaacttgtaaataaagaaaatattattcaagttttgagttaccttaatatttgcttttgtagtgtttcaaaaggaacatcataagaattgtcttgataattttgagggaaatattactgcagtgagaaaaggcaatagctaacctataattggattgtcttaatttttaaaccagtaggcttttgctgtgtttttaataaagtaaatatgacttttgtaaattg

SEQ ID NO: 77566 - DNA, 3467 bp, Artificial Sequence
  derived and/or modified sequence
cccaaagagactgctttcgtgccggccaggcagggggtttgtcgcctggaggcccaagaggaacggcctccccccaacttagcgggttatgctggaccgggcggtgaggggaaccgaggccacccggactttccgcggctgagggcagcgccggttccttgcggtcaagatgctgcaaaacgtgactccccacaataagctccctggggaagggaatgcagggttgctggggctgggcccagaagcagcagcaccagggaaaaggattcgaaaaccctctctcttgtatgagggctttgagagccccacaatggcttcggtgcctgctttgcaacttacccctgccaacccaccacccccggaggtgtccaatcccaaaaagccaggacgagttaccaaccagctgcaatacctacacaaggtagtgatgaaggctctgtggaaacatcagttcgcatggccattccggcagcctgtggatgctgtcaaactgggtctaccggattatcacaaaattataaaacagcctatggacatgggtactattaagaggagacttgaaaacaattattattgggctgcttcagagtgtatgcaagattttaataccatgttcaccaactgttacatttacaacaagcccactgatgatattgtcctaatggcacaaacgctggaaaagatattcctacagaaggttgcatcaatgccacaagaagaacaagagctggtagtgaccatccctaagaacagccacaagaagggggccaagttggcagcgctccagggcagtgttaccagtgcccatcaggtgcctgccgtctcttctgtgtcacacacagccctgtatactcctccacctgagatacctaccactgtcctcaacattccccacccatcagtcatttcctctccacttctcaagtccttgcactctgctggacccccgctccttgctgttactgcagctcctccagcccagccccttgccaagaaaaaaggcgtaaagcggaaagcagatactaccacccctacacctacagccatcttggctcctggttctccagctagccctcctgggagtcttgagcctaaggcagcacggcttccccctatgcgtagagagagtggtcgccccatcaagcccccacgcaaagacttgcctgactctcagcaacaacaccagagctctaagaaaggaaagctttcagaacagttaaaacattgcaatggcattttgaaggagttactctctaagaagcatgctgcctatgcttggcctttctataaaccagtggatgcttctgcacttggcctgcatgactaccatgacatcattaagcaccccatggacctcagcactgtcaagcggaagatggagaaccgtgattaccgggatgcacaggagtttgctgctgatgtacggcttatgttctccaactgctataagtacaatcccccagatcacgatgttgtggcaatggcacgaaagctacaggatgtatttgagttccgttatgccaagatgccagatgaaccactagaaccagggcctttaccagtctctactgccatgccccctggcttggccaaatcgtcttcagagtcctccagtgaggaaagtagcagtgagagctcctctgaggaagaggaggaggaagatgaggaggacgaggaggaagaagagagtgaaagctcagactcagaggaagaaagggctcatcgcttagcagaactacaggaacagcttcgggcagtacatgaacaactggctgctctgtcccagggtccaatatccaagcccaagaggaaaagagagaaaaaagagaaaaagaagaaacggaaggcagagaagcatcgaggccgagctggggccgatgaagatgacaaggggcctagggcaccccgcccacctcaacctaagaagtccaagaaagcaagtggcagtgggggtggcagtgctgctttaggcccttctggctttggaccttctggaggaagtggcaccaaactccaggctggagtgcagtggcgtgatctcggcttactgcaacctccacttctcgggttcaagcgattctcctgcctcagcctcccaagtagccaggattacaggctccccaaaaaggccacaaagacagccccacctgccctgcctacaggttatgattcagaggaggaggaagagagcaggcccatgagttacgatgagaagcggcagctgagcctggacatcaacaaattacctggggagaagctgggccgagttgtgcatataatccaagccagggagccctctttacgtgattcaaacccagaagagattgagattgattttgaaacactcaagccatccacacttagagagcttgagcgctatgtcctttcctgcctacgtaagaaaccccggaagccctacaccattaagaagcctgtgggaaagacaaaggaggaactggctttggagaaaaagcgggaattagaaaagcggttacaagatgtcagcggacagctcaattctactaaaaagccccccaagaaagcgaatgagaaaacagagtcatcctctgcacagcaagtagcagtgtcacgccttagcgcttccagctccagctcagattccagctcctcctcttcctcgtcgtcgtcttcagacaccagtgattcagactcaggctaaggggtcaggccagatggggcaggaaggctccgcaggaccggacccctagaccaccctgccccacctgccccttccccctttgctgtgacacttcttcatctcacccccccctgcccccctctaggagagctggctctgcagtgggggagggatgcagggacatttactgaaggagggacatggacaaaacaacattgaattcccagccccattggggagtgatctcttggacacagagcccccattcaaaatggggcagggcaagggtgggagtgtgcaaagccctgatctggagttacctgaggccatagctgccctattcacttctaagggccctgttttgagattgtttgttctaatttattttaagctaggtaaggctggggggagggtggggccgtggtcccctcagcctccatggggagggaagaagggggagctctttttttacgttgatttttttttttctactctgttttccctttttccttccgctccatttggggccctgggggtttcagtcatctccccatttggtcccctggactgtctttgttgattctaacttgtaaataaagaaaatattattcaagttttgagttaccttaatatttgcttttgtagtgtttcaaaaggaacatcataagaattgtcttgataattttgagggaaatattactgcagtgagaaaaggcaatagctaacctataattggattgtcttaatttttaaaccagtaggcttttgctgtgtttttaataaagtaaatatgacttttgtaaattga

SEQ ID NO: 77567 - DNA, 2115 bp, Artificial Sequence
  derived and/or modified sequence
cccaaagagactgctttcgtgccggccaggcagggggtttgtcgcctggaggcccaagaggaacggcctccccccaacttagcgggttatgctggaccgggcggtgaggggaaccgaggccacccggactttccgcggctgagggcagcgccggttccttgcggtcaagatgctgcaaaacgtgactccccacaataagctccctggggaagggaatgcagggttgctggggctgggcccagaagcagcagcaccagggaagaggattcgaaaaccctctctcttgtatgagggctttgagagccccacaatggcttcggtgcctgctttgcaacttacccctgccaacccaccacccccggaggtgtccaatcccaaaaagccaggacgagttaccaaccagctgcaatacctacacaaggtagtgatgaaggctctgtggaaacatcagttcgcatggccattccggcagcctgtggatgctgtcaaactgggtctaccggattatcacaaaattataaaacagcctatggacatgggtactattaagaggagacttgaaaacaattattattgggctgcttcagagtgtatgcaagattttaataccatgttcaccaactgttacatttacaacaagcccactgatgatattgtcctaatggcacaaacgctggaaaagatattcctacagaaggttgcatcaatgccacaagaagaacaagagctggtagtgaccatccctaagaacagccacaagaagggggccaagttggcagcgctccagggcagtgttaccagtgcccatcaggtgcctgccgtctcttctgtgtcacacacagccctctatactcctccacctgagatacctaccactgtcctcaacattccccacccatcagtcatttcctctccacttctcaagtccttgcactctgctggacccccgctccttgctgttactgcagctcctccagcccagccccttgccaagaaaaaaggcgtaaagcggaaagcagatactaccacccctacacctacagccatcttggctcctggttctccagctagccctcctgggagtcttgagcctaaggcagcacggcttccccctatgcgtagagagagtggtcgccccatcaagcccccacgcaaagacttgcctgactctcagcaacaacaccagagctctaagaaaggaaagctttcagaacagttaaaacattgcaatggcattttgaaggagttactctctaagaagcatgctgcctatgcttggcctttctataaaccagtggatgcttctgcacttggcctgcatgactaccatgacatcattaagcaccccatggacctcagcactgtcaagcggaagatggagaaccgtgattaccgggatgcacaggagtttgctgctgatgtacggcttatgttctccaactgctataagtacaatcccccagatcacgatgttgtggcaatggcacgaaagctacaggatgtatttgagttccgttatgccaagatgccagatgaaccactagaaccagggcctttaccagtctctactgccatgccccctggcttggccaaatcgtcttcagagtcctccagtgaggaaagtagcagtgagagctcctctgaggaagaggaggaggaagatgaggaggacgaggaggaagaagagagtgaaagctcagactcagaggaagaaagggctcatcgcttagcagaactacaggaacagcttcgggcagtacatgaacaactggctgctctgtcccagggtccaatatccaagcccaagaggaaaagagagaaaaaagagaaaaagaagaaacggaaggcagagaagcatcgaggccgagctggggccgatgaagatgacaaggggcctagggcaccccgcccacctcaacctaagaagtccaagaaagcaagtggcagtgggggtggcagtgctgctttaggcccttctggctttggaccttctggaggaagtggcaccaaactccaggctggagtgcagtggcgtgatctcggcttactgcaacctccacttctcgggttcaagcgattctcctgcctcagcctcccaagtagccaggattacag

SEQ ID NO: 77568 - DNA, 1878 bp, Artificial Sequence
  derived and/or modified sequence
ggccaaatcgtcttcagagtcctccagtgaggaaagtagcagtgagagctcctctgaggaagaggaggaggaagatgaggacgaggaggaagaagagagtgaaagctcagactcagaggaagaaagggctcatcgcttagcagaactacaggaacagcttcgggcagtacatgaacaactggctgctctgtcccagggtccaatatccaagcccaagaggaaaagagagaaaaaagagaaaaagaagaaacggaaggcagagaagcatcgaggccgagctggggccgatgaagatgacaaggggcctagggcaccccgcccacctcaacctaagaagtccaagaaagcaagtggcagtgggggtggcagtgctgctttaggcccttctggctttggaccttctggaggaagtggcaccaaactccaggctggagtgcagtggcgtgatctcggcttactgcaacctccacttctcgggttcaagcgattctcctgcctcagcctcccaagtagccaggattacaggctccccaaaaaggccacaaagacagccccacctgccctgcctacaggttatgattcagaggaggaggaagagagcaggcccatgagttacgatgagaagcggcagctgagcctggacatcaacaaattacctggggagaagctgggccgagttgtgcatataatccaagccagggagccctctttacgtgattcaaacccagaagagattgagattgattttgaaacactcaagccatccacacttagagagcttgagcgctatgtcctttcctgcctacgtaagaaaccccggaagccctacaccattaagaagcctgtgggaaagacaaaggaggaactggctttggagaaaaagcgggaattagaaaagcggttacaagatgtcagcggacagctcaattctactaaaaagccccccaagaaagcgaatgagaaaacagagtcatcctctgcacagcaagtagcagtgtcacgccttagcgcttccagctccagctcagattccagctcctcctcttcctcgtcgtcgtcttcagacaccagtgattcagactcaggctaaggggtcaggccagatggggcaggaaggctccgcaggaccggacccctagaccaccctgccccacctgccccttccccctttgctgtgacacttcttcatctcaccccccccccgcccccctctaggagagctggctctgcagtgggggagggatgcagggacatttactgaaggagggacatggacaaaacaacattgaattcccagccccattggggagtgatctcttggacacagagcccccattcaaaatggggcagggcaagggtgggagtgtgcaaagccctgatctggagttacctgaggccatagctgccctattcacttctaagggccctgttttgagattgtttgttctaatttattttaagctaggtaaggctggggggagggtggggccgtggtcccctcagcctccatggggagggaagaagggggagctctttttttacgttgatttttttttttctactctgttttccctttttccttccgctccatttggggccctgggggtttcagtcatctccccatttggtcccctggactgtctttgttgattctaacttgtaaataaagaaaatattattcaagttttgagttaccttaatatttgcttttgtagtgtttcaaaaggaacatcataagaattgtcttgataattttgagggaaatattactgcagtgagaaaaggcaatagctaacctataattggattgtcttaatttttaaaccagtaggcttttgctgtgtttttaataaagtaaatatgacttttgtaaattga

SEQ ID NO: 77569 - DNA, 3467 bp, Artificial Sequence
  derived and/or modified sequence
cccaaagagactgctttcgtgccggccaggcagggggtttgtcgcctggaggcccaagaggaacggcctccccccaacttagcgggttatgctggaccgggcggtgaggggaaccgaggccacccggactttccgcggctgagggcagcgccggttccttgcggtcaagatgctgcaaaacgtgactccccacaataagctccctggggaagggaatgcagggttgctggggctgggcccagaagcagcagcaccagggaagaggattcgaaaaccctctctcttgtatgagggctttgagagccccacaatggcttcggtgcctgctttgcaacttacccctgccaacccaccacccccggaggtgtccaatcccaaaaagccaggacgagttaccaaccagctgcaatacctacacaaggtagtgatgaaggctctgtggaaacatcagttcgcatggccattccggcagcctgtggatgctgtcaaactgggtctaccggattatcacaaaattataaaacagcctatggacatgggtactattaagaggagacttgaaaacaattattattgggctgcttcagagtgtatgcaagattttaataccatgttcaccaactgttacatttacaacaagcccactgatgatattgtcctaatggcacaaacgctggaaaagatattcctacagaaggttgcatcaatgccacaagaagaacaagagctggtagtgaccatccctaagaacagccacaagaagggggccaagttggcagcgctccagggcagtgttaccagtgcccatcaggtgcctgccgtctcttctgtgtcacacacagccctctatactcctccacctgagatacctaccactgtcctcaacattccccacccatcagtcatttcctctccacttctcaagtccttgcactctgctggacccccgctccttgctgttactgcagctcctccagcccagccccttgccaagaaaaaaggcgtaaagcggaaagcagatactaccacccctacacctacagccatcttggctcctggttctccagctagccctcctgggagtcttgagcctaaggcagcacggcttccccctatgcgtagagagagtggtcgccccatcaagcccccacgcaaagacttgcctgactctcagcaacaacaccagagctctaagaaaggaaagctttcagaacagttaaaacattgcaatggcattttgaaggagttactctctaagaagcatgctgcctatgcttggcctttctataaaccagtggatgcttctgcacttggcctgcatgactaccatgacatcattaagcaccccatggacctcagcactgtcaagcggaagatggagaaccgtgattaccgggatgcacaggagtttgctgctgatgtacggcttatgttctccaactgctataagtacaatcccccagatcacgatgttgtggcaatggcacgaaagctacaggatgtatttgagttccgttatgccaagatgccagatgaaccactagaaccagggcctttaccagtctctactgccatgccccctggcttggccaaatcgtcttcagagtcctccagtgaggaaagtagcagtgagagctcctctgaggaagaggaggaggaagatgaggaggacgaggaggaagaagagagtgaaagctcagactcagaggaagaaagggctcatcgcttagcagaactacaggaacagcttcgggcagtacatgaacaactggctgctctgtcccagggtccaatatccaagcccaagaggaaaagagagaaaaaagagaaaaagaagaaacggaaggcagagaagcatcgaggccgagctggggccgatgaagatgacaaggggcctagggcaccccgcccacctcaacctaagaagtccaagaaagcaagtggcagtgggggtggcagtgctgctttaggcccttctggctttggaccttctggaggaagtggcaccaaactccaggctggagtgcagtggcgtgatctcggcttactgcaacctccacttctcgggttcaagcgattctcctgcctcagcctcccaagtagccaggattacaggctccccaaaaaggccacaaagacagccccacctgccctgcctacaggttatgattcagaggaggaggaagagagcaggcccatgagttacgatgagaagcggcagctgagcctggacatcaacaaattacctggggagaagctgggccgagttgtgcatataatccaagccagggagccctctttacgtgattcaaacccagaagagattgagattgattttgaaacactcaagccatccacacttagagagcttgagcgctatgtcctttcctgcctacgtaagaaaccccggaagccctacaccattaagaagcctgtgggaaagacaaaggaggaactggctttggagaaaaagcgggaattagaaaagcggttacaagatgtcagcggacagctcaattctactaaaaagccccccaagaaagcgaatgagaaaacagagtcatcctctgcacagcaagtagcagtgtcacgccttagcgcttccagctctagctcagattccagctcctcctcttcctcgtcgtcgtcttcagacaccagtgattcagactcaggctaaggggtcaggccagatggggcaggaaggctccgcaggaccggacccctagaccaccctgccccacctgccccttccccctttgctgtgacacttcttcatctcacccccccctgcccccctctaggagagctggctctgcagtgggggagggatgcagggacatttactgaaggagggacatggacaaaacaacattgaattcccagccccattggggagtgatctcttggacacagagcccccattcaaaatggggcagggcaagggtgggagtgtgcaaagccctgatctggagttacctgaggccatagctgccctattcacttctaagggccctgttttgagattgtttgttctaatttattttaagctaggtaaggctggggggagggtggggccgtggtcccctcagcctccatggggagggaagaagggggagctctttttttacgttgatttttttttttctactctgttttccctttttccttccgctccatttggggccctgggggtttcagtcatctccccatttggtcccctggactgtctttgttgattctaacttgtaaataaagaaaatattattcaagttttgagttaccttaatatttgcttttgtagtgtttcaaaaggaacatcataagaattgtcttgataattttgagggaaatattactgcagtgagaaaaggcaatagctaacctataattggattgtcttaatttttaaaccagtaggcttttgctgtgtttttaataaagtaaatatgacttttgtaaattga

SEQ ID NO: 77570 - DNA, 3467 bp, Artificial Sequence
  derived and/or modified sequence
cccaaagagactgctttcgtgccggccaggcagggggtttgtcgcctggaggcccaagaggaacggcctccccccaacttagcgggttatgctggaccgggcggtgaggggaaccgaggccacccggactttccgcggctgagggcagcgccggttccttgcggtcaagatgctgcaaaacgtgactccccacaataagctccctggggaagggaatgcagggttgctggggctgggcccagaagcagcagcaccagggaaaaggattcgaaaaccctctctcttgtatgagggctttgagagccccacaatggcttcggtgcctgctttgcaacttacccctgccaacccaccacccccggaggtgtccaatcccaaaaagccaggacgagttaccaaccagctgcaatacctacacaaggtagtgatgaaggctctgtggaaacatcagttcgcatggccattccggcagcctgtggatgctgtcaaactgggtctaccggattatcacaaaattataaaacagcctatggacatgggtactattaagaggagacttgaaaacaattattattgggctgcttcagagtgtatgcaagattttaataccatgttcaccaactgttacatttacaacaagcccactgatgatattgtcctaatggcacaaacgctggaaaagatattcctacagaaggttgcatcaatgccacaagaagaacaagagctggtagtgaccatccctaagaacagccacaagaagggggccaagttggcagcgctccagggcagtgttaccagtgcccatcaggtgcctgccgtctcttctgtgtcacacacagccctgtatactcctccacctgagatacctaccactgtcttcaacattccccacccatcagtcatttcctctccacttctcaagtccttgcactctgctggacccccgctccttgctgttactgcagctcctccagcccagccccttgccaagaaaaaaggcgtaaagcggaaagcagatactaccacccctacacctacagccatcttggctcctggttctccagctagccctcctgggagtcttgagcctaaggcagcacggcttccccctatgcgtagagagagtggtcgccccatcaagcccccacgcaaagacttgcctgactctcagcaacaacaccagagctctaagaaaggaaagctttcagaacagttaaaacattgcaatggcattttgaaggagttactctctaagaagcatgctgcctatgcttggcctttctataaaccagtggatgcttctgcacttggcctgcatgactaccatgacatcattaagcaccccatggacctcagcactgtcaagcggaagatggagaaccgtgattaccgggatgcacaggagtttgctgctgatgtacggcttatgttctccaactgctataagtacaatcccccagatcacgatgttgtggcaatggcacgaaagctacaggatgtatttgagttccgttatgccaagatgccagatgaaccactagaaccagggcctttaccagtctctactgccatgccccctggcttggccaaatcgtcttcagagtcctccagtgaggaaagtagcagtgagagctcctctgaggaagaggaggaggaagatgaggaggacgaggaggaagaagagagtgaaagctcagactcagaggaagaaagggctcatcgcttagcagaactacaggaacagcttcgggcagtacatgaacaactggctgctctgtcccagggtccaatatccaagcccaagaggaaaagagagaaaaaagagaaaaagaagaaacggaaggcagagaagcatcgaggccgagctggggccgatgaagatgacaaggggcctagggcaccccgcccacctcaacctaagaagtccaagaaagcaagtggcagtgggggtggcagtgctgctttaggcccttccggctttggaccttctggaggaagtggcaccaaactccaggctggagtgcagtggcgtgatctcggcttactgcaacctccacttctcgggttcaagcgattctcctgcctcagcctcccaagtagccagaattacaggctccccaaaaaggccacaaagacagccccacctgccctgcctacaggttatgattcagaggaggaggaagagagcaggcccatgagttacgatgagaagcggcagctgagcctggacatcaacaaattacctggggagaagctgggccgagttgtgcatataatccaagccagggagccctctttacgtgattcaaacccagaagagattgagattgattttgaaacactcaagccatccacacttagagagcttgagcgctatgtcctttcctgcctacgtaagaaaccccggaagccctacaccattaagaagcctgtgggaaagacaaaggaggaactggctttggagaaaaagcgggaattagaaaagcggttacaagatgtcagcggacagctcaattctactaaaaagccccccaagaaagcgaatgagaaaacagagtcatcctctgcacagcaagtagcagtgtcacgccttagcgcttccagctccagctcagattccagctcctcctcttcctcgtcgtcgtcttcagacaccagtgattcagactcaggctaaggggtcaggccagatggggcaggaaggctccgcaggaccggacccctagaccaccctgccccacctgccccttccccctttgctgtgacacttcttcatctcacccccccctgcccccctctaggagagctggctctgcagtgggggagggatgcagggacatttactgaaggagggacatggacaaaacaacattgaattcccagccccattggggagtgatctcttggacacagagcccccattcaaaatggggcagggcaagggtgggagtgtgcaaagccctgatctggagttacctgaggccatagctgccctattcacttctaagggccctgttttgagattgtttgttctaatttattttaagctaggtaaggctggggggagggtggggccgtggtcccctcagcctccatggggagggaagaagggggagctctttttttacgttgatttttttttttctactctgttttccctttttccttccgctccatttggggccctgggggtttcagtcatctccccatttggtcccctggactgtctttgttgattctaacttgtaaataaagaaaatattattcaagttttgagttaccttaatatttgcttttgtagtgtttcaaaaggaacatcataagaattgtcttgataattttgagggaaatattactgcagtgagaaaaggcaatagctaacctataattggattgtcttaatttttaaaccagtaggcttttgctgtgtttttaataaagtaaatatgacttttgtaaattga

SEQ ID NO: 77571 - DNA, 4898 bp, Artificial Sequence
  derived and/or modified sequence
tagtctgagccgcagccgccgcctcctccgctcgccctcctccctggcgctgaccgatggaccagccgctccgtggggaggactccggaccctggtgggggggcgggggggttctttcgcccccgtggcggagggcccctgagaggcggatacgggtgtgcctttgggggtgatgtggcgtgtggggggaaaggtccgagctcgcctggagggggagggtttttcccttaagtcatccctcccaggacttgctttttctgctctgagccggacgccggaatggagtttgaggaagagattcttcgctgctgctgccttaccgccgagaaccaccacccgccaggcgtcttgcggccacacccctggcgggttcaggcaggctacgcccacgcgacccctcccgtttccctgctttggccaatggaggagctacgaatggcacgacctgctcgagcttggcagtctccagttgggctgtgcatggaagcttgggaagactttgttggaaggggaggcggggagagagtgctggaggctctggggcgatggcttccgcacctcttccaaccaccctctttccctggagtcggcggaccacagctcagccaattggcttggagatgtggcgggttgccacttccctgtgggtctctgcggcactcttctgcctggtgactgacaccttggaaatgaagtttatgacgtcatcgttgcggctggccaatagaaaaagctcccgcggagaggtgttccttccccttcgactcagcttcttcacccgcgtgagcgagcgcgcgcgcgcggagggggtggggaaaatctcaagcagggtggcgcgcatgagcggcgaagctcctcctccccgcctatatataaagggctggcgcggggctcggcggcgccatttcgtgctggagtggagcagcctctagaacgagctggaggattctgcctaccgatacagagccttcgagtcgtccggggccgccattacaatccacctccatccgcttggaaatggccttcgtcccggcctatgactggtcccagcgggcagtacagaccccctagaagcccctggagctcccctttttcgggccccgcccaatcctcggagtctgtccaccccctctactccgccctcaagaggatttcaaagatggaggcggcggctccctaaaccacttttcgtgttcatccgcctccatccgagatcgaaacgggacctcgtcggccccgtaggggcccgacaagaagagggaatccctgcagaccaacagcgggctatattgacgacggtgtctgagatcggggaccgtcttttgaagagtcagtccctccttagttgcccgcctcagctgaggccgccgccattttcttgctgtccgccgtctgcagagcgcgccaagctgcccggagctctccgagaggccccaaagagactgctttcgtgccggccaggcagggggtttgtcgcctggaggcccaagaggaacggcctccccccaacttagcgggttatgctggaccgggcggtgaggggaaccgaggccacccggactttccgcggctgagggcagcgccggttccttgcggtcaagatgctgcaaaacgtgactccccacaataagctccctggggaagggaatgcagggttgctggggctgggcccagaagcagcagcaccagggaagaggattcgaaaaccctctctcttgtatgagggctttgagagccccacaatggcttcggtgcctgctttgcaacttacccctgccaacccaccacccccggaggtgtccaatcccaaaaagccaggacgagttaccaaccagctgcaatacctacacaaggtagtgatgaaggctctgtggaaacatcagttcgcatggccattccggcagcctgtggatgctgtcaaactgggtctaccggattatcacaaaattataaaacagcctatggacatgggtactattaagaggagacttgaaaacaattattattgggctgcttcagagtgtatgcaagattttaataccatgttcaccaactgttacatttacaacaagcccactgatgatattgtcctaatggcacaaacgctggaaaagatattcctacagaaggttgcatcaatgccacaagaagaacaagagctggtagtgaccatccctaagaacagccacaagaagggggccaagttggcagcgctccagggcagtgttaccagtgcccatcaggtgcctgccgtctcttctgtgtcacacacagccctctatactcctccacctgagatacctaccactgtcctcaacattccccacccatcagtcatttcctctccacttctcaagtccttgcactctgctggacccccgctccttgctgttactgcagctcctccagcccagccccttgccaagaaaaaaggcgtaaagcggaaagcagatactaccacccctacacctacagccatcttggctcctggttctccagctagccctcctgggagtcttgagcctaaggcagcacggcttccccctatgcgtagagagagtggtcgccccatcaagcccccacgcaaagacttgcctgactctcagcaacaacaccagagctctaagaaaggaaagctttcagaacagttaaaacattgcaatggcattttgaaggagttactctctaagaagcatgctgcctatgcttggcctttctataaaccagtggatgcttctgcacttggcctgcatgactaccatgacatcattaagcaccccatggacctcagcactgtcaagcggaagatggagaaccgtgattaccgggatgcacaggagtttgctgctgatgtacggcttatgttctccaactgctataagtacaatcccccagatcacgatgttgtggcaatggcacgaaagctacaggatgtatttgagttccgttatgccaagatgccagatgaaccactagaaccagggcctttaccagtctctactgccatgccccctggcttggccaaatcgtcttcagagtcctccagtgaggaaagtagcagtgagagctcctctgaggaagaggaggaggaagatgaggaggacgaggaggaagaagagagtgaaagctcagactcagaggaagaaagggctcatcgcttagcagaactacaggaacagcttcgggcagtacatgaacaactggctgctctgtcccagggtccaatatccaagcccaagaggaaaagagagaaaaaagagaaaaagaagaaacggaaggcagagaagcatcgaggccgagctggggccgatgaagatgacaaggggcctagggcaccccgcccacctcaacctaagaagtccaagaaagcaagtggcagtgggggtggcagtgctgctttaggcccttctggctttggaccttctggaggaagtggcaccaaactccaggctggagtgcagtggcgtgatctcggcttactgcaacctccacttctcgggttcaagcgattctcctgcctcagcctcccaagtagccaggattacaggctccccaaaaaggccacaaagacagccccacctgccctgcctacaggttatgattcagaggaggaggaagagagcaggcccatgagttacgatgagaagcggcagctgagcctggacatcaacaaattacctggggagaagctgggccgagttgtgcatataatccaagccagggagccctctttacgtgattcaaacccagaagagattgagattgattttgaaacactcaagccatccacacttagagagcttgagcgctatgtcctttcctgcctacgtaagaaaccccggaagccctacaccattaagaagcctgtgggaaagacaaaggaggaactggctttggagaaaaagcgggaattagaaaagcggttacaagatgtcagcggacagctcaattctactaaaaagccccccaagaaagcgaatgagaaaacagagtcatcctctgcacagcaagtagcagtgtcacgccttagcgcttccagctctagctcagattccagctcctcctcttcctcgtcgtcgtcttcagacaccagtgattcagactcaggctaaggggtcaggccagatggggcaggaaggctccgcaggaccggacccctagaccaccctgccccacctgccccttccccctttgctgtgacacttcttcatctcacccccccctgcccccctctaggagagctggctctgcagtgggggagggatgcagggacatttactgaaggagggacatggacaaaacaacattgaattcccagccccattggggagtgatctcttggacacagagcccccattcaaaatggggcagggcaagggtgggagtgtgcaaagccctgatctggagttacctgaggccatagctgccctattcacttctaagggccctgttttgagattgtttgttctaatttattttaagctaggtaaggctggggggagggtggggccgtggtcccctcagcctccatggggagggaagaagggggagctctttttttacgttgatttttttttttctactctgttttccctttttccttccgctccatttggggccctgggggtttcagtcatctccccatttggtcccctggactgtctttgttgattctaacttgtaaataaagaaaatattattcaagttttgagttaccttaatatttgcttttgtagtgtttcaaaaggaacatcataagaattgtcttgataattttgagggaaatattactgcagtgagaaaaggcaatagctaacctataattggattgtcttaatttttaaaccagtaggcttttgctgtgtttttaataaagtaaatatgacttttgtaaattg

SEQ ID NO: 77572 - DNA, 4898 bp, Artificial Sequence
  derived and/or modified sequence
tagtctgagccgcagccgccgcctcctccgctcgccctcctccctggcgctgaccgatggaccagccgctccgtggggaggactccggaccctggtgggggggcgggggggttctttcgcccccgtggcggagggcccctgagaggcggatacgggtgtgcctttgggggtgatgtggcgtgtggggggaaaggtccgagctcgcctggagggggagggtttttcccttaagtcatccctcccaggacttgctttttctgctctgagccggacgccggaatggagtttgaggaagagattcttcgctgctgctgccttaccgccgagaaccaccacccgccaggcgtcttgcggccacacccctggcgggttcaggcaggctacgcccacgcgacccctcccgtttccctgctttggccaatggaggagctacgaatggcacgacctgctcgagcttggcagtctccagttgggctgtgcatggaagcttgggaagactttgttggaaggggaggcggggagagagtgctggaggctctggggcgatggcttccgcacctcttccaaccaccctctttccctggagtcggcggaccacagctcagccaattggcttggagatgtggcgggttgccacttccctgtgggtctctgcggcactcttctgcctggtgactgacaccttggaaatgaagtttatgacgtcatcgttgcggctggccaatagaaaaagctcccgcggagaggtgttccttccccttcgactcagcttcttcacccgcgtgagcgagcgcgcgcgcgcggagggggtggggaaaatctcaagcagggtggcgcgcatgagcggcgaagctcctcctccccgcctatatataaagggctggcgcggggctcggcggcgccatttcgtgctggagtggagcagcctctagaacgagctggaggattctgcctaccgatacagagccttcgagtcgtccggggccgccattacaatccacctccatccgcttggaaatggccttcgtcccggcctatgactggtcccagcgggcagtacagaccccctagaagcccctggagctcccctttttcgggccccgcccaatcctcggagtctgtccaccccctctactccgccctcaagaggatttcaaagatggaggcggcggctccctaaaccacttttcgtgttcatccgcctccatccgagatcgaaacgggacctcgtcggccccgtaggggcccgacaagaagagggaatccctgcagaccaacagcgggctatattgacgacggtgtctgagatcggggaccgtcttttgaagagtcagtccctccttagttgcccgcctcagctgaggccgccgccattttcttgctgtccgccgtctgcagagcgcgccaagctgcccggagctctccgagaggccccaaagagactgctttcgtgccggccaggcagggggtttgtcgcctggaggcccaagaggaacggcctccccccaacttagcgggttatgctggaccgggcggtgaggggaaccgaggccacccggactttccgcggctgagggcagcgccggttccttgcggtcaagatgctgcaaaacgtgactccccacaataagctccctggggaagggaatgcagggttgctggggctgggcccagaagcagcagcaccagggaaaaggattcgaaaaccctctctcttgtatgagggctttgagagccccacaatggcttcggtgcctgctttgcaacttacccctgccaacccaccacccccggaggtgtccaatcccaaaaagccaggacgagttaccaaccagctgcaatacctacacaaggtagtgatgaaggctctgtggaaacatcagttcgcatggccattccggcagcctgtggatgctgtcaaactgggtctaccggattatcacaaaattataaaacagcctatggacatgggtactattaagaggagacttgaaaacaattattattgggctgcttcagagtgtatgcaagattttaataccatgttcaccaactgttacatttacaacaagcccactgatgatattgtcctaatggcacaaacgctggaaaagatattcctacagaaggttgcatcaatgccacaagaagaacaagagctggtagtgaccatccctaagaacagccacaagaagggggccaagttggcagcgctccagggcagtgttaccagtgcccatcaggtgcctgccgtctcttctgtgtcacacacagccctgtatactcctccacctgagatacctaccactgtcctcaacattccccacccatcagtcatttcctctccacttctcaagtccttgcactctgctggacccccgctccttgctgttactgcagctcctccagcccagccccttgccaagaaaaaaggcgtaaagcggaaagcagatactaccacccctacacctacagccatcttggctcctggttctccagctagccctcctgggagtcttgagcctaaggcagcacggcttccccctatgcgtagagagagtggtcgccccatcaagcccccacgcaaagacttgcctgactctcagcaacaacaccagagctctaagaaaggaaagctttcagaacagttaaaacattgcaatggcattttgaaggagttactctctaagaagcatgctgcctatgcttggcctttctataaaccagtggatgcttctgcacttggcctgcatgactaccatgacatcattaagcaccccatggacctcagcactgtcaagcggaagatggagaaccgtgattaccgggatgcacaggagtttgctgctgatgtacggcttatgttctccaactgctataagtacaatcccccagatcacgatgttgtggcaatggcacgaaagctacaggatgtatttgagttccgttatgccaagatgccagatgaaccactagaaccagggcctttaccagtctctactgccatgccccctggcttggccaaatcgtcttcagagtcctccagtgaggaaagtagcagtgagagctcctctgaggaagaggaggaggaagatgaggaggacgaggaggaagaagagagtgaaagctcagactcagaggaagaaagggctcatcgcttagcagaactacaggaacagcttcgggcagtacatgaacaactggctgctctgtcccagggtccaatatccaagcccaagaggaaaagagagaaaaaagagaaaaagaagaaacggaaggcagagaagcatcgaggccgagctggggccgatgaagatgacaaggggcctagggcaccccgcccacctcaacctaagaagtccaagaaagcaagtggcagtgggggtggcagtgctgctttaggcccttctggctttggaccttctggaggaagtggcaccaaactccaggctggagtgcagtggcgtgatctcggcttactgcaacctccacttctcgggttcaagcgattctcctgcctcagcctcccaagtagccaggattacaggctccccaaaaaggccacaaagacagccccacctgccctgcctacaggttatgattcagaggaggaggaagagagcaggcccatgagttacgatgagaagcggcagctgagcctggacatcaacaaattacctggggagaagctgggccgagttgtgcatataatccaagccagggagccctctttacgtgattcaaacccagaagagattgagattgattttgaaacactcaagccatccacacttagagagcttgagcgctatgtcctttcctgcctacgtaagaaaccccggaagccctacaccattaagaagcctgtgggaaagacaaaggaggaactggctttggagaaaaagcgggaattagaaaagcggttacaagatgtcagcggacagctcaattctactaaaaagccccccaagaaagcgaatgagaaaacagagtcatcctctgcacagcaagtagcagtgtcacgccttagcgcttccagctccagctcagattccagctcctcctcttcctcgtcgtcgtcttcagacaccagtgattcagactcaggctaaggggtcaggccagatggggcaggaaggctccgcaggaccggacccctagaccaccctgccccacctgccccttccccctttgctgtgacacttcttcatctcacccccccctgcccccctctaggagagctggctctgcagtgggggagggatgcagggacatttactgaaggagggacatggacaaaacaacattgaattcccagccccattggggagtgatctcttggacacagagcccccattcaaaatggggcagggcaagggtgggagtgtgcaaagccctgatctggagttacctgaggccatagctgccctattcacttctaagggccctgttttgagattgtttgttctaatttattttaagctaggtaaggctggggggagggtggggccgtggtcccctcagcctccatggggagggaagaagggggagctctttttttacgttgatttttttttttctactctgttttccctttttccttccgctccatttggggccctgggggtttcagtcatctccccatttggtcccctggactgtctttgttgattctaacttgtaaataaagaaaatattattcaagttttgagttaccttaatatttgcttttgtagtgtttcaaaaggaacatcataagaattgtcttgataattttgagggaaatattactgcagtgagaaaaggcaatagctaacctataattggattgtcttaatttttaaaccagtaggcttttgctgtgtttttaataaagtaaatatgacttttgtaaattg

SEQ ID NO: 77573 - DNA, 4898 bp, Artificial Sequence
  derived and/or modified sequence
tagtctgagccgcagccgccgcctcctccgctcgccctcctccctggcgctgaccgatggaccagccgctccgtggggaggactccggaccctggtgggggggcgggggggttctttcgcccccgtggcggagggcccctgagaggcggatacgggtgtgcctttgggggtgatgtggcgtgtggggggaaaggtccgagctcgcctggagggggagggtttttcccttaagtcatccctcccaggacttgctttttctgctctgagccggacgccggaatggagtttgaggaagagattcttcgctgctgctgccttaccgccgagaaccaccacccgccaggcgtcttgcggccacacccctggcgggttcaggcaggctacgcccacgcgacccctcccgtttccctgctttggccaatggaggagctacgaatggcacgacctgctcgagcttggcagtctccagttgggctgtgcatggaagcttgggaagactttgttggaaggggaggcggggagagagtgctggaggctctggggcgatggcttccgcacctcttccaaccaccctctttccctggagtcggcggaccacagctcagccaattggcttggagatgtggcgggttgccacttccctgtgggtctctgcggcactcttctgcctggtgactgacaccttggaaatgaagtttatgacgtcatcgttgcggctggccaatagaaaaagctcccgcggagaggtgttccttccccttcgactcagcttcttcacccgcgtgagcgagcgcgcgcgcgcggagggggtggggaaaatctcaagcagggtggcgcgcatgagcggcgaagctcctcctccccgcctatatataaagggctggcgcggggctcggcggcgccatttcgtgctggagtggagcagcctctagaacgagctggaggattctgcctaccgatacagagccttcgagtcgtccggggccgccattacaatccacctccatccgcttggaaatggccttcgtcccggcctatgactggtcccagcgggcagtacagaccccctagaagcccctggagctcccctttttcgggccccgcccaatcctcggagtctgtccaccccctctactccgccctcaagaggatttcaaagatggaggcggcggctccctaaaccacttttcgtgttcatccgcctccatccgagatcgaaacgggacctcgtcggccccgtaggggcccgacaagaagagggaatccctgcagaccaacagcgggctatattgacgacggtgtctgagatcggggaccgtcttttgaagagtcagtccctccttagttgcccgcctcagctgaggccgccgccattttcttgctgtccgccgtctgcagagcgcgccaagctgcccggagctctccgagaggccccaaagagactgctttcgtgccggccaggcagggggtttgtcgcctggaggcccaagaggaacggcctccccccaacttagcgggttatgctggaccgggcggtgaggggaaccgaggccacccggactttccgcggctgagggcagcgccggttccttgcggtcaagatgctgcaaaacgtgactccccacaataagctccctggggaagggaatgcagggttgctggggctgggcccagaagcagcagcaccagggaaaaggattcgaaaaccctctctcttgtatgagggctttgagagccccacaatggcttcggtgcctgctttgcaacttacccctgccaacccaccacccccggaggtgtccaatcccaaaaagccaggacgagttaccaaccagctgcaatacctacacaaggtagtgatgaaggctctgtggaaacatcagttcgcatggccattccggcagcctgtggatgctgtcaaactgggtctaccggattatcacaaaattataaaacagcctatggacatgggtactattaagaggagacttgaaaacaattattattgggctgcttcagagtgtatgcaagattttaataccatgttcaccaactgttacatttacaacaagcccactgatgatattgtcctaatggcacaaacgctggaaaagatattcctacagaaggttgcatcaatgccacaagaagaacaagagctggtagtgaccatccctaagaacagccacaagaagggggccaagttggcagcgctccagggcagtgttaccagtgcccatcaggtgcctgccgtctcttctgtgtcacacacagccctgtatactcctccacctgagatacctaccactgtcttcaacattccccacccatcagtcatttcctctccacttctcaagtccttgcactctgctggacccccgctccttgctgttactgcagctcctccagcccagccccttgccaagaaaaaaggcgtaaagcggaaagcagatactaccacccctacacctacagccatcttggctcctggttctccagctagccctcctgggagtcttgagcctaaggcagcacggcttccccctatgcgtagagagagtggtcgccccatcaagcccccacgcaaagacttgcctgactctcagcaacaacaccagagctctaagaaaggaaagctttcagaacagttaaaacattgcaatggcattttgaaggagttactctctaagaagcatgctgcctatgcttggcctttctataaaccagtggatgcttctgcacttggcctgcatgactaccatgacatcattaagcaccccatggacctcagcactgtcaagcggaagatggagaaccgtgattaccgggatgcacaggagtttgctgctgatgtacggcttatgttctccaactgctataagtacaatcccccagatcacgatgttgtggcaatggcacgaaagctacaggatgtatttgagttccgttatgccaagatgccagatgaaccactagaaccagggcctttaccagtctctactgccatgccccctggcttggccaaatcgtcttcagagtcctccagtgaggaaagtagcagtgagagctcctctgaggaagaggaggaggaagatgaggaggacgaggaggaagaagagagtgaaagctcagactcagaggaagaaagggctcatcgcttagcagaactacaggaacagcttcgggcagtacatgaacaactggctgctctgtcccagggtccaatatccaagcccaagaggaaaagagagaaaaaagagaaaaagaagaaacggaaggcagagaagcatcgaggccgagctggggccgatgaagatgacaaggggcctagggcaccccgcccacctcaacctaagaagtccaagaaagcaagtggcagtgggggtggcagtgctgctttaggcccttccggctttggaccttctggaggaagtggcaccaaactccaggctggagtgcagtggcgtgatctcggcttactgcaacctccacttctcgggttcaagcgattctcctgcctcagcctcccaagtagccagaattacaggctccccaaaaaggccacaaagacagccccacctgccctgcctacaggttatgattcagaggaggaggaagagagcaggcccatgagttacgatgagaagcggcagctgagcctggacatcaacaaattacctggggagaagctgggccgagttgtgcatataatccaagccagggagccctctttacgtgattcaaacccagaagagattgagattgattttgaaacactcaagccatccacacttagagagcttgagcgctatgtcctttcctgcctacgtaagaaaccccggaagccctacaccattaagaagcctgtgggaaagacaaaggaggaactggctttggagaaaaagcgggaattagaaaagcggttacaagatgtcagcggacagctcaattctactaaaaagccccccaagaaagcgaatgagaaaacagagtcatcctctgcacagcaagtagcagtgtcacgccttagcgcttccagctccagctcagattccagctcctcctcttcctcgtcgtcgtcttcagacaccagtgattcagactcaggctaaggggtcaggccagatggggcaggaaggctccgcaggaccggacccctagaccaccctgccccacctgccccttccccctttgctgtgacacttcttcatctcacccccccctgcccccctctaggagagctggctctgcagtgggggagggatgcagggacatttactgaaggagggacatggacaaaacaacattgaattcccagccccattggggagtgatctcttggacacagagcccccattcaaaatggggcagggcaagggtgggagtgtgcaaagccctgatctggagttacctgaggccatagctgccctattcacttctaagggccctgttttgagattgtttgttctaatttattttaagctaggtaaggctggggggagggtggggccgtggtcccctcagcctccatggggagggaagaagggggagctctttttttacgttgatttttttttttctactctgttttccctttttccttccgctccatttggggccctgggggtttcagtcatctccccatttggtcccctggactgtctttgttgattctaacttgtaaataaagaaaatattattcaagttttgagttaccttaatatttgcttttgtagtgtttcaaaaggaacatcataagaattgtcttgataattttgagggaaatattactgcagtgagaaaaggcaatagctaacctataattggattgtcttaatttttaaaccagtaggcttttgctgtgtttttaataaagtaaatatgacttttgtaaattg

SEQ ID NO: 77574 - DNA, 2511 bp, Artificial Sequence
  derived and/or modified sequence
atgctgcagaacgtgaccccccacaacaagctgcccggcgagggcaacgccggcctgctgggcctgggccccgaggccgccgcccccggcaagagaatcagaaagcccagcctgctgtacgagggcttcgagagccccaccatggccagcgtgcccgccctgcagctgacccccgccaacccccccccccccgaggtgagcaaccccaagaagcccggcagagtgaccaaccagctgcagtacctgcacaaggtggtgatgaaggccctgtggaagcaccagttcgcctggcccttcagacagcccgtggacgccgtgaagctgggcctgcccgactaccacaagatcatcaagcagcccatggacatgggcaccatcaagagaagactggagaacaactactactgggccgccagcgagtgcatgcaggacttcaacaccatgttcaccaactgctacatctacaacaagcccaccgacgacatcgtgctgatggcccagaccctggagaagatcttcctgcagaaggtggccagcatgccccaggaggagcaggagctggtggtgaccatccccaagaacagccacaagaagggcgccaagctggccgccctgcagggcagcgtgaccagcgcccaccaggtgcccgccgtgagcagcgtgagccacaccgccctgtacacccccccccccgagatccccaccaccgtgctgaacatcccccaccccagcgtgatcagcagccccctgctgaagagcctgcacagcgccggcccccccctgctggccgtgaccgccgccccccccgcccagcccctggccaagaagaagggcgtgaagagaaaggccgacaccaccacccccacccccaccgccatcctggcccccggcagccccgccagcccccccggcagcctggagcccaaggccgccagactgccccccatgagaagagagagcggcagacccatcaagccccccagaaaggacctgcccgacagccagcagcagcaccagagcagcaagaagggcaagctgagcgagcagctgaagcactgcaacggcatcctgaaggagctgctgagcaagaagcacgccgcctacgcctggcccttctacaagcccgtggacgccagcgccctgggcctgcacgactaccacgacatcatcaagcaccccatggacctgagcaccgtgaagagaaagatggagaacagagactacagagacgcccaggagttcgccgccgacgtgagactgatgttcagcaactgctacaagtacaacccccccgaccacgacgtggtggccatggccagaaagctgcaggacgtgttcgagttcagatacgccaagatgcccgacgagcccctggagcccggccccctgcccgtgagcaccgccatgccccccggcctggccaagagcagcagcgagagcagcagcgaggagagcagcagcgagagcagcagcgaggaggaggaggaggaggacgaggaggacgaggaggaggaggagagcgagagcagcgacagcgaggaggagagagcccacagactggccgagctgcaggagcagctgagagccgtgcacgagcagctggccgccctgagccagggccccatcagcaagcccaagagaaagagagagaagaaggagaagaagaagaagagaaaggccgagaagcacagaggcagagccggcgccgacgaggacgacaagggccccagagcccccagacccccccagcccaagaagagcaagaaggccagcggcagcggcggcggcagcgccgccctgggccccagcggcttcggccccagcggcggcagcggcaccaagctgcaggccggcgtgcagtggagagacctgggcctgctgcagccccccctgctgggcttcaagagattcagctgcctgagcctgcccagcagccaggactacagactgcccaagaaggccaccaagaccgccccccccgccctgcccaccggctacgacagcgaggaggaggaggagagcagacccatgagctacgacgagaagagacagctgagcctggacatcaacaagctgcccggcgagaagctgggcagagtggtgcacatcatccaggccagagagcccagcctgagagacagcaaccccgaggagatcgagatcgacttcgagaccctgaagcccagcaccctgagagagctggagagatacgtgctgagctgcctgagaaagaagcccagaaagccctacaccatcaagaagcccgtgggcaagaccaaggaggagctggccctggagaagaagagagagctggagaagagactgcaggacgtgagcggccagctgaacagcaccaagaagccccccaagaaggccaacgagaagaccgagagcagcagcgcccagcaggtggccgtgagcagactgagcgccagcagcagcagcagcgacagcagcagcagcagcagcagcagcagcagcagcgacaccagcgacagcgacagcggctag

SEQ ID NO: 77575 - DNA, 1947 bp, Artificial Sequence
  derived and/or modified sequence
atgctgcagaacgtgaccccccacaacaagctgcccggcgagggcaacgccggcctgctgggcctgggccccgaggccgccgcccccggcaagagaatcagaaagcccagcctgctgtacgagggcttcgagagccccaccatggccagcgtgcccgccctgcagctgacccccgccaacccccccccccccgaggtgagcaaccccaagaagcccggcagagtgaccaaccagctgcagtacctgcacaaggtggtgatgaaggccctgtggaagcaccagttcgcctggcccttcagacagcccgtggacgccgtgaagctgggcctgcccgactaccacaagatcatcaagcagcccatggacatgggcaccatcaagagaagactggagaacaactactactgggccgccagcgagtgcatgcaggacttcaacaccatgttcaccaactgctacatctacaacaagcccaccgacgacatcgtgctgatggcccagaccctggagaagatcttcctgcagaaggtggccagcatgccccaggaggagcaggagctggtggtgaccatccccaagaacagccacaagaagggcgccaagctggccgccctgcagggcagcgtgaccagcgcccaccaggtgcccgccgtgagcagcgtgagccacaccgccctgtacacccccccccccgagatccccaccaccgtgctgaacatcccccaccccagcgtgatcagcagccccctgctgaagagcctgcacagcgccggcccccccctgctggccgtgaccgccgccccccccgcccagcccctggccaagaagaagggcgtgaagagaaaggccgacaccaccacccccacccccaccgccatcctggcccccggcagccccgccagcccccccggcagcctggagcccaaggccgccagactgccccccatgagaagagagagcggcagacccatcaagccccccagaaaggacctgcccgacagccagcagcagcaccagagcagcaagaagggcaagctgagcgagcagctgaagcactgcaacggcatcctgaaggagctgctgagcaagaagcacgccgcctacgcctggcccttctacaagcccgtggacgccagcgccctgggcctgcacgactaccacgacatcatcaagcaccccatggacctgagcaccgtgaagagaaagatggagaacagagactacagagacgcccaggagttcgccgccgacgtgagactgatgttcagcaactgctacaagtacaacccccccgaccacgacgtggtggccatggccagaaagctgcaggacgtgttcgagttcagatacgccaagatgcccgacgagcccctggagcccggccccctgcccgtgagcaccgccatgccccccggcctggccaagagcagcagcgagagcagcagcgaggagagcagcagcgagagcagcagcgaggaggaggaggaggaggacgaggaggacgaggaggaggaggagagcgagagcagcgacagcgaggaggagagagcccacagactggccgagctgcaggagcagctgagagccgtgcacgagcagctggccgccctgagccagggccccatcagcaagcccaagagaaagagagagaagaaggagaagaagaagaagagaaaggccgagaagcacagaggcagagccggcgccgacgaggacgacaagggccccagagcccccagacccccccagcccaagaagagcaagaaggccagcggcagcggcggcggcagcgccgccctgggccccagcggcttcggccccagcggcggcagcggcaccaagctgcaggccggcgtgcagtggagagacctgggcctgctgcagccccccctgctgggcttcaagagattcagctgcctgagcctgcccagcagccaggactactag

SEQ ID NO: 77576 - DNA, 1092 bp, Artificial Sequence
  derived and/or modified sequence
tgagccaagagcagcagcgagagcagcagcgaggagagcagcagcgagagcagcagcgaggaggaggaggaggaggacgaggacgaggaggaggaggagagcgagagcagcgacagcgaggaggagagagcccacagactggccgagctgcaggagcagctgagagccgtgcacgagcagctggccgccctgagccagggccccatcagcaagcccaagagaaagagagagaagaaggagaagaagaagaagagaaaggccgagaagcacagaggcagagccggcgccgacgaggacgacaagggccccagagcccccagacccccccagcccaagaagagcaagaaggccagcggcagcggcggcggcagcgccgccctgggccccagcggcttcggccccagcggcggcagcggcaccaagctgcaggccggcgtgcagtggagagacctgggcctgctgcagccccccctgctgggcttcaagagattcagctgcctgagcctgcccagcagccaggactacagactgcccaagaaggccaccaagaccgccccccccgccctgcccaccggctacgacagcgaggaggaggaggagagcagacccatgagctacgacgagaagagacagctgagcctggacatcaacaagctgcccggcgagaagctgggcagagtggtgcacatcatccaggccagagagcccagcctgagagacagcaaccccgaggagatcgagatcgacttcgagaccctgaagcccagcaccctgagagagctggagagatacgtgctgagctgcctgagaaagaagcccagaaagccctacaccatcaagaagcccgtgggcaagaccaaggaggagctggccctggagaagaagagagagctggagaagagactgcaggacgtgagcggccagctgaacagcaccaagaagccccccaagaaggccaacgagaagaccgagagcagcagcgcccagcaggtggccgtgagcagactgagcgccagcagcagcagcagcgacagcagcagcagcagcagcagcagcagcagcagcgacaccagcgacagcgacagcggctag

SEQ ID NO: 77577 - DNA, 2511 bp, Artificial Sequence
  derived and/or modified sequence
atgctgcagaacgtgaccccccacaacaagctgcccggcgagggcaacgccggcctgctgggcctgggccccgaggccgccgcccccggcaagagaatcagaaagcccagcctgctgtacgagggcttcgagagccccaccatggccagcgtgcccgccctgcagctgacccccgccaacccccccccccccgaggtgagcaaccccaagaagcccggcagagtgaccaaccagctgcagtacctgcacaaggtggtgatgaaggccctgtggaagcaccagttcgcctggcccttcagacagcccgtggacgccgtgaagctgggcctgcccgactaccacaagatcatcaagcagcccatggacatgggcaccatcaagagaagactggagaacaactactactgggccgccagcgagtgcatgcaggacttcaacaccatgttcaccaactgctacatctacaacaagcccaccgacgacatcgtgctgatggcccagaccctggagaagatcttcctgcagaaggtggccagcatgccccaggaggagcaggagctggtggtgaccatccccaagaacagccacaagaagggcgccaagctggccgccctgcagggcagcgtgaccagcgcccaccaggtgcccgccgtgagcagcgtgagccacaccgccctgtacacccccccccccgagatccccaccaccgtgttcaacatcccccaccccagcgtgatcagcagccccctgctgaagagcctgcacagcgccggcccccccctgctggccgtgaccgccgccccccccgcccagcccctggccaagaagaagggcgtgaagagaaaggccgacaccaccacccccacccccaccgccatcctggcccccggcagccccgccagcccccccggcagcctggagcccaaggccgccagactgccccccatgagaagagagagcggcagacccatcaagccccccagaaaggacctgcccgacagccagcagcagcaccagagcagcaagaagggcaagctgagcgagcagctgaagcactgcaacggcatcctgaaggagctgctgagcaagaagcacgccgcctacgcctggcccttctacaagcccgtggacgccagcgccctgggcctgcacgactaccacgacatcatcaagcaccccatggacctgagcaccgtgaagagaaagatggagaacagagactacagagacgcccaggagttcgccgccgacgtgagactgatgttcagcaactgctacaagtacaacccccccgaccacgacgtggtggccatggccagaaagctgcaggacgtgttcgagttcagatacgccaagatgcccgacgagcccctggagcccggccccctgcccgtgagcaccgccatgccccccggcctggccaagagcagcagcgagagcagcagcgaggagagcagcagcgagagcagcagcgaggaggaggaggaggaggacgaggaggacgaggaggaggaggagagcgagagcagcgacagcgaggaggagagagcccacagactggccgagctgcaggagcagctgagagccgtgcacgagcagctggccgccctgagccagggccccatcagcaagcccaagagaaagagagagaagaaggagaagaagaagaagagaaaggccgagaagcacagaggcagagccggcgccgacgaggacgacaagggccccagagcccccagacccccccagcccaagaagagcaagaaggccagcggcagcggcggcggcagcgccgccctgggccccagcggcttcggccccagcggcggcagcggcaccaagctgcaggccggcgtgcagtggagagacctgggcctgctgcagccccccctgctgggcttcaagagattcagctgcctgagcctgcccagcagccagaactacagactgcccaagaaggccaccaagaccgccccccccgccctgcccaccggctacgacagcgaggaggaggaggagagcagacccatgagctacgacgagaagagacagctgagcctggacatcaacaagctgcccggcgagaagctgggcagagtggtgcacatcatccaggccagagagcccagcctgagagacagcaaccccgaggagatcgagatcgacttcgagaccctgaagcccagcaccctgagagagctggagagatacgtgctgagctgcctgagaaagaagcccagaaagccctacaccatcaagaagcccgtgggcaagaccaaggaggagctggccctggagaagaagagagagctggagaagagactgcaggacgtgagcggccagctgaacagcaccaagaagccccccaagaaggccaacgagaagaccgagagcagcagcgcccagcaggtggccgtgagcagactgagcgccagcagcagcagcagcgacagcagcagcagcagcagcagcagcagcagcagcgacaccagcgacagcgacagcggctag

SEQ ID NO: 77578 - protein, 328 aa, Artificial Sequence
  derived and/or modified sequence
  misc_feature (1)..(1): Xaa can be any naturally occurring amino acid
XAKSSSESSSEESSSESSSEEEEEEDEDEEEEESESSDSEEERAHRLAELQEQLRAVHEQLAALSQGPISKPKRKREKKEKKKKRKAEKHRGRAGADEDDKGPRAPRPPQPKKSKKASGSGGGSAALGPSGFGPSGGSGTKLPKKATKTAPPALPTGYDSEEEEESRPMSYDEKRQLSLDINKLPGEKLGRVVHIIQAREPSLRDSNPEEIEIDFETLKPSTLRELERYVLSCLRKKPRKPYTIKKPVGKTKEELALEKKRELEKRLQDVSGQLNSTKKPPKKANEKTESSSAQQVAVSRLSASSSSSDSSSSSSSSSSSDTSDSDSG

SEQ ID NO: 77579 - protein, 754 aa, Artificial Sequence
  derived and/or modified sequence
MASVPALQLTPANPPPPEVSNPKKPGRVTNQLQYLHKVVMKALWKHQFAWPFRQPVDAVKLGLPDYHKIIKQPMDMGTIKRRLENNYYWAASECMQDFNTMFTNCYIYNKPTDDIVLMAQTLEKIFLQKVASMPQEEQELVVTIPKNSHKKGAKLAALQGSVTSAHQVPAVSSVSHTALYTPPPEIPTTVLNIPHPSVISSPLLKSLHSAGPPLLAVTAAPPAQPLAKKKGVKRKADTTTPTPTAILAPGSPASPPGSLEPKAARLPPMRRESGRPIKPPRKDLPDSQQQHQSSKKGKLSEQLKHCNGILKELLSKKHAAYAWPFYKPVDASALGLHDYHDIIKHPMDLSTVKRKMENRDYRDAQEFAADVRLMFSNCYKYNPPDHDVVAMARKLQDVFEFRYAKMPDEPLEPGPLPVSTAMPPGLAKSSSESSSEESSSESSSEEEEEEDEEDEEEEESESSDSEEERAHRLAELQEQLRAVHEQLAALSQGPISKPKRKREKKEKKKKRKAEKHRGRAGADEDDKGPRAPRPPQPKKSKKASGSGGGSAALGPSGFGPSGGSGTKLPKKATKTAPPALPTGYDSEEEEESRPMSYDEKRQLSLDINKLPGEKLGRVVHIIQAREPSLRDSNPEEIEIDFETLKPSTLRELERYVLSCLRKKPRKPYTIKKPVGKTKEELALEKKRELEKRLQDVSGQLNSTKKPPKKANEKTESSSAQQVAVSRLSASSSSSDSSSSSSSSSSSDTSDSDSG

SEQ ID NO: 77580 - protein, 754 aa, Artificial Sequence [sequence omitted]

SEQ ID NO: 77581 - DNA, 2265 bp, Artificial Sequence
  derived and/or modified sequence
atggcgtctgtgcccgctctgcagctgacacccgccaatcctcctccacccgaagtgagcaatcccaagaaaccaggacgtgttaccaatcagctccaatatcttcacaaggtggtcatgaaagctctctggaaacatcagttcgcctggccattcaggcagccggttgatgccgttaagctggggcttcctgactaccataaaattatcaaacagcccatggacatggggactataaaaagacgtcttgaaaacaattactattgggcagcctccgagtgtatgcaggatttcaatactatgtttaccaattgctatatatataataagcccacagatgacattgtcctgatggctcagaccctggagaaaatatttttgcagaaggtcgcttccatgcctcaggaggagcaggaactggtggtgactattccaaaaaacagtcacaagaaaggtgcgaagctggcggcactgcaagggtccgtgaccagcgcacaccaggtccccgccgtcagctctgtatcccacacagccctgtataccccacctcccgaaatccctactaccgtcttgaatatcccccacccctctgttatctctagcccactgctaaagtccttgcactccgctggccctcctctgcttgccgttaccgccgctcccccagcccagcccctggcaaagaagaaaggagtgaagaggaaggccgatactaccaccccaacccctacggccattctggccccgggttctccagccagccccccaggttccctggaacctaaggccgcgcggcttccccccatgcgccgagagagcggacgcccaattaaacccccacgcaaagacctccccgactcccagcagcagcaccagtcaagtaagaaggggaagctgtctgagcagctcaaacattgcaatggcattctgaaagaactgctgtcaaagaaacacgccgcttacgcatggccattctacaaaccagtggacgcatctgccttaggactgcatgattaccacgacatcataaagcatcctatggacttgagtaccgtgaagcgtaagatggagaaccgagactaccgcgacgcacaggaattcgccgccgacgtcagactgatgttttcaaattgttacaaatataacccaccggatcatgatgtggtcgcaatggctcggaagctccaggatgtctttgaattccgatatgctaaaatgcccgatgagcccctggagcccgggcctctccctgtgtcaactgctatgcccccaggcctggctaaatcttcctccgaatcgtcatccgaagagtctagctccgagtcttcctcagaggaagaggaagaggaggatgaagaggacgaggaggaagaggagagcgaatcgtcggacagcgaagaagagcgtgcacatagattagcggagttgcaagaacagctgcgcgctgtgcacgagcaactggccgctctcagtcaggggcccatctcaaagccaaaaaggaaacgtgaaaagaaagaaaaaaaaaaaaagcgcaaagccgagaagcacagaggcagagccggtgctgacgaagacgacaaaggcccaagagcccctcgaccaccccagcccaagaagtctaagaaagcgtcaggctctggagggggaagtgctgccctgggaccatctggtttcggtccatcgggggggagcggcaccaagctgccaaagaaggcaacaaagaccgcacctcccgctcttcccactggctatgattccgaagaagaagaagagtctaggcccatgtcctacgacgaaaagaggcaactgagcctggacattaacaaacttcccggggagaaactaggaagggtggtgcatatcatccaagcacgcgaacccagcctgcgagacagcaacccagaagagatcgagatcgattttgaaactctgaaacccagcactttgagggaacttgaaagatacgttctcagctgcctgaggaagaaacccaggaaaccctacaccatcaagaagcctgtcggcaagaccaaagaggaattagcactggaaaaaaaaagggaacttgaaaagaggcttcaagacgtgagtggccagctgaactccacaaaaaaacctcctaaaaaagccaacgaaaaaactgagtcctcctccgctcaacaggtggctgtgagcaggctcagtgcatcctcctcatcctccgattcatcgagctcatcctcctcaagctctagtagcgatacgagcgactctgactctggatag

SEQ ID NO: 77582 - DNA, 2265 bp, Artificial Sequence
  derived and/or modified sequence
atggcaagcgtgcctgcgcttcaactcacccccgcaaacccacccccgcctgaggtgagcaatcccaagaagcctggccgggtaacaaatcaattgcagtacctgcacaaggttgtgatgaaggctctgtggaaacaccaatttgcgtggccattcaggcagcctgttgatgctgtgaaactgggccttcctgattatcataaaatcatcaaacaaccaatggatatgggcaccatcaaacgccgactggaaaacaattactactgggccgccagcgagtgcatgcaggactttaacactatgttcacaaactgttatatctataataagcccactgatgacatcgtgcttatggctcagaccctggagaagatttttctacagaaggtggcgagcatgccccaggaggagcaggaattagttgtaacaatccccaagaacagtcacaaaaaaggagctaagttggccgccctgcaggggagcgtgacctccgcacaccaggtgcccgctgtgtctagcgtcagccacactgcgctctatacaccccccccagagattccaactacagtacttaacattcctcacccctccgtgatctcatctcctcttctaaagtccttacatagcgctggccctcccctgctggcagtgaccgcagctccaccagcacagccactggcgaagaagaaaggcgtgaaaaggaaggctgacactacaacccccaccccgactgctatccttgccccgggctctcctgccagtcctcctggttctctggagcccaaggccgctcgccttccccccatgcggagagaatccgggcggcccattaagccacctcggaaggatctccctgactcccaacaacagcaccagagtagcaaaaaggggaagctatccgaacagttaaagcattgtaacgggattctgaaagagcttctgtctaaaaagcacgccgcatatgcctggcccttctataagccagtggatgcatccgcgctagggctgcatgactatcatgatatcataaagcacccaatggatcttagcacagtgaagcgaaaaatggaaaatagggattaccgcgacgcgcaggaattcgctgcagacgtgcgactgatgtttagtaattgctataaatataatcctccagaccacgatgtcgtagccatggcacgaaaactgcaggatgtgttcgaattcaggtacgcaaagatgcccgacgaacctctggagccaggtccgttgcccgtttctaccgcaatgccccccggtcttgcaaagagctctagcgagagtagcagtgaagaatcttcctcagagtcctctagtgaagaggaggaggaagaggatgaggaagacgaagaagaagaagagtctgagtccagcgattctgaagaagaaagagcacatcgcctcgccgaactacaagagcagcttcgcgccgtacacgagcagctagcggccctcagccagggtcccatctccaaacctaagcggaagcgcgaaaagaaagagaagaagaagaagcgtaaggctgaaaagcataggggccgagctggagccgacgaggatgacaaagggccccgtgcaccacgccctcctcagcccaagaaaagtaagaaggcctctggctccggcggcggttcggccgccctcggacctagcggctttggcccctccgggggctctggaacgaagttgccaaagaaggcaaccaaaacagcgcctcccgcacttccaaccggctatgatagcgaagaagaggaggagtcacggccaatgtcctatgatgaaaagaggcagctcagcctagacataaacaaactcccgggcgagaaactgggccgggttgtgcacataattcaggccagagaaccgtccctgcgtgatagtaaccccgaagaaattgagatcgacttcgagacattgaagccatccaccctgagggagctcgagaggtatgtcttgtcttgcctccgaaagaagcctaggaaaccgtacaccattaagaaacccgtggggaaaacgaaggaggagctggcgctggaaaagaagcgcgagctggaaaaaaggctgcaggacgtatccgggcagctgaacagtacaaagaagcctccaaaaaaagctaatgagaaaaccgaaagttcatcagcacagcaggtcgcggtaagccgcctgagtgcatcttccagcagctccgactcgagttctagttcctcatcaagctcctcgtctgatacctctgacagcgacagcggatag

SEQ ID NO: 77583 - DNA, 2265 bp, Artificial Sequence
  derived and/or modified sequence
atggcgagcgttcctgccttacaattgactccggccaacccccctcctcccgaggtgtctaaccctaaaaagcccggtagagtcactaaccagttgcagtatctgcataaagtggtcatgaaagcgctctggaaacaccagtttgcatggccatttagacagcccgtagacgccgtcaagctgggcctcccagattaccataagatcattaaacagcctatggacatggggaccattaaacgccggctggagaacaactactactgggccgcgagcgaatgcatgcaggacttcaacacaatgtttactaactgttacatttataacaagccaacagatgacattgtcctgatggctcaaactctggagaagatattcttgcagaaggtagcctccatgccacaggaagaacaggagctggttgtgaccatacccaagaactctcataagaagggcgcaaagctggctgctctgcagggatctgtgacttccgctcatcaggtgcctgccgtgtcttcagtgtcacataccgcactatacactccaccccccgaaatccccaccacagtatttaatatccctcacccgtccgtgattagcagtccgctgctgaaatctctgcacagcgccggtcctcccctgctggccgtgaccgcggccccgcccgcccagccgctggccaagaagaagggagttaagaggaaagctgacactactactccaactcctaccgcaattctcgctccaggctctcccgcatcacctccagggagcctcgaacccaaagccgcccgcctgccccccatgaggagagaatccggacggcccattaaaccacctaggaaagatttgcctgattcccagcagcaacaccagtctagcaaaaagggaaaactgagcgaacagttaaaacactgcaatggaatcctgaaggagttactgtcaaagaaacacgcagcatatgcgtggcccttctataaaccggtagacgcttcagcactcggcctgcatgattatcatgatataattaaacaccctatggatctgagcaccgtgaagcgcaagatggaaaaccgggactatcgtgatgcccaggagtttgctgccgacgtacggcttatgttcagtaactgttataaatacaacccaccagatcacgatgtagtggctatggcgcgaaaactgcaggacgtgtttgagttccggtatgccaaaatgcccgacgaaccgttagaacctggtcctttacctgtgagcactgctatgccgcccggcctggccaagagcagctccgagagtagttcagaagaaagttccagtgaatcctcctcagaggaggaagaagaggaggatgaggaagatgaggaggaagaggaatcagagagctcggactcagaggaagagagggcgcacaggctcgctgagctgcaggagcagctgcgcgcagtgcacgagcagctagccgccctgagtcagggcccgatctctaagcccaaacggaaacgagagaaaaaggaaaagaagaagaaaaggaaagctgaaaagcatagggggcgggcaggcgccgacgaggacgataaaggtccacgggctccccgtccacctcaaccgaaaaagagcaaaaaggcatctggctcaggaggcggttccgctgccctggggcccagtggattcgggccttcaggaggaagtggaaccaagctgcccaaaaaagccaccaaaacagcccctccagcgctgcccacgggatatgattctgaggaggaggaggagagtcgtccgatgtcatacgacgaaaaacgtcagttgtctttagacatcaataaactccctggcgagaagctgggcagggttgtgcatattattcaagccagagaaccatctctgagagacagcaatcctgaggaaatcgaaatcgacttcgaaacgctaaaaccttctacactgcgggaattggagcgctacgtcctgagctgcctgagaaagaagcctcgcaaaccatacacaattaaaaagccggtggggaagaccaaagaggagcttgccctcgaaaagaaaagagagctggagaagaggctgcaggacgtcagcggccagctcaattctactaagaaacctcccaagaaggccaatgagaaaacagaatcctcttctgcccagcaggtggccgtgtcccgtctgagcgccagcagtagttcctcagattcctcttcatcatcatcctccagttcctcgtccgatacatccgactctgactcagggtag

SEQ ID NO: 77584 - DNA, 2265 bp, Artificial Sequence
  derived and/or modified sequence
atggcctcagtgccagccctgcaattaaccccggcaaaccctcctcccccagaggtgagtaaccccaagaaaccgggccgagtaactaatcagctccagtatctgcacaaggttgtgatgaaagctctatggaagcaccagtttgcctggccattcaggcagccagtagatgcagttaaacttgggttgcctgattaccataagataatcaagcagcccatggacatgggcacaataaaaagaaggctcgagaataactactactgggctgcctctgaatgtatgcaagactttaacaccatgttcacgaactgttatatctataataaacccacggacgacatagttctcatggcacagacacttgaaaaaatcttcctccaaaaagttgcatcaatgcctcaagaggagcaggagctggtggtaacaatccccaaaaattcccataagaagggagctaaactagctgctctccagggatctgtcacatctgcccaccaggtccctgctgttagctcggtaagtcacactgccctgtacacccctccaccagagatcccaaccacggtgctgaatatcccccatcctagcgtaatctcttccccactcctcaaatcactccattctgccggcccccccctgctggccgtgacagctgctcctcccgcacagcccttggctaaaaagaaaggagtgaagcgcaaggcagataccactactccaaccccaactgccatactggcacccgggtcccctgcatcacccccggggtccctggaaccaaaagcagcacgactgcccccaatgcgcagagaatccggacgacctataaaacccccacgcaaagatttacccgactcccagcagcaacaccagagctccaaaaaaggcaaacttagcgagcagttgaaacactgcaacggtattctcaaggagctgttgtccaaaaagcatgctgcctatgcgtggccattctataagcccgtcgatgcaagcgccctcggcttacacgactaccacgacatcatcaagcaccctatggatctaagcaccgttaagcggaaaatggagaacagggactatcgtgatgcccaagaattcgccgcggacgtaagactgatgttctccaactgttataaatacaatccccctgatcatgatgtggtggccatggctcggaagctgcaggacgtgttcgaatttcggtacgccaaaatgcccgatgagcccctggagcctggcccgcttcccgtgagcactgctatgccacctggacttgcaaagtcctccagcgaaagcagttcggaggagagttcaagtgaaagcagttctgaagaggaagaggaggaggacgaagaagacgaggaggaagaagagtcagagagcagtgactcggaagaagagagggcccacagactggccgagctgcaagagcagctgcgagcggttcacgaacagctcgccgccctaagccagggacccatctccaaacctaaacggaaacgggaaaagaaggagaaaaagaagaagcgcaaagcagaaaagcacagagggcgcgccggtgccgacgaggacgacaagggtcccagggcacccagacctccacagcctaagaagtctaagaaagccagcggatctggcggcggatctgcggcactgggaccaagtggattcgggccttccgggggatccggcaccaagctacctaaaaaggcgaccaaaactgccccaccggcactgcctacaggctacgacagtgaggaggaagaggaatcacgcccaatgagctacgacgagaaaagacaactgagcctggacatcaacaaactgccaggggaaaagttgggacgggtcgtgcatattatccaggctagggaacccagtctccgcgacagtaaccccgaggaaatcgagatagattttgaaaccctaaaaccatcgaccttacgcgagttggagagatatgtattgtcgtgtctccgtaagaaaccacgaaagccatacacaattaaaaaacccgtgggaaagacaaaagaagagctggctctcgagaaaaagcgcgagcttgaaaagcgcctacaggacgtgagcggacagctgaattcaaccaagaagcctcctaagaaggccaatgaaaagaccgaatcgtccagtgcgcagcaggtagcggtgagtcgactttctgcaagcagttcctcaagcgactccagctcctccagtagctccagttcttcttcagacacaagcgactcggacagtggctag

SEQ ID NO: 77585 - DNA, 2265 bp, Artificial Sequence
  derived and/or modified sequence
atggccagcgtgccagctctgcagttgacccctgcaaaccccccaccaccagaagtgagcaacccgaaaaagcctggacgcgtcacaaatcagcttcagtacctgcacaaggttgtcatgaaagccctgtggaaacaccagttcgcgtggccattccgacaacccgtggacgctgtgaaactaggtttgcccgattaccacaagatcattaaacaacccatggatatggggaccataaagcgcaggctggagaataactactactgggcagcatcagaatgtatgcaggacttcaacacaatgttcacaaattgttacatttataataagcctactgatgacatagtgctgatggcccagaccctggagaaaattttcctgcaaaaggtcgcttctatgccccaggaagaacaggagctggtcgtaactattcccaagaactctcacaagaagggcgcgaagctggctgctctgcaggggagtgtgactagcgcccatcaagtgccagccgtgtccagcgtttcccataccgccctttatacacctccccccgagataccaaccacggttctgaacatcccccacccttcagtcataagtagccctcttctgaaatctctgcatagtgctgggcctccattgctggctgtgacagccgcgcccccggctcagccactggctaaaaaaaagggcgtgaagcggaaggccgataccactacccccactcctaccgccatcctggccccaggctcacctgcctcgccacccgggagtttggagccaaaggcagctagactgccaccaatgcgccgagagtcaggcagacccatcaaaccacctcgcaaggatctccctgactcgcagcagcagcatcagtcatcaaaaaagggaaagctttctgagcaactgaaacattgcaacggcatcctaaaagagctccttagtaaaaaacacgccgcctacgcatggcctttctacaaacccgtcgacgcttctgccctcggactccatgactatcacgacatcattaaacatccaatggacctgagcacagtcaaacgcaaaatggagaatagggattaccgcgacgcccaggaatttgcagcagatgtccggttgatgttttcaaactgctacaagtacaaccctccagaccacgacgtggtcgcgatggcccggaagctccaggacgtatttgagtttcggtacgccaagatgcccgacgaaccactggagccaggccccctgcctgtctcaacggccatgcctccaggcctagccaaaagctctagcgagtcctcctcagaggagtcatcctcagagtcatcgtctgaggaagaagaggaggaagatgaggaggatgaggaagaagaggagtcagagagcagcgactccgaggaagagcgggcgcaccggttggccgagctgcaggagcaactgagggccgtccacgagcagctggccgctctgtcccagggaccaatttctaagcctaagaggaagagagagaagaaagaaaaaaagaagaaaaggaaggctgagaagcatcgtggaagagctggagctgacgaagatgataagggtccgcgagccccacgacccccccagccaaaaaagtccaaaaaggcgtcgggaagcggaggcgggtcagctgctctgggcccctccggttttggacctagtggcgggtcagggaccaaactgcctaagaaagctactaaaacagcacctcctgcactacctacgggttacgacagcgaagaggaggaagaaagtcgcccaatgtcttatgacgagaagcggcaactgtcacttgatattaacaaactccccggagaaaagctcggacgggtggtccacatcatccaggcacgcgaacccagcctaagggatagcaaccctgaggaaatcgagatcgatttcgaaacactgaaaccttcaacactccgggagctcgagagatacgtccttagctgcctgagaaaaaagccaagaaaaccctacaccatcaaaaaacccgtaggaaaaactaaagaggagctagccctggagaagaaaagagagctcgagaagcgtctacaggatgtgagcggtcagctcaacagtacaaaaaagcctcctaagaaggctaatgagaaaaccgaatcctcctccgcccagcaggtcgcggtgagccgcctcagtgcctccagcagttcctctgatagttcaagcagctcctcttccagcagctccagtgatacgtctgactccgacagcggctag

SEQ ID NO: 77586 - DNA, 2265 bp, Artificial Sequence
  derived and/or modified sequence
atggcctctgtgcctgccctgcagctgaccccagccaaccccccacctcctgaggtgagcaaccccaagaagccaggccgggtgaccaaccagctgcagtacctgcacaaggtggtgatgaaggccctgtggaagcaccagtttgcctggcccttccggcagcctgtggatgctgtgaagctgggcctgcctgactaccacaagatcatcaagcagcccatggacatgggcaccatcaagaggcggctggagaacaactactactgggccgccagcgagtgcatgcaggacttcaacaccatgttcaccaactgctacatctacaacaagcccacagatgacatcgtgctgatggcccagaccctggagaagatcttcctgcagaaggtggcctccatgccccaggaggagcaggagctggtggtgaccatccccaagaacagccacaagaagggggccaagctggccgccctgcagggctctgtgaccagcgcccaccaggtgcctgctgtgtcctctgtgagccacacagccctgtacaccccacctcctgagatccccaccaccgtgctgaacatcccccaccccagcgtcatcagcagccccctgctgaagagcctgcacagcgctggcccccccctgctggccgtgacagctgcccccccagcccagcccctggccaagaagaagggcgtgaagaggaaggctgacaccaccacccccacccccacagccatcctggcccctggcagccctgccagccccccaggcagcctggagcccaaggccgcccggctgccccccatgaggcgggagagcggccggcccatcaagccacccaggaaggacctgcctgacagccagcagcagcaccagagcagcaagaagggcaagctgtctgagcagctgaagcactgcaatggcatcctgaaggagctgctgagcaagaagcatgctgcctatgcctggcccttctacaagcctgtggatgccagcgccctgggcctgcatgactaccatgacatcatcaagcaccccatggacctgagcacagtgaagaggaagatggagaacagagactacagagatgcccaggagtttgctgctgatgtgcggctgatgttcagcaactgctacaagtacaaccccccagaccatgatgtggtggccatggccaggaagctgcaggatgtgtttgagttccgctatgccaagatgccagatgagcccctggagcccggccccctgcctgtgtccacagccatgcctcctggcctggccaagagcagcagcgagagcagcagcgaggagagcagcagcgagagcagcagcgaggaggaggaggaggaggatgaagaagatgaggaggaggaggagagcgagagcagtgacagcgaggaggagcgggcccaccggctggccgagctgcaggagcagctgcgggctgtgcatgagcagctggccgccctgagccagggccccatcagcaagcccaagaggaagcgggagaagaaggagaagaagaagaagaggaaggccgagaagcaccggggccgggccggggctgatgaagatgacaagggcccccgggccccccggcccccccagcccaagaagagcaagaaggccagcggcagcggcggcggcagcgctgccctgggccccagcggcttcggccccagcggcggcagcggcaccaagctgcccaagaaggccaccaagacagcccccccagccctgcccaccggctatgacagcgaggaggaggaggagagccggcccatgtcctatgatgagaagaggcagctgagcctggacatcaacaagctgcctggagagaagctgggccgggtggtgcacatcatccaggcccgggagcccagcctgcgggacagcaaccctgaggagattgaaattgactttgagaccctgaagcccagcaccctgcgggagctggagagatatgtgctgagctgcctgaggaagaagcccaggaagccctacaccatcaagaagcctgtgggcaagaccaaggaggagctggccctggagaagaagcgggagctggagaagaggctgcaggatgtgtctggccagctgaacagcaccaagaagccacccaagaaggccaatgagaagacagagagcagcagcgcccagcaggtggccgtgtcccggctgagcgccagcagcagcagcagtgacagcagcagcagcagcagcagcagcagcagcagtgacaccagtgacagcgacagcggctag

SEQ ID NO: 77587 - DNA, 2265 bp, Artificial Sequence
  derived and/or modified sequence
atggcctctgtgcctgccctgcagctgaccccagccaaccccccacctcctgaggtgagcaaccccaagaagccaggccgggtgaccaaccagctgcagtacctgcacaaggtggtgatgaaggccctgtggaagcaccagtttgcctggcccttccggcagcctgtggatgctgtgaagctgggcctgcctgactaccacaagatcatcaagcagcccatggacatgggcaccatcaagaggcggctggagaacaactactactgggccgccagcgagtgcatgcaggacttcaacaccatgttcaccaactgctacatctacaacaagcccacagatgacatcgtgctgatggcccagaccctggagaagatcttcctgcagaaggtggcctccatgccccaggaggagcaggagctggtggtgaccatccccaagaacagccacaagaagggggccaagctggccgccctgcagggctctgtgaccagcgcccaccaggtgcctgctgtgtcctctgtgagccacacagccctgtacaccccacctcctgagatccccaccaccgtcttcaacatcccccaccccagcgtcatcagcagccccctgctgaagagcctgcacagcgctggcccccccctgctggccgtgacagctgcccccccagcccagcccctggccaagaagaagggcgtgaagaggaaggctgacaccaccacccccacccccacagccatcctggcccctggcagccctgccagccccccaggcagcctggagcccaaggccgcccggctgccccccatgaggcgggagagcggccggcccatcaagccacccaggaaggacctgcctgacagccagcagcagcaccagagcagcaagaagggcaagctgtctgagcagctgaagcactgcaatggcatcctgaaggagctgctgagcaagaagcatgctgcctatgcctggcccttctacaagcctgtggatgccagcgccctgggcctgcatgactaccatgacatcatcaagcaccccatggacctgagcacagtgaagaggaagatggagaacagagactacagagatgcccaggagtttgctgctgatgtgcggctgatgttcagcaactgctacaagtacaaccccccagaccatgatgtggtggccatggccaggaagctgcaggatgtgtttgagttccgctatgccaagatgccagatgagcccctggagcccggccccctgcctgtgtccacagccatgcctcctggcctggccaagagcagcagcgagagcagcagcgaggagagcagcagcgagagcagcagcgaggaggaggaggaggaggatgaagaagatgaggaggaggaggagagcgagagcagtgacagcgaggaggagcgggcccaccggctggccgagctgcaggagcagctgcgggctgtgcatgagcagctggccgccctgagccagggccccatcagcaagcccaagaggaagcgggagaagaaggagaagaagaagaagaggaaggccgagaagcaccggggccgggccggggctgatgaagatgacaagggcccccgggccccccggcccccccagcccaagaagagcaagaaggccagcggcagcggcggcggcagcgctgccctgggccccagcggcttcggccccagcggcggcagcggcaccaagctgcccaagaaggccaccaagacagcccccccagccctgcccaccggctatgacagcgaggaggaggaggagagccggcccatgtcctatgatgagaagaggcagctgagcctggacatcaacaagctgcctggagagaagctgggccgggtggtgcacatcatccaggcccgggagcccagcctgcgggacagcaaccctgaggagattgaaattgactttgagaccctgaagcccagcaccctgcgggagctggagagatatgtgctgagctgcctgaggaagaagcccaggaagccctacaccatcaagaagcctgtgggcaagaccaaggaggagctggccctggagaagaagcgggagctggagaagaggctgcaggatgtgtctggccagctgaacagcaccaagaagccacccaagaaggccaatgagaagacagagagcagcagcgcccagcaggtggccgtgtcccggctgagcgccagcagcagcagcagtgacagcagcagcagcagcagcagcagcagcagcagtgacaccagtgacagcgacagcggctag

SEQ ID NO: 77588 - DNA, 2265 bp, Artificial Sequence
  derived and/or modified sequence
atggccagcgtgcccgccctgcagctgacccccgccaaccccccccctccggaggtgagcaaccctaagaagccgggcagagtgacaaaccagctacagtacctgcacaaggtggtcatgaaggccctgtggaagcatcaattcgcctggccctttcggcagcccgttgacgcggttaagctgggtttgcctgattaccacaagattataaagcagccaatggacatggggaccatcaagcgcaggctggaaaataattattactgggccgcctccgagtgtatgcaagactttaataccatgtttacaaattgctacatttacaacaagccgaccgatgatatagtcctgatggcacagacgctagagaaaatttttttacagaaagtggcttccatgccccaggaagagcaggaactggtagtgaccatccccaaaaatagtcacaaaaagggggcgaaactagccgccttgcaggggtctgtgacatcagctcaccaggtcccagcagtctcctctgtgtcacacaccgcactgtataccccaccccctgagattcctactaccgtcttgaatattccccacccgtcagtaatttcaagtcctcttttaaagtccctccacagcgccggccctcccctgcttgctgttactgcagcaccacctgctcagccattggccaaaaaaaaaggagtgaagcgaaaagccgataccaccaccccaactcccacagctatcctggctccagggtctcctgccagtcctcccggatcgctcgagccgaaagccgccagactgccccccatgcggcgcgagtccggtcggccgataaaaccccccaggaaagatttgccagactcgcagcagcaacatcaaagctcaaagaaaggaaaactgagtgagcagcttaagcactgcaacgggatcctcaaggaactgctgtcaaagaaacatgcggcttacgcttggcctttttacaaacccgtggatgcatctgctctgggactgcacgattatcatgatatcattaaacaccctatggacctcagcaccgtgaagagaaaaatggaaaatagagactaccgggacgcccaggagtttgccgccgatgtgcgcctgatgttttctaactgttacaagtacaacccccctgaccatgacgtggtagcaatggccagaaaattgcaagatgtgttcgaattcaggtacgccaagatgccggatgaaccccttgagcccgggccgctccccgtgagcaccgctatgcctccaggcctggcgaagtcatctagtgaatcttcgtccgaggagagcagttccgagtcttcgtccgaagaagaggaagaggaggacgaagaagatgaggaagaggaggagtccgaatccagcgacagtgaggaggagcgcgctcaccgattggcggagttacaggagcagctacgggctgttcacgaacagctggccgccttgtcgcaggggcccatcagtaagcccaagagaaagagagagaagaaggagaaaaaaaagaaaaggaaagctgaaaagcaccgcgggcgcgcgggagctgacgaagacgataagggaccgcgggcacccagacccccacaacccaagaaatctaagaaagcttcaggttcaggaggaggctccgcagcactcgggccttctggattcggacctagcggcggtagtggcacaaaactgcccaaaaaagccacaaaaaccgccccacccgcattgccgaccggctatgactccgaggaagaggaggagagcagacctatgtcatacgatgaaaaacgtcagctttctctggacatcaacaagctgcctggagagaagctggggagagtggtgcacattattcaggctcgagagccctcactccgcgatagcaatccggaggagatagagatcgattttgaaactcttaagcccagtaccctgcgcgagttggagcggtacgtcctgtcttgtctgcgcaaaaaacctcggaaaccctacactatcaaaaagcctgtgggtaagacaaaggaggagttggcactggagaagaaaagggagctagaaaaaaggctccaagacgtgtcaggacaattgaatagcacgaagaagcctccaaagaaagctaatgaaaaaactgagtcctcctcggcccagcaggtggccgtatcaaggctgtccgctagtagttcctcatctgactcaagttcttccagttcgtcaagctcctcaagcgatacctctgactctgatagcggatag

SEQ ID NO: 77589 - DNA, 2265 bp, Artificial Sequence
  derived and/or modified sequence
atggccagcgtgcccgccctgcagctgacccccgccaacccccccccgcccgaggtcagcaatccgaagaagccaggtcgcgtgaccaatcagcttcagtacctccacaaggtggtcatgaaagcactgtggaagcatcagtttgcttggccattccggcagcctgttgacgctgtgaaactcgggttgccagattatcataaaataataaaacagcctatggatatgggtaccattaagagacgcctggaaaacaattactactgggcggcttcggagtgcatgcaggacttcaacaccatgttcactaactgctatatctacaataaaccaactgacgacatcgtcctgatggctcaaactctagagaagatttttctacagaaggtggcctcgatgcctcaggaagaacaggagctcgtagtgaccatccccaagaacagccataagaagggggccaaactggcggctctccagggaagtgttactagcgctcatcaggtccccgcagtctctagtgtgagtcacacagcattgtataccccccctccagagattcccacgacggtgctcaacatccctcatccttctgtcatctctagcccccttctcaagtcacttcattccgccggtcctcctttactcgccgtaactgcagcacctcccgctcagcctctcgcgaaaaagaaaggtgtgaaacgaaaggctgacaccactaccccaaccccaactgctatcctggcccccgggagccctgccagcccaccggggtccctcgaacctaaggcagcccgccttccgcccatgcgccgcgagagcgggagaccgattaaacctccaaggaaagatctacctgatagccagcaacagcatcaaagcagtaaaaaaggtaagctctctgagcagctcaagcactgcaacggcatcttaaaagagctgctttccaagaagcatgcagcttacgcatggccattttacaaacctgtggatgcgagtgctttgggacttcacgattaccatgacatcattaaacatcccatggacctctctactgttaaacgcaaaatggaaaatagggattacagagatgctcaggaattcgcagccgacgttagactcatgttcagtaattgctacaaatataaccctccagaccatgacgtggtggctatggccagaaagcttcaagacgtcttcgagtttcggtatgcaaaaatgccagatgagccccttgagccgggtcccctgcccgtttctacagcaatgccccccggtcttgcaaagagcagctcagaatcaagcagcgaggaaagttcctccgagtcatcatccgaggaagaggaggaggaggatgaggaagatgaggaggaagaagaaagcgagagtagcgattctgaggaggagagagcccatcgactggcagagctgcaagagcagctgcgggctgtccatgagcagttggccgccttgagccagggcccaatatctaaacctaaaagaaaacgcgaaaagaaggagaagaaaaaaaagaggaaagcagagaaacatagaggccgggctggggccgacgaggacgacaagggcccccgtgcccccaggcctccccaaccgaagaagagtaagaaagcaagcggtagtggcggtggcagtgctgccctgggtccttcaggatttggacccagcggagggtccgggaccaagctgcccaaaaaggccactaaaacagcaccacctgccctccctactggatacgatagtgaggaggaggaggaaagccgacccatgtcttacgacgagaagaggcagttgagcctggatatcaacaagctcccaggagagaagctagggcgtgtcgtgcacattattcaggcacgtgagccaagccttcgagattcaaatcctgaggagatcgaaatcgattttgagacactcaagccgagcactttgagagaactagagcggtacgtcctctcatgcttacggaagaaacctcgtaagccttatactatcaagaaaccagtgggtaagacaaaggaagagctcgcccttgaaaaaaagcgcgagctggagaagcgattacaggacgtgagcggccaacttaactctactaaaaaaccaccgaagaaggcgaatgaaaagaccgaaagctccagtgcccagcaggttgctgtatcacggttgtcagcaagctccagctcttcggacagctcgtcatctagctccagttctagtagctccgatacttctgattccgatagtggctag

SEQ ID NO: 77590 - DNA, 2265 bp, Artificial Sequence
  derived and/or modified sequence
atggccagcgtgcccgccctgcagctgacccccgccaaccccccccctcctgaagtgtccaaccccaaaaaacctgggcgagtgaccaaccagctgcagtacctgcacaaagtggtaatgaaagcattgtggaagcatcaattcgcctggcctttccgacaaccagtcgacgccgtgaagctgggattgcccgactatcacaaaattatcaaacagcccatggacatgggaaccatcaagcgaagacttgaaaacaattattattgggcagcctccgagtgtatgcaggattttaatactatgttcacgaattgctacatctacaataaaccaaccgatgatattgtgctgatggcccagactctggagaagatcttcttgcagaaagtcgcatctatgccccaggaagaacaagaactcgttgtgacaattcctaaaaatagccataagaaaggagctaagctggctgcccttcaaggctctgtcacaagcgcccaccaggtgccggctgtgagctccgtgtcacatacggcattgtatacgccaccccctgaaatccccaccacagtattcaacatccctcaccccagtgtcatcagttcgccactgcttaaatcactgcattctgcggggccaccgctcctcgctgtaaccgccgctccgccagcccagccactagcgaagaagaaaggcgtgaaaaggaaggccgatacgaccacacccactcctaccgcaattctcgctccaggctctcccgcaagccctcctggcagtcttgaacccaaagctgcgcggttaccaccaatgcggagagaatcggggcgccctatcaagcccccaagaaaagaccttccagatagccagcagcagcaccaatcttctaagaaggggaagctgtctgaacaactgaagcactgtaacgggatcctgaaggagttgctgtccaagaagcacgcagcctacgcttggccgttttacaagcctgttgacgcctcagctcttgggttgcacgattaccacgacatcatcaaacacccaatggacctgtcaacagtcaaaagaaagatggagaatagggactatcgggacgctcaggagtttgcagctgatgtacggttgatgttttcaaattgctataaatataatcctcccgaccacgacgttgtcgccatggcacggaaactccaggacgtgtttgagttcaggtacgcgaaaatgccagacgaacctctggagcctggccctcttcctgtgagtacagccatgccgcctggactcgctaagtcatctagcgaatctagctcagaagagtcttcttctgagtcgagttctgaagaggaagaggaggaggacgaggaggacgaagaggaggaagagagcgaaagcagcgattccgaagaagaacgagctcaccgcctcgctgaactgcaggaacagctgcgtgctgtccatgagcagcttgcagctttatcccagggtcccatatcgaaaccaaagcgaaagcgagagaagaaggagaaaaagaaaaaaagaaaagccgaaaaacacaggggcagagcgggggcggacgaggatgataaagggccccgagctccaaggcctccccagcctaaaaagtctaagaaggcgtctggctctggaggaggtagcgcagcactgggacccagcgggtttggaccgtccggtggaagcggcaccaagctgcccaaaaaggctaccaagaccgccccccccgccctcccgacaggatacgattccgaggaggaggaagagtcccgtcccatgagttatgatgaaaaacgccagctgtctctggatataaacaagctgccaggagagaaactaggcagagtggtgcacatcatccaggcgcgagagccaagcctgcgagacagtaatcccgaggagatcgagatcgatttcgagaccctgaagcctagtacacttcgagagctggagcgatatgttcttagctgcttgcggaaaaagccaaggaagccttacacgataaagaagcccgtgggcaagacgaaagaagagctggcgttagagaagaagagagaactggagaagagactccaagacgtgagcgggcagctaaactctactaagaagccgcctaaaaaggctaacgaaaaaactgagtctagctctgctcagcaagtggctgtcagcagactcagcgcatcttcttcatcatctgatagttcaagctcaagcagttctagctcttcctccgatacgtctgatagcgatagcggctag

SEQ ID NO: 77591 - DNA, 2265 bp, Artificial Sequence
  derived and/or modified sequence
atggccagcgtgcccgccctgcagctgacccccgccaaccccccccccccagaggtctccaaccccaagaagcccggtcgagtgacgaatcaactgcagtacctccacaaggtagtcatgaaagctctatggaaacaccagttcgcttggccgttccggcaacctgttgatgcggtgaaactgggtctccctgattaccataagatcatcaaacagcccatggatatgggaacgatcaagcggcgtcttgagaataactattactgggccgctagtgagtgtatgcaagatttcaacacgatgttcacaaactgctacatttacaataagcctactgacgatatcgtattgatggcccagacgcttgaaaagatattcttgcaaaaggttgccagtatgccccaggaagagcaggaactggtggtgaccatcccaaaaaatagccacaagaaaggagctaaactggcggccttgcaaggatccgtgacctcagctcaccaggtaccagctgtgtcttcggttagccacaccgccctctacactccgccacctgaaataccgaccacagtattaaacatcccacacccgtctgtaatttccagcccactgctgaagagcctgcacagcgccggcccccctctgctggctgtaacagccgccccccctgcccaacctctggccaagaagaaaggcgtcaagcgcaaagctgataccactacccccacaccaacagccatcttggccccgggctcgccagccagcccgcctggaagtctcgaacccaaagcggcccggctccctcctatgcggcgggagtccggccgaccgattaaaccacctaggaaggatctgccggacagtcagcaacaacatcagagctcgaaaaagggcaagctgtctgagcagcttaaacattgtaatggcatactaaaggaactcctgtccaaaaaacacgccgcgtacgcatggcccttttataaacccgtggacgcgagtgccctcggtcttcatgattatcatgatatcattaaacatcccatggacctgagtaccgttaagcggaaaatggaaaaccgagactaccgtgatgctcaagaattcgctgccgatgtgagactcatgttctccaattgttataaatataacccaccagaccatgatgtcgtggccatggcaaggaagctgcaggacgtgtttgagtttagatatgcaaaaatgccagacgaaccactggaacctggacctctgccagttagcaccgccatgccaccaggcttagccaagagctcgagtgagtcttcaagtgaggagtcttcctctgaaagttcctcagaagaggaggaagaagaggacgaagaggacgaagaggaagaggagtctgaatctagcgactcagaggaggaaagagcccacagattagcagagctgcaggagcaactgcgggccgtccacgagcaattagctgccctctcccaaggaccgatcagcaagccaaaacggaagagggagaagaaggagaagaagaagaaaaggaaggcggaaaagcaccgggggcgggccggggctgacgaggacgataaggggccgcgtgcccccaggccgccgcagcctaaaaagtccaagaaggcttccggctcgggtgggggctcggctgcactggggccatcaggctttggtcctagcggtgggtcagggactaaactaccaaagaaagctaccaagaccgctcctcctgcactgcccacaggctacgactcagaggaagaagaagagagccggcctatgtcttatgatgagaagaggcagctgagtttggacattaacaagctgcccggggagaaacttggcagagtggtgcacatcatccaggctcgcgagccgtcactgagagacagtaacccagaagaaatcgagatcgacttcgagacattgaaaccaagcaccctgcgcgagctggaacgatacgttctgtcctgtctgagaaagaagccaaggaagccctatacaatcaaaaagccagtagggaaaacaaaggaggagttagcactcgaaaagaagcgcgaattagagaagagactccaggatgtaagtggacaactgaattctaccaagaagcctcctaaaaaggctaacgaaaagacagaatcttcaagcgcacaacaggtggccgtaagcagactgtctgcttcctcttcctcctctgatagttcttcaagtagttcttcctcctcaagcagcgacacctccgattccgattctgggtag

SEQ ID NO: 77592 - DNA, 2265 bp, Artificial Sequence
  derived and/or modified sequence
atggccagcgtgcccgccctgcagctgacccccgccaacccccccccacctgaggtttctaatccaaaaaaacccggacgagtcacaaatcaattgcagtacttgcacaaagtggtgatgaaggccctctggaaacatcaattcgcttggcccttccgccagccagtggacgccgtgaagctcggattgcctgattaccacaagatcataaaacagcccatggatatggggaccattaaaaggcggctagaaaacaattactattgggccgcaagtgaatgtatgcaggactttaataccatgttcaccaattgttacatttacaataaaccaaccgacgatatcgtgcttatggcccaaacccttgaaaagatctttcttcagaaggtggctagcatgccacaggaagagcaggagttagttgtgacaattccaaagaactctcacaaaaagggggccaagctcgcagctctgcaggggagtgtcacatcagcccaccaggttccagccgtgtcctctgtatctcataccgcattgtatactcccccccctgagattcccaccactgtgttaaatatcccccatccttcggtcattagcagccctctgcttaaatcactccactccgcaggcccaccactcctggccgtaaccgcggctccacctgcccagcctctggctaaaaagaagggggtcaagagaaaggccgacactacaactcctacacccacagcaatcctggcgccaggcagtcctgcaagccccccagggtcactcgaaccaaaagccgctagactgcctcctatgcgaagggaaagcgggcggcccataaagcccccacgcaaggatctcccagactcgcagcaacaacaccagagttccaaaaaaggaaagctgagtgagcagctgaagcactgcaatggcatccttaaagagcttctgagcaaaaaacatgcagcttatgcctggcctttctataagccagtagacgctagtgctctcgggctgcacgattatcatgacatcataaaacatcctatggatctgagcaccgtgaaacgcaagatggaaaacagagactatcgtgacgctcaggaattcgcggccgatgtccgcttaatgttcagcaattgctataaatataatcccccagatcacgacgtggttgctatggcacggaagctgcaagatgtattcgagtttaggtacgccaaaatgcctgacgagccactagagccgggccccctgcccgtgtcgacagccatgcctcctggccttgccaaatcatccagtgagtcaagcagtgaagaaagctcctccgagtcaagctcagaggaagaggaagaggaggacgaggaggacgaagaagaggaggagagcgagagcagcgactctgaggaagaacgtgcccacagactggcggagcttcaggagcagctgagagctgtccacgagcagctagccgccctatctcagggcccaatctccaaacccaagaggaaacgggaaaaaaaagagaaaaagaagaaacgtaaggcagaaaaacaccgggggagagccggagccgacgaggacgataaagggcccagagccccaagaccgccccagcctaagaagagcaagaaagcctccggatcgggtggtggctcagccgcattaggacccagtggattcggaccttccggtggatccgggaccaagctgccaaagaaagctaccaagaccgcccccccagctctcccaaccggatacgactccgaggaggaagaggaatcccgccctatgagttacgacgagaagcgtcagctgagcttggatatcaataaactgcctggtgaaaagctggggagagtggtgcacatcattcaggctcgtgaaccctcactgcgggattcaaaccctgaagaaatcgagatagattttgagacactgaaaccttccacccttcgggagttggaaaggtacgttctgtcatgtcttcgcaagaaaccgcggaagccgtacaccattaagaaaccggtagggaagaccaaggaagaactggcactggagaagaaaagagagctggaaaaaaggctgcaggatgtctccggacaattgaactccacaaaaaaacctcccaagaaggccaatgagaagacagagtcgagttcagctcagcaagtggctgtgtcccgtctctcagcctcctcatcaagttccgacagtagctcgtcctcgtctagctcgtcgagctctgacacctccgattctgactccggctag

SEQ ID NO: 77593 - DNA, 2265 bp, Artificial Sequence
  derived and/or modified sequence
atggcttcagtccccgcacttcagttaacgccagctaatcccccacccccagaggtgtccaatccgaaaaaaccgggacgcgttaccaaccagcttcaatacttacacaaggtggtcatgaaggctttatggaaacaccagtttgcttggccattcagacaacctgtggatgcggttaagttgggcctgccagattatcataaaatcatcaagcaaccaatggacatgggcactatcaaacgacgccttgagaacaactactattgggccgcaagcgaatgtatgcaggattttaataccatgttcactaattgttatatttataataagcctactgacgatatcgtcctaatggctcagacactagagaaaatatttctccagaaagtggcctccatgccacaggaagagcaagagctggtagttaccatccctaagaacagtcacaagaagggagccaagttggccgcactgcaaggctcagtgacctccgctcaccaggtgcccgcagtgagttcagtctcacacaccgcgctctatacgccccctcccgaaatcccaaccaccgtgctgaacatcccccacccctccgtcataagtagtcccttactcaaatccttacattctgccggtccgccactgctggccgtcacagctgcccctccagcacaacctttagcaaaaaaaaaaggagttaagaggaaggcggacacaaccacccccacacccaccgcgattctggcccctggatcacctgcctcaccgcctggatcactcgagccgaaggcagccagactcccaccaatgaggagggaatcaggcaggcccattaagcctccccgtaaggacttacctgactcacaacagcagcatcaatcatccaagaagggaaagctgtcagagcaactgaaacattgcaatgggatccttaaagagctactgtctaaaaaacacgccgcttacgcctggcccttctacaaacccgtggatgccagcgccctcgggttgcacgattaccacgatataattaaacatccaatggacctgtctacagtgaagcgcaaaatggaaaatcgagattatagggacgcacaggagttcgcagccgacgtcagactgatgttttcaaattgttacaaatataaccctccagatcacgatgtagtggccatggcccgaaagctccaggatgtgttcgaatttagatacgccaaaatgcctgatgaacctctggagcctggaccactgccggtgtctacggccatgccccctggtcttgcaaagagttcctctgagagcagctccgaggagagcagcagtgaatcctcttctgaggaagaggaggaggaagacgaggaagatgaggaggaggaggaatctgaatcgagtgacagcgaagaggagagagcccatagactggccgagctgcaggagcagttgcgcgcagtgcacgaacagctggcagcgctttcccagggcccaataagcaagcccaagcggaaacgcgagaaaaaagagaagaaaaaaaagcggaaggcagaaaaacatcggggaagggcaggagctgacgaggacgacaaaggcccaagggcacccaggcccccacaaccaaaaaagagcaaaaaggctagtggaagtgggggaggctctgctgcacttgggccttctggtttcggtccatccggtggcagcggcactaagctccccaaaaaagccactaagacagcgccacccgctctccctaccgggtacgacagcgaagaagaggaagaaagtcgccctatgtcctatgacgaaaaacgtcagctttccctggacattaacaaactgcctggcgaaaaacttggcagagtcgtccacattatccaggccagggagccatcattgagagattccaaccccgaagaaattgagattgactttgaaaccttgaagcctagcactttgcgcgaactggagagatacgtactgtcttgcctcagaaagaagccaaggaagccatacacaattaagaagcccgtgggtaagactaaagaagagcttgccttggagaaaaagcgggaactggagaagcgcttacaggacgtgtccggacaattgaatagcacaaagaaacccccaaaaaaagctaacgaaaagacggagagttctagcgcccaacaggtagccgtgagccgtctctctgccagttcgtccagctccgactcatccagcagttcttcctcctcgagtagctctgacacctcagatagtgattccggatag

SEQ ID NO: 77594 - DNA, 2265 bp, Artificial Sequence
  derived and/or modified sequence
atggcctcagtccccgctctccagcttacccctgccaatccgccaccacctgaagttagtaatcccaagaagccgggtcgggtgactaatcagttgcagtaccttcataaggtggtcatgaaggcactctggaagcaccaatttgcctggccattccggcagcccgtggacgctgtgaagttgggcctccctgactatcacaaaatcatcaaacaacccatggacatgggaacgattaagaggcggctggagaacaattactattgggctgcttcggagtgtatgcaagatttcaacactatgtttactaactgttacatttacaacaagccaaccgatgacatcgttctcatggcgcaaaccctggagaagattttcttacaaaaggtcgcgagcatgccacaagaggaacaggaactcgtggtgaccatcccaaagaacagccataagaagggcgctaaactcgcagccttgcagggctcagttacctcagcacatcaggtgcctgctgtaagttctgtgtcccataccgccctatatacgccaccccctgaaatcccaacaaccgtgttgaacatacctcacccatctgtgatctcatctccactactcaagtcgctccactctgccggaccaccgcttcttgctgttacagcagctcctccggctcagcctctggcaaaaaaaaaaggtgtgaagaggaaggcggacactacaaccccaacccctactgctattcttgcgccagggtcacctgcatctcctcctggatccttagagccaaaagccgctcgtttgcccccaatgcggcgagagagcggtcgccctattaagccaccaagaaaggaccttccagattcgcagcagcagcaccaatctagtaagaaaggaaaattgtctgaacagctaaagcactgtaatggaatcttaaaggagttactgagtaagaagcatgctgcctacgcatggccattttacaaacccgtggatgcaagcgcactcggtctgcacgactatcatgatataataaagcaccctatggacctcagtactgttaagcgtaagatggaaaaccgagattacagggatgcacaggaatttgcggcagatgtgcgcctgatgttcagtaattgctacaagtacaaccctcccgatcacgacgtggtggctatggccagaaaattacaggacgtctttgaattcaggtatgcaaagatgcctgacgaacccttagagccagggccattgccagtatcgacagcaatgccacccggtctagccaagtcctctagtgagtcttcaagcgaggagtcatcttctgagagcagttcagaggaggaagaagaggaggatgaagaagatgaagaagaagaggagtctgagtcgagtgactcagaggaggagagggcacaccgcctggcggagctgcaggaacagctcagagccgtccatgagcaactggctgcacttagtcagggtccgatttccaagcccaaaaggaagcgcgagaagaaagagaaaaaaaaaaaacgcaaggccgagaaacacaggggacgcgcaggggcagatgaggatgacaaggggccacgggctccacgccctccccaacccaagaagtccaaaaaagcatccggcagtggagggggaagcgcagccctcggcccaagcgggtttggtccttctggaggaagtggaaccaaactcccaaaaaaagcgacaaaaactgcacccccagccctcccaactggctacgacagcgaagaagaagaggagtcgagacccatgtcgtacgacgaaaaacgccagctatctttagacatcaacaaactgcctggtgagaaactgggacgtgtggtccacatcattcaagcgagagaaccttccctccgcgacagcaatcctgaagagattgagattgattttgagacacttaagccctccaccctgcgggaactggaacgctatgttttgagttgcctgcggaaaaagccaaggaagccgtataccatcaaaaagccagtcggaaaaactaaggaggagctggccctggagaaaaagagggaactcgagaagaggctgcaggacgtgtctggacaattaaattcaacgaagaaaccaccaaagaaggccaatgagaagactgagtctagcagcgctcagcaggtagccgtatcacgattgtccgccagctcttccagcagcgacagtagttccagttctagctcttcctcaagttcagacacgtctgacagcgatagcggctag

SEQ ID NO: 77595 - DNA, 2265 bp, Artificial Sequence
  derived and/or modified sequence
atggcaagcgtgcctgctttacagctcaccccagccaaccccccaccgcctgaagtgtccaatcccaaaaagccagggcgtgtgaccaatcaactgcaatacctgcacaaagttgtaatgaaagccttgtggaaacaccagttcgcgtggcccttccgacaaccagtggacgcggtgaagcttggattgcccgattatcataagatcatcaagcaaccaatggacatgggcaccattaagcgaaggttagagaacaactattattgggcggcatctgagtgcatgcaagactttaacactatgttcactaattgctacatttataataaacctactgatgatattgtcctgatggcccagactctcgagaagatctttcttcagaaagttgcctctatgcctcaggaagagcaagagctcgtggtgactattcctaagaactcccacaagaagggtgccaagctggctgctcttcagggttctgtaacctcagcacaccaggttccagctgtgtcttccgtgtctcacacagctctttatactccccctccggagatacccactacagtgttcaatatccctcaccctagtgtgataagtagtccccttctgaagtcactccacagtgccggtccacctctgctcgcagtgacagcggctcccccagctcagccgctagcgaaaaaaaagggcgtgaagcgcaaagctgacacaaccacacccactcctacagctattctcgcaccaggcagcccggctagcccacctggctccctggagcctaaggcggctcggctgccgccaatgaggagggagtcaggaagaccaatcaaaccccctcggaaagatcttcccgactctcaacagcaacaccagagtagcaagaaggggaagctgtctgaacagctgaagcactgcaatggaattctgaaagaactgctatctaaaaagcatgcagcatacgcgtggcctttttataaaccggtcgatgcatccgccttagggctgcatgactaccacgacataatcaaacatccgatggacttatcaaccgtcaagcgcaagatggaaaatcgcgactacagggacgcccaggagtttgccgctgacgtgcggctcatgttctcaaattgttacaaatataaccctccagatcatgacgtggtagcaatggcgaggaaattacaggacgtcttcgagtttcgctacgcaaagatgcctgatgagcccctggagccaggcccactgcccgtttcaactgccatgcctccgggactcgccaaaagcagcagcgagtcatcgagcgaagaatcctctagtgagtcctccagtgaagaggaggaggaagaggatgaggaagacgaagaggaagaggaatccgagtcatccgacagtgaggaagagagagcccatcgactcgctgaactgcaggaacaattgagggctgtccatgaacagctagcggcactctcacaagggcctattagcaaacctaaacgcaaaagagagaagaaagaaaaaaaaaagaaaagaaaggccgaaaaacatcggggaagggccggagccgatgaagacgataaggggcctagggcccctcgacctcctcagcccaagaaatccaagaaagccagcgggagcggcggaggatccgctgcactgggacctagcggtttcggcccatctggagggagcggtaccaaacttcccaagaaggctacaaagactgccccacccgctcttcctacaggatatgatagcgaggaggaagaggagagtcgtccgatgtcgtacgatgaaaaacggcagctgtccctggacattaacaagttgcccggtgaaaaactcggacgagtggtgcacatcattcaagcgcgtgaaccatcactcagggactcaaaccctgaagagatcgagatagatttcgaaactctgaaacccagtacattgcgggaactggagcgatacgtcctctcctgtctacggaagaaaccccgtaaaccatataccatcaaaaagcctgtgggaaagacaaaggaagagctggccctggagaaaaagagagaattggagaagcggcttcaagatgtctccgggcagttgaatagtacaaagaagccccctaagaaagctaacgaaaaaacagaatcttcgagtgcccagcaagttgctgtgagcaggctgtccgcgtcctccagctcatcagattcgagttcaagctcctccagcagttccagctccgataccagcgattccgacagcggttag

SEQ ID NO: 77596 - DNA, 2265 bp, Artificial Sequence
  derived and/or modified sequence
atggcatcagttcccgctctgcagctcacccccgcaaacccgccacctcctgaagtatctaatcccaagaaaccaggccgagtaaccaaccagctgcaatatctgcacaaagtcgtcatgaaagcactgtggaagcatcagttcgcatggccttttcggcagccagtcgatgccgtgaagttgggccttccagactatcataagattattaagcagccaatggacatgggcacaatcaagaggagactggagaataactactactgggcagccagtgaatgtatgcaggatttcaacactatgttcacgaactgttacatctacaataagcccacagatgacatcgttttgatggctcaaactctcgagaagatttttcttcagaaagtcgcatctatgcctcaagaggagcaagagctggtggttaccattcctaagaacagtcacaagaaaggcgctaaattagctgccctgcaaggcagcgtgacttctgcccatcaggtgccagccgtgtccagcgtgagtcacacagcactgtatacacctcctccagagatccctacaaccgttcttaatatcccccacccatcagttattagttcccctctgctgaagagtcttcatagcgccggacctcctctgctggccgtgaccgcagcaccacccgctcaaccactggcgaaaaagaagggagtaaaaagaaaggcggataccacaacgcccacccccacagcgatcctggccccagggtcccccgcttccccgcctggatccttggagccgaaagctgcgagactaccgcctatgcgaagagagagtgggaggcccatcaaacccccacgcaaggatctacctgactcccagcaacaacaccaatcttctaagaagggcaaactgtccgaacagctaaaacactgcaacggcatcctgaaggagttgctttccaagaaacatgcagcctacgcatggcccttttataagcctgtggacgcctcagctctggggctgcatgattaccatgacatcattaagcacccgatggaccttagcacagtgaagaggaagatggagaaccgtgattatagagacgcccaggagtttgccgctgatgtacgcctgatgttcagtaattgctacaaatacaaccctcctgaccacgacgtggtggccatggccagaaagctccaagacgtgttcgaattccgatacgccaagatgcctgatgaaccactggagcccggacctctgcctgtctcaacggcgatgccccctggactcgctaaatccagctctgaatcaagcagcgaggagtcgtcctccgagtcctccagcgaggaggaagaagaagaagatgaagaagacgaagaggaggaagagtccgagtcttccgactccgaggaggaacgcgcacaccggctggccgagcttcaagaacaactgcgggcagtgcacgagcagcttgctgccctctcgcagggacctataagcaagccaaagcgcaaacgcgagaagaaagaaaaaaagaagaaacgtaaggctgaaaagcacagggggagagcaggtgccgacgaggacgacaaagggccaagagccccacgtccaccacagcccaagaagtctaaaaaagccagcggaagcggtgggggtagcgcagctttgggcccaagtggctttgggccaagcggaggaagcggtacaaaactgcccaagaaagccactaagaccgctccccctgctctgccaaccggatatgattcggaggaggaggaggaaagtcggccaatgtcatatgacgaaaagaggcagctgtctctagacattaacaaactccctggtgaaaagttaggaagagttgtccacattatccaagcgagggagccttcattgcgggactccaatcccgaagagattgagatcgactttgaaacgctgaagccatctacactacgcgaacttgagcgctacgtgttaagctgtcttcgaaaaaaacctcggaaaccttatacaattaaaaaacccgttggaaaaaccaaagaagaattggctctggaaaaaaagcgggagcttgaaaagagactacaggacgtaagcggacaactcaattcaaccaaaaaaccgcctaagaaggccaacgagaaaacggagtcaagctctgcgcagcaggtggcagtctcccgcctaagcgcttcaagttctagctccgacagtagttcctctagttcctcttcctcatcttctgacacttctgatagcgacagtgggtag

SEQ ID NO: 77597 - DNA, 2265 bp, Artificial Sequence
  derived and/or modified sequence
atggcgtccgtgcccgctctgcagctgaccccggctaatccaccaccacctgaggtgtccaatcctaagaagccgggtcgggtcacaaaccaactccagtatttgcacaaggtggtgatgaaggcattatggaagcaccagtttgcctggcctttcagacagccagtggacgccgtcaaactgggactgccagattaccataaaatcatcaagcagcccatggacatgggaaccattaaacgcagattggaaaataactattattgggcggcaagtgagtgtatgcaggactttaacaccatgttcacaaactgctatatctataataagccaaccgatgacatcgtgctcatggcccaaactctggaaaaaatctttctgcaaaaggtcgcttcaatgccacaggaagagcaggagctcgtcgtgacaatccctaagaacagtcacaaaaaaggggcaaagcttgctgccctgcagggatccgtaactagtgcacaccaggtacctgccgtgagctcggtatctcacaccgcactgtacactccccctcctgaaataccgacgaccgtcttgaatatcccacatcccagtgttatctctagccctctgcttaagtctttgcactccgccggacctccactgctggccgtcactgcggcaccccctgcccagcccttggcgaagaagaaaggcgtaaagagaaaggccgataccacaactccaacacctaccgccatcctggcgccaggtagccccgcttcccctcctggtagcctggagccaaaagcagccaggctgcctcctatgagacgagaaagcggaaggcctataaagccaccgcgaaaggatctgccagacagccaacagcagcatcagtccagtaagaaaggcaaactgagtgaacaactgaaacattgtaatggaattctcaaagagctactatctaagaaacacgcggcttacgcctggccattttataagcctgtggatgcctctgctctagggctgcatgactaccatgacattataaaacacccaatggacctgtcgactgtcaagcgcaagatggagaatcgcgactacagggacgcccaggaatttgccgcagacgtgcgattaatgttcagcaattgctacaagtataacccgcctgatcacgacgtggtcgccatggcacgaaagctgcaggatgtctttgagttcagatacgcaaaaatgccagacgagcctttagaaccgggaccactccccgtttcaacggcgatgccacccggattagcgaagtccagttcggagtcctctagcgaagagtccagtagtgaaagctcctcagaagaggaagaggaggaggatgaagaggatgaagaggaggaagagtccgagtcttccgattccgaagaggagcgggcacatcggctcgccgagctacaggagcaacttagggcagtgcacgagcaactcgcggcactttctcagggaccaatctccaaacccaagcgaaaaagggagaagaaggagaagaaaaaaaagcgtaaggccgagaagcatagaggacgcgctggagcggacgaagatgacaaaggccctcgggctcctcgacccccacagcccaaaaagtccaagaaggcttcaggctctggagggggaagtgcagcccttggaccaagcggcttcggcccttctgggggatcaggaacgaaactgcccaaaaaggcgactaagacagcccctcctgcactccctacagggtatgacagcgaggaagaggaggaatctcgccctatgtcttacgacgagaagcggcagctctccctagatattaacaaactgccaggagagaaactgggacgcgtggtgcacatcatacaggcacgagaaccgtcactccgggactcgaaccccgaggagatcgagatcgactttgagactctcaaaccatccactctacgagagttggaacggtacgttcttagttgtctgaggaaaaaaccccgtaaaccctatacaattaaaaaacctgtaggcaagacaaaggaggagctggcactggaaaaaaaacgtgaactcgagaagaggctacaagatgtgtctggacagcttaacagcaccaagaaacccccaaaaaaagcaaatgaaaagaccgagagctcttccgcacagcaggtcgccgtttctaggctgtcagcatctagctcctctagcgactcatccagctcaagcagtagcagttcttcttccgacacatccgacagcgacagtggatag

SEQ ID NO: 77598 - DNA, 4637 bp, Artificial Sequence
  derived and/or modified sequence
accgatggaccagccgctccgtggggaggactccggaccctggtgggggggcgggggggttctttcgcccccgtggcggagggcccctgagaggcggatacgggtgtgcctttgggggtgatgtggcgtgtggggggaaaggtccgagctcgcctggagggggagggtttttcccttaagtcatccctcccaggacttgctttttctgctctgagccggacgccggaatggagtttgaggaagagattcttcgctgctgctgccttaccgccgagaaccaccacccgccaggcgtcttgcggccacacccctggcgggttcaggcaggctacgcccacgcgacccctcccgtttccctgctttggccaatggaggagctacgaatggcacgacctgctcgagcttggcagtctccagttgggctgtgcatggaagcttgggaagactttgttggaaggggaggcggggagagagtgctggaggctctggggcgatggcttccgcacctcttccaaccaccctctttccctggagtcggcggaccacagctcagccaattggcttggagatgtggcgggttgccacttccctgtgggtctctgcggcactcttctgcctggtgactgacaccttggaaatgaagtttatgacgtcatcgttgcggctggccaatagaaaaagctcccgcggagaggtgttccttccccttcgactcagcttcttcacccgcgtgagcgagcgcgcgcgcgcggagggggtggggaaaagctcaagcagggtggcgcgcatgagcggcgaagctcctcctccccgcctatatataaagggctggcgcggggctcggcggcgccatttcgtgctggagtggagcagcctctagaacgagctggaggattctgcctaccgatacagagccttcgagtcgtccggggccgccattacaatccacctccatccgcttggaaatggccttcgtcccggcctatgactggtcccagcgggcagtacagaccccctagaagcccctggagctcccctttttcgggccccgcccaatcctcggagtctgtccaccccctctactccgccctcaagaggatttcaaagatggaggcggcggctccctaaaccacttttcgtgttcatccgcctccatccgagatcgaaacgggacctcgtcggccccgtaggggcccgacaagaagagggaatccctgcagaccaacagcgggctatattgacgacggtgtctgagatcggggaccgtcttttgaagagtcagtccctccttagttgcccgcctcagctgaggccgccgccattttcttgctgtccgccgtctgcagagcgcgccaagctgcccggagctctccgagaggccccaaagagactgctttcgtgccggccaggcagggggtttgtcgcctggaggcccaagaggaacggcctccccccaacttagcgggttatgctggaccgggcggtgaggggaaccgaggccacccggactttccgcggctgagggcagcgccggttccttgcggtcaagatgctgcaaaacgtgactccccacaataagctccctggggaagggaatgcagggttgctggggctgggcccagaagcagcagcaccagggaagaggattcgaaaaccctctctcttgtatgagggctttgagagccccacaatggcttcggtgcctgctttgcaacttacccctgccaacccaccacccccggaggtgtccaatcccaaaaagccaggacgagttaccaaccagctgcaatacctacacaaggtagtgatgaaggctctgtggaaacatcagttcgcatggccattccggcagcctgtggatgctgtcaaactgggtctaccgattcccacctcgggttgggagaggaccacggtggccaaaattcttagcttcttcctttccctcatgcagcccatggatagccagccccagaggattatcacaaaattataaaacagcctatggacatgggtactattaagaggagacttgaaaacaattattattgggctgcttcagagtgtatgcaagattttaataccatgttcaccaactgttacatttacaacaagcccactgatgatattgtcctaatggcacaaacgctggaaaagatattcctacagaaggttgcatcaatgccacaagaagaacaagagctggtagtgaccatccctaagaacagccacaagaagggggccaagttggcagcgctccagggcagtgttaccagtgcccatcaggtgcctgccgtctcttctgtgtcacacacagccctgtatactcctccacctgagatacctaccactgtcctcaacattccccacccatcagtcatttcctctccacttctcaagtccttgcactctgctggacccccgctccttgctgttactgcagctcctccagcccagccccttgccaagaaaaaaggcgtaaagcggaaagcagatactaccacccctacacctacagccatcttggctcctggttctccagctagccctcctgggagtcttgagcctaaggcagcacggcttccccctatgcgtagagagagtggtcgccccatcaagcccccacgcaaagacttgcctgactctcagcaacaacaccagagctctaagaaaggaaagctttcagaacagttaaaacattgcaatggcattttgaaggagttactctctaagaagcatgctgcctatgcttggcctttctataaaccagtggatgcttctgcacttggcctgcatgactaccatgacatcattaagcaccccatggacctcagcactgtcaagcggaagatggagaaccgtgattaccgggatgcacaggagtttgctgctgatgtacggcttatgttctccaactgctataagtacaatcccccagatcacgatgttgtggcaatggcacgaaagctacaggatgtatttgagttccgttatgccaagatgccagatgaaccactagaaccagggcctttaccagtctctactgccatgccccctggcttggccaaatcgtcttcagagtcctccagtgaggaaagtagcagtgagagctcctctgaggaagaggaggaggaagatgaggaggacgaggaggaagaagagagtgaaagctcagactcagaggaagaaagggctcatcgcttagcagaactacaggaacagcttcgggcagtacatgaacaactggctgctctgtcccagggtccaatatccaagcccaagaggaaaagagagaaaaaagagaaaaagaagaaacggaaggcagagaagcatcgaggccgagctggggccgatgaagatgacaaggggcctagggcaccccgcccacctcaacctaagaagtccaagaaagcaagtggcagtgggggtggcagtgctgctttaggcccttctggctttggaccttctggaggaagtggcaccaagctccccaaaaaggccacaaagacagccccacctgccctgcctacaggttatgattcagaggaggaggaagagagcaggcccatgagttacgatgagaagcggcagctgagcctggacatcaacaaattacctggggagaagctgggccgagttgtgcatataatccaagccagggagccctctttacgtgattcaaacccagaagagattgagattgattttgaaacactcaagccatccacacttagagagcttgagcgctatgtcctttcctgcctacgtaagaaaccccggaagccctacaccattaagaagcctgtgggaaagacaaaggaggaactggctttggagaaaaagcgggaattagaaaagcggttacaagatgtcagcggacagctcaattctactaaaaagccccccaagaaagcgaatgagaaaacagagtcatcctctgcacagcaagtagcagtgtcacgccttagcgcttccagctccagctcagattccagctcctcctcttcctcgtcgtcgtcttcagacaccagtgattcagactcaggctaaggggtcaggccagatggggcaggaaggctccgcaggaccggacccctagaccaccctgccccacctgccccttccccctttgctgtgacacttcttcatctcacccccccccgcccccctctaggagagctggctctgcagtgggggagggatgcagggacatttactgaaggagggacatggacaaaacaacattgaattcccagccccattggggagtgatctcttggacacagagcccccattcaaaatggggcagggcaagggtgggagtgtgcaaagccctgatctggagttacctgaggccacagctgccctattcacttctaagggccctgttttgagattgtttgttctaatttattttaagctaggtaaggctggggggagggtggggccgtggtcccctcagcctccatggggagggaagaagggggagctctttttttacgttgatttttttttttctactctgttttccctttttccttccgctccatttggggccctgggggtttcagtcatctccccatttggtcccctggactgtctttgttgattctaacttgtaaataaagaaaatattattc

SEQ ID NO: 77599 - DNA, 4637 bp, Artificial Sequence
  derived and/or modified sequence
accgatggaccagccgctccgtggggaggactccggaccctggtgggggggcgggggggttctttcgcccccgtggcggagggcccctgagaggcggatacgggtgtgcctttgggggtgatgtggcgtgtggggggaaaggtccgagctcgcctggagggggagggtttttcccttaagtcatccctcccaggacttgctttttctgctctgagccggacgccggaatggagtttgaggaagagattcttcgctgctgctgccttaccgccgagaaccaccacccgccaggcgtcttgcggccacacccctggcgggttcaggcaggctacgcccacgcgacccctcccgtttccctgctttggccaatggaggagctacgaatggcacgacctgctcgagcttggcagtctccagttgggctgtgcatggaagcttgggaagactttgttggaaggggaggcggggagagagtgctggaggctctggggcgatggcttccgcacctcttccaaccaccctctttccctggagtcggcggaccacagctcagccaattggcttggagatgtggcgggttgccacttccctgtgggtctctgcggcactcttctgcctggtgactgacaccttggaaatgaagtttatgacgtcatcgttgcggctggccaatagaaaaagctcccgcggagaggtgttccttccccttcgactcagcttcttcacccgcgtgagcgagcgcgcgcgcgcggagggggtggggaaaatctcaagcagggtggcgcgcatgagcggcgaagctcctcctccccgcctatatataaagggctggcgcggggctcggcggcgccatttcgtgctggagtggagcagcctctagaacgagctggaggattctgcctaccgatacagagccttcgagtcgtccggggccgccattacaatccacctccatccgcttggaaatggccttcgtcccggcctatgactggtcccagcgggcagtacagaccccctagaagcccctggagctcccctttttcgggccccgcccaatcctcggagtctgtccaccccctctactccgccctcaagaggatttcaaagatggaggcggcggctccctaaaccacttttcgtgttcatccgcctccatccgagatcgaaacgggacctcgtcggccccgtaggggcccgacaagaagagggaatccctgcagaccaacagcgggctatattgacgacggtgtctgagatcggggaccgtcttttgaagagtcagtccctccttagttgcccgcctcagctgaggccgccgccattttcttgctgtccgccgtctgcagagcgcgccaagctgcccggagctctccgagaggccccaaagagactgctttcgtgccggccaggcagggggtttgtcgcctggaggcccaagaggaacggcctccccccaacttagcgggttatgctggaccgggcggtgaggggaaccgaggccacccggactttccgcggctgagggcagcgccggttccttgcggtcaagatgctgcaaaacgtgactccccacaataagctccctggggaagggaatgcagggttgctggggctgggcccagaagcagcagcaccagggaaaaggattcgaaaaccctctctcttgtatgagggctttgagagccccacaatggcttcggtgcctgctttgcaacttacccctgccaacccaccacccccggaggtgtccaatcccaaaaagccaggacgagttaccaaccagctgcaatacctacacaaggtagtgatgaaggctctgtggaaacatcagttcgcatggccattccggcagcctgtggatgctgtcaaactgggtctaccgattcccacctcgggttgggagaggaccacggtggccaaaattcttagcttcttcctttccctcatgcagcccatggatagccagccccagaggattatcacaaaattataaaacagcctatggacatgggtactattaagaggagacttgaaaacaattattattgggctgcttcagagtgtatgcaagattttaataccatgttcaccaactgttacatttacaacaagcccactgatgatattgtcctaatggcacaaacgctggaaaagatattcctacagaaggttgcatcaatgccacaagaagaacaagagctggtagtgaccatccctaagaacagccacaagaagggggccaagttggcagcgctccagggcagtgttaccagtgcccatcaggtgcctgccgtctcttctgtgtcacacacagccctgtatactcctccacctgagatacctaccactgtcttcaacattccccacccatcagtcatttcctctccacttctcaagtccttgcactctgctggacccccgctccttgctgttactgcagctcctccagcccagccccttgccaagaaaaaaggcgtaaagcggaaagcagatactaccacccctacacctacagccatcttggctcctggttctccagctagccctcctgggagtcttgagcctaaggcagcacggcttccccctatgcgtagagagagtggtcgccccatcaagcccccacgcaaagacttgcctgactctcagcaacaacaccagagctctaagaaaggaaagctttcagaacagttaaaacattgcaatggcattttgaaggagttactctctaagaagcatgctgcctatgcttggcctttctataaaccagtggatgcttctgcacttggcctgcatgactaccatgacatcattaagcaccccatggacctcagcactgtcaagcggaagatggagaaccgtgattaccgggatgcacaggagtttgctgctgatgtacggcttatgttctccaactgctataagtacaatcccccagatcacgatgttgtggcaatggcacgaaagctacaggatgtatttgagttccgttatgccaagatgccagatgaaccactagaaccagggcctttaccagtctctactgccatgccccctggcttggccaaatcgtcttcagagtcctccagtgaggaaagtagcagtgagagctcctctgaggaagaggaggaggaagatgaggaggacgaggaggaagaagagagtgaaagctcagactcagaggaagaaagggctcatcgcttagcagaactacaggaacagcttcgggcagtacatgaacaactggctgctctgtcccagggtccaatatccaagcccaagaggaaaagagagaaaaaagagaaaaagaagaaacggaaggcagagaagcatcgaggccgagctggggccgatgaagatgacaaggggcctagggcaccccgcccacctcaacctaagaagtccaagaaagcaagtggcagtgggggtggcagtgctgctttaggcccttccggctttggaccttctggaggaagtggcaccaagctccccaaaaaggccacaaagacagccccacctgccctgcctacaggttatgattcagaggaggaggaagagagcaggcccatgagttacgatgagaagcggcagctgagcctggacatcaacaaattacctggggagaagctgggccgagttgtgcatataatccaagccagggagccctctttacgtgattcaaacccagaagagattgagattgattttgaaacactcaagccatccacacttagagagcttgagcgctatgtcctttcctgcctacgtaagaaaccccggaagccctacaccattaagaagcctgtgggaaagacaaaggaggaactggctttggagaaaaagcgggaattagaaaagcggttacaagatgtcagcggacagctcaattctactaaaaagccccccaagaaagcgaatgagaaaacagagtcatcctctgcacagcaagtagcagtgtcacgccttagcgcttccagctccagctcagattccagctcctcctcttcctcgtcgtcgtcttcagacaccagtgattcagactcaggctaaggggtcaggccagatggggcaggaaggctccgcaggaccggacccctagaccaccctgccccacctgccccttccccctttgctgtgacacttcttcatctcacccccccctgcccccctctaggagagctggctctgcagtgggggagggatgcagggacatttactgaaggagggacatggacaaaacaacattgaattcccagccccattggggagtgatctcttggacacagagcccccattcaaaatggggcagggcaagggtgggagtgtgcaaagccctgatctggagttacctgaggccatagctgccctattcacttctaagggccctgttttgagattgtttgttctaatttattttaagctaggtaaggctggggggagggtggggccgtggtcccctcagcctccatggggagggaagaagggggagctctttttttacgttgatttttttttttctactctgttttccctttttccttccgctccatttggggccctgggggtttcagtcatctccccatttggtcccctggactgtctttgttgattctaacttgtaaataaagaaaatattattc

SEQ ID NO: 77600 - DNA, 4637 bp, Artificial Sequence
  derived and/or modified sequence
accgatggaccagccgctccgtggggaggactccggaccctggtgggggggcgggggggttctttcgcccccgtggcggagggcccctgagaggcggatacgggtgtgcctttgggggtgatgtggcgtgtggggggaaaggtccgagctcgcctggagggggagggtttttcccttaagtcatccctcccaggacttgctttttctgctctgagccggacgccggaatggagtttgaggaagagattcttcgctgctgctgccttaccgccgagaaccaccacccgccaggcgtcttgcggccacacccctggcgggttcaggcaggctacgcccacgcgacccctcccgtttccctgctttggccaatggaggagctacgaatggcacgacctgctcgagcttggcagtctccagttgggctgtgcatggaagcttgggaagactttgttggaaggggaggcggggagagagtgctggaggctctggggcgatggcttccgcacctcttccaaccaccctctttccctggagtcggcggaccacagctcagccaattggcttggagatgtggcgggttgccacttccctgtgggtctctgcggcactcttctgcctggtgactgacaccttggaaatgaagtttatgacgtcatcgttgcggctggccaatagaaaaagctcccgcggagaggtgttccttccccttcgactcagcttcttcacccgcgtgagcgagcgcgcgcgcgcggagggggtggggaaaatctcaagcagggtggcgcgcatgagcggcgaagctcctcctccccgcctatatataaagggctggcgcggggctcggcggcgccatttcgtgctggagtggagcagcctctagaacgagctggaggattctgcctaccgatacagagccttcgagtcgtccggggccgccattacaatccacctccatccgcttggaaatggccttcgtcccggcctatgactggtcccagcgggcagtacagaccccctagaagcccctggagctcccctttttcgggccccgcccaatcctcggagtctgtccaccccctctactccgccctcaagaggatttcaaagatggaggcggcggctccctaaaccacttttcgtgttcatccgcctccatccgagatcgaaacgggacctcgtcggccccgtaggggcccgacaagaagagggaatccctgcagaccaacagcgggctatattgacgacggtgtctgagatcggggaccgtcttttgaagagtcagtccctccttagttgcccgcctcagctgaggccgccgccattttcttgctgtccgccgtctgcagagcgcgccaagctgcccggagctctccgagaggccccaaagagactgctttcgtgccggccaggcagggggtttgtcgcctggaggcccaagaggaacggcctccccccaacttagcgggttatgctggaccgggcggtgaggggaaccgaggccacccggactttccgcggctgagggcagcgccggttccttgcggtcaagatgctgcaaaacgtgactccccacaataagctccctggggaagggaatgcagggttgctggggctgggcccagaagcagcagcaccagggaaaaggattcgaaaaccctctctcttgtatgagggctttgagagccccacaatggcttcggtgcctgctttgcaacttacccctgccaacccaccacccccggaggtgtccaatcccaaaaagccaggacgagttaccaaccagctgcaatacctacacaaggtagtgatgaaggctctgtggaaacatcagttcgcatggccattccggcagcctgtggatgctgtcaaactgggtctaccgattcccacctcgggttgggagaggaccacggtggccaaaattcttagcttcttcctttccctcatgcagcccatggatagccagccccagaggattatcacaaaattataaaacagcctatggacatgggtactattaagaggagacttgaaaacaattattattgggctgcttcagagtgtatgcaagattttaataccatgttcaccaactgttacatttacaacaagcccactgatgatattgtcctaatggcacaaacgctggaaaagatattcctacagaaggttgcatcaatgccacaagaagaacaagagctggtagtgaccatccctaagaacagccacaagaagggggccaagttggcagcgctccagggcagtgttaccagtgcccatcaggtgcctgccgtctcttctgtgtcacacacagccctgtatactcctccacctgagatacctaccactgtcctcaacattccccacccatcagtcatttcctctccacttctcaagtccttgcactctgctggacccccgctccttgctgttactgcagctcctccagcccagccccttgccaagaaaaaaggcgtaaagcggaaagcagatactaccacccctacacctacagccatcttggctcctggttctccagctagccctcctgggagtcttgagcctaaggcagcacggcttccccctatgcgtagagagagtggtcgccccatcaagcccccacgcaaagacttgcctgactctcagcaacaacaccagagctctaagaaaggaaagctttcagaacagttaaaacattgcaatggcattttgaaggagttactctctaagaagcatgctgcctatgcttggcctttctataaaccagtggatgcttctgcacttggcctgcatgactaccatgacatcattaagcaccccatggacctcagcactgtcaagcggaagatggagaaccgtgattaccgggatgcacaggagtttgctgctgatgtacggcttatgttctccaactgctataagtacaatcccccagatcacgatgttgtggcaatggcacgaaagctacaggatgtatttgagttccgttatgccaagatgccagatgaaccactagaaccagggcctttaccagtctctactgccatgccccctggcttggccaaatcgtcttcagagtcctccagtgaggaaagtagcagtgagagctcctctgaggaagaggaggaggaagatgaggaggacgaggaggaagaagagagtgaaagctcagactcagaggaagaaagggctcatcgcttagcagaactacaggaacagcttcgggcagtacatgaacaactggctgctctgtcccagggtccaatatccaagcccaagaggaaaagagagaaaaaagagaaaaagaagaaacggaaggcagagaagcatcgaggccgagctggggccgatgaagatgacaaggggcctagggcaccccgcccacctcaacctaagaagtccaagaaagcaagtggcagtgggggtggcagtgctgctttaggcccttctggctttggaccttctggaggaagtggcaccaagctccccaaaaaggccacaaagacagccccacctgccctgcctacaggttatgattcagaggaggaggaagagagcaggcccatgagttacgatgagaagcggcagctgagcctggacatcaacaaattacctggggagaagctgggccgagttgtgcatataatccaagccagggagccctctttacgtgattcaaacccagaagagattgagattgattttgaaacactcaagccatccacacttagagagcttgagcgctatgtcctttcctgcctacgtaagaaaccccggaagccctacaccattaagaagcctgtgggaaagacaaaggaggaactggctttggagaaaaagcgggaattagaaaagcggttacaagatgtcagcggacagctcaattctactaaaaagccccccaagaaagcgaatgagaaaacagagtcatcctctgcacagcaagtagcagtgtcacgccttagcgcttccagctccagctcagattccagctcctcctcttcctcgtcgtcgtcttcagacaccagtgattcagactcaggctaaggggtcaggccagatggggcaggaaggctccgcaggaccggacccctagaccaccctgccccacctgccccttccccctttgctgtgacacttcttcatctcacccccccctgcccccctctaggagagctggctctgcagtgggggagggatgcagggacatttactgaaggagggacatggacaaaacaacattgaattcccagccccattggggagtgatctcttggacacagagcccccattcaaaatggggcagggcaagggtgggagtgtgcaaagccctgatctggagttacctgaggccatagctgccctattcacttctaagggccctgttttgagattgtttgttctaatttattttaagctaggtaaggctggggggagggtggggccgtggtcccctcagcctccatggggagggaagaagggggagctctttttttacgttgatttttttttttctactctgttttccctttttccttccgctccatttggggccctgggggtttcagtcatctccccatttggtcccctggactgtctttgttgattctaacttgtaaataaagaaaatattattc

SEQ ID NO: 77601 - DNA, 4637 bp, Artificial Sequence
  derived and/or modified sequence
accgatggaccagccgctccgtggggaggactccggaccctggtgggggggcgggggggttctttcgcccccgtggcggagggcccctgagaggcggatacgggtgtgcctttgggggtgatgtggcgtgtggggggaaaggtccgagctcgcctggagggggagggtttttcccttaagtcatccctcccaggacttgctttttctgctctgagccggacgccggaatggagtttgaggaagagattcttcgctgctgctgccttaccgccgagaaccaccacccgccaggcgtcttgcggccacacccctggcgggttcaggcaggctacgcccacgcgacccctcccgtttccctgctttggccaatggaggagctacgaatggcacgacctgctcgagcttggcagtctccagttgggctgtgcatggaagcttgggaagactttgttggaaggggaggcggggagagagtgctggaggctctggggcgatggcttccgcacctcttccaaccaccctctttccctggagtcggcggaccacagctcagccaattggcttggagatgtggcgggttgccacttccctgtgggtctctgcggcactcttctgcctggtgactgacaccttggaaatgaagtttatgacgtcatcgttgcggctggccaatagaaaaagctcccgcggagaggtgttccttccccttcgactcagcttcttcacccgcgtgagcgagcgcgcgcgcgcggagggggtggggaaaatctcaagcagggtggcgcgcatgagcggcgaagctcctcctccccgcctatatataaagggctggcgcggggctcggcggcgccatttcgtgctggagtggagcagcctctagaacgagctggaggattctgcctaccgatacagagccttcgagtcgtccggggccgccattacaatccacctccatccgcttggaaatggccttcgtcccggcctatgactggtcccagcgggcagtacagaccccctagaagcccctggagctcccctttttcgggccccgcccaatcctcggagtctgtccaccccctctactccgccctcaagaggatttcaaagatggaggcggcggctccctaaaccacttttcgtgttcatccgcctccatccgagatcgaaacgggacctcgtcggccccgtaggggcccgacaagaagagggaatccctgcagaccaacagcgggctatattgacgacggtgtctgagatcggggaccgtcttttgaagagtcagtccctccttagttgcccgcctcagctgaggccgccgccattttcttgctgtccgccgtctgcagagcgcgccaagctgcccggagctctccgagaggccccaaagagactgctttcgtgccggccaggcagggggtttgtcgcctggaggcccaagaggaacggcctccccccaacttagcgggttatgctggaccgggcggtgaggggaaccgaggccacccggactttccgcggctgagggcagcgccggttccttgcggtcaagatgctgcaaaacgtgactccccacaataagctccctggggaagggaatgcagggttgctggggctgggcccagaagcagcagcaccagggaagaggattcgaaaaccctctctcttgtatgagggctttgagagccccacaatggcttcggtgcctgctttgcaacttacccctgccaacccaccacccccggaggtgtccaatcccaaaaagccaggacgagttaccaaccagctgcaatacctacacaaggtagtgatgaaggctctgtggaaacatcagttcgcatggccattccggcagcctgtggatgctgtcaaactgggtctaccgattcccacctcgggttgggagaggaccacggtggccaaaattcttagcttcttcctttccctcatgcagcccatggatagccagccccagaggattatcacaaaattataaaacagcctatggacatgggtactattaagaggagacttgaaaacaattattattgggctgcttcagagtgtatgcaagattttaataccatgttcaccaactgttacatttacaacaagcccactgatgatattgtcctaatggcacaaacgctggaaaagatattcctacagaaggttgcatcaatgccacaagaagaacaagagctggtagtgaccatccctaagaacagccacaagaagggggccaagttggcagcgctccagggcagtgttaccagtgcccatcaggtgcctgccgtctcttctgtgtcacacacagccctctatactcctccacctgagatacctaccactgtcctcaacattccccacccatcagtcatttcctctccacttctcaagtccttgcactctgctggacccccgctccttgctgttactgcagctcctccagcccagccccttgccaagaaaaaaggcgtaaagcggaaagcagatactaccacccctacacctacagccatcttggctcctggttctccagctagccctcctgggagtcttgagcctaaggcagcacggcttccccctatgcgtagagagagtggtcgccccatcaagcccccacgcaaagacttgcctgactctcagcaacaacaccagagctctaagaaaggaaagctttcagaacagttaaaacattgcaatggcattttgaaggagttactctctaagaagcatgctgcctatgcttggcctttctataaaccagtggatgcttctgcacttggcctgcatgactaccatgacatcattaagcaccccatggacctcagcactgtcaagcggaagatggagaaccgtgattaccgggatgcacaggagtttgctgctgatgtacggcttatgttctccaactgctataagtacaatcccccagatcacgatgttgtggcaatggcacgaaagctacaggatgtatttgagttccgttatgccaagatgccagatgaaccactagaaccagggcctttaccagtctctactgccatgccccctggcttggccaaatcgtcttcagagtcctccagtgaggaaagtagcagtgagagctcctctgaggaagaggaggaggaagatgaggaggacgaggaggaagaagagagtgaaagctcagactcagaggaagaaagggctcatcgcttagcagaactacaggaacagcttcgggcagtacatgaacaactggctgctctgtcccagggtccaatatccaagcccaagaggaaaagagagaaaaaagagaaaaagaagaaacggaaggcagagaagcatcgaggccgagctggggccgatgaagatgacaaggggcctagggcaccccgcccacctcaacctaagaagtccaagaaagcaagtggcagtgggggtggcagtgctgctttaggcccttctggctttggaccttctggaggaagtggcaccaagctccccaaaaaggccacaaagacagccccacctgccctgcctacaggttatgattcagaggaggaggaagagagcaggcccatgagttacgatgagaagcggcagctgagcctggacatcaacaaattacctggggagaagctgggccgagttgtgcatataatccaagccagggagccctctttacgtgattcaaacccagaagagattgagattgattttgaaacactcaagccatccacacttagagagcttgagcgctatgtcctttcctgcctacgtaagaaaccccggaagccctacaccattaagaagcctgtgggaaagacaaaggaggaactggctttggagaaaaagcgggaattagaaaagcggttacaagatgtcagcggacagctcaattctactaaaaagccccccaagaaagcgaatgagaaaacagagtcatcctctgcacagcaagtagcagtgtcacgccttagcgcttccagctctagctcagattccagctcctcctcttcctcgtcgtcgtcttcagacaccagtgattcagactcaggctaaggggtcaggccagatggggcaggaaggctccgcaggaccggacccctagaccaccctgccccacctgccccttccccctttgctgtgacacttcttcatctcacccccccctgcccccctctaggagagctggctctgcagtgggggagggatgcagggacatttactgaaggagggacatggacaaaacaacattgaattcccagccccattggggagtgatctcttggacacagagcccccattcaaaatggggcagggcaagggtgggagtgtgcaaagccctgatctggagttacctgaggccatagctgccctattcacttctaagggccctgttttgagattgtttgttctaatttattttaagctaggtaaggctggggggagggtggggccgtggtcccctcagcctccatggggagggaagaagggggagctctttttttacgttgatttttttttttctactctgttttccctttttccttccgctccatttggggccctgggggtttcagtcatctccccatttggtcccctggactgtctttgttgattctaacttgtaaataaagaaaatattattc

SEQ ID NO: 77602 - DNA, 2265 bp, Artificial Sequence
  derived and/or modified sequence
atggccagcgtgcccgccctgcagctgacccccgccaacccccccccccccgaggtgagcaaccccaagaagcccggcagagtgaccaaccagctgcagtacctgcacaaggtggtgatgaaggccctgtggaagcaccagttcgcctggcccttcagacagcccgtggacgccgtgaagctgggcctgcccgactaccacaagatcatcaagcagcccatggacatgggcaccatcaagagaagactggagaacaactactactgggccgccagcgagtgcatgcaggacttcaacaccatgttcaccaactgctacatctacaacaagcccaccgacgacatcgtgctgatggcccagaccctggagaagatcttcctgcagaaggtggccagcatgccccaggaggagcaggagctggtggtgaccatccccaagaacagccacaagaagggcgccaagctggccgccctgcagggcagcgtgaccagcgcccaccaggtgcccgccgtgagcagcgtgagccacaccgccctgtacacccccccccccgagatccccaccaccgtgctgaacatcccccaccccagcgtgatcagcagccccctgctgaagagcctgcacagcgccggcccccccctgctggccgtgaccgccgccccccccgcccagcccctggccaagaagaagggcgtgaagagaaaggccgacaccaccacccccacccccaccgccatcctggcccccggcagccccgccagcccccccggcagcctggagcccaaggccgccagactgccccccatgagaagagagagcggcagacccatcaagccccccagaaaggacctgcccgacagccagcagcagcaccagagcagcaagaagggcaagctgagcgagcagctgaagcactgcaacggcatcctgaaggagctgctgagcaagaagcacgccgcctacgcctggcccttctacaagcccgtggacgccagcgccctgggcctgcacgactaccacgacatcatcaagcaccccatggacctgagcaccgtgaagagaaagatggagaacagagactacagagacgcccaggagttcgccgccgacgtgagactgatgttcagcaactgctacaagtacaacccccccgaccacgacgtggtggccatggccagaaagctgcaggacgtgttcgagttcagatacgccaagatgcccgacgagcccctggagcccggccccctgcccgtgagcaccgccatgccccccggcctggccaagagcagcagcgagagcagcagcgaggagagcagcagcgagagcagcagcgaggaggaggaggaggaggacgaggaggacgaggaggaggaggagagcgagagcagcgacagcgaggaggagagagcccacagactggccgagctgcaggagcagctgagagccgtgcacgagcagctggccgccctgagccagggccccatcagcaagcccaagagaaagagagagaagaaggagaagaagaagaagagaaaggccgagaagcacagaggcagagccggcgccgacgaggacgacaagggccccagagcccccagacccccccagcccaagaagagcaagaaggccagcggcagcggcggcggcagcgccgccctgggccccagcggcttcggccccagcggcggcagcggcaccaagctgcccaagaaggccaccaagaccgccccccccgccctgcccaccggctacgacagcgaggaggaggaggagagcagacccatgagctacgacgagaagagacagctgagcctggacatcaacaagctgcccggcgagaagctgggcagagtggtgcacatcatccaggccagagagcccagcctgagagacagcaaccccgaggagatcgagatcgacttcgagaccctgaagcccagcaccctgagagagctggagagatacgtgctgagctgcctgagaaagaagcccagaaagccctacaccatcaagaagcccgtgggcaagaccaaggaggagctggccctggagaagaagagagagctggagaagagactgcaggacgtgagcggccagctgaacagcaccaagaagccccccaagaaggccaacgagaagaccgagagcagcagcgcccagcaggtggccgtgagcagactgagcgccagcagcagcagcagcgacagcagcagcagcagcagcagcagcagcagcagcgacaccagcgacagcgacagcggctag

SEQ ID NO: 77603 - DNA, 2265 bp, Artificial Sequence
  derived and/or modified sequence
atggccagcgtgcccgccctgcagctgacccccgccaacccccccccccccgaggtgagcaaccccaagaagcccggcagagtgaccaaccagctgcagtacctgcacaaggtggtgatgaaggccctgtggaagcaccagttcgcctggcccttcagacagcccgtggacgccgtgaagctgggcctgcccgactaccacaagatcatcaagcagcccatggacatgggcaccatcaagagaagactggagaacaactactactgggccgccagcgagtgcatgcaggacttcaacaccatgttcaccaactgctacatctacaacaagcccaccgacgacatcgtgctgatggcccagaccctggagaagatcttcctgcagaaggtggccagcatgccccaggaggagcaggagctggtggtgaccatccccaagaacagccacaagaagggcgccaagctggccgccctgcagggcagcgtgaccagcgcccaccaggtgcccgccgtgagcagcgtgagccacaccgccctgtacacccccccccccgagatccccaccaccgtgttcaacatcccccaccccagcgtgatcagcagccccctgctgaagagcctgcacagcgccggcccccccctgctggccgtgaccgccgccccccccgcccagcccctggccaagaagaagggcgtgaagagaaaggccgacaccaccacccccacccccaccgccatcctggcccccggcagccccgccagcccccccggcagcctggagcccaaggccgccagactgccccccatgagaagagagagcggcagacccatcaagccccccagaaaggacctgcccgacagccagcagcagcaccagagcagcaagaagggcaagctgagcgagcagctgaagcactgcaacggcatcctgaaggagctgctgagcaagaagcacgccgcctacgcctggcccttctacaagcccgtggacgccagcgccctgggcctgcacgactaccacgacatcatcaagcaccccatggacctgagcaccgtgaagagaaagatggagaacagagactacagagacgcccaggagttcgccgccgacgtgagactgatgttcagcaactgctacaagtacaacccccccgaccacgacgtggtggccatggccagaaagctgcaggacgtgttcgagttcagatacgccaagatgcccgacgagcccctggagcccggccccctgcccgtgagcaccgccatgccccccggcctggccaagagcagcagcgagagcagcagcgaggagagcagcagcgagagcagcagcgaggaggaggaggaggaggacgaggaggacgaggaggaggaggagagcgagagcagcgacagcgaggaggagagagcccacagactggccgagctgcaggagcagctgagagccgtgcacgagcagctggccgccctgagccagggccccatcagcaagcccaagagaaagagagagaagaaggagaagaagaagaagagaaaggccgagaagcacagaggcagagccggcgccgacgaggacgacaagggccccagagcccccagacccccccagcccaagaagagcaagaaggccagcggcagcggcggcggcagcgccgccctgggccccagcggcttcggccccagcggcggcagcggcaccaagctgcccaagaaggccaccaagaccgccccccccgccctgcccaccggctacgacagcgaggaggaggaggagagcagacccatgagctacgacgagaagagacagctgagcctggacatcaacaagctgcccggcgagaagctgggcagagtggtgcacatcatccaggccagagagcccagcctgagagacagcaaccccgaggagatcgagatcgacttcgagaccctgaagcccagcaccctgagagagctggagagatacgtgctgagctgcctgagaaagaagcccagaaagccctacaccatcaagaagcccgtgggcaagaccaaggaggagctggccctggagaagaagagagagctggagaagagactgcaggacgtgagcggccagctgaacagcaccaagaagccccccaagaaggccaacgagaagaccgagagcagcagcgcccagcaggtggccgtgagcagactgagcgccagcagcagcagcagcgacagcagcagcagcagcagcagcagcagcagcagcgacaccagcgacagcgacagcggctag

SEQ ID NO: 77604 - protein, 311 aa, Artificial Sequence
  derived and/or modified sequence
MAAAGARPVELGFAESAPAWRLRSEQFPSKVYAPLPGRPDAFHRCIFLFCCREQPCCAGLRVFRNQLPRKNDFYSYEPPSENPPPETGESVCLQLKSGAHLCRVCGCLGPKTCSRCHKAYYCSKEHQTLDWRLGHKQACAQPDHLDHIIPDHNFLFPEFEIVIETEDEIMPEVVEKEDYSEIIGSMGEALEEELDSMAKHESREDKIFQKFKTQIALEPEQILRYGRGIAPIWISGENIPQEKDIPDCPCGAKRILEFQVMPQLLNYLKADRLGKSIDWGILAVFTCAESCSLGTGYTEEFVWKQDVTDTP

SEQ ID NO: 77605 - protein, 188 aa, Artificial Sequence
  derived and/or modified sequence
MAAAGARPVELGFAESAPAWRLRSEQFPSKVYAPLPGRPDAFHRCIFLFCCREQPCCAGLRVFRNQLPRKNDFYSYEPPSENPPPETGESVCLQLKSGAHLCRVCGCLGPKTCSRCHKAYYCSKEHQTLDWRLGHKQACAQPDHLDHIIPDHNFLFPEFEIVIETEDEIMPEVVEKEDYSEIIGSMGI

SEQ ID NO: 77606 - DNA, 936 bp, Artificial Sequence
  derived and/or modified sequence
atggccgccgccggcgcccggcctgtggagctgggcttcgcagagtcagcccctgcttggagactgaggtcagaacagtttccatctaaggtgtacgcaccactgccggggcgacctgatgcctttcatcggtgtatcttcctgttctgttgtcgcgagcaaccatgttgtgctggactgcgggtgttcagaaaccaactaccccggaagaacgacttttatagttacgaaccgccctccgagaatccaccacctgaaactggtgagtctgtatgcctgcaactgaagtccggtgcgcatctttgccgggtgtgtgggtgcctggggcctaagacgtgctctcgctgtcataaggcctattattgcagcaaagagcaccagaccctcgattggcgtctgggccacaagcaggcctgtgctcagcctgaccaccttgaccacatcattcctgaccataacttcctgttccccgaattcgagatagtaattgaaacagaggatgagataatgcccgaggtggtagagaaggaggactactccgagatcatcggaagcatgggtgaagccctggaagaagagctcgacagcatggccaagcacgaaagtcgcgaggacaagatatttcagaagtttaagacacagatcgccctggaacctgagcagattctcagatacggaagggggatcgcccccatttggatctcaggcgaaaatatcccgcaggagaaagacatccccgattgtccctgcggggcaaagcgtatcctcgaatttcaggtaatgccgcagctcctcaactacctgaaagctgatcggttgggaaaatccatcgactggggtatccttgcagttttcacttgcgcggaatcctgttcgttaggcaccggttatacggaagaatttgtgtggaaacaggatgtcacagatacaccttag

SEQ ID NO: 77607 - DNA, 936 bp, Artificial Sequence
  derived and/or modified sequence
atggctgctgctggggcccggcctgtggagctgggctttgctgagagcgccccagcctggaggctgcggtctgagcagttccccagcaaggtgtatgcccccctgcccggccgcccagatgccttccaccgctgcatcttcctgttctgctgccgggagcagccctgctgtgccggcctgcgggtcttcaggaaccagctgcccaggaagaatgacttctacagctatgagcccccatctgaaaatcctcctcctgagactggagagagcgtgtgcctgcagctgaagagcggggcccacctgtgccgggtgtgtggctgcctgggccccaagacctgcagccgctgccacaaggcctactactgcagcaaggagcaccagaccctggactggaggctgggccacaagcaggcctgtgcccagcctgaccacctggaccacatcatcccagaccacaacttcctgtttcctgagtttgaaattgtgattgaaacagaagatgagatcatgcctgaggtggtggagaaggaggactacagcgagatcatcggctccatgggagaggccctggaggaggagctggacagcatggccaagcatgagagccgggaggacaagatcttccagaagttcaagacccagatcgccctggagcctgagcagatcctgcgctatggccggggcatcgcccccatctggatctctggagagaacatcccccaggagaaggacatcccagactgcccctgtggggccaagaggatcctggagttccaggtgatgccccagctgctgaactacctgaaggctgaccggctgggcaagagcattgactggggcatcctggccgtgttcacctgtgccgagagctgcagcctgggcaccggctacacagaggagtttgtgtggaagcaggatgtgacagacaccccctag

SEQ ID NO: 77608 - DNA, 936 bp, Artificial Sequence
  derived and/or modified sequence
atggccgccgccggcgcccggcccgtggagctgggcttcgccgagagcgcccctgcctggcgcctgcgatccgaacagtttccgagtaaggtctacgcacctctgcctgggcggcctgatgcatttcacagatgtatctttctcttctgctgtagggaacagccttgttgtgctgggttgcgagttttccgcaatcagcttcctaggaaaaacgacttttatagctacgaaccccctagtgaaaaccccccccctgagactggagaatcggtttgcctgcaactgaagtctggtgctcacctgtgccgcgtctgtggctgcctcggccccaagacgtgcagccgatgtcacaaggcttactactgtagcaaggagcaccagactctcgactggcgactaggacacaaacaggcttgcgctcagccggatcatctggaccacatcatccccgaccacaatttcctgttccctgaattcgaaatagttatcgaaactgaggacgagatcatgcctgaagttgtcgaaaaagaagactattctgagattatcggctctatgggcgaggccttggaggaggaactagattccatggctaaacatgagtcaagggaagacaagatattccagaagttcaagactcaaatcgcattagaacccgagcagattctcagatacggacgcggaatcgcacccatttggataagcggcgaaaatattccccaggagaaggatataccagactgcccgtgcggcgctaagaggatcctggagtttcaagtgatgccacagctgctgaactatctgaaggctgatcgcctgggcaagagtatcgactggggaatcctggcagtgttcacctgtgcagaatcttgcagcctgggcactggttatacagaagaatttgtctggaagcaggacgttactgacaccccctag

SEQ ID NO: 77609 - DNA, 936 bp, Artificial Sequence
  derived and/or modified sequence
atggcggctgcgggagctcgtccggtagaactcggatttgccgaatccgcacccgcatggagattaagaagcgagcagtttccgagcaaggtctacgccccactgccaggacgcccagatgcctttcatcgctgtatctttctgttttgctgtagggagcaaccttgttgcgcaggcctgagagtctttcgaaatcagctaccaaggaagaatgatttttattcctatgagcctccgagtgagaatccaccccctgaaaccggggagagcgtttgtctccagcttaaaagcggagctcacctttgccgagtgtgtggatgcctcgggccaaaaacctgttctaggtgccacaaggcttactattgttctaaagagcaccagaccctggattggcggctgggccacaaacaggcctgcgctcagcctgaccacctggaccacatcataccagatcacaatttccttttccccgaatttgaaattgtgatcgagaccgaggacgagattatgcccgaggtcgtagagaaggaggactattccgagatcattggatctatgggggaagcgctcgaggaggaacttgatagcatggccaagcatgagtcccgggaagataagattttccagaagtttaaaacacagatcgctctagagcctgaacagatcctcaggtatggaaggggaatcgctccgatatggatctccggagaaaatatcccccaggagaaggatatccccgactgcccctgcggggcaaaaagaatccttgagtttcaagtaatgccccagttactgaattatctaaaggctgaccgcctggggaaatctatcgactgggggatactcgctgtcttcacttgcgcagagtcttgttccttgggaaccggatacaccgaagagttcgtctggaaacaggatgtcactgatactccatag

SEQ ID NO: 77610 - DNA, 936 bp, Artificial Sequence
  derived and/or modified sequence
atggctgccgccggggccaggcctgtggagctgggcttcgccgagtcggcgccggcgtggcgactgcgcagcgagcagttccccagcaaggtgtatgcgccgctgcctggccgcccggacgccttccaccgctgcatcttcctcttctgctgccgcgagcagccgtgctgtgccggcctgcgagtttttaggaatcaactacccaggaaaaacgatttttactcatatgagccaccttctgagaatcctcccccagaaacaggagaatcagtgtgtctccagcttaagtctggtgctcatctctgcagggtttgtggctgtttaggccccaaaacgtgctccagatgccacaaagcatattactgcagcaaggagcatcagaccctagactggagattgggacataagcaggcttgtgcacaaccagatcatctggaccatataattccagaccacaacttcctttttccagaatttgaaattgtaatagaaacagaagatgagattatgcctgaggttgtggaaaaggaagattactcagagattatagggagcatgggtgaagcacttgaggaagaactggattccatggcaaaacatgaatccagggaagataaaatttttcagaagtttaaaactcagatagcccttgaaccagaacagattcttagatatggcagaggtattgcccccatctggatttctggtgaaaatattcctcaagaaaaggatattccagattgcccctgtggtgccaagagaatattggaattccaggtcatgcctcagctcctaaactacctgaaggctgacagactgggcaagagcattgactggggcatcctggctgtcttcacctgtgctgagagctgcagcttgggtactggctatacagaagaatttgtgtggaagcaggatgtaacagatacaccgtaa

SEQ ID NO: 77611 - DNA, 936 bp, Artificial Sequence
  derived and/or modified sequence
atggccgccgccggcgccagacccgtggagctgggcttcgccgagagcgcccccgcctggagactgagaagcgagcagttccccagcaaggtgtacgcccccctgcccggcagacccgacgccttccacagatgcatcttcctgttctgctgcagagagcagccctgctgcgccggcctgagagtgttcagaaaccagctgcccagaaagaacgacttctacagctacgagccccccagcgagaaccccccccccgagaccggcgagagcgtgtgcctgcagctgaagagcggcgcccacctgtgcagagtgtgcggctgcctgggccccaagacctgcagcagatgccacaaggcctactactgcagcaaggagcaccagaccctggactggagactgggccacaagcaggcctgcgcccagcccgaccacctggaccacatcatccccgaccacaacttcctgttccccgagttcgagatcgtgatcgagaccgaggacgagatcatgcccgaggtggtggagaaggaggactacagcgagatcatcggcagcatgggcgaggccctggaggaggagctggacagcatggccaagcacgagagcagagaggacaagatcttccagaagttcaagacccagatcgccctggagcccgagcagatcctgagatacggcagaggcatcgcccccatctggatcagcggcgagaacatcccccaggagaaggacatccccgactgcccctgcggcgccaagagaatcctggagttccaggtgatgccccagctgctgaactacctgaaggccgacagactgggcaagagcatcgactggggcatcctggccgtgttcacctgcgccgagagctgcagcctgggcaccggctacaccgaggagttcgtgtggaagcaggacgtgaccgacaccccctag

SEQ ID NO: 77612 - protein, 195 aa, Artificial Sequence
  derived and/or modified sequence
MAAAGARPVELGFAESAPAWRLRSEQFPSKVYAPLPGRPDAFHRCIFLFCCREQPCCAGLRVFRNQLPRKNDFYSYEPPSENPPPETGESVCLQLKSGAHLCRVCGCLGPKTCSRCHKAYYCSKEHQTLDWRLGHKQACAQPDHLDHIIPDHNFLFPEFEIVIETEDEIMPEVVEKEDYSEIIGSMGKQFQDFIH

SEQ ID NO: 77613 - DNA, 588 bp, Artificial Sequence
  derived and/or modified sequence
atggcggcggctggggctcggcccgtagagctgggattcgccgagtccgcgcccgcctggagactccggagcgagcaattcccatccaaagtatacgccccactccctggtcgtcctgatgccttccatagatgcatttttctgttttgctgtcgtgaacagccttgttgcgcaggccttagggtctttcgaaaccagttgccccggaagaatgacttctattcttacgagccaccatccgaaaaccccccgcccgaaactggcgagtcagtttgcttacagctgaaaagcggcgctcatctctgccgtgtctgtggatgtttggggcccaagacttgtagtaggtgtcacaaggcctactactgctccaaggagcaccagacactcgactggcgtttgggccacaagcaggcatgtgcccagccggaccatttggaccatattatccctgatcacaacttcctcttccctgaatttgaaattgtgatcgagaccgaggacgagattatgcctgaggtcgtggaaaaagaggactatagcgaaatcatcggatcaatgggtaaacagttccaggactttattcattag

SEQ ID NO: 77614 - DNA, 588 bp, Artificial Sequence
  derived and/or modified sequence
atggctgctgctggggcccggcctgtggagctgggctttgctgagagcgccccagcctggaggctgcggtctgagcagttccccagcaaggtgtatgcccccctgcccggccgcccagatgccttccaccgctgcatcttcctgttctgctgccgggagcagccctgctgtgccggcctgcgggtcttcaggaaccagctgcccaggaagaatgacttctacagctatgagcccccatctgaaaatcctcctcctgagactggagagagcgtgtgcctgcagctgaagagcggggcccacctgtgccgggtgtgtggctgcctgggccccaagacctgcagccgctgccacaaggcctactactgcagcaaggagcaccagaccctggactggaggctgggccacaagcaggcctgtgcccagcctgaccacctggaccacatcatcccagaccacaacttcctgtttcctgagtttgaaattgtgattgaaacagaagatgagatcatgcctgaggtggtggagaaggaggactacagcgagatcatcggctccatgggcaagcagttccaggacttcatccactag

SEQ ID NO: 77615 - DNA, 588 bp, Artificial Sequence
  derived and/or modified sequence
atggccgccgccggcgcccggcccgtggagctgggcttcgccgagtccgcgccagcttggcgactccggtcagaacagtttcccagcaaagtctacgcccctttgcctggacgtcctgatgctttccaccgctgtatcttcctgttctgttgtcgggagcagccttgctgcgctgggcttcgggtgtttagaaaccaactgcctcgcaaaaacgacttctactcttacgagccaccttcggagaaccccccgcccgaaacaggcgagtccgtgtgcttacaactaaagtccggcgcccatctttgtcgtgtgtgcgggtgcctcgggcctaagacttgttcccggtgtcacaaagcttattactgcagcaaggaacaccagacacttgattggagactcgggcataaacaagcctgtgcccagcctgaccacctggaccacataatccccgaccacaatttcttgtttcccgagttcgagattgtgatagagactgaggacgagatcatgccggaagtagtggagaaggaggattactccgaaataatcgggagtatgggaaaacagtttcaggactttatccactag

SEQ ID NO: 77616 - DNA, 588 bp, Artificial Sequence
  derived and/or modified sequence
atggccgctgccggtgcacgccctgtggagctggggtttgcagaatcggccccagcttggaggctgcgctctgaacagttcccgtctaaagtttatgccccactgccaggtaggccagatgcatttcacaggtgtatctttttgttctgctgtagagagcaaccttgctgcgccggactgagagttttccgcaatcaactgcccagaaagaacgacttttactcgtacgagcccccaagtgagaatccaccacccgagacaggagagagtgtttgtttacagttgaagagtggagctcacctgtgccgggtgtgcggatgtttggggcctaagacatgttcgcggtgtcataaggcctactattgttctaaagagcatcaaaccctggattggagactggggcacaagcaggcctgcgcacagcctgatcacctcgatcatatcatcccagaccataactttctgttcccagaattcgaaatcgtgatcgaaactgaggacgagatcatgcctgaggtggtggagaaagaagattattccgaaatcattggctccatggggaagcagttccaggacttcattcattag

SEQ ID NO: 77617 - DNA, 1897 bp, Artificial Sequence
  derived and/or modified sequence
cttccggcccggcgcccgatttccgccttccgacccagctgtgggctgcgccccacgccagcccgcgccccgcatggctgccgccggggccaggcctgtggagctgggcttcgccgagtcggcgccggcgtggcgactgcgcagcgagcagttccccagcaaggtgtatgcgccgctgcctggccgcccggacgccttccaccgctgcatcttcctcttctgctgccgcgagcagccgtgctgtgccggcctgcgagtttttaggaatcaactacccaggaaaaacgatttttactcatatgagccaccttctgagaatcctcccccagaaacaggagaatcagtgtgtctccagcttaagtctggtgctcatctctgcagggtttgtggctgtttaggccccaaaacgtgctccagatgccacaaagcatattactgcagcaaggagcatcagaccctagactggagattgggacataagcaggcttgtgcacaaccagatcatctggaccatataattccagaccacaacttcctttttccagaatttgaaattgtaatagaaacagaagatgagattatgcctgaggttgtggaaaaggaagattactcagagattatagggagcatgggtaagcagtttcaggacttcattcattaagtggttaaacataatacttggaagaaagggctccatgtgcctagaagagaggtactgagaggaagactcactttggaggctgtagcatacaattttcagatattgcctcaggtaaaaatatacttcctggactttgttttctgacacataagaggtgtgttctgctccctgtaaagacaagggtgggtatccagatggtcccatgagtagggctgcacaagatgctggaggcttggtaagttcctctgggtcgcagatcggtttctcgggtcgggatagtgtgagtgcctagcacagtgtcgggcacgcagaagggccccttaaaagtttctctttcatctggccagttttagatacacaattttgtcagtttacttacagtgcatactcttgggtagtacttgtgctgaccaagtatcttagaggcttattttattatagtagccaacatttatccagcacttaccttatataaagggctgtttgtgcatgagctcattaaaatcgtgacagcagaccaatgagtgagaaactgccccattttgaaggtgaggaaattgaggttctgggtataactttctttggtcacataatattaaattttacaatttgagccttgagccatacacaaaaccaccacaaaattagatttatagactcaaaatgaaaacatcagcttactggtttgtagttcataccagtcatacattccaaaacatgttttgagtcttactctgtgcctgaccttgtgcttgataacagggatataatgggaagcaacactccagtggtcagatgctcacagtcttatggaggagcccaaataatatctggggaagttaaagtccatataatgactgataagagtacaatacaggtgccatgggaacacgtgacatcactgaagactgcctggaaggggccgcgcgtgtgttcatgcctatacgataaacatgatacataatgaaaatgcttatctttaggagaaaggagagcctagagtagcaggatcaaggatgaaagctggacttcaaatatgccttgttagtgtaaatgtgactgtggaactgtatgagtattttaagattatggagtaaagtaagttttaaaaagcagtccctaatcatcaaaagtaaaaaactcttgatgtagtcatataaccacactaagaactcttccaggtgacttcaaaacataggacagtacatctctagtagaatatgccctgagaatgaa

SEQ ID NO: 77618 - DNA, 588 bp, Artificial Sequence
  derived and/or modified sequence
atggccgccgccggcgccagacccgtggagctgggcttcgccgagagcgcccccgcctggagactgagaagcgagcagttccccagcaaggtgtacgcccccctgcccggcagacccgacgccttccacagatgcatcttcctgttctgctgcagagagcagccctgctgcgccggcctgagagtgttcagaaaccagctgcccagaaagaacgacttctacagctacgagccccccagcgagaaccccccccccgagaccggcgagagcgtgtgcctgcagctgaagagcggcgcccacctgtgcagagtgtgcggctgcctgggccccaagacctgcagcagatgccacaaggcctactactgcagcaaggagcaccagaccctggactggagactgggccacaagcaggcctgcgcccagcccgaccacctggaccacatcatccccgaccacaacttcctgttccccgagttcgagatcgtgatcgagaccgaggacgagatcatgcccgaggtggtggagaaggaggactacagcgagatcatcggcagcatgggcaagcagttccaggacttcatccactag

SEQ ID NO: 77619 - DNA, 567 bp, Artificial Sequence
  derived and/or modified sequence
atggctgcagctggcgcacggcccgttgaacttggcttcgctgagtctgccccagcttggaggctgcgttctgagcaattcccaagcaaggtatacgccccgttgcccggacgcccagatgccttccatagatgcatctttttattctgttgcagagaacagccttgctgtgcaggacttcgtgtttttcgcaaccagctaccccggaagaacgacttttactcctacgagccaccgtccgagaacccccccccagagaccggcgagtccgtctgtctacagctaaagtcaggcgcacatctttgtcgcgtgtgcgggtgcctcggaccaaagacatgcagccgctgccataaggcgtactattgctctaaggagcatcaaacactcgactggcggctgggacacaaacaggcgtgcgcccaaccagatcacctggaccatattatccctgaccataattttctgttcccagagttcgagattgtaatcgagacagaagatgagataatgcctgaagtggtcgagaaagaagactattccgaaattattggctcaatgggcatatag

SEQ ID NO: 77620 - DNA, 567 bp, Artificial Sequence
  derived and/or modified sequence
atggctgctgctggggcccggcctgtggagctgggctttgctgagagcgccccagcctggaggctgcggtctgagcagttccccagcaaggtgtatgcccccctgcccggccgcccagatgccttccaccgctgcatcttcctgttctgctgccgggagcagccctgctgtgccggcctgcgggtcttcaggaaccagctgcccaggaagaatgacttctacagctatgagcccccatctgaaaatcctcctcctgagactggagagagcgtgtgcctgcagctgaagagcggggcccacctgtgccgggtgtgtggctgcctgggccccaagacctgcagccgctgccacaaggcctactactgcagcaaggagcaccagaccctggactggaggctgggccacaagcaggcctgtgcccagcctgaccacctggaccacatcatcccagaccacaacttcctgtttcctgagtttgaaattgtgattgaaacagaagatgagatcatgcctgaggtggtggagaaggaggactacagcgagatcatcggctccatgggcatctag

SEQ ID NO: 77621 - DNA, 567 bp, Artificial Sequence
  derived and/or modified sequence
atggccgccgccggcgcccggcccgtggagctgggcttcgccgagtctgctccggcatggaggctgaggtccgaacaatttccgagtaaggtgtatgccccactcccagggaggcccgacgccttccataggtgcatattcctcttttgctgccgagagcagccatgttgtgccggcctgcgcgtgttcaggaaccaactgcctcgcaaaaatgacttctacagctacgagcctcccagtgagaacccgcctcccgagacaggcgagagcgtgtgcctgcagctgaaatctggggcccatctctgcagagtgtgtggatgtttgggacctaaaacatgttcgcgctgtcataaggcttactattgcagcaaggagcaccagacacttgactggaggctgggacacaaacaggcctgcgctcagccagatcaccttgaccacatcattcctgatcacaactttctgttccccgagtttgaaatcgtaatcgagacagaggacgagatcatgcctgaagtggtcgagaaggaggattatagtgaaattattggaagcatgggcatctag

SEQ ID NO: 77622 - DNA, 567 bp, Artificial Sequence
  derived and/or modified sequence
atggccgcagcaggagctcgccctgtggagctcggattcgccgagagtgccccagcttggcggctgagatccgagcagttccccagtaaagtgtatgcgcctctgcccggacgccctgatgcctttcacaggtgcattttcctcttctgctgtcgcgaacaaccctgttgcgccggattacgggttttcaggaaccagctgccacgaaagaatgacttttactcctatgaaccaccatccgaaaacccgcctccggagactggagagtccgtttgcctgcagcttaaatccggggctcacctgtgcagggtgtgtgggtgtctggggcctaaaacttgctctaggtgtcataaggcttactattgtagtaaggagcaccagacgctcgactggagattggggcacaaacaggcctgcgctcaaccagatcacctcgaccatatcattcccgaccacaacttcctcttccctgagttcgagatcgtgatcgagactgaggatgaaatcatgcccgaagtggtcgaaaaagaggactactcggagataatcggatctatggggatttag

SEQ ID NO: 77623 - DNA, 1114 bp, Artificial Sequence
  derived and/or modified sequence
tgtgggctgcgccccacgccagcccgcgccccgcatggctgccgccggggccaggcctgtggagctgggcttcgccgagtcggcgccggcgtggcgactgcgcagcgagcagttccccagcaaggtgtatgcgccgctgcctggccgcccggacgccttccaccgctgcatcttcctcttctgctgccgcgagcagccgtgctgtgccggcctgcgagtttttaggaatcaactacccaggaaaaacgatttttactcatatgagccaccttctgagaatcctcccccagaaacaggagaatcagtgtgtctccagcttaagtctggtgctcatctctgcagggtttgtggctgtttaggccccaaaacgtgctccagatgccacaaagcatattactgcagcaaggagcatcagaccctagactggagattgggacataagcaggcttgtgcacaaccagatcatctggaccatataattccagaccacaacttcctttttccagaatttgaaattgtaatagaaacagaagatgagattatgcctgaggttgtggaaaaggaagattactcagagattatagggagcatggggatataatgggaagcaacactccagtggtcagatgctcacagtcttatggaggagcccaaataatatctggggaagttaaagtccatataatgactgataagagtacaatacaggtgccatgggaacacgtgacatcactgaagactgcctggaaggggccgcgcgtgtgttcatgcctatacgataaacatgatacataatgaaaatgcttatctttaggagaaaggagagcctagagtagcaggatcaaggatgaaagctggacttcaaatatgccttgttagtgtaaatgtgactgtggaactgtatgagtattttaagattatggagtaaagtaagttttaaaaagcagtccctaatcatcaaaagtaaaaaactcttgatgtagtcatataaccacactaagaactcttccaggtgacttcaaaacataggacagtacatctctagtagaatatgccctgagaatgaaaagaatgtaacagtgttagtattttgaataaacatgttattactaga

SEQ ID NO: 77624 - DNA, 567 bp, Artificial Sequence
  derived and/or modified sequence
atggccgccgccggcgccagacccgtggagctgggcttcgccgagagcgcccccgcctggagactgagaagcgagcagttccccagcaaggtgtacgcccccctgcccggcagacccgacgccttccacagatgcatcttcctgttctgctgcagagagcagccctgctgcgccggcctgagagtgttcagaaaccagctgcccagaaagaacgacttctacagctacgagccccccagcgagaaccccccccccgagaccggcgagagcgtgtgcctgcagctgaagagcggcgcccacctgtgcagagtgtgcggctgcctgggccccaagacctgcagcagatgccacaaggcctactactgcagcaaggagcaccagaccctggactggagactgggccacaagcaggcctgcgcccagcccgaccacctggaccacatcatccccgaccacaacttcctgttccccgagttcgagatcgtgatcgagaccgaggacgagatcatgcccgaggtggtggagaaggaggactacagcgagatcatcggcagcatgggcatctag

SEQ ID NO: 77625 - DNA, 1338 bp, Artificial Sequence
  derived and/or modified sequence
atgaacaccaacagcaaggaggtgctgagcctgggcgtgcaggtgcccgaggcctgggaggagctgctgaccatgaaggtggaggccaagagccacctgcagtggcaggagagcagactgaagagaagcaaccccctggccagagagatcttcagaagacacttcagacagctgtgctaccaggagacccccggccccagagaggccctgaccagactgcaggagctgtgctaccagtggctgagaccccacgtgagcaccaaggagcagatcctggacctgctggtgctggagcagttcctgagcatcctgcccaaggagctgcagggctgggtgagagagcactgccccgagagcggcgaggaggccgtgatcctgctggaggacctggagagagagctggacgagccccagcacgagatggtggcccacagacacagacaggaggtgctgtgcaaggagatggtgcccctggccgagcagacccccctgaccctgcagagccagcccaaggagccccagctgacctgcgacagcgcccagaagtgccacagcatcggcgagaccgacctgatcagaagcctgagaagaagagccgtgctgatccccctgggcgcccacctgttcagcaccgacaccttcctgttcagcaagcccgtggtgatcccccagctgaagggcggcggcgagacctggcccaacaacagaggcgtgctgagagacgaggtgaccaagaccgaggacagagagctggtgctgagaaaggactgccccaagatcgtggagccccacggcaagatgttcaacgagcagacctgggaggtgagccagcaggaccccagccacggcgaggtgggcgagcacaaggacagaatcgagagacagtggggcaacctgctgggcgagggccagcacaagtgcgacgagtgcggcaagagcttcacccagagcagcggcctgatcagacaccagagaatccacaccggcgagagaccctacgagtgcaacgagtgcggcaaggccttcagcagaagcagcggcctgttcaaccacagaggcatccacaacatccagaagagataccactgcaaggagtgcggcaaggtgttcagccagagcgccggcctgatccagcaccagagaatccacaagggcgagaagccctaccagtgcagccagtgcagcaagagctacagcagaagaagcttcctgatcgagcaccagagaagccacaccggcgagagaccccaccagtgcatcgagtgcggcaagagcttcaacagacactgcaacctgatcagacaccagaagatccacaccgtggccgagctggtgtag

SEQ ID NO: 77626 - DNA, 1338 bp, Artificial Sequence
  derived and/or modified sequence
atgaatactaattcgaaagaagtgctgtcgctgggagttcaagtccccgaagcttgggaagagctgctcaccatgaaagtcgaagccaaaagtcatctgcagtggcaggaatcaaggttgaagcgctctaatcctttggctagggagatcttcaggcgtcactttagacagttatgttaccaggaaacacctggtccacgcgaagccttgacaagactgcaagagctgtgttaccagtggttgagaccccatgtctcaactaaggaacagatcctggatctgttggttctggagcagttcctgtcaattctgcctaaggaattacaaggctgggtcagagagcattgcccagagagtggcgaggaggcggtcatacttctggaagatctagaacgcgagttggacgaaccccagcacgagatggtcgcccataggcacaggcaggaggtgctgtgcaaggaaatggtgccactagcggagcaaacccctcttacattgcagagtcagccaaaggagcctcagcttacctgtgactctgctcagaagtgccactcaattggagaaacagacctgattaggagcttgaggaggagggccgtgctgattccccttggggctcatctgttttcgacagacactttcctgtttagtaaaccggtagtgatcccacagctaaaaggcgggggcgagacatggccaaataacagaggggtgctccgggacgaagtcactaagaccgaagacagagaactcgtgcttaggaaggattgcccaaaaatcgttgaaccgcacggcaagatgtttaacgagcaaacctgggaagtgtcacagcaggacccaagccacggcgaggttggtgaacacaaggacaggattgagcggcaatgggggaacctgctgggcgaaggccagcataaatgtgatgagtgtgggaagtcattcacccagtcttcaggactgatccggcatcagagaattcatactggcgaacggccctatgaatgcaacgaatgtggcaaagcctttagccgtagttctggcctatttaaccaccgcggtatccataatatccagaagcggtaccactgcaaggagtgcggcaaggtgtttagtcaaagcgctggactgatccagcaccagagaattcacaaaggagagaagccttaccaatgttcccagtgctccaagagctactccaggcgttcattcttaattgaacaccagagatcccatactggcgaacgcccgcatcagtgcatagagtgtggcaaaagtttcaacaggcactgcaacctgattagacaccagaagattcacaccgtggcggagctcgtgtag

SEQ ID NO: 77627 - DNA, 1338 bp, Artificial Sequence
  derived and/or modified sequence
atgaacaccaacagcaaggaggtgctgagcctgggcgtgcaggtgcctgaggcctgggaggagctgctgaccatgaaggtggaggccaagagccacctgcagtggcaggagagccggctgaagaggagcaaccccctggcccgggagatcttccgccgccacttccggcagctgtgctaccaggagaccccaggcccccgggaggccctgacccggctgcaggagctgtgctaccagtggctgcggccccacgtgtccaccaaggagcagatcctggacctgctggtgctggagcagttcctgagcatcctgcccaaggagctgcagggctgggtgcgggagcactgcccagagagcggggaggaggccgtcatcctgctggaggacctggagcgggagctggatgagccccagcacgagatggtggcccaccgccaccggcaggaggtgctgtgcaaggagatggtgcccctggccgagcagacccccctgaccctgcagagccagcccaaggagccccagctgacctgtgacagcgcccagaagtgccacagcatcggggagacagacctgatccgcagcctgcggaggagagctgtgctgatccccctgggcgcccacctgttcagcacagacaccttcctgttcagcaagcctgtggtgatcccccagctgaagggcggcggggagacctggcccaacaacagaggagtgctgagagatgaggtgaccaagacagaagatcgggagctggtgctgaggaaggactgccccaagatcgtggagccccacggcaagatgtttaatgagcagacctgggaggtgtcccagcaggaccccagccacggggaggtgggggagcacaaggaccgcatcgagcggcagtggggcaacctgctgggggagggccagcacaagtgtgatgaatgtgggaagagcttcacccagagcagcggcctcatccgccaccagaggatccacactggagagcggccctatgagtgcaatgaatgtgggaaggccttcagccgcagcagcggcctcttcaaccaccggggcatccacaacatccagaagcgctaccactgcaaggaatgtgggaaggtgttcagccagagcgctggcctcatccagcaccagaggatccacaagggggagaagccctaccagtgcagccagtgcagcaagagctacagccgccgctccttcctgattgagcaccagaggagccacactggagagcggccccaccagtgcattgaatgtgggaagagcttcaacagacactgcaacctgatccgccaccagaagatccacacagtggccgagctggtgtag

SEQ ID NO: 77628 - DNA, 1338 bp, Artificial Sequence
  derived and/or modified sequence
atgaacaccaacagcaaggaggtgctgagcctgggcgtgcaggtgccagaggcatgggaagaactcctgacaatgaaagtggaggctaaatcccacctgcaatggcaggagtcacggcttaaacggtcaaatccgctagcaagagaaatctttaggcggcacttccgacagctgtgttaccaagagaccccaggcccccgggaggccttgacccggttgcaggagttgtgctatcagtggctgagaccacatgtaagcacaaaagagcagattttggatctcttagtcctagaacagttccttagcatactcccgaaggaattgcagggatgggtaagagagcattgccccgaaagcggggaggaggcggtaattctattagaggatctcgagagggaactggacgagcctcagcacgaaatggtcgcacataggcatagacaggaagtcctgtgcaaggaaatggtgcccctggcagagcaaaccccactgacgttgcaatctcagcctaaggaaccgcagctcacttgcgactctgctcagaaatgccacagcatcggagaaacggatctgatcagatccttgcggcggagggctgtgctcatccctctgggtgctcatctgttctccaccgacacgttcctctttagtaagcctgtggtgatcccgcagcttaagggtggcggtgagacttggcccaacaacagaggggtgctcagagacgaagtgaccaagactgaagatagggagctcgttctacgaaaagactgcccgaagattgtcgagccacacggaaaaatgtttaatgagcagacctgggaagtttcacagcaggacccttctcatggagaagtaggcgagcataaggatcgcattgaacgacagtggggtaacctgctcggggagggccagcacaaatgtgatgagtgcggcaagtcatttacacagagcagcggactgatccgccatcagcgtatccacactggtgaaagaccttacgaatgtaatgagtgtggaaaagcattctctagatcctccggcctctttaaccatagggggatccacaacattcagaagcggtaccactgtaaggaatgcgggaaggtttttagccaatccgctgggctgattcagcatcagcgcattcacaagggcgaaaagccctaccagtgctcacagtgctctaagtcttactcaagacgatccttcctgatagaacaccagcgttcccacactggggaaaggccacaccagtgcatagaatgcggaaaatctttcaaccgacactgtaatcttattagacaccaaaagatccataccgtcgcagaacttgtatag

SEQ ID NO: 77629 - DNA, 1338 bp, Artificial Sequence
  derived and/or modified sequence
atgaataccaattctaaagaggtattaagcctgggggttcaggttccggaggcctgggaggaactcctaacaatgaaagttgaagcgaagagccatctccagtggcaagaaagccgattgaagaggagcaatcctctggctcgcgagattttccgacgtcattttagacagctctgttaccaggagacccctgggcctcgcgaggccctgacgcgcttacaggaattatgctatcaatggctaagacctcacgtatcgaccaaggagcagatattggatctgctggtgctggaacagttcctgagcatcctccccaaagagctccaaggatgggtgagagagcactgtcctgagagtggagaagaggcagtgatactgctcgaggatctggagcgagaactcgacgaaccacagcacgaaatggtggcacatcggcaccgtcaggaggtcctctgtaaggagatggtcccgctcgcagaacaaaccccacttacccttcagtcccagccaaaagaacctcagctgacttgtgatagtgcacagaaatgtcacagtataggcgagaccgacctgatcaggtcactgagacgacgagcagtactcatccctcttggcgcacatcttttttccaccgacaccttcctgttctctaagcccgtggtgattccccagcttaagggaggaggagagacctggcccaataaccgcggagtgcttcgtgatgaagtcacgaagacagaagaccgcgaactggtgctgcggaaggactgcccgaaaattgtggaacctcacgggaaaatgtttaacgagcagacgtgggaagtctcacagcaagacccttcacacggcgaggtgggcgaacacaaggatcggatcgagagacagtggggcaatctgctgggtgaaggtcaacacaagtgcgatgaatgcgggaagtcgttcacccagtcctctgggctgattagacaccagaggatccacactggagaaaggccctacgaatgcaacgagtgtgggaaagcattttccagatcttccgggctgttcaaccatagagggatccacaacattcaaaaaagatatcattgtaaggaatgcggcaaggtgttttcccagagcgctggcttaattcaacatcaacggattcacaaaggggagaagccctatcagtgctcccagtgctccaaatcctatagccgcaggagttttcttatcgagcatcaacgctcgcacacaggggaacgacctcatcagtgcattgagtgcggaaagagctttaatcggcattgtaatctgataagacatcaaaagattcacaccgtggcagaacttgtttag

SEQ ID NO: 77630 - protein, 231 aa, Artificial Sequence
  derived and/or modified sequence
MDVENEQILNVNPAENAGTEEIKNEINGNWISASSINEARINAKAKRRLRKNSSRDSGRGDSVSDSGSDALRSGLTVPTSPKGRLLDRRSRSGKGRGLPKKGGAGGKGVWGTPGQVYDVEEVDVKDPNYDDDQENCVYETVVLPLDERAFEKTLTPIIQEYFEHGDTNEVAEMLRDLNLGEMKSGVPVLAVSLALEGKASHREMTSKLLSDLCGTVMSTTDVEKSFDKLLK

SEQ ID NO: 77631 - DNA, 696 bp, Artificial Sequence
  derived and/or modified sequence
atggacgtggagaacgagcagatcctgaacgtgaaccccgccgagaacgccggcaccgaggagatcaagaacgagatcaacggcaactggatcagcgccagcagcatcaacgaggccagaatcaacgccaaggccaagagaagactgagaaagaacagcagcagagacagcggcagaggcgacagcgtgagcgacagcggcagcgacgccctgagaagcggcctgaccgtgcccaccagccccaagggcagactgctggacagaagaagcagaagcggcaagggcagaggcctgcccaagaagggcggcgccggcggcaagggcgtgtggggcacccccggccaggtgtacgacgtggaggaggtggacgtgaaggaccccaactacgacgacgaccaggagaactgcgtgtacgagaccgtggtgctgcccctggacgagagagccttcgagaagaccctgacccccatcatccaggagtacttcgagcacggcgacaccaacgaggtggccgagatgctgagagacctgaacctgggcgagatgaagagcggcgtgcccgtgctggccgtgagcctggccctggagggcaaggccagccacagagagatgaccagcaagctgctgagcgacctgtgcggcaccgtgatgagcaccaccgacgtggagaagagcttcgacaagctgctgaagtag

SEQ ID NO: 77632 - DNA, 696 bp, Artificial Sequence
  derived and/or modified sequence
atggatgtggagaatgagcaaattcttaacgtcaaccccgcggagaatgccggcaccgaagagattaaaaacgagattaatgggaactggatcagtgcctcatccatcaacgaagcacgcattaatgccaaggctaaacggcggctgaggaagaactcctccagggattcaggccggggcgattccgttagtgattctgggtccgacgctctccgctccggactgacggtgccgacaagtcccaagggtcgccttctggatagaagatcccggagcggtaaaggcagaggactgcccaagaaagggggggccggggggaaaggcgtctgggggacccctggacaggtgtatgatgtggaggaggtggacgtgaaggatcccaactacgacgatgatcaagagaattgcgtgtacgagacagtagttctgccattggacgagcgcgcctttgagaaaacattgacccccatcatccaagaatactttgaacacggggacaccaacgaggtggcggaaatgttacgagacctgaacctcggagaaatgaagagcggcgtcccagtgcttgccgtctccttggctctggaaggtaaagcctctcaccgcgagatgacatccaaattattgagcgatctgtgcggaacagtgatgagtaccacagatgtggagaagagttttgacaagctactcaaatag

SEQ ID NO: 77633 - DNA, 696 bp, Artificial Sequence
  derived and/or modified sequence
atggatgtggagaatgagcagatcctgaatgtgaacccagcagaaaatgccggcacagaggagatcaagaatgagatcaatggaaactggatcagcgccagcagcatcaatgaggcccgcatcaatgccaaggccaagaggcggctgaggaagaacagcagccgggacagcggccgcggggacagcgtgtctgacagcggcagtgatgccctgcggagcggcctgactgtgcccaccagccccaagggccgcctgctggaccggcgcagccgcagcggcaagggccggggcctgcccaagaagggcggggccggcggcaaaggagtgtggggcaccccaggccaggtgtatgatgtggaggaggtggatgtgaaggaccccaactatgatgatgaccaggagaactgtgtgtatgagaccgtggtgctgcccctggatgagcgggcctttgagaagaccctgacccccatcatccaggagtactttgagcacggggacaccaatgaggtggccgagatgctgcgggacctgaacctgggggagatgaagagcggcgtgcctgtgctggccgtgtccctggccctggagggcaaggccagccaccgggagatgaccagcaagctgctgagtgacctgtgtggcaccgtgatgagcaccacagatgtggagaagagctttgacaagctgctgaagtag

SEQ ID NO: 77634 - DNA, 696 bp, Artificial Sequence
  derived and/or modified sequence
atggacgtggagaacgagcagatcctgaacgtgaaccccgccgagaatgccggtacagaagagattaaaaatgagataaacggcaattggattagcgcctcctccattaatgaagccagaattaatgccaaagccaaacgccgccttcggaagaactccagcagagactccggtcgtggcgatagcgtgtccgatagcggatcagacgcgctgagatccggcctgacggtccccaccagccctaaggggcgactcctggaccggagatcacgttccggcaaagggcgggggctccctaaaaaagggggtgccggtgggaagggcgtgtgggggacccctgggcaggtgtatgatgtcgaggaggtagacgtgaaggaccctaattacgacgacgaccaggaaaactgcgtgtatgaaacggtggttttgcctctggatgaaagggcatttgagaaaacactgactcctattatccaagagtattttgaacatggggacaccaatgaagttgccgaaatgctcagagaccttaacctcggagaaatgaagagcggagtccccgtgttggccgtctctctggcactcgagggaaaagcaagccaccgcgagatgactagcaaacttctgtcagacttgtgtgggactgtgatgagcacgaccgatgttgaaaaatcattcgacaaactgctaaaatag

SEQ ID NO: 77635 - DNA, 696 bp, Artificial Sequence
  derived and/or modified sequence
atggacgtcgaaaacgaacaaatattaaacgttaaccccgcagagaatgcaggcacggaggaaataaagaatgagatcaacggcaactggattagcgccagctccataaacgaggcacgcattaatgccaaggccaaacggagattacgtaagaattcctctcgagactctggcagaggcgattccgtgagcgactccgggtcagatgccctacgttcagggcttacagtgccaacgtcccccaagggtcggctgctcgatagaagatctcgtagcggcaagggcagaggtttacccaaaaaaggcggagcaggcggtaagggcgtatggggcacccccggtcaggtgtatgacgtagaggaggttgacgttaaggaccccaactatgacgacgaccaggagaactgtgtgtatgagactgtggtacttccgcttgatgagcgcgcatttgaaaaaactctgactccaattattcaagagtattttgagcatggggatacgaacgaggtggcagagatgctgagagatttgaatctgggagagatgaaatccggtgtcccggtcctggctgtcagtctggctctagaggggaaggcatcccaccgggagatgacttcgaagctgctatcggatctgtgcggcactgttatgtcaacaacggatgtcgagaaatcatttgacaagctactgaagtag

SEQ ID NO: 77636 - DNA, 819 bp, Artificial Sequence
  derived and/or modified sequence
cagaagagcggggtcggggccggctgaccaggaacctgggcgagcagcggcgggggcccgagggattctgaaggaagatttccattaggtaatttgtttaatcagtgcaagcgaaattaagggaaaatggatgtagaaaatgagcagatactgaatgtaaaccctgcagaaaatgctgggactgaggaaataaagaatgaaataaatggaaattggatttcagcatcctccattaacgaagctagaattaatgccaaggcaaaaaggcgactaaggaaaaactcatcccgggactctggcagaggcgattcggtcagcgacagtgggagtgacgcccttagaagtggattaactgtgccaaccagtccaaagggaaggttgctggataggcgatccagatctgggaaaggaaggggactaccaaagaaaggtggtgcaggaggcaaaggtgtctggggtacacctggacaggtgtatgatgtggaggaggtggatgtgaaagatcctaactatgatgatgaccaggagaactgtgtttatgaaactgtagttttgcctttggatgaaagggcatttgagaagactttaacaccaatcatacaggaatattttgagcatggagatactaatgaagttgcggaaatgttaagagatttaaatcttggtgaaatgaaaagtggagtaccagtgttggcagtatccttagcattggaggggaaggctagtcatagagagatgacatctaagcttctttctgacctttgtgggacagtaatgagcacaactgatgtggaaaaatcatttgataaattgttgaaa

SEQ ID NO: 77637 - DNA, 2247 bp, Artificial Sequence
  derived and/or modified sequence
acctttcagggagatttgagagaaagactccagaagcccgcggggagagcaggggttctggggaagataaagcccttcatccaggatccctctgtgaccataagatgagatggaccaaacgcccccggcgcgtcctgaatatctggtctcagggattcgaactccccctgtgaggaggaacagcaaactggccaccctgggcaggatcttcaaaccctggaaatggaggaaaaagaaaaacgaaaaactgaagcagacaacgtcagcgctggagaagaagatggccggcaggcaaggccgagaggagctcatcaagaaggggctgctggagatgatggagcaggatgctgaaagcaaaacttgcaaccccgatggaggaccccgatctgtacagagtgaaccacccactcccaagtcggagacgctgacttcagaagatgcccagcccggaagccccttggccactgggacggaccaggtctccctggacaagccactgtcctcagctgcccacttggacgatgcagccaagatgccttctgcatccagtggtgaagaagcagacgctggcagcctcctgcccaccaccaatgagctctcccaagccttagctggggctgactccctggacagtcctcccagacctctggagagatccgtgggccagctccccagccccccactgctgcccactccgccacccaaggcaagctccaaaaccacaaaaaatgtcacaggccaagccacactcttccaagcctccagcatgaagagtgccgacccttccctccggggccagctctccacacccacggggtctccgcatctcaccacggtccaccggcctcttcccccaagccgcgtcattgaggagctgcacagggcgctggccacgaagcaccgccaggacagttttcaaggaagagaaagtaaagggtctccaaagaagcggctggatgtccgtctgtcgagaacgtccagcgtggagcggggcaaggagagggaggaggcttggagctttgacggggcattggagaacaagcgaactgccgctaaggaatctgaggagaacaaggagaacctgatcataaattctgaactcaaagacgacttgcttttgtatcaggacgaggaggcgctgaacgactccattatttctggaacactgccacggaaatgcaagaaggagctcctggccgtgaagctaaggaaccggccaagcaaacaggaactagaagaccggaacattttccccagaaggactgatgaagaaagacaggagatccggcagcagatcgagatgaagctttccaaacggctgagccaaagacctgccgtggaagagctggagagaagaaatatcttgaaacaaaggaatgatcagacagagcaggaagaaagaagagaaatcaagcaaagattgacaagaaagcttaatcagagacccactgttgatgaattaagagacagaaaaattctgatacgattcagtgattacgtggaagtagcaaaagcgcaggactatgacaggagggcagacaaaccctggacgagactgtcagcagcagataaggcagcaattcgtaaagaattaaatgagtacaaaagtaatgaaatggaggtacatgcatcaagcaagcacttgacaagattccacaggccatagagattttcttctgagaagaatttgtgtttaattttttgataccaacactgaacattcatcagggaactttcctgaagttcagctcaagactaccctacctgctgtgtttgtgagaagagtaggatcacacacacaggtgcaatcttgaccacacttacctgcaagaggagtaaccagaggacacacttccttccttctttggtgtctgaggagtgtgaactgttggggtcagttaagacccaacataactctatcagaagaaaactgttgtttgcctttcaaccttgttttacagttctgcagtgtaatggaggacgggcaacgtgcatgtgcaggctcaccactcccaggcctctgacatgagggacatgtgacagtgtcattcagtattatgttcaaaagacatttttatcctgatcataattaatttgaaaactctttaagttcatgttatacaagatgatttactgtattatacttttccttttttatataatgtctaacaaaaaatacagctgcaacattttgattcctgttaattttgttctttaattaaatgactacttattgcaggaaattaa

SEQ ID NO: 77638 - DNA, 2372 bp, Artificial Sequence
  derived and/or modified sequence
cattcaaacccagtccattctggctcatggggcccaagccttgctctgctgccccaggctgtgtaggatgcatctgcggtggccattcttctctccagaggtccttcctaggactgactttgtggagattctgtgctggtaggtggcggggcaagacacgcctgtctctccccctggaaggagtcagtccagcaagaaacctgatgaaaccagtgactcccagctctggatgagatggaccaaacgcccccggcgcgtcctgaatatctggtctcagggattcgaactccccctgtgaggaggaacagcaaactggccaccctgggcaggatcttcaaaccctggaaatggaggaaaaagaaaaacgaaaaactgaagcagacaacgtcagcgctggagaagaagatggccggcaggcaaggccgagaggagctcatcaagaaggggctgctggagatgatggagcaggatgctgaaagcaaaacttgcaaccccgatggaggaccccgatctgtacagagtgaaccacccactcccaagtcggagacgctgacttcagaagatgcccagcccggaagccccttggccactgggacggaccaggtctccctggacaagccactgtcctcagctgcccacttggacgatgcagccaagatgccttctgcatccagtggtgaagaagcagacgctggcagcctcctgcccaccaccaatgagctctcccaagccttagctggggctgactccctggacagtcctcccagacctctggagagatccgtgggccagctccccagccccccactgctgcccactccgccacccaaggcaagctccaaaaccacaaaaaatgtcacaggccaagccacactcttccaagcctccagcatgaagagtgccgacccttccctccggggccagctctccacacccacggggtctccgcatctcaccacggtccaccggcctcttcccccaagccgcgtcattgaggagctgcacagggcgctggccacgaagcaccgccaggacagttttcaaggaagagaaagtaaagggtctccaaagaagcggctggatgtccgtctgtcgagaacgtccagcgtggagcggggcaaggagagggaggaggcttggagctttgacggggcattggagaacaagcgaactgccgctaaggaatctgaggagaacaaggagaacctgatcataaattctgaactcaaagacgacttgcttttgtatcaggacgaggaggcgctgaacgactccattatttctggaacactgccacggaaatgcaagaaggagctcctggccgtgaagctaaggaaccggccaagcaaacaggaactagaagaccggaacattttccccagaaggactgatgaagaaagacaggagatccggcagcagatcgagatgaagctttccaaacggctgagccaaagacctgccgtggaagagctggagagaagaaatatcttgaaacaaaggaatgatcagacagagcaggaagaaagaagagaaatcaagcaaagattgacaagaaagcttaatcagagacccactgttgatgaattaagagacagaaaaattctgatacgattcagtgattacgtggaagtagcaaaagcgcaggactatgacaggagggcagacaaaccctggacgagactgtcagcagcagataaggcagcaattcgtaaagaattaaatgagtacaaaagtaatgaaatggaggtacatgcatcaagcaagcacttgacaagattccacaggccatagagattttcttctgagaagaatttgtgtttaattttttgataccaacactgaacattcatcagggaactttcctgaagttcagctcaagactaccctacctgctgtgtttgtgagaagagtaggatcacacacacaggtgcaatcttgaccacacttacctgcaagaggagtaaccagaggacacacttccttccttctttggtgtctgaggagtgtgaactgttggggtcagttaagacccaacataactctatcagaagaaaactgttgtttgcctttcaaccttgttttacagttctgcagtgtaatggaggacgggcaacgtgcatgtgcaggctcaccactcccaggcctctgacatgagggacatgtgacagtgtcattcagtattatgttcaaaagacatttttatcctgatcataattaatttgaaaactctttaagttcatgttatacaagatgatttactgtattatacttttccttttttatataatgtctaacaaaaaatacagctgcaacattttgattcctgttaattttgttctttaattaaatgactacttattgcaggaaattaa

SEQ ID NO: 77639 - DNA, 1786 bp, Artificial Sequence
  derived and/or modified sequence
aaaaacacaaagaaacaaaaagtacgggagaggatcagttcattctcctgactcctggttggtctcaagacctcccctgttgcctgtgctctggaagattccccatagtacctactaggtgggccagagaaggatggatttgtgggaccctggaaggctgggaagaggactgagaagccacagccctgcgctgggaagagccacggagatgagatggaccaaacgcccccggcgcgtcctgaatatctggtctcagggattcgaactccccctgtgaggaggaacagcaaactggccaccctgggcaggatcttcaaaccctggaaatggaggaaaaagaaaaacgaaaaactgaagcagacaacgtcagcgctggagaagaagatggccggcaggcaaggccgagaggagctcatcaagaaggggctgctggagatgatggagcaggatgctgaaagcaaaacttgcaaccccgatggaggaccccgatctgtacagagtgaaccacccactcccaagtcggagacgctgacttcagaagatgcccagcccggaagccccttggccactgggacggaccaggtctccctggacaagccactgtcctcagctgcccacttggacgatgcagccaagatgccttctgcatccagtggtgaagaagcagacgctggcagcctcctgcccaccaccaatgagctctcccaagccttagctggggctgactccctggacagtcctcccagacctctggagagatccgtgggccagctccccagccccccactgctgcccactccgccacccaaggcaagctccaaaaccacaaaaaatgtcacaggccaagccacactcttccaagcctccagcatgaagagtgccgacccttccctccggggccagctctccacacccacggggtctccgcatctcaccacggtccaccggcctcttcccccaagccgcgtcattgaggagctgcacagggcgctggccacgaagcaccgccaggacagttttcaaggaagagaaagtaaagggtctccaaagaagcggctggatgtccgtctgtcgagaacgtccagcgtggagcggggcaaggagagggaggaggcttggagctttgacggggcattggagaacaagcgaactgccgctaaggaatctgaggagaacaaggagaacctgatcataaattctgaactcaaagacgacttgcttttgtatcaggacgaggaggcgctgaacgactccattatttctggaacactgccacggaaatgcaagaaggagctcctggccgtgaagctaaggaaccggccaagcaaacaggaactagaagaccggaacattttccccagaaggactgatgaagaaagacaggagatccggcagcagatcgagatgaagctttccaaacggctgagccaaagacctgccgtggaagagctggagagaagaaatatcttgaaacaaaggaatgatcagacagagcaggaagaaagaagagaaatcaagcaaagattgacaagaaagcttaatcagagacccactgttgatgaattaagagacagaaaaattctgatacgattcagtgattacgtggaagtagcaaaagcgcaggactatgacaggagggcagacaaaccctggacgagactgtcagcagcagataaggcagcaattcgtaaagaattaaatgagtacaaaagtaatgaaatggaggtacatgcatcaagcaagcacttgacaagattccacaggccatagagattttcttctgaga

SEQ ID NO: 77640 - protein, 270 aa, Artificial Sequence
  derived and/or modified sequence
MAWRALHPLLLLLLLFPGSQAQSKAQVLQSVAGQTLTVRCQYPPTGSLYEKKGWCKEASALVCIRLVTSSKPRTMAWTSRFTIWDDPDAGFFTVTMTDLREEDSGHYWCRIYRPSDNSVSKSVRFYLVVSPASASTQTSWTPRDLVSSQTQTQSCVPPTAGARQAPESPSTIPVPSHPSSPLPVPLPSRPQNSTLRPGPAAPIALVPVFCGLLVAKSLVLSALLVWWVLRNRHMQHQGRSLLHPAQPRPQAHRHFPLSHRAPGGTYGGKP

SEQ ID NO: 77641 - DNA, 813 bp, Artificial Sequence
  derived and/or modified sequence
atggcctggagggccctccacccactgcttttgctgttactgctctttcctggaagtcaagctcagtctaaggcgcaagttctgcaatccgtggccgggcagactttaactgtgcggtgccagtaccctcctaccggttccctctatgagaagaagggctggtgtaaggaagcttctgccctggtgtgcattcggttagttacatcatctaagccacggactatggcctggacctcgcggttcactatctgggacgatccagacgccggattctttacagtcaccatgaccgacctgagagaggaagactccggccactattggtgccggatctacaggccatctgacaactctgtatccaagtcggtgaggttttacctcgtagtctcacccgcctctgctagtacgcaaacctcatggaccccacgagacctggtatcgtcacagacacaaactcagagctgcgtgccccctaccgccggagctcggcaagcacctgaatccccttccacaattcctgtaccttctcatccttccagtccgctacccgtgcccctgccatcccgcccccagaactccacactccgccccggccccgccgcgcccattgcattggtgccagtcttctgcggactcttggtggccaagagtttggtactgagtgctctgctggtctggtgggtcctgcgcaaccgacatatgcagcatcagggcagatcactactgcatccagcacaaccaaggccccaggcacacagacacttcccactctcacaccgggcacctggcggaacttacggcggaaagccgtag

SEQ ID NO: 77642 - DNA, 813 bp, Artificial Sequence
  derived and/or modified sequence
atggcctggagggccctgcaccccctgctgctgctgctgctgctcttccctggcagccaggcccagagcaaggcccaggtgctgcagagcgtggccggccagaccctgactgtgcgctgccagtacccacccaccggcagcctgtatgagaagaagggctggtgcaaggaggccagcgccctggtgtgcatccggctggtgaccagcagcaagcccaggaccatggcctggaccagccgcttcaccatctgggatgatcctgatgctggcttcttcaccgtgaccatgacagacctgcgggaggaggacagcggccactactggtgccgcatctaccggcccagcgacaacagcgtgtccaagtctgtgcgcttctacctggtggtgtccccagccagcgccagcacccagacctcctggaccccccgggacctggtgagcagccagacccagacccagagctgtgtgcccccaacagctggggcccggcaggcccctgagagccccagcaccatccctgtgcccagccaccccagcagccccctgcctgtgcccctgcccagccggccccagaacagcaccctgcggcccggccctgctgcccccatcgccctggtgcctgtgttctgtggcctgctggtggccaagagcctggtgctgagcgccctgctggtgtggtgggtgctgaggaacagacacatgcagcaccagggccgcagcctgctgcacccagcccagccccggccccaggcccaccgccacttccccctgagccaccgggcccctgggggcacctacggcggcaagccctag

SEQ ID NO: 77643 - DNA, 1000 bp, Artificial Sequence
  derived and/or modified sequence
ccatgagcgcacaggaaaaggaccacatggcctggcgagccctacacccactgctactgctgctgctgctgttcccaggctctcaggcacaatccaaggctcaggtacttcaaagtgtggcagggcagacgctaaccgtgagatgccagtacccgcccacgggcagtctctacgagaagaaaggctggtgtaaggaggcttcagcacttgtgtgcatcaggttagtcaccagctccaagcccaggacgatggcttggacctctcgattcacaatctgggacgaccctgatgctggcttcttcactgtcaccatgactgatctgagagaggaagactcaggacattactggtgtagaatctaccgcccttctgacaactctgtctctaagtccgtcagattctatctggtggtatctccagcctctgcctccacacagacctcctggactccccgcgacctggtctcttcacagacccagacccagagctgtgtgcctcccactgcaggagccagacaagcccctgagtctccatctaccatccctgtcccttcacacccgtcctctccccttcctgtccctctgccttccaggccacagaactccacgctccgccctggccctgcagcccccattgccctggtgcctgtgttctgtggactcctcgtagccaagagcctggtgctgtcagccctgctcgtctggtgggttttaaggaatcggcacatgcagcatcaagggaggtctctgctgcacccagctcagcccaggccccaggcccatagacacttcccactgagccacagggcaccaggggggacatatggtggaaaaccatgatggagctcaggagcctggatacccaaaaagccacctgccaccttcaacaggtcacggaccttccctggacctcagtttcctcacctgtagagagagaaatattatatcacactgttgcaaggactaagataagcgatgatgatgatgaacacactttgtga

SEQ ID NO: 77644 - DNA, 813 bp, Artificial Sequence
  derived and/or modified sequence
atggcctggcgggccctgcaccccctgctgctgctgctgctgctgttccccggtagtcaggcacagtccaaagcccaggtcctccaaagcgtagctggccagactctaaccgtcagatgccaatacccccctacaggcagtctgtatgaaaaaaaaggctggtgcaaggaagctagtgcgctggtgtgtatcagactcgtgacttcatctaaaccaaggaccatggcctggacctctcggttcacaatttgggatgaccccgacgccggatttttcacggtgacaatgacagacctgcgggaagaggactcaggccattattggtgtcgcatttatcgaccgtccgataacagcgtgtccaagtcagttagattctatttggtggtgtcccctgcttccgcctcaacacaaacttcctggacgccacgcgacctggtgagctcccagacccagacccaaagctgcgtgcctccaacggcaggggcacggcaggccccagaatcacctagcacaatcccagtgccgtctcatccaagcagtccactccccgttccactgcccagtcgtccacaaaactccacacttagaccaggtccagccgcgccaattgccctggttccggtgttctgcggcttactggttgcgaagtcccttgtgctgagcgccttactcgtctggtgggttttgcgcaacaggcatatgcagcaccagggtaggtcactgctgcaccccgctcaacctcggccgcaggcacacaggcattttcctctgtctcatagggcaccaggcggaacttacggtggtaaaccttag

SEQ ID NO: 77645 - DNA, 813 bp, Artificial Sequence
  derived and/or modified sequence
atggcatggcgggctctccacccactacttctgctgcttctcctgtttcccggatcccaggcacagagtaaggcccaggtgctccagtccgttgccggtcaaaccctaactgtgagatgccagtaccctccaaccggcagtttatacgagaaaaaaggctggtgcaaagaagcctctgcgctggtgtgcatcaggctagtgacctctagtaaacctagaaccatggcttggaccagccgcttcacgatttgggacgaccctgatgcaggcttctttaccgttaccatgacagacttgagggaggaggatagtggacactattggtgtaggatttaccggccttcagacaacagcgttagcaaaagtgtccgcttttatctcgttgtctctccagctagcgcgtccacccaaacaagttggactcccagagacctggtcagctcccagacccagacccagtcgtgcgtcccacccacagcaggggcaaggcaggctcctgagtcaccaagtaccattcctgtgccctcccatcccagctcgcccctgcctgtgcccctgccatcgaggcctcagaattcaactctccgcccagggcctgccgcacctatcgcgttggtgcccgtgttctgcggtctgttagtggctaaatccctcgtactatccgctctcctggtttggtgggtcttgcgtaatagacacatgcagcaccaaggccgatcattattgcacccagctcagccccgacctcaggctcaccgacacttccccctctcccacagagcgcctggcggaacttacggagggaagccttag

SEQ ID NO: 77646 - DNA, 813 bp, Artificial Sequence
  derived and/or modified sequence
atggcctggagagccctgcaccccctgctgctgctgctgctgctgttccccggcagccaggcccagagcaaggcccaggtgctgcagagcgtggccggccagaccctgaccgtgagatgccagtacccccccaccggcagcctgtacgagaagaagggctggtgcaaggaggccagcgccctggtgtgcatcagactggtgaccagcagcaagcccagaaccatggcctggaccagcagattcaccatctgggacgaccccgacgccggcttcttcaccgtgaccatgaccgacctgagagaggaggacagcggccactactggtgcagaatctacagacccagcgacaacagcgtgagcaagagcgtgagattctacctggtggtgagccccgccagcgccagcacccagaccagctggacccccagagacctggtgagcagccagacccagacccagagctgcgtgccccccaccgccggcgccagacaggcccccgagagccccagcaccatccccgtgcccagccaccccagcagccccctgcccgtgcccctgcccagcagaccccagaacagcaccctgagacccggccccgccgcccccatcgccctggtgcccgtgttctgcggcctgctggtggccaagagcctggtgctgagcgccctgctggtgtggtgggtgctgagaaacagacacatgcagcaccagggcagaagcctgctgcaccccgcccagcccagaccccaggcccacagacacttccccctgagccacagagcccccggcggcacctacggcggcaagccctag

SEQ ID NO: 77647 - protein, 258 aa, Artificial Sequence
  derived and/or modified sequence
MAWRALHPLLLLLLLFPGSQAQSKAQVLQSVAGQTLTVRCQYPPTGSLYEKKGWCKEASALVCIRLVTSSKPRTMAWTSRFTIWDDPDAGFFTVTMTDLREEDSGHYWCRIYRPSDNSVSKSVRFYLVVSPASASTQTSWTPRDLVSSQTQTQSCVPPTAGARQAPESPSTIPVPSQPQNSTLRPGPAAPIALVPVFCGLLVAKSLVLSALLVWWVLRNRHMQHQGRSLLHPAQPRPQAHRHFPLSHRAPGGTYGGKP

SEQ ID NO: 77648 - DNA, 777 bp, Artificial Sequence
  derived and/or modified sequence
atggcttggagggccctccaccctttactactgctgctcctcctgtttccgggcagccaggcacagtccaaggcccaagtgctgcaatccgtcgcgggacagaccctcaccgtacggtgtcagtatcctcccaccgggagtctttatgaaaaaaaagggtggtgcaaggaagcctccgccctggtctgtataagacttgttaccagctcgaagccacggactatggcatggacatcccgctttactatctgggacgacccggatgctgggttcttcactgtcacaatgaccgacctcagagaagaagattcggggcattattggtgtcgtatttacagaccctccgataacagcgtaagtaaatctgtgcgattctacttagtagtgtccccagcctcagctagcacccagacgagttggacaccgagagatttggtgagctcccagacccagacccagtcctgtgtgcccccaactgccggcgctcggcaggcccccgagagtccgagcaccattcctgtcccttcccagccccagaactctacactgaggcccggccctgcagccccaattgcgctggtgcctgtattttgcggcctcctcgtcgccaaatccctggtgctgagcgctctcctagtgtggtgggtgctccggaacagacacatgcaacaccagggcaggtccctccttcaccccgctcagcccagacctcaggctcataggcattttcctctgagtcatagagcgccaggcggaacctacgggggaaagccttag

SEQ ID NO: 77649 - DNA, 777 bp, Artificial Sequence
  derived and/or modified sequence
atggcctggagggccctgcaccccctgctgctgctgctgctgctcttccctggcagccaggcccagagcaaggcccaggtgctgcagagcgtggccggccagaccctgactgtgcgctgccagtacccacccaccggcagcctgtatgagaagaagggctggtgcaaggaggccagcgccctggtgtgcatccggctggtgaccagcagcaagcccaggaccatggcctggaccagccgcttcaccatctgggatgatcctgatgctggcttcttcaccgtgaccatgacagacctgcgggaggaggacagcggccactactggtgccgcatctaccggcccagcgacaacagcgtgtccaagtctgtgcgcttctacctggtggtgtccccagccagcgccagcacccagacctcctggaccccccgggacctggtgagcagccagacccagacccagagctgtgtgcccccaacagctggggcccggcaggcccctgagagccccagcaccatccctgtgcccagccagccccagaacagcaccctgcggcccggccctgctgcccccatcgccctggtgcctgtgttctgtggcctgctggtggccaagagcctggtgctgagcgccctgctggtgtggtgggtgctgaggaacagacacatgcagcaccagggccgcagcctgctgcacccagcccagccccggccccaggcccaccgccacttccccctgagccaccgggcccctgggggcacctacggcggcaagccctag

SEQ ID NO: 77650 - DNA, 1154 bp, Artificial Sequence
  derived and/or modified sequence
agcccaccagacccagactcacctacagctggagatccccacttccctgtgcccacagaatctgccctttgcagtctcccatctccccaacccaggcctcagcctgtctcatttttctatcagacgtgctggaagagcagcagaatcaggcccagctcccaattccctctccccagtcttctccaggtgtcccctcccatgagcgcacaggaaaaggaccacatggcctggcgagccctacacccactgctactgctgctgctgctgttcccaggctctcaggcacaatccaaggctcaggtacttcaaagtgtggcagggcagacgctaaccgtgagatgccagtacccgcccacgggcagtctctacgagaagaaaggctggtgtaaggaggcttcagcacttgtgtgcatcaggttagtcaccagctccaagcccaggacgatggcttggacctctcgattcacaatctgggacgaccctgatgctggcttcttcactgtcaccatgactgatctgagagaggaagactcaggacattactggtgtagaatctaccgcccttctgacaactctgtctctaagtccgtcagattctatctggtggtatctccagcctctgcctccacacagacctcctggactccccgcgacctggtctcttcacagacccagacccagagctgtgtgcctcccactgcaggagccagacaagcccctgagtctccatctaccatccctgtcccttcacagccacagaactccacgctccgccctggccctgcagcccccattgccctggtgcctgtgttctgtggactcctcgtagccaagagcctggtgctgtcagccctgctcgtctggtgggttttaaggaatcggcacatgcagcatcaagggaggtctctgctgcacccagctcagcccaggccccaggcccatagacacttcccactgagccacagggcaccaggggggacatatggtggaaaaccatgatggagctcaggagcctggatacccaaaaagccacctgccaccttcaacaggtcacggaccttccctggacctcagtttcctcacctgtagagagagaaatattatatcacactgttgcaaggactaagataagcgatgatgatgatgaacacact

SEQ ID NO: 77651 - DNA, 777 bp, Artificial Sequence
  derived and/or modified sequence
atggcctggcgggccctgcaccccctgctgctgctgctgctgctgtttccgggatcccaggcccaatccaaggcccaggtgcttcagagcgtggccggtcaaaccctgaccgtccgctgccaatatcctcccacgggcagcctgtacgagaagaaaggatggtgcaaggaagctagcgccctggtttgtatccgtctagtgacaagctctaagcccagaactatggcttggactagcagatttaccatttgggatgaccctgatgccggattctttacagtaacaatgacagacctaagagaagaggatagcggtcactactggtgccggatttacaggccttccgacaatagtgtgtccaagtccgtaagattctacttggtggtttctcccgcctcagcatccacacaaacctcatggacgcccagggacctggtatcctcccagacgcagacccagtcctgcgtgcctcccaccgccggagcacgccaggcgccggagtctccatccaccatcccagtgcctagccagccacagaatagcaccctgcggccgggtcccgctgcccctattgccctggtcccggtgttttgtggcctcctggtggccaaatctcttgtcttgagtgcactgcttgtgtggtgggttcttcggaatcgccacatgcagcaccagggccgatcccttttgcaccccgctcagcctagacctcaggctcatagacactttcccctgtcccaccgcgcacccggggggacttatggaggcaagccctag

SEQ ID NO: 77652 - DNA, 777 bp, Artificial Sequence
  derived and/or modified sequence
atggcatggcgtgcattacatccacttctcttgctgctgctcctctttcctgggagtcaggcacaaagcaaagcccaagtgttgcagagcgtggccggtcagacacttacagtcagatgccagtacccccctacaggcagtctctatgagaaaaaaggatggtgcaaggaagcgtctgcattggtatgtatcaggcttgtcacaagttccaagccaagaaccatggcatggacatcccgcttcaccatatgggatgacccggacgccggtttcttcactgtgaccatgactgatcttcgagaggaagattctggtcactactggtgtcgaatctatagaccctcggacaacagcgtgtccaaatctgtccgcttctaccttgtggtaagtcccgcatctgcatccacacaaacctcctggacccctcgcgacttggtgagctctcaaacccagacacagtcttgcgtacctccaactgccggtgccagacaagccccagagtccccttcaacaatccctgtgccttcccagcctcagaactcaaccctcagacccggtccagccgctcccatcgccctggttcccgtgttctgcggcctgctggtcgccaaatctctggtgctgtcggctctcctcgtatggtgggtgctgcgcaatcggcacatgcagcaccagggccgatctctgctgcacccagcccagccaagaccccaggcccacaggcattttccactttcgcatagggcccctgggggaacttatggtggcaagccctag

SEQ ID NO: 77653 - DNA, 777 bp, Artificial Sequence
  derived and/or modified sequence
atggcctggagagccctgcaccccctgctgctgctgctgctgctgttccccggcagccaggcccagagcaaggcccaggtgctgcagagcgtggccggccagaccctgaccgtgagatgccagtacccccccaccggcagcctgtacgagaagaagggctggtgcaaggaggccagcgccctggtgtgcatcagactggtgaccagcagcaagcccagaaccatggcctggaccagcagattcaccatctgggacgaccccgacgccggcttcttcaccgtgaccatgaccgacctgagagaggaggacagcggccactactggtgcagaatctacagacccagcgacaacagcgtgagcaagagcgtgagattctacctggtggtgagccccgccagcgccagcacccagaccagctggacccccagagacctggtgagcagccagacccagacccagagctgcgtgccccccaccgccggcgccagacaggcccccgagagccccagcaccatccccgtgcccagccagccccagaacagcaccctgagacccggccccgccgcccccatcgccctggtgcccgtgttctgcggcctgctggtggccaagagcctggtgctgagcgccctgctggtgtggtgggtgctgagaaacagacacatgcagcaccagggcagaagcctgctgcaccccgcccagcccagaccccaggcccacagacacttccccctgagccacagagcccccggcggcacctacggcggcaagccctag

SEQ ID NO: 77654 - protein, 237 aa, Artificial Sequence
  derived and/or modified sequence
MSDSDLGEDEGLLSLAGKRKRRGNLPKESVKILRDWLYLHRYNAYPSEQEKLSLSGQTNLSVLQICNWFINARRRLLPDMLRKDGKDPNQFTISRRGGKASDVALPRGSSPSVLAVSVPAPTNVLSLSVCSMPLHSGQGEKPAAPFPRGELESPKPLVTPGSTLTLLTRAEAGSPTGGLFNTPPPTPPEQDKEDFSSFQLLVEVALQRAAEMELQKQQDPSLPLLHTPIPLVSENPQ

SEQ ID NO: 77655 - protein, 174 aa, Artificial Sequence
  derived and/or modified sequence
MSDSDLGEDEGLLSLAGKRKRRGNLPKESVKILRDWLYLHRYNAYPSEQEKLSLSGQTNLSVLQICNWFINARRRLLPDMLRKDGKDPNQFTISRRGGKASDVALPRGSSPSVLAVSVPAPTNVLSLSVCSMPLHSGQGEKPAAPFPRGELESPKPLVTPGSTLTLLTRAEAGS

SEQ ID NO: 77656 - DNA, 714 bp, Artificial Sequence
  derived and/or modified sequence
atgagcgacagcgacctgggcgaggacgagggcctgctgagcctggccggcaagagaaagagaagaggcaacctgcccaaggagagcgtgaagatcctgagagactggctgtacctgcacagatacaacgcctaccccagcgagcaggagaagctgagcctgagcggccagaccaacctgagcgtgctgcagatctgcaactggttcatcaacgccagaagaagactgctgcccgacatgctgagaaaggacggcaaggaccccaaccagttcaccatcagcagaagaggcggcaaggccagcgacgtggccctgcccagaggcagcagccccagcgtgctggccgtgagcgtgcccgcccccaccaacgtgctgagcctgagcgtgtgcagcatgcccctgcacagcggccagggcgagaagcccgccgcccccttccccagaggcgagctggagagccccaagcccctggtgacccccggcagcaccctgaccctgctgaccagagccgaggccggcagccccaccggcggcctgttcaacacccccccccccaccccccccgagcaggacaaggaggacttcagcagcttccagctgctggtggaggtggccctgcagagagccgccgagatggagctgcagaagcagcaggaccccagcctgcccctgctgcacacccccatccccctggtgagcgagaacccccagtag

SEQ ID NO: 77657 - DNA, 525 bp, Artificial Sequence
  derived and/or modified sequence
atgagcgacagcgacctgggcgaggacgagggcctgctgagcctggccggcaagagaaagagaagaggcaacctgcccaaggagagcgtgaagatcctgagagactggctgtacctgcacagatacaacgcctaccccagcgagcaggagaagctgagcctgagcggccagaccaacctgagcgtgctgcagatctgcaactggttcatcaacgccagaagaagactgctgcccgacatgctgagaaaggacggcaaggaccccaaccagttcaccatcagcagaagaggcggcaaggccagcgacgtggccctgcccagaggcagcagccccagcgtgctggccgtgagcgtgcccgcccccaccaacgtgctgagcctgagcgtgtgcagcatgcccctgcacagcggccagggcgagaagcccgccgcccccttccccagaggcgagctggagagccccaagcccctggtgacccccggcagcaccctgaccctgctgaccagagccgaggccggcagctag

SEQ ID NO: 77658 - DNA, 714 bp, Artificial Sequence
  derived and/or modified sequence
atgtctgactctgatctgggcgaggacgaaggccttctctccctggccggcaaacgtaaacggagaggaaacctgccaaaagagtccgtaaaaatactccgagactggctctaccttcacagatataacgcataccccagcgaacaggagaaactaagtctaagcgggcagacaaatctttctgttttgcaaatatgtaattggttcatcaatgcacgccggcgacttctgcccgatatgctacgcaaggacggtaaagaccccaatcagttcaccatttctagaagaggtggcaaggcttccgatgtggccctcccccgaggaagctcccccagcgttcttgccgtgtctgtgcctgccccaacaaatgttttgtcgctctccgtgtgtagcatgcctctccatagtgggcaaggggaaaagccagccgcaccttttcccagaggtgaactcgaatcccccaaacctcttgtgactcctgggagcacactgacgctgttgacccgcgccgaagcagggtcccctacaggtggactgttcaatactccccctcctaccccccccgagcaggataaagaggatttttctagcttccaactgcttgtcgaggtggccctgcaacgggccgcagagatggaattgcagaagcagcaggacccctctctgcctttactacatacaccgatcccgctggtgtctgagaacccccagtag

SEQ ID NO: 77659 - DNA, 714 bp, Artificial Sequence
  derived and/or modified sequence
atgagcgactcagacctgggtgaagatgaaggccttctttctcttgcaggaaaaaggaagcggcgggggaacctcccaaaggagagtgtcaagattctgagggattggctgtatttacacagatataacgcatatccctccgaacaggagaaactgagtctgtctgggcagacaaacttgtctgtcctgcagatttgtaactggttcattaatgctaggaggcggttgctgccagatatgctgagaaaagatgggaaggacccaaaccagtttacaatttcacgtcgtggtgggaaagctagtgatgtggcgttaccccggggcagtagccctagcgtgctggccgtgagtgtacctgccccaaccaacgtgctgtctctttctgtgtgtagtatgcccctgcatagcgggcagggcgaaaaacccgctgctcctttccccagaggcgagcttgaaagccctaaaccactcgtcacacccggaagtacactgaccctactgactcgggccgaagctggctccccaacaggcgggctttttaatacgccaccacctaccccacctgaacaggacaaggaggacttcagctcctttcagctactggtggaagtggcactccaacgtgcagcagaaatggagcttcagaaacagcaggatccctccttgccattgttacacaccccaatccctctggtgagtgagaatccgcagtag

SEQ ID NO: 77660 - DNA, 525 bp, Artificial Sequence
  derived and/or modified sequence
atgtctgacagcgatctcggcgaagatgaaggactactctccttggctggcaagcggaagaggcggggaaatctccctaaggagtccgtgaagatcctccgcgactggctgtacctccatcgctacaacgcctatccgtccgaacaagaaaagttatccctatctggtcaaacaaacctgtctgtgctgcagatttgtaactggtttataaacgccaggaggcggctcctgcctgatatgcttcgaaaggacggcaaagatcccaatcaattcaccatctctaggagagggggcaaggcttccgacgtcgctctgccacgcggtagtagcccgtccgttctggcagtttccgtacctgcacctacaaatgtgctgagtctatctgtgtgctccatgcccttgcacagcgggcaaggcgaaaagccggccgctccttttcccagaggagagttggagtcgccaaagcctctggttacacctggcagtacactcactctacttactagagcagaagctgggagttag

SEQ ID NO: 77661 - DNA, 714 bp, Artificial Sequence
  derived and/or modified sequence
atgagcgatagtgatttaggcgaagacgagggattactgtctttagctggcaagaggaaacggagaggtaacctcccgaaagagtctgtgaaaatcctgagagattggctttatctccaccgttataacgcatatccctccgaacaggagaagctgtcactttctgggcagacaaatctgtctgtgcttcagatctgcaactggttcattaatgccagacgtcgactcctgcccgatatgctccggaaagatgggaaggaccctaaccaatttaccatttcccggcggggcgggaaagcttctgatgttgcccttcctcgtggcagctctccctccgttttggcagtcagcgttcctgcccccactaatgtcctgagcctgtccgtttgtagcatgccactccactctggtcaaggcgaaaaaccggccgctccattcccccgcggtgagctcgaaagtcccaaaccgctcgtgacaccaggttctactctgacactgctcaccagggcagaagctggctcacccacaggaggcctgttcaacacccctcccccaacgccccctgaacaggacaaggaagactttagctcatttcaactgttagttgaggtcgccctgcagagagcagccgagatggagttacaaaagcaacaagacccttccctgcctctgctacacacacctatccctttggtaagtgaaaatcctcagtag

SEQ ID NO: 77662 - DNA, 714 bp, Artificial Sequence
  derived and/or modified sequence
atgtctgacagcgacctgggggaggatgagggcctgctgagcctggccggcaagaggaagagaagaggcaacctgcccaaggagagcgtgaagatcctgcgggactggctgtacctgcaccgctacaatgcctaccccagcgagcaggagaagctgagcctgagcggccagaccaacctgtctgtgctgcagatctgcaactggttcatcaatgcccggcggcggctgctgcctgacatgctgaggaaggatggcaaggaccccaaccagttcaccatcagcagaagaggaggcaaggccagtgatgtggccctgccccggggcagcagccccagcgtgctggccgtgtctgtgcctgcccccaccaacgtgctgagcctgtctgtgtgcagcatgcccctgcacagcggccagggcgagaagccagctgcccccttccccagaggagagctggagagccccaagcccctggtgaccccaggcagcaccctgaccctgctgaccagggctgaggccggcagccccaccggcggcctcttcaacaccccaccacccaccccacctgagcaggacaaggaggacttcagcagcttccagctgctggtggaggtggccctgcagagagctgctgagatggagctgcagaagcagcaggaccccagcctgcccctgctgcacacccccatccccctggtgtctgagaacccccagtag

SEQ ID NO: 77663 - DNA, 525 bp, Artificial Sequence
  derived and/or modified sequence
atgtctgacagcgacctgggggaggatgagggcctgctgagcctggccggcaagaggaagagaagaggcaacctgcccaaggagagcgtgaagatcctgcgggactggctgtacctgcaccgctacaatgcctaccccagcgagcaggagaagctgagcctgagcggccagaccaacctgtctgtgctgcagatctgcaactggttcatcaatgcccggcggcggctgctgcctgacatgctgaggaaggatggcaaggaccccaaccagttcaccatcagcagaagaggaggcaaggccagtgatgtggccctgccccggggcagcagccccagcgtgctggccgtgtctgtgcctgcccccaccaacgtgctgagcctgtctgtgtgcagcatgcccctgcacagcggccagggcgagaagccagctgcccccttccccagaggagagctggagagccccaagcccctggtgaccccaggcagcaccctgaccctgctgaccagggctgaggccggcagctag

SEQ ID NO: 77664 - DNA, 714 bp, Artificial Sequence
  derived and/or modified sequence
atgagcgacagcgacctgggcgaggacgagggcctgctgagcctggcagggaagcgcaagagaaggggcaacctccccaaagagtccgttaagattctccgtgactggctctaccttcatcggtacaatgcatacccatcagagcaggaaaagctgtcgctatcaggacagacaaatttgtctgtgctgcagatttgcaactggtttattaatgctcgccggcgactgttgcccgacatgctccgcaaggatggaaaggatcctaaccaattcacaatatcaaggcgtggagggaaagccagcgacgtcgccctaccgcggggttcctccccttccgtcttggcagtctcagtacccgcccctaccaacgtgctgtcattgtctgtctgtagtatgcccctgcattccggtcaaggtgaaaagcccgcggcaccttttccgagaggagagctggagtccccgaaaccattggtaacccctggtagtacgttaacgctattgacaagggccgaggccggctctcctaccggaggcctgttcaatacccccccaccaacacctcctgagcaggataaagaagacttcagctcgttccagcttctggttgaggtggccctccagagagctgccgagatggaactgcagaaacagcaggacccgagtctgccactgctccacaccccgattcccctagtgtccgagaatccccaatag

SEQ ID NO: 77665 - DNA, 714 bp, Artificial Sequence
  derived and/or modified sequence
atgagcgacagcgacctgggcgaggacgagggcctgctgagcctggccgggaagcgaaagcggcgaggcaaccttcccaaggaaagtgtgaaaatccttcgcgattggttgtatctgcaccgatataatgcatacccaagtgagcaggaaaagctcagtctcagtggacaaactaacctgtcagtgctgcagatctgcaactggttcattaatgccagaaggagacttctgccagacatgttgcgtaaggatggcaaggaccctaatcagttcacgatctctcggagaggaggaaaggccagcgatgtggcacttccaaggggcagctcacctagcgtccttgccgtcagcgtacccgctcccacaaacgtgttgtctctcagtgtgtgtagtatgcctttgcacagtgggcagggggagaaaccagccgccccttttcccagaggcgaactcgaatctccaaagcctctggttacccctgggtcgacccttaccctgctgacacgggccgaagctggctccccgacgggcggcctcttcaataccccaccgcctaccccacccgaacaggacaaagaggacttcagttctttccagctactcgtggaggttgctctgcagcgggcggcagagatggaacttcagaaacagcaggatccatcgctaccactgttgcatactccaattcccctcgtgagcgagaacccccagtag

SEQ ID NO: 77666 - DNA, 525 bp, Artificial Sequence
  derived and/or modified sequence
atgagcgacagcgacctgggcgaggacgagggcctgctgagcctggctggaaagagaaaacgtagaggtaatctgcctaaggagagcgtaaaaattttgcgagattggttatacctccaccggtacaatgcctacccctcggaacaggagaagctgtcactgtccgggcaaacaaatctgtcagtactgcaaatctgcaattggttcatcaacgcccgccgcagactgctcccggacatgttgagaaaggatggcaaagaccccaaccagttcactattagccgccggggtgggaaagcgagcgacgttgcactgcctcgtggctccagtccttcagtccttgctgtgtccgttcctgcacccacaaatgttttgagtttgagcgtgtgctcgatgcctctgcacagcggccagggagaaaaacccgcagcgccgttccctcgaggcgagcttgagtccccgaaacccctcgtgacaccaggatccaccttgacattacttacaagagctgaagctggctcttag

SEQ ID NO: 77667 - DNA, 714 bp, Artificial Sequence
  derived and/or modified sequence
atgagcgacagcgacctgggcgaggacgagggcctgctgagcctggcaggaaaacgcaagcgtcggggcaatcttccgaaagagtctgtgaaaattctaagagactggctctacttacacaggtacaatgcataccctagtgaacaagagaagttaagcctcagtggtcagacgaacctaagtgtcctgcagatctgcaattggttcataaacgcccggcggagactccttcccgacatgttacgcaaagatgggaaagacccaaaccagttcactattagccggagaggcggtaaagctagtgacgtggccctgccacgaggaagttcccccagcgtgttagccgtgtctgtccctgctcctaccaacgtgctcagtctcagtgtttgtagcatgccccttcattccggccaaggagagaagcctgcagccccattcccaaggggggagctagaatctccaaagcctctggttacaccaggttcaactctgactctgctcacaagagccgaggctgggtcccccaccgggggactgtttaacaccccccctcccaccccccctgagcaggataaggaagacttctcctcatttcaacttctggtggaagtcgccttacaaagagccgctgagatggagctgcaaaaacaacaagaccctagcttgcccctgctgcatacaccaatcccccttgtatcagagaatccacagtag

SEQ ID NO: 77668 - DNA, 714 bp, Artificial Sequence
  derived and/or modified sequence
atgtcagacagcgacctcggagaggatgaaggtctcttgagcttagcgggtaaacgtaaacgaaggggcaacctgcctaaagagtcggtcaaaatcctgagagactggttgtatttgcatagatataacgcataccctagcgagcaggaaaagctttcattgtctgggcaaactaatttatcggtgctgcaaatttgtaactggtttatcaacgcccgaaggcggctgctgcccgatatgttgcggaaggacgggaaggaccccaaccagtttacaattagtcggagagggggtaaggcatctgatgttgcccttcccagaggctcaagcccgtcggtgcttgctgtgtccgtgcctgcacctactaatgtgctgagcttgtctgtatgttcaatgcccctgcactctgggcagggcgagaaacccgcagcccctttccccaggggagagctcgagagcccaaaaccgctggtgacacctgggagtacactgactctgctcaccagggctgaggcaggttctccaactgggggactcttcaatactccaccaccaacccccccagaacaggacaaagaagacttttcatccttccaacttcttgttgaagttgcgttgcaacgggctgctgaaatggagctgcaaaaacagcaggacccgtcactgcctctcttgcacacaccaattccactcgtgagcgagaacccccagtag

SEQ ID NO: 77669 - DNA, 714 bp, Artificial Sequence
  derived and/or modified sequence
atgagtgatagcgatctgggggaggacgaaggtctcctgtctcttgccggtaagaggaagaggcgcggtaatctccccaaggaatccgtcaagatcctgcgggattggctgtacctgcatagatataatgcctaccccagtgagcaagaaaagctgtctctgagtgggcagactaacctgtcagtactgcagatatgtaattggtttataaatgccagaagaaggctgctccccgacatgttgcgcaaagatggaaaggatccgaaccagttcaccatctccagacgcggaggcaaagccagtgacgtggctctccccagaggcagctctccgtctgtgttggccgtgtctgtgccagcgcctacgaacgttctctctctgtctgtctgttctatgcccctgcacagcgggcagggcgagaaaccagccgcaccgttccccagaggcgagttggagtctcctaaacctcttgtcactcccggatcaacactgacgttgctcactcgcgctgaagctgggagccctaccgggggactcttcaacacacctcctccaacacctcccgaacaggataaggaggacttttcttcgttccagctacttgtggaggtggccctgcagcgagccgctgagatggagctccaaaagcagcaggacccctccctgcccctattgcacaccccaatcccactggtaagcgagaatcctcagtag

SEQ ID NO: 77670 - DNA, 525 bp, Artificial Sequence
  derived and/or modified sequence
atgtctgacagtgacttgggcgaagatgagggcctcctgagcctggctggcaaacgaaagaggaggggcaacttacccaaagaatccgtgaagatacttcgagactggctttatctgcaccgatacaacgcatatccgagcgaacaggagaagctcagcctgagcggacagaccaacctatctgtgctgcagatttgtaactggttcataaacgccagacgaagactgcttcctgacatgctgcggaaggatggaaaagatccaaatcagttcacgatctcacgacgaggcggaaaggcaagtgatgtggcactccccagaggttctagcccatccgtattggcagtgagtgtgcccgctccaaccaatgtcctatcgctctctgtttgtagtatgcctctccattcaggacaaggagaaaagcccgctgcccctttcccacggggagagctggagagcccgaaaccgcttgtcacacccggatccactctgactttgctaactcgcgctgaagcaggatcgtag

SEQ ID NO: 77671 - DNA, 714 bp, Artificial Sequence
  derived and/or modified sequence
atgagcgattcagacctgggcgaagacgaaggcctactaagtctggcagggaagcgtaaacgcaggggaaacctccccaaagaatccgtgaaaatcctgagggactggttgtatctccatcgatacaatgcttatccatccgaacaagaaaagcttagtctaagtggccagactaacctgtcagtgctgcagatctgcaattggttcatcaatgctaggcgccgattgttgcctgacatgttgaggaaggacggaaaagatcctaaccagttcacgattagcagacgcggaggaaaagcatctgatgtcgcacttccgaggggttcatccccaagcgtgctcgccgtcagtgtacctgcccctaccaatgtgctttctcttagtgtatgttcaatgcctttgcactccggccagggcgagaagcctgcagccccttttcctaggggagaactggagagccctaaacctttggtcaccccgggatcgacactgacgctcctgaccagggcggaggctggaagcccaaccggcggactgtttaatacacccccacccacccccccagagcaggacaaagaagatttttcttcttttcagctcctggtggaagtcgcactgcagcgggcagcggagatggagcttcaaaagcagcaggatccctctctgccactgttacacactccgatcccactagtgtcggaaaacccgcagtag

SEQ ID NO: 77672 - DNA, 3613 bp, Artificial Sequence
  derived and/or modified sequence
gtgctttccagccgcgagctgtcaggccgagtgtcaggccgggcaggtacgcggcgcgcgcccccggcgccccccgctccccgccgggacgccccgcgccgagccggaggccgcgtggacccgaaagccgctgggaaaagtttacccaaggtccagcctagcccctaggcaccatgtcggacagtgatctaggtgaggacgaaggcctcctctccctggcgggcaaaaggaagcgcagggggaacctgcccaaggagtcggtgaagatcctccgggactggctgtacttgcaccgctacaacgcctacccctcagagcaggagaagctgagcctttctggacagaccaacctgtcagtgctgcaaatatgtaactggttcatcaatgcccggcggcggcttctcccagacatgcttcggaaggatggcaaagaccctaatcagtttaccatttcccgccgcgggggtaaggcctcagatgtggccctcccccgtggcagcagcccctcagtgctggctgtgtctgtcccagcccccaccaatgtgctctccctgtctgtgtgctccatgccgcttcactcaggccagggggaaaagccagcagcccctttcccacgtggggagctggagtctcccaagcccctggtgacccctggtagcacacttactctgctgaccagggctgaggctggaagccccacaggtggactcttcaacacgccaccacccacacccccagagcaggacaaagaggacttcagcagcttccagctgctggtggaggtggcgctacagagggctgctgagatggagcttcagaagcagcaggacccatcactcccattactgcacactcccatccctttagtctctgaaaatccccagtaggcatctgccaagaagggtgctgaaggctccagccagctgtcctgggtttccgttttggttccctttcatacagagggttttctatggatcactgccaaacattgggatcatctcctctgtccagaggtcttcaacaggaagatgccagctggcaccactgcactgtgatgggggccctctcctctgctgactctgccgtttctccaggcctccgctcagtgatgagaccaagagatcggagacaagcatggtgctgctgcttctgctgcttctccagaaaatccctgggacacctttgttccagcctggtttcctgggctgggctcaggaaagctgccaaattcagtcctatgttgggtccaagctgcccctgtgctgtttctgtcaagccaggtgtggacattccaagttcatatgcgtgaacaaaagaaaagaggaacccagtggatgtaacagaaccgactccagttgaatgtttagatttttgctaaactgttttctttttcccttttttgctgtggtttgcattcacggcagtagttagcccaggtgtggggaacgagagtgcactgcatgatagcgttctggtgagctgggaaggacccaccactgccactgaggattgttttggaagaaaggaatatttttatcttggggaccagctaagtctctgcagtagtgtgaaattccaaatggttgttttatcattggtttggtttaccaaaaaaaaggcagggaaaaaaaaaaaaaacaaccgtatgagcgcattggcttgtctgccgcaggcacagaagggtagaaagccacagcagggggcagtccagcagactctgactcaactttctaggcacctagcagagaaagataagatcaaaaggtgtttggtttttcttttaatttttattgtagtttttttgggtgggtgggggaagtaaactagactgaagcgatggattttttttttcttttttttctttagtgtttttccctttgttcttgaacacttttgccctgcagcctcagttttgaattcttttagcaacttggattagaggggcccatatgtcagaagctcccagcacctcctacttgggagaaaagtgagccatctgctggtcaggaagtcctccagagaggcagcttttcccacaatggtggcaggaaactttggggaaagcaggaatggtgtccactgctgcggaggaactgccttcagagaaggtggggctggaaaagggttagaagcctcctagctgggattgtctttgtttcacctttctttaaattagaattacagaagcccctgcccagtgaacagataacgattggtcttatgctcctccctttcccccattttttcttttgctgttttgttttttgttttttgtttgtttgtttgtttttttgagacagagtcatgctctgtcacccgggctggagtgcagtggtgcgatctcagctcactgtaacctccgcctcccgggttcaagcaattatttgcctcagcctcccgagtagctgggattataggcacccgccaccatgtctggcttttagtagagacggggtttcaccatcttggccaggctggtcttggaactcctgacctcgtgagccaccacgcccagcctcttttgctgtttcattgctgacagtgttcaacaatatgccccatctttatatatcctaagaaacactaatcctaggttattgctagccaaaatatttttgtcctgagtagtgtcactgggccaaaagatagatcaggacgacagcctttagttttcctgaaatcaccaggtcaggcacaaggagaaaaggttcctggatactgactaacttgggtgggtggatctagccaggagaaagacagtaacatgtgttctgtactttctgggaagatccctgaagccatcacagaggctccccaacttctgagtcgcccatctgttgctgtgggagtgtgaacggatcgctgaaggagagggagctttgctctctctaggtgggcaagtttcctgggctctctgtgttgcctccctctggcttcttcctcccgtgccctctccccgtgtgccccagggggatcagggatcctcaccctcctgaggcccagtggggaagaatgaacatggcttcatccaggttaactgatgctgccatttgcccagcctcttccatcccagccctgtcagtgagcccaggtctggtgcaactgctgcaggatgcctgtagtagggaactctggaagtgtattgggctgaggtgggattttccctccccacagtgcactgagcaatggagggtggtgagggagccatgctgctgaattctggttggcatttccccattatgtaaaatggggtgttgggtagggcagactctgcttgggtttggttgtaagataaacctggaggagaagcacagttgtcccattgaattatttgagcaaaaactactgtaaataacttttttgtcttttgtcaaataaaatttttttttgtttttttaagcagaaacagggttcttgattgatccaccagggctcagggcccaggcttgaagacaaagcagtcactggcttcttattttgctttacatcttttactctccctctagtagccagctgtgagttctgtgcacgctgtacccccattccctttcaccagctccattctgtatcccattcaactcagggtaaagggggcatttgcatctcacattgg

SEQ ID NO: 77673 - DNA, 3432 bp, Artificial Sequence
  derived and/or modified sequence
gcggggggtgggcgcagctcgtcgcgctccgcacaaagtttgttttctccctccgggcgggtgggggagggcgcagagggcgcggggggaggagaggggatctgacgtcaggccgcgaggtgctttccagccgcgagctgtcaggccgagtgtcaggccgggcaggtttacccaaggtccagcctagcccctaggcaccatgtcggacagtgatctaggtgaggacgaaggcctcctctccctggcgggcaaaaggaagcgcagggggaacctgcccaaggagtcggtgaagatcctccgggactggctgtacttgcaccgctacaacgcctacccctcagagcaggagaagctgagcctttctggacagaccaacctgtcagtgctgcaaatatgtaactggttcatcaatgcccggcggcggcttctcccagacatgcttcggaaggatggcaaagaccctaatcagtttaccatttcccgccgcgggggtaaggcctcagatgtggccctcccccgtggcagcagcccctcagtgctggctgtgtctgtcccagcccccaccaatgtgctctccctgtctgtgtgctccatgccgcttcactcaggccagggggaaaagccagcagcccctttcccacgtggggagctggagtctcccaagcccctggtgacccctggtagcacacttactctgctgaccagggctgaggctggaagccccacaggtggactcttcaacacgccaccacccacacccccagagcaggacaaagaggacttcagcagcttccagctgctggtggaggtggcgctacagagggctgctgagatggagcttcagaagcagcaggacccatcactcccattactgcacactcccatccctttagtctctgaaaatccccagtaggcatctgccaagaagggtgctgaaggctccagccagctgtcctgggtttccgttttggttccctttcatacagagggttttctatggatcactgccaaacattgggatcatctcctctgtccagaggtcttcaacaggaagatgccagctggcaccactgcactgtgatgggggccctctcctctgctgactctgccgtttctccaggcctccgctcagtgatgagaccaagagatcggagacaagcatggtgctgctgcttctgctgcttctccagaaaatccctgggacacctttgttccagcctggtttcctgggctgggctcaggaaagctgccaaattcagtcctatgttgggtccaagctgcccctgtgctgtttctgtcaagccaggtgtggacattccaagttcatatgcgtgaacaaaagaaaagaggaacccagtggatgtaacagaaccgactccagttgaatgtttagatttttgctaaactgttttctttttcccttttttgctgtggtttgcattcacggcagtagttagcccaggtgtggggaacgagagtgcactgcatgatagcgttctggtgagctgggaaggacccaccactgccactgaggattgttttggaagaaaggaatatttttatcttggggaccagctaagtctctgcagtagtgtgaaattccaaatggttgttttatcattggtttggtttaccaaaaaaaaggcagggaaaaaaaaaaaaaacaaccgtatgagcgcattggcttgtctgccgcaggcacagaagggtagaaagccacagcagggggcagtccagcagactctgactcaactttctaggcacctagcagagaaagataagatcaaaaggtgtttggtttttcttttaatttttattgtagtttttttgggtgggtgggggaagtaaactagactgaagcgatggattttttttttcttttttttctttagtgtttttccctttgttcttgaacacttttgccctgcagcctcagttttgaattcttttagcaacttggattagaggggcccatatgtcagaagctcccagcacctcctacttgggagaaaagtgagccatctgctggtcaggaagtcctccagagaggcagcttttcccacaatggtggcaggaaactttggggaaagcaggaatggtgtccactgctgcggaggaactgccttcagagaaggtggggctggaaaagggttagaagcctcctagctgggattgtctttgtttcacctttctttaaattagaattacagaagcccctgcccagtgaacagataacgattggtcttatgctcctccctttcccccattttttcttttgctgttttgttttttgttttttgtttgtttgtttgtttttttgagacagagtcatgctctgtcacccgggctggagtgcagtggtgcgatctcagctcactgtaacctccgcctcccgggttcaagcaattatttgcctcagcctcccgagtagctgggattataggcacccgccaccatgtctggcttttagtagagacggggtttcaccatcttggccaggctggtcttggaactcctgacctcgtgagccaccacgcccagcctcttttgctgtttcattgctgacagtgttcaacaatatgccccatctttatatatcctaagaaacactaatcctaggttattgctagccaaaatatttttgtcctgagtagtgtcactgggccaaaagatagatcaggacgacagcctttagttttcctgaaatcaccaggtcaggcacaaggagaaaaggttcctggatactgactaacttgggtgggtggatctagccaggagaaagacagtaacatgtgttctgtactttctgggaagatccctgaagccatcacagaggctccccaacttctgagtcgcccatctgttgctgtgggagtgtgaacggatcgctgaaggagagggagctttgctctctctaggtgggcaagtttcctgggctctctgtgttgcctccctctggcttcttcctcccgtgccctctccccgtgtgccccagggggatcagggatcctcaccctcctgaggcccagtggggaagaatgaacatggcttcatccaggttaactgatgctgccatttgcccagcctcttccatcccagccctgtcagtgagcccaggtctggtgcaactgctgcaggatgcctgtagtagggaactctggaagtgtattgggctgaggtgggattttccctccccacagtgcactgagcaatggagggtggtgagggagccatgctgctgaattctggttggcatttccccattatgtaaaatggggtgttgggtagggcagactctgcttgggtttggttgtaagataaacctggaggagaagcacagttgtcccattgaattatttgagcaaaaactactgtaaataacttttttgtcttttgtcaaataaaatttttttttgtttttttaagcagaaa

SEQ ID NO: 77674 - DNA, 638 bp, Artificial Sequence
  derived and/or modified sequence
cccgcgccccgaagagtcggccagccccgaactgccggagtaggggtgggaaccaaactttttcctgccccgggacagacacgtttacccaaggtccagcctagcccctaggcaccatgtcggacagtgatctaggtgaggacgaaggcctcctctccctggcgggcaaaaggaagcgcagggggaacctgcccaaggagtcggtgaagatcctccgggactggctgtacttgcaccgctacaacgcctacccctcagagcaggagaagctgagcctttctggacagaccaacctgtcagtgctgcaaatatgtaactggttcatcaatgcccggcggcggcttctcccagacatgcttcggaaggatggcaaagaccctaatcagtttaccatttcccgccgcgggggtaaggcctcagatgtggccctcccccgtggcagcagcccctcagtgctggctgtgtctgtcccagcccccaccaatgtgctctccctgtctgtgtgctccatgccgcttcactcaggccagggggaaaagccagcagcccctttcccacgtggggagctggagtctcccaagcccctggtgacccctggtagcacacttactctgctgaccagggctgaggctggaagc

SEQ ID NO: 77675 - DNA, 923 bp, Artificial Sequence
  derived and/or modified sequence
ggatggcgggcccgcgcgggagctggtgcgcggagtcggcccggggtgtggggactgtggggtgcaagcgccccgagcgccggacgattcctcgccgacccaggagccatgtgctccgactcggtctgggccgcgggggaggttgcgcgctttgtctgaactgctgggaatgcgggcgtttacccaaggtccagcctagcccctaggcaccatgtcggacagtgatctaggtgaggacgaaggcctcctctccctggcgggcaaaaggaagcgcagggggaacctgcccaaggagtcggtgaagatcctccgggactggctgtacttgcaccgctacaacgcctacccctcagagcaggagaagctgagcctttctggacagaccaacctgtcagtgctgcaaatatgtaactggttcatcaatgcccggcggcggcttctcccagacatgcttcggaaggatggcaaagaccctaatcagtttaccatttcccgccgcgggggtaaggcctcagatgtggccctcccccgtggcagcagcccctcagtgctggctgtgtctgtcccagcccccaccaatgtgctctccctgtctgtgtgctccatgccgcttcactcaggccagggggaaaagccagcagcccctttcccacgtggggagctggagtctcccaagcccctggtgacccctggtagcacacttactctgctgaccagggctgaggctggaagccccacaggtggactcttcaacacgccaccacccacacccccagagcaggacaaagaggacttcagcagcttccagctgctggtggaggtggcgctacagagggctgctgagatggagcttcagaagcagcaggacccatcactcccattactgcacactcccatccctttagtctctgaaaatccccagt

SEQ ID NO: 77676 - protein, 155 aa, Artificial Sequence
  derived and/or modified sequence
MSDSDLGEDEGLLSLAGKRKRRGNLPKESVKILRDWLYLHRYNAYPSEQEKLSLSGQTNLSVLQDEFLDVIYWFRQIIAVVLGVIWGVLPLRGFLGIAGFCLINAGVLYLYFSNYLQIDEEEYGGTWELTKEGFMTSFALFMVIWIIFYTAIHYD

SEQ ID NO: 77677 - DNA, 468 bp, Artificial Sequence
  derived and/or modified sequence
atgagcgacagcgacctgggcgaggacgagggcctgctgagcctggccggcaagagaaagagaagaggcaacctgcccaaggagagcgtgaagatcctgagagactggctgtacctgcacagatacaacgcctaccccagcgagcaggagaagctgagcctgagcggccagaccaacctgagcgtgctgcaggacgagttcctggacgtgatctactggttcagacagatcatcgccgtggtgctgggcgtgatctggggcgtgctgcccctgagaggcttcctgggcatcgccggcttctgcctgatcaacgccggcgtgctgtacctgtacttcagcaactacctgcagatcgacgaggaggagtacggcggcacctgggagctgaccaaggagggcttcatgaccagcttcgccctgttcatggtgatctggatcatcttctacaccgccatccactacgactag

SEQ ID NO: 77678 - DNA, 468 bp, Artificial Sequence
  derived and/or modified sequence
atgtcggatagtgatctgggcgaagatgaaggattgctctccttggccgggaagcgcaagagaagaggaaatttaccaaaggaatcagtcaaaatattgcgggactggctgtacttacatcgctacaatgcttacccttccgaacaggaaaagctgtccctctcggggcaaacaaaccttagtgtgttgcaggacgaattcctggatgtaatttattggtttcggcagattattgccgtcgtcttgggagtgatttggggcgtgctgccactgcgaggctttctgggcattgctggcttctgtctaatcaatgcgggggtgctctatctgtacttttctaattacctccaaatagacgaagaggagtatggtggtacctgggaattgacgaaggagggcttcatgacatcgttcgccctgtttatggtcatttggattattttctataccgctatccattacgactag

SEQ ID NO: 77679 - DNA, 468 bp, Artificial Sequence
  derived and/or modified sequence
atgtctgacagcgacctgggggaggatgagggcctgctgagcctggccggcaagaggaagagaagaggcaacctgcccaaggagagcgtgaagatcctgcgggactggctgtacctgcaccgctacaatgcctaccccagcgagcaggagaagctgagcctgagcggccagaccaacctgtctgtgctgcaggatgagttcctggatgtgatctactggttccggcagatcatcgctgtggtgctgggcgtcatctggggcgtgctgcccctgcggggcttcctgggcattgctggcttctgcctgatcaatgccggcgtgctgtacctgtacttcagcaactacctgcagattgatgaggaggagtatggaggcacctgggagctgaccaaggagggcttcatgaccagctttgccctcttcatggtgatctggatcatcttctacacagccatccactatgactag

SEQ ID NO: 77680 - DNA, 468 bp, Artificial Sequence
  derived and/or modified sequence
atgagcgacagcgacctgggcgaggacgagggcctgctgagcctggctgggaaaagaaaacgcagaggaaatttgcctaaagaatctgtcaagatcttgcgggactggctgtatctccatcgctataacgcctatccttccgagcaagagaaattgtctctgagtggccaaactaacctgtcagtcttacaggacgaattcttagacgtaatctattggttccgacagatcattgcggtagtacttggggtgatttggggggtgctgccactgcgcgggtttctaggcattgcaggtttttgtctcattaacgccggggtgctgtatctgtacttctcaaactatctgcaaattgacgaagaggaatacggaggtacgtgggaactgactaaagaggggtttatgacctcttttgccctgtttatggtgatatggattatcttttataccgccattcactatgactag

SEQ ID NO: 77681 - DNA, 468 bp, Artificial Sequence
  derived and/or modified sequence
atgagcgatagcgaccttggggaggacgaaggactcctctccctcgccggtaaaaggaagcgcagagggaacctgcctaaggagtccgtgaagatcctgcgggactggctttacctgcacaggtataatgcttaccctagcgaacaggagaagctgtcactgtccggccaaaccaacttgagtgtcctgcaggatgaatttctcgacgtgatttactggttccgccagattatcgctgtggttctgggcgtaatctggggcgtcctccctctgagggggttcttgggcatcgccggtttctgcttgattaacgccggtgttctctacttgtacttctcaaactatctacaaatcgacgaggaagaatacggcggtacctgggaactgactaaggagggatttatgaccagtttcgccctctttatggtaatctggatcattttttatacagcaatccattacgactag

SEQ ID NO: 77682 - DNA, 918 bp, Artificial Sequence
  derived and/or modified sequence
ccccgcgccccgaagagtcggccagccccgaactgccggagtaggggtgggaaccaaactttttcctgccccgggacagacacgtttacccaaggtccagcctagcccctaggcaccatgtcggacagtgatctaggtgaggacgaaggcctcctctccctggcgggcaaaaggaagcgcagggggaacctgcccaaggagtcggtgaagatcctccgggactggctgtacttgcaccgctacaacgcctacccctcagagcaggagaagctgagcctttctggacagaccaacctgtcagtgctgcaagatgaatttttagatgtgatctactggttccgacagatcattgctgtggtcctgggtgtcatttggggagttttgccattacgagggttcttgggaatagcaggattctgcctgatcaatgcaggagtcctgtacctctacttcagcaattacctacagattgatgaggaagaatatggtggcacgtgggagctcacgaaggaagggtttatgacctcttttgccttgttcatggtcatttggatcatcttttacactgccatccattatgactgatggtgtacagctcccaagtgctccctatccagtccaaaggaccctcttgattacagcacaggaacttgatcgttggggaaccccagccccttggaacttggaagacccgtgtttcctggaccgcgaatcagtgtgttgggcatcagtgttttctgcaagggttgtgacctgaaactttttaaaaaccacccacctttggggaagcatttctgaatttatccatcaccaaccatttcttcttggataccatcaagtaacagctattatttgccaagtggagctgtcatttaatttgatgcacctctggattcagatgaaacattaaattgtctt

SEQ ID NO: 77683 - protein, 133 aa, Artificial Sequence
  derived and/or modified sequence
MEYAMKSLSLLYPKSLSRHVSVRTSVVTQQLLSEPSPKAPRARPCRVSTADRSVRKGIMAYSLEDLLLKGSFPLGPLQHAGHRPRTAWHLLLPAAAPRCYGGRAAPQGQGLIPYPDLSEDTAVKAQVLGSFPQ

SEQ ID NO: 77684 - protein, 248 aa, Artificial Sequence
  derived and/or modified sequence
MEYAMKSLSLLYPKSLSRHVSVRTSVVTQQLLSEPSPKAPRARPCRVSTADRSVRKGIMAYSLEDLLLKTRNPEARSQEVRDTLMLADKPFFLVLEEDGTTVETEEYFQALAGDTVFMVLQKGQKWQPPSEQGTRHPLSLSHKPAKKIDVARVTFDLYKLNPQDFIGCLNVKATFYDTYSLSYDLHCCGAKRIMKEAFRWALFSMQATGHVLLGTSCYLQQLLDATEEGQPPKGKASSLIPTCLKILQ

SEQ ID NO: 77685 - DNA, 402 bp, Artificial Sequence
  derived and/or modified sequence
atggagtacgccatgaagagcctgagcctgctgtaccccaagagcctgagcagacacgtgagcgtgagaaccagcgtggtgacccagcagctgctgagcgagcccagccccaaggcccccagagccagaccctgcagagtgagcaccgccgacagaagcgtgagaaagggcatcatggcctacagcctggaggacctgctgctgaagggcagcttccccctgggccccctgcagcacgccggccacagacccagaaccgcctggcacctgctgctgcccgccgccgcccccagatgctacggcggcagagccgccccccagggccagggcctgatcccctaccccgacctgagcgaggacaccgccgtgaaggcccaggtgctgggcagcttcccccagtag

SEQ ID NO: 77686 - DNA, 747 bp, Artificial Sequence
  derived and/or modified sequence
atggagtacgccatgaagagcctgagcctgctgtaccccaagagcctgagcagacacgtgagcgtgagaaccagcgtggtgacccagcagctgctgagcgagcccagccccaaggcccccagagccagaccctgcagagtgagcaccgccgacagaagcgtgagaaagggcatcatggcctacagcctggaggacctgctgctgaagaccagaaaccccgaggccagaagccaggaggtgagagacaccctgatgctggccgacaagcccttcttcctggtgctggaggaggacggcaccaccgtggagaccgaggagtacttccaggccctggccggcgacaccgtgttcatggtgctgcagaagggccagaagtggcagccccccagcgagcagggcaccagacaccccctgagcctgagccacaagcccgccaagaagatcgacgtggccagagtgaccttcgacctgtacaagctgaacccccaggacttcatcggctgcctgaacgtgaaggccaccttctacgacacctacagcctgagctacgacctgcactgctgcggcgccaagagaatcatgaaggaggccttcagatgggccctgttcagcatgcaggccaccggccacgtgctgctgggcaccagctgctacctgcagcagctgctggacgccaccgaggagggccagccccccaagggcaaggccagcagcctgatccccacctgcctgaagatcctgcagtag

SEQ ID NO: 77687 - DNA, 402 bp, Artificial Sequence
  derived and/or modified sequence
atggaatacgcaatgaaaagtctgtctttactctaccccaaaagcctgagtcggcacgtcagtgttcggacctccgtagtgacccagcaactgctatccgagccatccccaaaagcccccagggccagaccctgccgagtcagcactgccgacaggtctgttaggaaaggcatcatggcctatagcctggaggacttattgctgaagggctccttccccctcggtccattgcaacatgcagggcaccgtccaagaacagcgtggcacctactcctgcctgctgccgcccctcgctgttacggtggaagagccgctccccaagggcagggcttaatcccgtatcccgacctgagcgaagataccgctgtcaaagcacaggtcttgggatcgtttccccagtag

SEQ ID NO: 77688 - DNA, 747 bp, Artificial Sequence
  derived and/or modified sequence
atggagtacgctatgaagtctctttccttactctatccaaagtccctctctcgtcacgtatccgtgcggacctcggtggtaacccagcagctgttgagcgaacctagccctaaggctccacgcgcccggccatgccgcgttagcacagcagaccggtcagtgagaaagggaatcatggcctacagcctagaggacctcttgctcaaaactaggaatcccgaagcccggagtcaggaagtaagagatacattgatgctggcagacaagcctttctttttggttctcgaagaagacggaaccacagttgaaacagaggaatattttcaggccctagctggggacactgtgtttatggtgttgcagaaaggacaaaagtggcagcccccaagtgagcaaggtacccgacaccctctctccctatctcataagcctgcaaagaagatagacgtggccagagttacttttgatttgtacaaattgaacccgcaggacttcattggatgtcttaatgtaaaggccactttctacgacacctattctctgagctacgacctccactgttgcggggcgaagcggatcatgaaggaagccttcaggtgggctctattctccatgcaagccaccggccatgttttgcttggaaccagctgctatctccagcagctactcgacgccactgaggaaggacaaccgcccaaggggaaggcttcatcactgattccaacttgtctgaaaatactccagtag

SEQ ID NO: 77689 - DNA, 402 bp, Artificial Sequence
  derived and/or modified sequence
atggagtatgccatgaagagcctgagcctgctgtaccccaagagcctgagcagacatgtgtctgtgaggacctctgtggtgacccagcagctgctgtctgagcccagccccaaggccccccgggcccggccctgccgggtgtccacagctgacagatctgtgaggaagggcatcatggcctacagcctggaggacctgctgctgaagggcagcttccccctgggccccctgcagcacgccggccaccggcccaggacagcctggcacctgctgctgcctgctgctgccccccgctgctacggcggccgggccgccccccagggccagggcctcatcccctacccagacctgtctgaggacacagctgtgaaggcccaggtgctgggcagcttcccccagtag

SEQ ID NO: 77690 - DNA, 747 bp, Artificial Sequence
  derived and/or modified sequence
atggagtatgccatgaagagcctgagcctgctgtaccccaagagcctgagcagacatgtgtctgtgaggacctctgtggtgacccagcagctgctgtctgagcccagccccaaggccccccgggcccggccctgccgggtgtccacagctgacagatctgtgaggaagggcatcatggcctacagcctggaggacctgctgctgaagaccagaaatcctgaggcccggagccaggaggtgcgggacaccctgatgctggccgacaagcccttcttcctggtgctggaggaggatggcaccaccgtggagacagaggagtacttccaggccctggccggggacacagtgttcatggtgctgcagaagggccagaagtggcagccccccagcgagcagggcaccaggcaccccctgagcctgagccacaagccagccaagaagattgatgtggcccgggtgacctttgacctgtacaagctgaacccccaggacttcatcggctgcctgaatgtgaaggccaccttctatgacacctacagcctgtcctatgacctgcactgctgcggggccaagaggatcatgaaggaggccttccgctgggccctcttctccatgcaggccaccggccacgtgctgctgggcaccagctgctacctgcagcagctgctggatgccacagaggagggccagccccccaagggcaaggccagcagcctcatccccacctgcctgaagatcctgcagtag

SEQ ID NO: 77691 - DNA, 402 bp, Artificial Sequence
  derived and/or modified sequence
atggagtacgccatgaagagcctgagcctgctgtaccccaagagccttagtcggcacgtctccgttcgaacaagcgtggttacccagcagctgctctctgaaccatctccaaaagccccacgtgccagaccttgcagagtgagtacagccgatagaagcgtcaggaaggggataatggcctatagcctcgaggatctcctgctgaagggtagctttcccctgggtccgcttcaacatgccggccaccgtccccggaccgcctggcatctgctgctaccagccgccgcacctaggtgctatgggggaagagccgctccgcaagggcaaggactgatcccataccctgacttatccgaggacactgccgtgaaagcgcaagtgctaggatccttcccccagtag

SEQ ID NO: 77692 - DNA, 747 bp, Artificial Sequence
  derived and/or modified sequence
atggagtacgccatgaagagcctgagcctgctgtaccccaagagcctgagccgccatgtttctgttagaacatcggtggtgacgcagcagctcttgtccgagccttccccgaaagccccaagggcccgaccctgcagagtctctacggcagatcgctcggtcagaaaaggaatcatggcctatagcctggaggatctcctgctcaaaacgagaaatcctgaggccagatcacaggaagtcagggataccctcatgctggcggacaagccgttctttttggtgctcgaggaagacggcactactgtcgagaccgaggagtacttccaggcattagcaggggataccgtgtttatggttctgcagaagggacagaagtggcagccaccaagtgagcaggggacccgccaccctttatccttgtcacataagcccgctaagaaaatcgatgtggctagagtgacatttgacctatacaagctgaacccgcaagactttatcggatgcctgaatgtgaaagcaactttctatgatacttacagtcttagttacgacctgcactgttgtggcgcaaaaaggattatgaaagaggcctttagatgggctctttttagtatgcaagctaccggccacgtcctcctgggcacttcatgttacttacagcagctacttgatgcaaccgaggagggccagcctcctaaaggtaaagccagctcccttattcctacatgcctgaagatcctgcagtag

SEQ ID NO: 77693 - DNA, 402 bp, Artificial Sequence
  derived and/or modified sequence
atggagtatgcaatgaaatctcttagccttttgtacccaaaatccctgagccgtcacgtgagtgtgcggaccagtgtcgtcacccagcagctgctgagtgagccatcacccaaagcaccacgagcacggccttgccgcgtctcaacagcggacagaagcgttcggaaagggattatggcctattcactggaggatttgttgttaaaggggagttttccactgggaccactgcaacacgccggtcaccgcccaaggacggcgtggcacctcctcttgcccgctgccgcacctaggtgttatgggggtcgcgctgcaccacagggccaaggactgattccatatcccgacctgagcgaggacaccgctgtgaaagcccaggtactcggaagttttcctcagtag

SEQ ID NO: 77694 - DNA, 747 bp, Artificial Sequence
  derived and/or modified sequence
atggaatacgccatgaagtccctctccctgctctatcctaaatccctgagtcgccacgttagtgtgcgcacttcagttgtgacacagcaactgctttccgaacctagccccaaggcccctcgagctagaccctgcagagttagtaccgctgatcgatcagtgaggaagggcataatggcatacagcctggaagatctgctgctgaaaactagaaaccctgaagctcgatctcaggaggtcagagatacattgatgctcgcagacaaaccttttttcctggtcctcgaggaagacggcacgaccgtggaaactgaagagtacttccaggcgctggcaggagatacagtctttatggtgctccagaagggccaaaagtggcagcctcccagtgagcagggaacccgacaccctctctcactctctcataagccagccaaaaagattgatgtggccagggtaacttttgacctttataaattaaatcctcaggatttcataggttgtctgaatgtgaaggccaccttttacgatacatacagtttgtcatacgatctacattgttgtggggctaaacgcataatgaaggaggccttccgctgggcactgttcagtatgcaggccaccggccatgtgctgttaggaacaagctgctacctacagcagctcctcgacgctacggaggaaggacaacccccaaaagggaaagcgtccagcttaatcccaacctgcctcaaaatcctgcagtag

SEQ ID NO: 77695 - DNA, 877 bp, Artificial Sequence
  derived and/or modified sequence
gtccaacgcagtccagctgacaaggatggaatacgccatgaagtcccttagccttctctaccccaagtccctctccaggcatgtgtcagtgcgtacctctgtggtgacccagcagctgctgtcggagcccagccccaaggcccccagggcccggccctgccgcgtaagcacggcggatcgaagcgtgaggaagggcatcatggcttacagtcttgaggacctcctcctcaagactaggaaccctgaagccaggagccaagaggtccgggacactctgatgctggcagacaagcccttcttcctggtgctggaggaagatggcacaactgtagagacagaagagtacttccaagccctggcaggggatacagtgttcatggtcctccagaaggggcagaaatggcagcccccatcagaacaggggacaaggcacccactgtccctctcccataagcctgccaagaagattgatgtggcccgtgtaacgtttgatctgtacaagctgaacccacaggacttcattggctgcctgaacgtgaaggcgactttttatgatacatactccctttcctatgatctgcactgctgtggggccaagcgcatcatgaaggaagctttccgctgggccctcttcagcatgcaggccacaggccacgtactgcttggcacctcctgttacctgcagcagctcctcgatgctacggaggaagggcagccccccaagggcaaggcctcatcccttatcccgacctgtctgaagatactgcagtgaaagcccaagtccttggaagctttccccagtgaaggactgactgggggcctcacgcttaactggtagtgcccacaagcctggcagctgtagagccgcgaacctccc

SEQ ID NO: 77696 - DNA, 717 bp, Artificial Sequence
  derived and/or modified sequence
atggagtacgccatgaagagcctgagcctgctgtaccccaagagcctgagcagacacgtgagcgtgagaaccagcgtggtgacccagcagctgctgagcgagcccagccccaaggcccccagagccagaccctgcagagtgagcaccgccgacagaagcgtgagaaagggcatcatggcctacagcctggaggacctgctgctgaaggtgagagacaccctgatgctggccgacaagcccttcttcctggtgctggaggaggacggcaccaccgtggagaccgaggagtacttccaggccctggccggcgacaccgtgttcatggtgctgcagaagggccagaagtggcagccccccagcgagcagggcaccagacaccccctgagcctgagccacaagcccgccaagaagatcgacgtggccagagtgaccttcgacctgtacaagctgaacccccaggacttcatcggctgcctgaacgtgaaggccaccttctacgacacctacagcctgagctacgacctgcactgctgcggcgccaagagaatcatgaaggaggccttcagatgggccctgttcagcatgcaggccaccggccacgtgctgctgggcaccagctgctacctgcagcagctgctggacgccaccgaggagggccagccccccaagggcaaggccagcagcctgatccccacctgcctgaagatcctgcagtag

SEQ ID NO: 77697 - DNA, 717 bp, Artificial Sequence
  derived and/or modified sequence
atggagtatgcgatgaaaagtctatcgcttttgtatcccaagtccctatcccgacatgtctccgtgagaaccagcgtagtgactcagcagctgcttagcgagccttcacctaaggcaccaagggcgcgcccctgtcgagtgtcaaccgccgacagatcggtaagaaaggggatcatggcgtattcgcttgaagatctcctgctcaaggtccgagacaccctgatgttggctgacaagccgtttttcttagtgttagaggaggatggcaccaccgttgagaccgaagagtatttccaggccctcgcaggcgataccgtgttcatggtgctgcaaaaagggcagaagtggcagcctcccagcgagcagggcactcgtcaccctctgtccttaagtcataagccagccaaaaagatcgacgtcgcacgtgtcacctttgacctatataagctaaacccccaggactttatcggctgcctcaacgttaaggcaaccttttatgatacctactccctgagttacgatctgcattgctgtggtgctaagagaattatgaaggaagcgttccgctgggctttgttctcaatgcaagctaccggccacgtgcttctgggtacatcttgctaccttcaacaactgctcgacgccaccgaggaaggccagccgcccaaggggaaagcaagctctttgataccaacatgtttaaagatcctgcagtag

SEQ ID NO: 77698 - DNA, 717 bp, Artificial Sequence
  derived and/or modified sequence
atggagtatgccatgaagagcctgagcctgctgtaccccaagagcctgagcagacatgtgtctgtgaggacctctgtggtgacccagcagctgctgtctgagcccagccccaaggccccccgggcccggccctgccgggtgtccacagctgacagatctgtgaggaagggcatcatggcctacagcctggaggacctgctgctgaaggtgcgggacaccctgatgctggccgacaagcccttcttcctggtgctggaggaggatggcaccaccgtggagacagaggagtacttccaggccctggccggggacacagtgttcatggtgctgcagaagggccagaagtggcagccccccagcgagcagggcaccaggcaccccctgagcctgagccacaagccagccaagaagattgatgtggcccgggtgacctttgacctgtacaagctgaacccccaggacttcatcggctgcctgaatgtgaaggccaccttctatgacacctacagcctgtcctatgacctgcactgctgcggggccaagaggatcatgaaggaggccttccgctgggccctcttctccatgcaggccaccggccacgtgctgctgggcaccagctgctacctgcagcagctgctggatgccacagaggagggccagccccccaagggcaaggccagcagcctcatccccacctgcctgaagatcctgcagtag

SEQ ID NO: 77699 - DNA, 717 bp, Artificial Sequence
  derived and/or modified sequence
atggagtacgccatgaagagcctgagcctgctgtaccccaagagcttaagccgccatgtcagcgtgagaactagcgttgtgacccagcagctcctgtccgagccatcccctaaagccccacgagctagaccttgtagggtcagtaccgcagatcgctccgtacgtaaagggattatggcatattctctcgaggatcttttgctcaaggtgagggacactctgatgctggccgacaaaccattctttcttgtgctcgaggaggatgggactaccgtggagaccgaggagtattttcaagcactcgccggtgatacagtttttatggtcctgcagaagggacaaaaatggcagcccccaagcgaacaggggactcgtcaccctctgtccttgagccacaaaccggcgaaaaagatcgacgttgcccgcgtgacatttgacctttataaattaaacccgcaagatttcattggctgcctgaatgttaaagctacattctatgacacctattctctgtcctatgacctacattgttgtggggctaagcgcataatgaaggaagcctttcgatgggccctgttctccatgcaggccactgggcacgtccttttaggcactagttgttacttacagcaacttcttgacgccactgaggaaggccagccacccaaaggcaaagcttcgtcactgattccaacctgtttgaagatccttcagtag

SEQ ID NO: 77700 - DNA, 717 bp, Artificial Sequence
  derived and/or modified sequence
atggaatatgcaatgaagtccctgtcattgctttatccaaagagccttagtaggcatgtgagcgtccgtaccagcgtcgtgactcaacagctcctgtcagagccctcacccaaggcaccaagagctcgtccatgtagggtaagcacggcggaccggtcagtaaggaaagggattatggcctacagtctggaggatctcctcctgaaagtgcgggataccctcatgctggcagacaaaccatttttcctggtgctcgaggaggatgggacaacggtcgagaccgaagagtatttccaggccctggcgggtgacactgtttttatggtgcttcagaagggccagaagtggcaaccgccatccgaacaagggacaagacatccattaagcctctcccacaagccggcaaagaaaatcgacgtggctagggtaactttcgacctgtataaactgaacccccaggattttattggttgtctgaatgtgaaggctactttttacgacacatattccctaagttacgatctccactgctgcggggcaaagcgaatcatgaaggaagctttcagatgggcattgttctcaatgcaggcaacaggacatgttttgctcggcacctcatgctatctacagcagttgctcgatgcaaccgaggagggacagcctccaaaggggaaggcctccagcttgatacctacttgtctaaagatactgcaatag

SEQ ID NO: 77701 - DNA, 1036 bp, Artificial Sequence
  derived and/or modified sequence
agtatttccaggaggctgtgagggggaggtccaacgcagtccagctgacaaggatggaatacgccatgaagtcccttagccttctctaccccaagtccctctccaggtccgggacactctgatgctggcagacaagcccttcttcctggtgctggaggaagatggcacaactgtagagacagaagagtacttccaagccctggcaggggatacagtgttcatggtcctccagaaggggcagaaatggcagcccccatcagaacaggggacaaggcacccactgtccctctcccataagcctgccaagaagattgatgtggcccgtgtaacgtttgatctgtacaagctgaacccacaggacttcattggctgcctgaacgtgaaggcgactttttatgatacatactccctttcctatgatctgcactgctgtggggccaagcgcatcatgaaggaagctttccgctgggccctcttcagcatgcaggccacaggccacgtactgcttggcacctcctgttacctgcagcagctcctcgatgctacggaggaagggcagccccccaagggcaaggcctcatcccttatcccgacctgtctgaagatactgcagtgaaagcccaagtccttggaagctttccccagtgaaggactgactgggggcctcacgcttaactggtagtgcccacaagcctggcagctgtagagccgcgaacctccccacacctccctcaccgcgcaggaccctgagtgaggaggaggagctggaaacctggggtgggttggccaaaggagaacctcaagctcctggcctgatccagctccttcctgcccaaggcagcttagcccatccagactggtcctgaagtctgtccctccattggcatgaagtctgccccttagcaatctggcctcgcaggctgtactttcatggtgctctctaccttctggcccccatcccggaacattcctgagtgaattcgcaagcgcactagcatgtgatattagggagtttgcaataaattattgaggctga

SEQ ID NO: 77702 - DNA, 1123 bp, Artificial Sequence
  derived and/or modified sequence
agaatgttcttttggccactgtgaagcctcaggaaggggctcggattgctcaaggacccatgggagagaggaggctttgactgggctgcctgcctgtgaggtctctggactagaggtccaacgcagtccagctgacaaggatggaatacgccatgaagtcccttagccttctctaccccaagtccctctccaggtccgggacactctgatgctggcagacaagcccttcttcctggtgctggaggaagatggcacaactgtagagacagaagagtacttccaagccctggcaggggatacagtgttcatggtcctccagaaggggcagaaatggcagcccccatcagaacaggggacaaggcacccactgtccctctcccataagcctgccaagaagattgatgtggcccgtgtaacgtttgatctgtacaagctgaacccacaggacttcattggctgcctgaacgtgaaggcgactttttatgatacatactccctttcctatgatctgcactgctgtggggccaagcgcatcatgaaggaagctttccgctgggccctcttcagcatgcaggccacaggccacgtactgcttggcacctcctgttacctgcagcagctcctcgatgctacggaggaagggcagccccccaagggcaaggcctcatcccttatcccgacctgtctgaagatactgcagtgaaagcccaagtccttggaagctttccccagtgaaggactgactgggggcctcacgcttaactggtagtgcccacaagcctggcagctgtagagccgcgaacctccccacacctccctcaccgcgcaggaccctgagtgaggaggaggagctggaaacctggggtgggttggccaaaggagaacctcaagctcctggcctgatccagctccttcctgcccaaggcagcttagcccatccagactggtcctgaagtctgtccctccattggcatgaagtctgccccttagcaatctggcctcgcaggctgtactttcatggtgctctctaccttctggcccccatcccggaacattcctgagtgaattcgcaagcgcactagcatgtgatattagggagtttgcaataaattattgaggctga

SEQ ID NO: 77703 - protein, 752 aa, Artificial Sequence
  derived and/or modified sequence
MQFFGRLVNTFSGVTNLFSNPFRVKEVAVADYTSSDRVREEGQLILFQNTPNRTWDCVLVNPRNSQSGFRLFQLELEADALVNFHQYSSQLLPFYESSPQVLHTEVLQHLTDLIRNHPSWSVAHLAVELGIRECFHHSRIISCANCAENEEGCTPLHLACRKGDGEILVELVQYCHTQMDVTDYKGETVFHYAVQGDNSQVLQLLGRNAVAGLNQVNNQGLTPLHLACQLGKQEMVRVLLLCNARCNIMGPNGYPIHSAMKFSQKGCAEMIISMDSSQIHSKDPRYGASPLHWAKNAEMARMLLKRGCNVNSTSSAGNTALHVAVMRNRFDCAIVLLTHGANADARGEHGNTPLHLAMSKDNVEMIKALIVFGAEVDTPNDFGETPTFLASKIGRQLQDLMHISRARKPAFILGSMRDEKRTHDHLLCLDGGGVKGLIIIQLLIAIEKASGVATKDLFDWVAGTSTGGILALAILHSKSMAYMRGMYFRMKDEVFRGSRPYESGPLEEFLKREFGEHTKMTDVRKPKVMLTGTLSDRQPAELHLFRNYDAPETVREPRFNQNVNLRPPAQPSDQLVWRAARSSGAAPTYFRPNGRFLDGGLLANNPTLDAMTEIHEYNQDLIRKGQANKVKKLSIVVSLGTGRSPQVPVTCVDVFRPSNPWELAKTVFGAKELGKMVVDCCTDPDGRAVDRARAWCEMVGIQYFRLNPQLGTDIMLDEVSDTVLVNALWETEVYIYEHREEFQKLIQLLLSP

SEQ ID NO: 77704 - DNA, 2259 bp, Artificial Sequence
  derived and/or modified sequence
atgcagttcttcggcagactggtgaacaccttcagcggcgtgaccaacctgttcagcaaccccttcagagtgaaggaggtggccgtggccgactacaccagcagcgacagagtgagagaggagggccagctgatcctgttccagaacacccccaacagaacctgggactgcgtgctggtgaaccccagaaacagccagagcggcttcagactgttccagctggagctggaggccgacgccctggtgaacttccaccagtacagcagccagctgctgcccttctacgagagcagcccccaggtgctgcacaccgaggtgctgcagcacctgaccgacctgatcagaaaccaccccagctggagcgtggcccacctggccgtggagctgggcatcagagagtgcttccaccacagcagaatcatcagctgcgccaactgcgccgagaacgaggagggctgcacccccctgcacctggcctgcagaaagggcgacggcgagatcctggtggagctggtgcagtactgccacacccagatggacgtgaccgactacaagggcgagaccgtgttccactacgccgtgcagggcgacaacagccaggtgctgcagctgctgggcagaaacgccgtggccggcctgaaccaggtgaacaaccagggcctgacccccctgcacctggcctgccagctgggcaagcaggagatggtgagagtgctgctgctgtgcaacgccagatgcaacatcatgggccccaacggctaccccatccacagcgccatgaagttcagccagaagggctgcgccgagatgatcatcagcatggacagcagccagatccacagcaaggaccccagatacggcgccagccccctgcactgggccaagaacgccgagatggccagaatgctgctgaagagaggctgcaacgtgaacagcaccagcagcgccggcaacaccgccctgcacgtggccgtgatgagaaacagattcgactgcgccatcgtgctgctgacccacggcgccaacgccgacgccagaggcgagcacggcaacacccccctgcacctggccatgagcaaggacaacgtggagatgatcaaggccctgatcgtgttcggcgccgaggtggacacccccaacgacttcggcgagacccccaccttcctggccagcaagatcggcagacagctgcaggacctgatgcacatcagcagagccagaaagcccgccttcatcctgggcagcatgagagacgagaagagaacccacgaccacctgctgtgcctggacggcggcggcgtgaagggcctgatcatcatccagctgctgatcgccatcgagaaggccagcggcgtggccaccaaggacctgttcgactgggtggccggcaccagcaccggcggcatcctggccctggccatcctgcacagcaagagcatggcctacatgagaggcatgtacttcagaatgaaggacgaggtgttcagaggcagcagaccctacgagagcggccccctggaggagttcctgaagagagagttcggcgagcacaccaagatgaccgacgtgagaaagcccaaggtgatgctgaccggcaccctgagcgacagacagcccgccgagctgcacctgttcagaaactacgacgcccccgagaccgtgagagagcccagattcaaccagaacgtgaacctgagaccccccgcccagcccagcgaccagctggtgtggagagccgccagaagcagcggcgccgcccccacctacttcagacccaacggcagattcctggacggcggcctgctggccaacaaccccaccctggacgccatgaccgagatccacgagtacaaccaggacctgatcagaaagggccaggccaacaaggtgaagaagctgagcatcgtggtgagcctgggcaccggcagaagcccccaggtgcccgtgacctgcgtggacgtgttcagacccagcaacccctgggagctggccaagaccgtgttcggcgccaaggagctgggcaagatggtggtggactgctgcaccgaccccgacggcagagccgtggacagagccagagcctggtgcgagatggtgggcatccagtacttcagactgaacccccagctgggcaccgacatcatgctggacgaggtgagcgacaccgtgctggtgaacgccctgtgggagaccgaggtgtacatctacgagcacagagaggagttccagaagctgatccagctgctgctgagcccctag

SEQ ID NO: 77705 - DNA, 2259 bp, Artificial Sequence
  derived and/or modified sequence
atgcagttctttgggaggctggtgaacacctttagcggggtcacgaacctgttctctaacccctttagagtcaaagaggtggcagtcgccgattatacaagctctgacagggttagagaggaaggacaactcattctgtttcagaacactcctaacagaacctgggactgtgttctggtgaacccacgaaatagccagagtggtttcagactgttccaactggaattggaggccgatgcactcgtgaacttccatcagtacagctctcagctgctgcctttctatgagtccagcccacaggtactgcacacagaggtcctccaacacctgacagacttaatcaggaatcatccctcctggtccgtggcccatctcgccgtggaactgggtatccgggaatgttttcatcacagtaggattattagttgtgcgaattgtgctgagaacgaagagggctgtactcccctccacctggcttgtagaaagggagatggagaaattctcgtcgagctggttcagtactgtcacacccagatggacgtgaccgattacaagggagaaaccgtattccactacgccgtgcagggcgacaactcacaagttttgcagctgctgggtaggaatgctgttgctggactcaaccaggtgaataaccagggcctcacacccctgcacctggcatgtcagctgggcaagcaggagatggttcgggttctgctcctctgtaacgcgcgatgcaacatcatggggcccaatggctaccctattcacagtgctatgaagttcagtcaaaagggatgtgccgaaatgatcataagcatggactctagccaaatccacagcaaagacccccgttatggggctagtccactgcactgggcaaaaaacgccgaaatggcgcgaatgctgctcaagcggggatgcaatgtcaacagtacttcttctgcggggaacaccgccttgcatgtggcagtgatgaggaatcgatttgattgtgctatcgtcttattgacacatggggccaatgcagatgctcgcggcgagcatggaaatactccgctgcacctcgcaatgtctaaggataacgtagagatgataaaggcgctaatagtattcggtgcggaggtggacactcctaatgactttggcgagacaccgacattcctcgcctccaagattgggcgccagttacaggatctgatgcacatttctcgtgccagaaaaccggcttttatactggggagcatgagggatgaaaagcggacgcacgatcatctgttgtgcctcgatggaggaggcgttaaaggcttaattataatccagttgttgatcgctatcgagaaagctagcggagtcgcaaccaaggatctgtttgattgggtcgccggcacatctactggaggtattttagccctggctatactgcattccaagagtatggcctacatgaggggcatgtattttcgcatgaaggacgaggttttcagaggtagcaggccatatgagtccgggcccctcgaggaatttctcaagcgggagtttggagaacacactaaaatgactgacgtgagaaaacccaaggtgatgcttacaggaaccctgtctgatcgtcagcccgctgagctgcacctcttccggaactatgacgcccccgaaacagtgagagagccacggttcaatcaaaatgtaaacctccgaccccctgcgcagccaagcgaccagctggtctggcgggcggcacgttcatctggagctgcccccacctattttagacctaatggcagattcctagacggtgggttactggccaacaacccaacattggatgccatgacagagattcatgaatataatcaggacctaataagaaaaggacaggcgaacaaggtcaagaagctgagcatcgtagtcagcctcgggaccggtagaagcccacaggtccccgtgacgtgcgtggacgtcttccgccccagcaacccctgggaattggctaagacagtgtttggggcaaaggaactgggaaagatggtagtcgactgttgtacagaccctgatgggcgagccgtggaccgggcacgcgcatggtgtgaaatggtcggcatccagtacttccggttaaatccacagctcggcacagatataatgctggatgaagtgtccgataccgtactcgtgaacgccttatgggagaccgaagtctatatctatgagcacagggaggaatttcaaaagttgatccaactcctcctgtctccctag

SEQ ID NO: 77706 - DNA, 2259 bp, Artificial Sequence
  derived and/or modified sequence
atgcagttttttggacgactggttaatactttttctggtgtgacaaacttgttctccaatcccttcagggtcaaagaggtcgctgtagcggactatactagtagtgacagagtcagggaagaaggccaactgatcctgttccagaatactccaaaccgaacctgggactgcgtgcttgtcaatccaaggaactctcagagtggttttaggctgtttcagcttgaactcgaggccgatgcgctggttaacttccaccagtactcttcccagctactccccttttacgagtccagtccacaggttttacacaccgaagttctacagcacttaacggaccttatcagaaaccacccgtcctggtccgtagcacatctggccgtggagctcggcatcagggagtgcttccaccacagtcgcataatcagctgtgcaaactgcgccgaaaacgaggagggatgcaccccgctgcatctcgcttgccggaagggggacggcgagatcctcgttgagctggtgcaatactgccatacccaaatggatgtcacagactacaagggtgaaaccgtcttccattacgccgtgcagggagataattcccaggtcctgcaactgttgggccgcaatgcggttgccggcttaaatcaggtgaataaccaagggcttacaccattacacctcgcctgccaactgggaaagcaggagatggtacgggttctgttactgtgtaatgcccgttgcaacataatgggaccaaatggctatcccatccactccgccatgaagttctcacagaagggttgcgcagagatgattatatctatggatagcagccagattcatagtaaagacccccgctatggggcatcccctctgcattgggccaaaaacgcagagatggctcgcatgctgctcaagagaggatgcaatgttaacagcacttcttcagctggcaatactgctctccatgttgctgttatgcgcaatcgctttgactgtgccatcgttctgttgacacatggtgccaatgcagacgccaggggagaacacggaaacacacctctgcacctcgcaatgtctaaagacaatgttgaaatgatcaaggcccttattgtatttggagccgaggtggacacaccaaacgattttggggagaccccgaccttcttagctagcaaaattggccgccagttacaggacctcatgcacattagccgggccaggaagcccgccttcatccttggctctatgcgcgatgagaagaggacccacgaccatttactctgcctcgatgggggtggggtcaagggtcttattatcatccaactgctcatcgccatagaaaaggcctccggagtggctacaaaggacctgttcgattgggtggcgggaaccagcacaggcggaatccttgctcttgccatcctgcattctaagtctatggcatacatgcgcggcatgtattttcgcatgaaggacgaggttttcaggggctcacggccatacgaaagcggcccactggaagagttcttgaaaagagagttcggcgaacatactaagatgaccgatgtccgcaagcccaaggtcatgcttaccggtactctgagcgacaggcaacctgcggagctgcatctgttcagaaactatgatgcgccagagaccgtccgagagcctcgcttcaatcagaatgtgaatctaaggcctcctgcccagcctagtgatcagttagtgtggcgtgccgctcgctcatcaggcgcagcccctacttactttcgccccaatggtcgctttctggatggcggactgctggctaataatcccacactcgacgctatgaccgagatccatgagtataaccaggatctgattaggaaaggtcaggcgaataaagtgaaaaaactgagtattgtagtcagcctggggactggccgttcaccccaggtacctgtgacttgtgtggacgtgttccgaccttcaaacccatgggagttggccaaaacggtgtttggagctaaagaactgggcaaaatggttgtggactgttgcacggatcctgacgggcgagccgtggatcgagcacgtgcctggtgcgagatggtaggcattcaatatttccgattgaacccccagctgggcacggatatcatgttggacgaggtgtccgacactgtcttagtaaacgcactctgggagaccgaggtctatatatacgagcatcgagaggagttccagaagctgatccaacttcttttgagcccctag

SEQ ID NO: 77707 - DNA, 2259 bp, Artificial Sequence
  derived and/or modified sequence
atgcagttcttcggccgcctggtgaacaccttcagcggcgtgaccaacctcttcagcaaccccttccgggtgaaggaggtggccgtggccgactacaccagcagtgacagagtgcgggaggagggccagctgatcctcttccagaacacccccaacagaacctgggactgtgtgctggtgaaccccaggaacagccagagcggcttccgcctcttccagctggagctggaggctgatgccctggtgaacttccaccagtacagcagccagctgctgcccttctatgagagcagcccccaggtgctgcacacagaggtgctgcagcacctgacagacctgatccggaaccaccccagctggagcgtggcccacctggccgtggagctgggcatccgggagtgcttccaccacagccgcatcatcagctgtgccaactgtgccgagaatgaggagggctgcacccccctgcacctggcctgcaggaaaggagatggagagatcctggtggagctggtgcagtactgccacacccagatggatgtgacagactacaagggggagaccgtcttccactatgctgtgcagggcgacaacagccaggtgctgcagctgctgggcagaaatgctgtggccggcctgaaccaggtgaacaaccagggcctgacccccctgcacctggcctgccagctgggcaagcaggagatggtgcgggtgctgctgctgtgcaatgcccgctgcaacatcatgggccccaacggctaccccatccacagcgccatgaagttcagccagaagggctgtgccgagatgatcatctccatggacagcagccagatccacagcaaggacccccgctacggggccagccccctgcactgggccaagaatgctgagatggccaggatgctgctgaagaggggctgcaatgtgaacagcaccagcagcgctggcaacacagccctgcacgtggccgtgatgaggaacagatttgactgtgccatcgtgctgctgacccatggagccaatgctgatgcccggggggagcacggcaacacccccctgcacctggccatgagcaaggacaacgtggagatgatcaaggccctgattgtgtttggagctgaggtggacaccccaaatgactttggagagacccccaccttcctggccagcaagattggccggcagctgcaggacctgatgcacatcagccgggccaggaagccagccttcatcctgggctccatgagagatgagaagaggacccatgaccacctgctgtgcctggatggcggcggcgtgaagggcctcatcatcatccagctgctgattgccatcgagaaggccagcggcgtggccaccaaggacctgtttgactgggtggccggcaccagcactggaggcatcctggccctggccatcctgcacagcaagtccatggcctacatgaggggcatgtacttcaggatgaaggatgaggtgttccggggcagccggccctatgaaagtggccccctggaggagttcctgaagcgggagtttggagagcacaccaagatgacagatgtgaggaagcccaaggtgatgctgaccggcaccctgagtgaccggcagcctgctgagctgcacctgttcaggaactatgatgcccctgagaccgtgcgggagccccgcttcaaccagaatgtgaacctgcggcccccagcccagcccagcgaccagctggtgtggagggctgcccggagcagtggagctgcccccacctacttccggcccaacggccgcttcctggatggcggcctgctggccaacaaccccaccctggatgccatgacagagatccacgagtacaaccaggacctgatcaggaagggccaggccaacaaggtgaagaagctgagcatcgtggtgtccctgggcaccggccgcagcccccaggtgcctgtgacctgtgtggatgtgttccggcccagcaacccctgggagctggccaagacagtgtttggagccaaggagctgggcaagatggtggtggactgctgcacagatcctgatggccgggctgtggaccgggcccgggcctggtgtgagatggtgggcatccagtacttccggctgaacccccagctgggcacagacatcatgctggatgaggtgtctgacacagtgctggtgaatgccctgtgggagacagaggtgtacatctatgagcaccgggaggagttccagaagctgatccagctgctgctgagcccctag

SEQ ID NO: 77708 - DNA, 2259 bp, Artificial Sequence
  derived and/or modified sequence
atgcagttcttcggccggctggtgaacaccttcagcggcgtgaccaaccttttttccaaccccttcagagtgaaagaggttgccgtggcggattatacaagtagcgatcgtgtgagagaagagggccagctcatcctttttcagaacacaccgaatcgaacatgggattgcgtactggtaaaccccaggaatagtcagtccggcttccggctgttccagctggaactagaggcggatgcattggttaacttccaccagtatagctctcagctgctccccttctatgaatcttctccacaggtgcttcacactgaggtactgcagcatttaaccgatctcataagaaaccatccctcttggagcgtggcccacctcgccgtggaactgggcattcgcgaatgcttccaccattcacggataatttcctgcgctaattgcgctgaaaacgaagaagggtgcaccccgctacatctggcttgcaggaagggtgacggggagattctcgtggaacttgtacagtattgtcacacccagatggacgtcaccgattacaaaggagagaccgttttccattatgccgtgcagggagataattcacaggtcctgcagctgctcggccggaacgccgtggccgggcttaatcaggtcaataaccagggccttacacctcttcatctcgcatgtcaattaggaaaacaggagatggtaagagtcctgcttctttgtaacgctcggtgtaatattatgggccctaatgggtatcccatacatagcgcgatgaaatttagccagaaaggctgcgctgagatgattatcagcatggatagttcgcagatccactcgaaagacccaaggtacggcgcgagccccctgcactgggctaaaaacgcggaaatggctcgaatgttgttaaaacgcgggtgtaacgtcaatagcaccagctctgccgggaacacggctttacacgtggctgtcatgcgcaacaggttcgactgcgccattgtcttgttaacgcacggagccaatgcagatgcacgcggggagcatgggaacactcctctgcacctcgcaatgagtaaggataatgtggaaatgatcaaagcgcttatagtttttggcgcagaggtagatacacccaatgatttcggcgagacaccgaccttcctggcttccaagataggacgtcagctgcaagacctgatgcatatttcacgagcccgaaagccggctttcattctggggtcaatgcgtgacgaaaagcggacacacgaccatttgctatgtctggatggaggaggggtaaaagggttgattatcatccagctccttatcgccatcgaaaaagcttcaggagtggctacgaaggatctgtttgattgggtcgccggtaccagtaccggcggcatcctcgccctcgctatcttgcatagtaaatccatggcctatatgaggggcatgtacttcaggatgaaggacgaagtcttcagggggtctcgaccttacgaatccggacccttagaagaatttttgaaacgcgagttcggagagcacacaaagatgacggatgtgcggaagccaaaggtaatgttaaccggaactctctcagatcgccagccagcagaacttcatctcttcagaaactatgatgcccctgagacagtccgcgaacctcgttttaatcaaaatgtcaaccttcggccacctgcccagccttccgaccaactcgtgtggcgggcagccagaagtagcggcgcagctcctacctactttcgacccaacgggcggttcctggacggtggattattggcgaataacccgacactggatgccatgaccgagatccacgagtataatcaggatctcatccgcaaagggcaggcgaacaaagtgaaaaaactatctatcgtcgtgtcattggggaccggaagaagccctcaggtacccgtcacttgtgtggatgtctttcgaccctcaaatccgtgggagctcgcgaaaacagtgttcggagccaaagagctgggcaagatggtggttgactgctgtaccgacccggatggacgtgcggtggatcgggcccgtgcatggtgtgaaatggtggggatccagtactttcggttaaacccacagttgggaaccgatatcatgcttgatgaagtctcagatacggtcctggtaaacgccttgtgggagactgaagtatacatatatgaacatcgcgaggagttccagaagttgattcagctgcttctgagtccgtag

SEQ ID NO: 77709 - DNA, 2259 bp, Artificial Sequence
  derived and/or modified sequence
atgcagttcttcggccggctggtgaacaccttcagcggcgtgaccaatttatttagtaacccctttcgggtgaaggaagtggccgtagccgattataccagtagtgaccgggtgcgggaagagggacaacttattctctttcagaacacgcccaaccgcacgtgggactgcgtcctcgtcaatccaaggaatagtcaatcagggttcagactgtttcagttagagctggaggccgacgcgcttgtgaacttccaccaatatagctcccagctcctgcctttctacgagagcagcccacaggttcttcacaccgaagtgcttcagcacctgactgatctgattcgcaaccacccgtcttggtctgtagcccacttagctgttgaactgggcattcgggaatgtttccaccactccaggatcatctcttgcgcaaactgcgcggagaacgaggagggctgcacacctctgcatctggcgtgtcggaaaggcgatggggagatcctagtcgagctggtgcagtactgccatactcagatggatgttacagattacaagggagaaaccgtgtttcactacgccgtgcagggtgacaatagtcaggtcctgcaactcctcggccgcaatgctgttgcaggcctcaaccaggtaaacaaccagggactcactcccttacacctggcctgtcagctagggaaacaggaaatggtcagggtcctattactttgtaacgccaggtgtaacattatgggcccgaatgggtacccgatccatagtgccatgaagttttcccagaagggctgcgcagaaatgattatcagtatggactccagccagatacactccaaggatccccgctatggagcctcccctctgcactgggcaaaaaacgccgagatggccagaatgctccttaagcggggatgcaatgtcaattccaccagttcggcagggaacacggccctccacgtcgcagtcatgcggaacagatttgactgcgctatcgttctattaacgcacggggctaacgccgatgcgcggggggagcacggaaatacgcccttgcacctggcgatgagtaaggacaatgtggaaatgatcaaagcgttaattgtgttcggcgccgaggttgatacgcctaacgacttcggtgagactccaaccttcctagcctcaaagattggtaggcagttgcaggacttgatgcatatctcacgggctagaaaacctgcttttattctcggaagcatgcgtgacgaaaagcggacccacgaccacttactgtgcctcgacgggggcggcgtcaagggcctgataatcattcagctactgattgccatcgaaaaggccagcggtgttgccaccaaggacctctttgactgggtcgccggaacaagtacaggcgggattctagctctggctatactccattccaagtctatggcgtatatgcggggaatgtactttcgaatgaaagacgaagtgtttagaggcagccggccatatgaaagcggacctcttgaggaatttttgaagcgtgaatttggcgagcacactaagatgacggacgtgagaaaaccaaaagtgatgctgaccggaacactcagcgaccgacagccggccgaattacacctattccgcaattatgacgcccctgaaaccgtgcgcgaaccacgtttcaatcagaacgtgaacttacgcccgcccgcacagccatcggatcaattggtgtggagagcagctcggtccagcggggctgccccaacatatttcagacccaatgggagattcctggatgggggcctgctcgcaaataaccccaccctggacgctatgaccgaaatacatgagtacaatcaagacctaatacggaagggccaagcaaataaagtaaaaaaactgtcgattgtggtgtccctaggcacaggcagaagtccccaagttcctgtgacatgcgtggacgtgttccgaccttccaacccttgggagttggctaagaccgtattcggcgccaaggagctgggtaaaatggtagtggattgttgcaccgaccccgacggccgcgccgtggaccgtgctcgcgcttggtgtgaaatggtgggtatccagtattttcgcctgaatccccagctcgggactgatattatgttggacgaagtctccgacacagtactggttaatgcgctctgggagaccgaagtctatatttacgagcacagagaggagtttcagaagctaatccagttgctactgtcgccctag

SEQ ID NO: 77710 - DNA, 2259 bp, Artificial Sequence
  derived and/or modified sequence
atgcagtttttcggacggcttgtgaatacattcagcggcgtgacgaacttgtttagtaaccctttccgcgtcaaagaagtagctgtggctgattatacctccagcgatagggttcgtgaagaagggcagctcatcctatttcagaatacccctaaccggacctgggattgtgtgctcgtgaaccccagaaactcacagtcagggtttcgcctgtttcagctggagcttgaagctgatgccctcgtcaattttcaccaatattcttctcagctactccccttttatgagtcatctccccaggtgctgcataccgaggtactgcagcacctgaccgatctaatccggaatcatcctagctggtcagtggctcatctagccgtggaactcggaatccgggaatgtttccatcattctcgaattatatcttgtgcaaattgcgctgagaacgaggagggctgtacccctctccacctggcctgtcggaaaggtgatggggagatcttggttgaattagtgcagtactgccatacccagatggatgttaccgactacaagggcgagacagtcttccattacgccgtgcaaggcgataactctcaggtgctgcagcttctaggtcgcaacgcagtggccggactgaaccaggttaacaatcaaggccttactcccctgcatttggcatgccagttaggaaagcaggagatggtaagagtgttgctgctgtgtaacgctcgatgtaacataatgggccctaacgggtatcccatccactccgcaatgaaattttcccagaagggctgtgccgaaatgatcatctctatggactcatctcagattcactcaaaggaccccagatacggggcatcacccctccactgggcgaaaaatgcagagatggcgcgaatgcttcttaagaggggatgtaacgtcaactcgacatcctccgctgggaatactgccttacacgttgccgtgatgcgcaaccgtttcgactgtgctatcgttctgctgacacacggggctaacgccgatgcgaggggagagcatggaaatactcccttacatctggcaatgtcaaaagacaatgtggaaatgatcaaggcgctaattgtgttcggggctgaggtggacacaccaaacgatttcggggagacaccaaccttcctggccagcaaaattgggcgtcagcttcaggatttaatgcacattagccgggctaggaaacccgcatttatcctgggcagcatgagggacgaaaaaaggacacacgaccatctactctgtttggatgggggtggcgtgaaaggcttaattattatccaacttctgatcgctattgagaaagcttctggagtggccacaaaagatctcttcgactgggtcgcagggacaagtactgggggaatcctggctctagcgatactgcattccaagtccatggcatacatgagaggcatgtatttccgtatgaaagacgaagttttcagaggtagccggccatatgaatccgggcctctcgaggagtttcttaagcgcgaatttggcgagcacaccaaaatgacagacgtccgaaaaccgaaggtgatgctgaccgggacactgagcgacagacagccagccgagcttcatctatttcggaattacgatgctcccgaaacagtacgcgagccaagattcaaccagaacgtgaatctgaggcccccagctcagccaagtgatcagctggtgtggagagccgcacgctcttccggggctgcacccacttactttcgtccaaacggcaggttcttagatggcggactgcttgcaaacaaccctactctcgacgccatgactgaaatccacgagtacaaccaggacctcattcgaaaaggccaagcgaataaggttaagaagctgtctatcgtggtgtctctcggcacaggccgaagtccacaggtgcctgtgacttgtgtggacgtcttcaggccaagcaatccctgggagctggccaagactgtgtttggtgcgaaggagctgggcaagatggtggttgattgttgcacagatcccgatggcagggctgtggaccgagctagagcctggtgcgaaatggtgggcatccagtatttccgcctgaatcctcagctgggtaccgacattatgctagatgaagttagcgacacagttcttgttaacgcactatgggagacagaggtatacatatacgagcacagagaagaattccaaaagttgatccagttactgctgtccccctag

SEQ ID NO: 77711 - DNA, 2259 bp, Artificial Sequence
  derived and/or modified sequence
atgcagttttttggccgactcgtaaacacattctcaggagtcacgaacttgttttccaacccattccgcgtgaaggaagtggccgttgctgactacactagtagcgatagagtgcgggaagaaggtcaactcattctctttcagaacacaccaaaccgcacctgggattgcgtgttagtgaacccccgaaattcccagagcggctttcgactgtttcagttggagctcgaagccgacgccttggtgaactttcaccaatacagttcccaactgcttccgttctacgagtcatccccacaggtgcttcacaccgaagttctgcagcacctcaccgaccttatcagaaaccatccaagctggagcgttgctcatttagctgtggaactggggatccgggaatgttttcaccactcccggataatttcatgtgccaattgtgcagagaacgaggagggctgcacccccctacatcttgcttgtcgcaagggagatggagagatcctggtcgagctggtccaatattgccatacccagatggatgtgactgattataagggcgagaccgtattccactatgctgttcagggcgacaacagccaggtgctgcaacttttaggcaggaacgccgtggccggactcaatcaggtgaacaatcaagggctaacgcctctgcacctcgcttgccagctgggtaagcaggagatggtccgagtactgttattgtgtaatgcccgatgcaacataatgggccctaacgggtatcccatccactctgcaatgaaattttcccagaaaggatgtgccgagatgataatcagcatggacagcagtcagatccattcaaaagacccgcgttatggcgcaagccctctacactgggctaaaaatgctgaaatggcacgcatgctgctcaaacggggatgcaatgtgaatagtactagctcagccggaaataccgcgctgcacgtagccgtgatgcgtaacaggtttgactgcgcaattgttcttctgacccatggcgctaatgccgacgctcgtggggaacacggcaataccccactgcacctcgctatgtcgaaggataatgttgaaatgatcaaggccttgatagtgtttggcgctgaagtggacactccaaacgatttcggcgaaacaccaaccttcctcgcatcgaaaattggacggcagctccaagacctgatgcacatcagtagggcaagaaagcctgcattcatcctgggttcaatgcgcgatgaaaagagaacacacgaccatctgctgtgcctggatggaggcggagtgaagggtttaatcattatccagttgcttattgccatcgagaaagcatctggggttgccaccaaagacttattcgactgggtggccggaaccagtactggtgggatcttagctcttgcaattctgcatagcaagtcaatggcctatatgcgtggtatgtacttcaggatgaaggacgaggtttttaggggctctcggccttatgagtctggtccgctggaggagtttcttaagagggagtttggcgagcataccaagatgactgacgtgcgaaagcccaaagtgatgcttactggaactctgagcgacagacaacccgctgaacttcacctgttccggaactacgatgctcctgaaacagttcgggagccacgatttaaccagaacgttaacctgaggccacctgcccagccttcggaccaactcgtatggcgcgcagcacggagctccggagccgctcccacctacttcagaccgaatgggagattcctagatggagggctcctggccaacaacccaacgctggatgccatgactgaaatccatgaatacaaccaggacttaatccgaaagggccaggccaacaaagtgaaaaaactgtcaatcgtcgtgtccctgggcacagggagaagtccccaggtgccagtgacctgcgtggatgtcttccgtccatcaaacccctgggagttagcgaagactgtttttggagccaaagagctaggtaaaatggtggtggactgctgtaccgatcccgatggaagagctgttgatcgggctcgggcttggtgcgagatggtcgggatccagtactttcgcctgaaccctcagctgggcacggatatcatgctagacgaggtgtccgataccgtgttagtgaatgcattatgggagactgaggtgtacatctacgagcatcgggaagagttccagaagttgatccagctcctgctcagcccctag

SEQ ID NO: 77712 - DNA, 3060 bp, Artificial Sequence
  derived and/or modified sequence
gggggtccgttccccaacttcctcggcgctccggactcccaagtctccgccggaccctcctttggatattcctcgtgtctccgattctgagacagagggggaagacggtggggcctccccacctgccccgcagaagatgcagttctttggccgcctggtcaataccttcagtggcgtcaccaacttgttctctaacccattccgggtgaaggaggtggctgtggccgactacacctcgagtgaccgagttcgggaggaagggcagctgattctgttccagaacactcccaaccgcacctgggactgcgtcctggtcaaccccaggaactcacagagtggattccgactcttccagctggagttggaggctgacgccctagtgaatttccatcagtattcttcccagctgctacccttctatgagagctcccctcaggtcctgcacactgaggtcctgcagcacctgaccgacctcatccgtaaccaccccagctggtcagtggcccacctggctgtggagctagggatccgcgagtgcttccatcacagccgtatcatcagctgtgccaattgcgcggagaacgaggagggctgcacacccctgcacctggcctgccgcaagggtgatggggagatcctggtggagctggtgcagtactgccacactcagatggatgtcaccgactacaagggagagaccgtcttccattatgctgtccagggtgacaattctcaggtgctgcagctccttggaaggaacgcagtggctggcctgaaccaggtgaataaccaagggctgaccccgctgcacctggcctgccagctggggaagcaggagatggtccgcgtgctgctgctgtgcaatgctcggtgcaacatcatgggccccaacggctaccccatccactcggccatgaagttctctcagaaggggtgtgcggagatgatcatcagcatggacagcagccagatccacagcaaagacccccgttacggagccagccccctccactgggccaagaacgcagagatggcccgcatgctgctgaaacggggctgcaacgtgaacagcaccagctccgcggggaacacggccctgcacgtggcggtgatgcgcaaccgcttcgactgtgccatagtgctgctgacccacggggccaacgcggatgcccgcggagagcacggcaacaccccgctgcacctggccatgtcgaaagacaacgtggagatgatcaaggccctcatcgtgttcggagcagaagtggacaccccgaatgactttggggagactcctacattcctagcctccaaaatcggcagacaactacaggatctcatgcacatctcacgggcccggaagccagcgttcatcctgggctccatgagggacgagaagcggacccacgaccacctgctgtgcctggatggaggaggagtgaaaggcctcatcatcatccagctcctcatcgccatcgagaaggcctcgggtgtggccaccaaggacctgtttgactgggtggcgggcaccagcactggaggcatcctggccctggccattctgcacagtaagtccatggcctacatgcgcggcatgtactttcgcatgaaggatgaggtgttccggggctccaggccctacgagtcggggcccctggaggagttcctgaagcgggagtttggggagcacaccaagatgacggacgtcaggaaacccaaggtgatgctgacagggacactgtctgaccggcagccggctgaactccacctcttccggaactacgatgctccagaaactgtccgggagcctcgtttcaaccagaacgttaacctcaggcctccagctcagccctcagaccagctggtgtggcgggcggcccgaagcagcggggcagctcctacttacttccgacccaatgggcgcttcctggacggtgggctgctggccaacaaccccacgctggatgccatgaccgagatccatgagtacaatcaggacctgatccgcaagggtcaggccaacaaggtgaagaaactctccatcgttgtctccctggggacagggaggtccccacaagtgcctgtgacctgtgtggatgtcttccgtcccagcaacccctgggagctggccaagactgtttttggggccaaggaactgggcaagatggtggtggactgttgcacggatccagacgggcgggctgtggaccgggcacgggcctggtgcgagatggtcggcatccagtacttcagattgaacccccagctggggacggacatcatgctggatgaggtcagtgacacagtgctggtcaacgccctctgggagaccgaggtctacatctatgagcaccgcgaggagttccagaagctcatccagctgctgctctcaccctgagggtccccagcctctcaccggccccagctgacctcgtccattcagcccctgccaggccaagcccagccactgccctcccgggcagatctgggcccaggcacctctgagtccatagaccaggcctgggagaatgccaagctgcctgcccgaggctggtcctgaaggcctgtctcccactaaccccgccttccagcactttctgtcattccaggctgggaaagtctagagccccctttggcccctttccctgactgtcaaggacaactgactcccccatcagctcaaacattaagggtacccgggcacaaccgtacccctgcccccagccccagcctccctgagggcctgccgggctgcctctgccccagcccccagcaagggcactcccaggcttcctggtgggtgcagcccactccctctgccctctgctccgttccctgggggctgggactaaagaaatgggtgtcccccaccccatcagctgggaaagcccaggccgcaggagtgggatgcccgttggactttgcccctcacactggcccagcccctcacactgccccaccccgagaaccctcagctctcaaaggtcactcctgggagtttcttcttcccaatggaagtggcttaagagccaaaactgaaataaatcatttggattcaagttc

SEQ ID NO: 77713 - DNA, 3011 bp, Artificial Sequence
  derived and/or modified sequence
tttgtttgcggaagtaggaggaagtagaagtgctgagtaagccgagacagagggggaagacggtggggcctccccacctgccccgcagaagatgcagttctttggccgcctggtcaataccttcagtggcgtcaccaacttgttctctaacccattccgggtgaaggaggtggctgtggccgactacacctcgagtgaccgagttcgggaggaagggcagctgattctgttccagaacactcccaaccgcacctgggactgcgtcctggtcaaccccaggaactcacagagtggattccgactcttccagctggagttggaggctgacgccctagtgaatttccatcagtattcttcccagctgctacccttctatgagagctcccctcaggtcctgcacactgaggtcctgcagcacctgaccgacctcatccgtaaccaccccagctggtcagtggcccacctggctgtggagctagggatccgcgagtgcttccatcacagccgtatcatcagctgtgccaattgcgcggagaacgaggagggctgcacacccctgcacctggcctgccgcaagggtgatggggagatcctggtggagctggtgcagtactgccacactcagatggatgtcaccgactacaagggagagaccgtcttccattatgctgtccagggtgacaattctcaggtgctgcagctccttggaaggaacgcagtggctggcctgaaccaggtgaataaccaagggctgaccccgctgcacctggcctgccagctggggaagcaggagatggtccgcgtgctgctgctgtgcaatgctcggtgcaacatcatgggccccaacggctaccccatccactcggccatgaagttctctcagaaggggtgtgcggagatgatcatcagcatggacagcagccagatccacagcaaagacccccgttacggagccagccccctccactgggccaagaacgcagagatggcccgcatgctgctgaaacggggctgcaacgtgaacagcaccagctccgcggggaacacggccctgcacgtggcggtgatgcgcaaccgcttcgactgtgccatagtgctgctgacccacggggccaacgcggatgcccgcggagagcacggcaacaccccgctgcacctggccatgtcgaaagacaacgtggagatgatcaaggccctcatcgtgttcggagcagaagtggacaccccgaatgactttggggagactcctacattcctagcctccaaaatcggcagacaactacaggatctcatgcacatctcacgggcccggaagccagcgttcatcctgggctccatgagggacgagaagcggacccacgaccacctgctgtgcctggatggaggaggagtgaaaggcctcatcatcatccagctcctcatcgccatcgagaaggcctcgggtgtggccaccaaggacctgtttgactgggtggcgggcaccagcactggaggcatcctggccctggccattctgcacagtaagtccatggcctacatgcgcggcatgtactttcgcatgaaggatgaggtgttccggggctccaggccctacgagtcggggcccctggaggagttcctgaagcgggagtttggggagcacaccaagatgacggacgtcaggaaacccaaggtgatgctgacagggacactgtctgaccggcagccggctgaactccacctcttccggaactacgatgctccagaaactgtccgggagcctcgtttcaaccagaacgttaacctcaggcctccagctcagccctcagaccagctggtgtggcgggcggcccgaagcagcggggcagctcctacttacttccgacccaatgggcgcttcctggacggtgggctgctggccaacaaccccacgctggatgccatgaccgagatccatgagtacaatcaggacctgatccgcaagggtcaggccaacaaggtgaagaaactctccatcgttgtctccctggggacagggaggtccccacaagtgcctgtgacctgtgtggatgtcttccgtcccagcaacccctgggagctggccaagactgtttttggggccaaggaactgggcaagatggtggtggactgttgcacggatccagacgggcgggctgtggaccgggcacgggcctggtgcgagatggtcggcatccagtacttcagattgaacccccagctggggacggacatcatgctggatgaggtcagtgacacagtgctggtcaacgccctctgggagaccgaggtctacatctatgagcaccgcgaggagttccagaagctcatccagctgctgctctcaccctgagggtccccagcctctcaccggccccagctgacctcgtccattcagcccctgccaggccaagcccagccactgccctcccgggcagatctgggcccaggcacctctgagtccatagaccaggcctgggagaatgccaagctgcctgcccgaggctggtcctgaaggcctgtctcccactaaccccgccttccagcactttctgtcattccaggctgggaaagtctagagccccctttggcccctttccctgactgtcaaggacaactgactcccccatcagctcaaacattaagggtacccgggcacaaccgtacccctgcccccagccccagcctccctgagggcctgccgggctgcctctgccccagcccccagcaagggcactcccaggcttcctggtgggtgcagcccactccctctgccctctgctccgttccctgggggctgggactaaagaaatgggtgtcccccaccccatcagctgggaaagcccaggccgcaggagtgggatgcccgttggactttgcccctcacactggcccagcccctcacactgccccaccccgagaaccctcagctctcaaaggtcactcctgggagtttcttcttcccaatggaagtggcttaagagccaaaactgaaataaatcatttggattcaa

SEQ ID NO: 77714 - protein, 420 aa, Artificial Sequence
  derived and/or modified sequence
MDFSVKVDIEKEVTCPICLELLTEPLSLDCGHSFCQACITAKIKESVIISRGESSCPVCQTRFQPGNLRPNRHLANIVERVKEVKMSPQEGQKRDVCEHHGKKLQIFCKEDGKVILDNEEQRELQKLEEGEVNVLDNLAAATDQLVQQRQDASTLISDLQRRLRGSSVEMLQDVIDVMKRSESWTLKKPKSVSKKLKSVFRVPDLSGMLQVLKELTDVQYYWVDVMLNPGSATSNVAISVDQRQVKTVRTCTFKNSNPCDFSAFGVFGCQYFSSGKYYWEVDVSGKIAWILGVHSKISSLNKRKSSGFAFDPSVNYSKVYSRYRPQYGYWVIGLQNTCEYNAFEDSSSSDPKVLTLFMAVPPCRIGVFLDYEAGIVSFFNVTNHGALIYKFSGCRFSRPAYPYFNPWNCLVPMTVCPPSS

SEQ ID NO: 77715 - protein, 309 aa, Artificial Sequence [sequence omitted]

SEQ ID NO: 77716 - DNA, 372 bp, Artificial Sequence
  derived and/or modified sequence
atggttgatggccgtactaggactattatcaacgatatttttttcactgaacctactcctgagatgtctagtctgcccgtccggagccactctagtctgtcgctgaacttggtcagtctcatggtgatttgtcgcggcatcatcaagcttgttatccacttccgcatgtactgccccccacgattgaaggccaagcatatcgaacccaccctgcggcctgtccctctgaaagagctgagaatatcccactggcctaacgaatgtataagacatagtgcctcagttcctatggctacaggcgcaaacgggcttgaaacaaaagatgagacaaaacggaatgctgaaaagtgcgcctgtagcgtgttcttgtag

SEQ ID NO: 77717 - DNA, 1263 bp, Artificial Sequence
  derived and/or modified sequence
atggacttcagcgtgaaggtggacatcgagaaggaggtgacctgccccatctgcctggagctgctgaccgagcccctgagcctggactgcggccacagcttctgccaggcctgcatcaccgccaagatcaaggagagcgtgatcatcagcagaggcgagagcagctgccccgtgtgccagaccagattccagcccggcaacctgagacccaacagacacctggccaacatcgtggagagagtgaaggaggtgaagatgagcccccaggagggccagaagagagacgtgtgcgagcaccacggcaagaagctgcagatcttctgcaaggaggacggcaaggtgatcctggacaacgaggagcagagagagctgcagaagctggaggagggcgaggtgaacgtgctggacaacctggccgccgccaccgaccagctggtgcagcagagacaggacgccagcaccctgatcagcgacctgcagagaagactgagaggcagcagcgtggagatgctgcaggacgtgatcgacgtgatgaagagaagcgagagctggaccctgaagaagcccaagagcgtgagcaagaagctgaagagcgtgttcagagtgcccgacctgagcggcatgctgcaggtgctgaaggagctgaccgacgtgcagtactactgggtggacgtgatgctgaaccccggcagcgccaccagcaacgtggccatcagcgtggaccagagacaggtgaagaccgtgagaacctgcaccttcaagaacagcaacccctgcgacttcagcgccttcggcgtgttcggctgccagtacttcagcagcggcaagtactactgggaggtggacgtgagcggcaagatcgcctggatcctgggcgtgcacagcaagatcagcagcctgaacaagagaaagagcagcggcttcgccttcgaccccagcgtgaactacagcaaggtgtacagcagatacagaccccagtacggctactgggtgatcggcctgcagaacacctgcgagtacaacgccttcgaggacagcagcagcagcgaccccaaggtgctgaccctgttcatggccgtgcccccctgcagaatcggcgtgttcctggactacgaggccggcatcgtgagcttcttcaacgtgaccaaccacggcgccctgatctacaagttcagcggctgcagattcagcagacccgcctacccctacttcaacccctggaactgcctggtgcccatgaccgtgtgcccccccagcagctag

SEQ ID NO: 77718 - DNA, 930 bp, Artificial Sequence
  derived and/or modified sequence
atgagagtgatcctggacaacgaggagcagagagagctgcagaagctggaggagggcgaggtgaacgtgctggacaacctggccgccgccaccgaccagctggtgcagcagagacaggacgccagcaccctgatcagcgacctgcagagaagactgagaggcagcagcgtggagatgctgcaggacgtgatcgacgtgatgaagagaagcgagagctggaccctgaagaagcccaagagcgtgagcaagaagctgaagagcgtgttcagagtgcccgacctgagcggcatgctgcaggtgctgaaggagctgaccgacgtgcagtactactgggtggacgtgatgctgaaccccggcagcgccaccagcaacgtggccatcagcgtggaccagagacaggtgaagaccgtgagaacctgcaccttcaagaacagcaacccctgcgacttcagcgccttcggcgtgttcggctgccagtacttcagcagcggcaagtactactgggaggtggacgtgagcggcaagatcgcctggatcctgggcgtgcacagcaagatcagcagcctgaacaagagaaagagcagcggcttcgccttcgaccccagcgtgaactacagcaaggtgtacagcagatacagaccccagtacggctactgggtgatcggcctgcagaacacctgcgagtacaacgccttcgaggacagcagcagcagcgaccccaaggtgctgaccctgttcatggccgtgcccccctgcagaatcggcgtgttcctggactacgaggccggcatcgtgagcttcttcaacgtgaccaaccacggcgccctgatctacaagttcagcggctgcagattcagcagacccgcctacccctacttcaacccctggaactgcctggtgcccatgaccgtgtgcccccccagcagctag

SEQ ID NO: 77719 - DNA, 1263 bp, Artificial Sequence
  derived and/or modified sequence
atggatttcagcgtcaaagtggacatcgagaaggaggtgacctgccccatatgccttgagctgttaactgaaccacttagcctagattgtggacattcgttctgtcaggcttgtatcacagccaaaattaaagagtctgtgattatctccagaggtgaaagctcatgcccagtatgccagaccagatttcagcccggtaatctgcgacctaaccgacaccttgccaacatcgtggagcgggtcaaagaagtgaagatgtctccccaggaaggccaaaagagggacgtctgtgaacaccatggcaaaaagctgcaaatcttctgcaaagaggacggaaaagtgatcctcgacaatgaggaacaaagggagctgcaaaaattggaggaaggcgaagtgaacgtgctggataatctggccgccgccactgatcaattggtacagcaacggcaggatgccagcacgctgatcagtgacctccaaaggaggctgcgcggcagctcggtggaaatgctgcaggatgtgatcgatgttatgaagcgctctgagtcctggacactcaaaaaaccaaagtcagtgagcaaaaaacttaaatccgtgtttagggtccccgatttgagtggaatgctgcaggtactgaaagaacttactgatgtccagtattactgggtcgacgtaatgctcaacccaggttccgctactagcaacgtcgccattagcgtggaccaacgccaagtgaaaacagtgcggacttgcacattcaaaaactctaacccttgcgacttctccgctttcggcgtctttggatgccagtatttttcctcaggtaaatactactgggaagtcgatgttagtggcaagatcgcatggatcctcggcgtgcattctaaaatctccagcctaaacaagcggaagagttcaggatttgccttcgacccatctgtgaattactccaaagtctactctagatatcggccacagtacggttattgggtgatcggtcttcaaaacacatgtgaatataatgcctttgaagactcatcgtccagcgaccctaaggtgcttaccctgtttatggctgtacccccctgcaggattggggtcttcctggactacgaagccggaatcgtgtccttttttaatgtcaccaatcatggcgctctgatctataaattctcaggctgtcggttctctcggcccgcatatccttactttaacccatggaattgcctggttccaatgaccgtttgtcctcctagttcctag

SEQ ID NO: 77720 - DNA, 930 bp, Artificial Sequence
  derived and/or modified sequence
atgcgcgttatcctcgacaatgaagagcagcgcgagctacagaaactggaggagggggaagtgaatgtgttagacaatctagctgctgctacggaccagctcgtccagcagagacaggatgcttcaacgcttatctccgatctccaacgtcgactgaggggaagctccgtcgaaatgctgcaggacgttatagatgttatgaagcggtctgagtcttggactcttaagaaacccaaatccgtgtcgaaaaaacttaagtctgtctttagggtgccagatctgtccggaatgttgcaagttctcaaagagctgacggatgtgcagtactactgggtggacgtgatgcttaaccctggtagcgccacttctaatgtggccatttctgtcgatcagcgccaggtgaagacggtgcggacatgtacattcaagaattccaacccgtgcgacttttccgcttttggagtgtttggctgccaatatttctcatctggcaagtactattgggaggtcgatgtgtctggaaagatcgcctggattctgggggtacatagcaagatttcctcgctgaataagaggaaatcaagcggctttgcgttcgaccctagtgtaaattacagtaaggtttattctcggtaccggcctcagtatggatattgggtcatcgggctgcagaacacatgcgaatacaacgcattcgaagactcgtcctcttctgaccctaaggtgctcactctttttatggctgtacccccatgcaggatcggcgtgttcctggattatgaagccgggattgtgtcattctttaatgttaccaaccatggcgctctgatctataagttttccgggtgccgattctcacgacccgcctacccctatttcaacccctggaattgcctggtgcctatgacggtttgccccccctcaagctag

SEQ ID NO: 77721 - DNA, 1263 bp, Artificial Sequence
  derived and/or modified sequence
atggacttctctgtgaaggtggacatcgagaaggaggtgacctgccccatctgcctggagctgctgacagagcccctgagcctggactgtggccacagcttctgccaggcctgcatcacagccaagatcaaggagagcgtcatcatcagcagaggagagagcagctgccctgtgtgccagacccgcttccagcccggcaacctgcggcccaacagacacctggccaacatcgtggagcgggtgaaggaggtgaagatgagcccccaggagggccagaagagagatgtgtgtgagcaccacggcaagaagctgcagatcttctgcaaggaggatggcaaggtgatcctggacaatgaggagcagcgggagctgcagaagctggaggagggggaggtgaatgtgctggacaacctggccgccgccacagaccagctggtgcagcagaggcaggatgccagcaccctcatcagtgacctgcagaggcggctgcggggcagctctgtggagatgctgcaggatgtgattgatgtgatgaagaggtctgagagctggaccctgaagaagcccaagtctgtgtccaagaagctgaagagcgtcttccgggtgcctgacctgagcggcatgctgcaggtgctgaaggagctgacagatgtgcagtactactgggtggatgtgatgctgaaccctggcagcgccaccagcaatgtggccatctctgtggaccagaggcaggtgaagacagtgaggacctgcaccttcaagaacagcaacccctgtgacttcagcgccttcggcgtgtttggctgccagtacttcagcagcggcaagtactactgggaggtggatgtgtctgggaagatcgcctggatcctgggcgtgcacagcaagatcagcagcctgaacaagaggaagagcagcggctttgcctttgaccccagcgtgaactacagcaaggtgtacagccgctaccggccccagtatggctactgggtgattggcctgcagaacacctgtgagtacaatgcctttgaggacagcagcagcagtgaccccaaggtgctgaccctcttcatggctgtgcccccctgcagaattggagtcttcctggactatgaagctggcatcgtgtccttcttcaacgtgaccaaccacggggccctgatctacaagttcagcggctgccgcttcagcaggcctgcctacccctacttcaacccctggaactgcctggtgcccatgacagtgtgcccccccagcagctag

SEQ ID NO: 77722 - DNA, 930 bp, Artificial Sequence
  derived and/or modified sequence
atgagggtcatcctggacaatgaggagcagcgggagctgcagaagctggaggagggggaggtgaatgtgctggacaacctggccgccgccacagaccagctggtgcagcagaggcaggatgccagcaccctcatcagtgacctgcagaggcggctgcggggcagctctgtggagatgctgcaggatgtgattgatgtgatgaagaggtctgagagctggaccctgaagaagcccaagtctgtgtccaagaagctgaagtctgtgttccgggtgcctgacctgagcggcatgctgcaggtgctgaaggagctgacagatgtgcagtactactgggtggatgtgatgctgaaccctggcagcgccaccagcaatgtggccatctctgtggaccagaggcaggtgaagacagtgaggacctgcaccttcaagaacagcaacccctgtgacttcagcgcctttggagtgtttggctgccagtacttcagcagcggcaagtactactgggaggtggatgtgtctgggaagatcgcctggatcctgggcgtgcacagcaagatcagcagcctgaacaagaggaagagcagcggctttgcctttgaccccagcgtgaactacagcaaggtgtacagccgctaccggccccagtatggctactgggtgattggcctgcagaacacctgtgagtacaatgcctttgaggacagcagcagcagtgaccccaaggtgctgaccctcttcatggctgtgcccccctgccgcatcggggtcttcctggactatgaggccggcatcgtgtccttcttcaacgtgaccaaccacggggccctgatctacaagttcagcggctgccgcttcagcaggcctgcctacccctacttcaacccctggaactgcctggtgcccatgacagtgtgcccccccagcagctag

SEQ ID NO: 77723 - DNA, 1263 bp, Artificial Sequence
  derived and/or modified sequence
atggacttcagcgtgaaggtggacatcgagaaggaggtgacctgccctatatgcttggaattgctgaccgaacctctcagcttggactgcggccattcgttttgccaggcctgtatcacagcgaagataaaggaaagtgtcattatttcccgaggagaatcctcatgcccagtctgccaaacgcggttccagccagggaatttgcgacccaacagacatcttgccaatatagtcgaacgagtaaaggaagtcaagatgagtccccaggaaggacagaagcgggacgtttgtgagcatcacggaaagaaacttcagatattctgtaaggaagatggcaaagttattttggacaatgaggagcaaagagaactccagaagctggaggaaggagaggtcaatgtgttagataacctggcggccgccaccgaccaactggtgcagcagcggcaggacgccagcaccctgatcagcgacttgcagaggcggctgcgcggatcctccgtggaaatgctccaggatgtaatcgatgtaatgaaaaggtccgaaagctggacgctcaaaaaacctaaatccgtgtctaagaaactgaagtcagttttccgagtccccgacctgagcggcatgctgcaggtcttgaaagagcttaccgatgtccagtattactgggttgacgtgatgctgaatccgggtagtgccaccagcaatgtggccatttctgttgatcagagacaggtgaaaaccgtgcgcacctgtacattcaagaactccaacccgtgtgatttctccgcattcggcgtcttcggctgtcagtatttctcttcaggcaaatattattgggaagtagacgtgagcggtaaaatcgcctggattctgggggtccatagtaaaatctcttctctcaacaagagaaaaagctctggcttcgctttcgaccccagcgtgaactactcaaaggtgtactcacgttataggcctcagtatggctattgggttataggactccagaatacatgtgagtacaacgccttcgaagacagctctagtagtgatcccaaagtccttacgttgtttatggctgttccgccctgtaggattggagtgtttctggattatgaggcgggcatcgtgtccttcttcaacgtaaccaaccatggagcactcatttacaagttttccggatgtagatttagccggccagcttacccgtactttaacccctggaactgtctcgtccccatgacagtgtgccccccctcttcctag

SEQ ID NO: 77724 - DNA, 930 bp, Artificial Sequence
  derived and/or modified sequence
atgcgggtgatcctggacaacgaggagcagcgggagctgcagaagctcgaggaaggtgaggttaacgttctcgacaatcttgctgccgccaccgaccagctcgtgcagcaacggcaggatgcttcaactctgattagcgacctgcagcggcggctaagaggcagctctgtagaaatgttacaggatgtcattgatgtcatgaaacgcagtgagtcatggaccctcaagaaaccgaaatctgtatctaagaagctgaagtccgtcttccgtgtgccagatctgtcaggtatgctgcaagtcttgaaggagctgacagacgtgcagtactactgggttgacgtgatgctgaatcccggttccgccacctccaatgtcgctatcagcgtggaccagaggcaggtgaaaacagtcaggacctgcacctttaagaactccaatccatgcgacttttcagcattcggtgtgttcggctgtcagtatttttcttcaggcaagtactattgggaggtcgatgttagcggaaaaattgcgtggatcctgggagtgcactctaagattagctcactaaacaagaggaagtctagcggcttcgcctttgaccctagcgtgaactacagcaaggtttatagccgctacaggcctcagtacggatactgggtcataggtttgcaaaacacctgtgagtacaacgcctttgaggacagttccagtagcgatccgaaagtcttaactctgtttatggccgttccaccttgccgaatcggtgtgtttcttgactacgaggccggaatcgtgtcattttttaacgtcacgaatcacggcgcgctgatatacaagttttccggctgtcgctttagtaggccagcttatccatacttcaatccttggaattgcctggtccccatgaccgtctgcccacccagcagttag

SEQ ID NO: 77725 - DNA, 1263 bp, Artificial Sequence
  derived and/or modified sequence
atggacttttctgtgaaagttgacattgagaaggaggtgacctgtccgatatgtctggaactcttgacggaaccactgtccctggattgcggtcactccttctgtcaagcctgcatcacggctaagatcaaggagagcgtcattatttctcgcggtgagagctcctgtccagtgtgtcagaccaggttccaaccaggaaacttacgaccgaatagacacctggcaaatatagtggagagagtcaaagaagtcaaaatgagcccacaggagggccagaagagagatgtgtgcgagcatcacggcaagaaattacaaatattctgcaaggaggacggaaaagtaattttagataatgaggagcagcgcgaattacagaaacttgaagagggcgaagtgaacgttctcgataaccttgccgcagccacagaccagctggtgcagcagcgccaagacgccagcaccttaatctcagacttgcaaaggcgactgcgcggttcctcagtggagatgctgcaggacgtgattgacgtgatgaaacggtccgagagttggacgcttaagaagcccaaatcagtatcaaaaaagctgaagtccgtattcagggtgccggacctgtctgggatgctgcaagtgctgaaagagctcaccgatgtccagtattattgggtggacgtcatgttgaatccaggctcagcaacttccaatgtggccattagtgtcgatcagagacaagtgaaaaccgtaaggacctgtacctttaaaaactcaaatccatgcgatttctctgctttcggggtgttcggctgccagtacttctctagtggtaaatattactgggaggtggatgtgtctggtaagatcgcttggatattgggggtgcattcaaaaatatcctccctgaacaagcgcaagagttccggcttcgcattcgatccgtcagtaaactactcaaaagtctattcacgttatcggcctcagtacggatactgggtgatcggactgcagaatacgtgtgaatataacgcattcgaggacagttctagttctgaccccaaagtgctgactctctttatggctgttcctccttgtagaatcggagtcttcctggattacgaagctggaatcgttagcttttttaatgtgactaaccacggcgcactgatttataaattttcgggatgtcgcttcagccgacctgcatatccttatttcaatccgtggaactgtttggtccccatgaccgtctgtcctccaagctcttag

SEQ ID NO: 77726 - DNA, 930 bp, Artificial Sequence
  derived and/or modified sequence
atgagagtcatcctggacaacgaggaacagagagaattgcagaagttagaagagggcgaggtgaacgtactcgacaacctcgccgctgctacggatcagctcgttcagcagcggcaggacgcttccaccctgataagcgatctccagagacgcttaaggggcagcagcgtcgaaatgctgcaagatgtcattgatgtcatgaaaaggtccgagtcctggaccctaaagaaacccaaaagcgtctccaaaaagctgaagtcagtatttcgcgtgcccgacctatccgggatgctgcaggtgctgaaggaactgacagatgtccagtactactgggttgacgtgatgctcaatcccggttctgcgaccagcaatgttgctatctcagtggaccaacgacaggttaaaaccgttagaacatgtacatttaagaactctaacccttgtgacttttccgccttcggagtgttcggatgccagtacttctcatctgggaagtactattgggaggtggatgtgagtggcaagatcgcctggatcctgggcgtccacagtaagattagcagcctgaataagcgtaagtcatctggattcgcttttgacccgtccgtgaactactccaaggtgtatagcagataccggccacaatacggctactgggttatagggctccagaatacctgtgagtataatgcctttgaagattccagctctagtgatccaaaggtgctgaccctcttcatggcggttccaccctgtcgcattggagttttccttgattacgaagcgggtatcgtgtccttctttaatgtgaccaaccacggcgcactgatttacaaattctccggctgccgattctctaggccagcgtacccatacttcaatccttggaactgcctggtgcccatgactgtttgcccacccagtagctag

SEQ ID NO: 77727 - DNA, 2477 bp, Artificial Sequence
  derived and/or modified sequence
atggatttctcagtaaaggtagacatagagaaggaggtgacctgccccatctgcctggagctcctgacagaacctctgagcctagattgtggccacagcttctgccaagcctgcatcactgcaaagatcaaggagtcagtgatcatctcaagaggggaaagcagctgtcctgtgtgtcagaccagattccagcctgggaacctccgacctaatcggcatctggccaacatagttgagagagtcaaagaggtcaagatgagcccacaggaggggcagaagagagatgtctgtgagcaccatggaaaaaaactccagatcttctgtaaggaggatggaaaagtcatcttggacaatgaggagcagagagagctgcaaaagctggaggaaggtgaggtgaatgtgctggataacctggcagcagctacagaccagctggtccagcagaggcaggatgccagcacgctcatctcagatctccagcggaggttgaggggatcgtcagtagagatgctgcaggatgtgattgacgtcatgaaaaggagtgaaagctggacattgaagaagccaaaatctgtttccaagaaactaaagagtgtattccgagtaccagatctgagtgggatgctgcaagttcttaaagagctgacagatgtccagtactactgggtggacgtgatgctgaatccaggcagtgccacttcgaatgttgctatttctgtggatcagagacaagtgaaaactgtacgcacctgcacatttaagaattcaaatccatgtgatttttctgcttttggtgtcttcggctgccaatatttctcttcggggaaatattactgggaagtagatgtgtctggaaagattgcctggatcctgggcgtacacagtaaaataagtagtctgaataaaaggaagagctctgggtttgcttttgatccaagtgtaaattattcaaaagtttactccagatatagacctcaatatggctactgggttataggattacagaatacatgtgaatataatgcttttgaggactcctcctcttctgatcccaaggttttgactctctttatggctgtgcctccctgtcgtattggggttttcctagactatgaggcaggcattgtctcatttttcaatgtcacaaaccacggagcactcatctacaagttctctggatgtcgcttttctcgacctgcttatccgtatttcaatccttggaactgcctagtccccatgactgtgtgcccaccgagctcctgagtgttctcattcctttacccacttctgcatagtagcccttgtgctgagactcagattctgcacctgagttcatctctactgagaccatctcttcctttctttccccttcttttacttagaatgtctttgtattcatttgctagggcttccatagcaaagcatcatagattgctgatttaaactgtaattgtattgccgtactgtgggctggaaatcccaaatctagattccagcagagttggttctttctgaggtctgcaaggaagggctctgttccatgcctctctccttggcttgtagaaggcatcttgtccctatgactcttcacattgtctttatgtacatctctgtgcccaagttttccctttttattaagacaccagtcatactggctcagggcccaccgctaatgccttaatgaaatcattttaacattatattctctacaaagaccttatttccaaataagataatatttggaggtattgggaataaaaactccaacatataaatttgaggaaggcacgatttcactcataacaatcttaccctttcttgcaagagatgcttgtacattattttcctaataccttggtttcactagtagtaaacattattattttttttatatttgcaaaggaaacatatctaatccttcctatagaaagaacagtattgctgtaattccttttcttttcttcctcatttcctctgccccttaaaagattgaagaaagagaaacttgtcaactcatatccacgttatctagcaaagtacataagaatctatcactaagtaatgtatccttcagaatgtgttggtttaccagtgacaccccatattcatcacaaaattaaagcaagaagtccatagtaatttatttgctaatagtggatttttaatgctcagagtttctgaggtcaaattttatcttttcacttacaagctctatgatcttaaataatttacttaatgtattttggtgtattttcctcaaattaatattggtgttcaagactatatctaattcctctgatcactttgagaaacaaacttttattaaatgtaaggcacttttctatgaattttaaatataaaaataaatattgttctgattattactgaaaagatgtcagccatttcaatgtcttgggaaacaattttttgtttttgttctgttttctttttgcttcaataaaacaatagctggctct

SEQ ID NO: 77728 - protein, 738 aa, Artificial Sequence
  derived and/or modified sequence
MSRRSQRLTRYSQGDDDGSSSSGGSSVAGSQSTLFKDSPLRTLKRKSSNMKRLSPAPQLGPSSDAHTSYYSESLVHESWFPPRSSLEELHGDANWGEDLRVRRRRGTGGSESSRASGLVGRKATEDFLGSSSGYSSEDDYVEDSEGRGSKVTETEPVSSFPAGYSDVDQQSSSSRLRSAVSRAGSLLWMVATSPGRLFRLLYWWAGTTWYRLTTAASLLDVFVLTRRFSSLKTFLWFLLPLLLLTCLTYGAWYFYPYGLQTFHPALVSWWAAKDSRRPDEGWEARDSSPHFQAEQRVMSRVHSLERRLEALAAEFSSNWQKEAMRLERLELRQGAPGQGGGGGLSHEDTLALLEGLVSRREAALKEDFRRETAARIQEELSALRAEHQQDSEDLFKKIVRASQESEARIQQLKSEWQSMTQESFQESSVKELRRLEDQLAGLQQELAALALKQSSVAEEVGLLPQQIQAVRDDVESQFPAWISQFLARGGGGRVGLLQREEMQAQLRELESKILTHVAEMQGKSAREAAASLSLTLQKEGVIGVTEEQVHHIVKQALQRYSEDRIGLADYALESGGASVISTRCSETYETKTALLSLFGIPLWYHSQSPRVILQPDVHPGNCWAFQGPQGFAVVRLSARIRPTAVTLEHVPKALSPNSTISSAPKDFAIFGFDEDLQQEGTLLGKFTYDQDGEPIQTFHFQAPTMATYQVVELRILTNWGHPEYTCIYRFRVHGEPAH

SEQ ID NO: 77729 - protein, 110 aa, Artificial Sequence
  derived and/or modified sequence
MSRRSQRLTRYSQGDDDGSSSSGGSSVAGSQSTLFKDSPLRTLKRKSSNMKRLSPAPQLGPSSDAHTSYYSESLVHESWFPPRSSLEELHGDANWGEDLRVRRRRGTGGS

SEQ ID NO: 77730 - DNA, 2217 bp, Artificial Sequence
  derived and/or modified sequence
atgagcaggcgctcacagcgcctgacccggtattcccagggcgatgacgacgggtccagcagcagtggcggttcaagcgtcgccggatcccagtccaccctcttcaaggatagtccactgcgcacgctaaagcgcaagagcagcaatatgaagagattaagtccagccccccagctgggacctagctctgatgcccacaccagttactattccgaatctctggttcacgaaagttggttccctccaagatccagcctagaggagctacacggtgacgccaattggggtgaagatctgagggttcggcgccgaaggggaaccgggggcagcgaaagcagccgggcctcaggtctggttgggcggaaggctaccgaggactttctcgggtccagctccggatactcctctgaagacgattacgttgaggactctgaagggcgcggttctaaggttactgagaccgagcccgtaagtagctttccagccggatactcagacgttgatcaacagtcttcctccagtagactgcggtctgcagtaagcagagccggttcgctgctgtggatggtggccaccagcccaggccggctgttcagactcctttattggtgggccggcactacctggtaccgtttaacaacagccgcttccttactggatgtgttcgtgctcacacggcgattctcaagtctgaaaacatttttatggttcctactacccttacttctgctgacttgcctcacatacggtgcatggtatttttacccttacggccttcagaccttccaccctgctcttgtgtcttggtgggctgcgaaggattctcggagacctgacgaaggatgggaggctcgagattcgtccccacacttccaagccgaacagagggtcatgtcacgagtgcactccttagagcggagattggaagctctcgcggccgagttttcatccaattggcagaaggaggctatgagacttgagagactagagctgcgtcaaggcgcccctggccagggtggaggtggagggctttcccacgaagacaccttggcccttctggagggacttgtttccaggcgcgaagcagctctgaaggaggatttcagacgggagaccgccgcgaggatccaagaggagctgtccgctctcagggctgagcaccagcaagattccgaagacctttttaaaaaaatcgtcagggcttcacaggagtctgaggcaaggattcaacagctgaaaagtgagtggcagtctatgacccaggagtccttccaggagagtagtgtgaaagaactacgcagattagaggatcaactagccgggctccagcaagaattggctgcgttggccctgaaacagagctccgtggcggaggaggtgggcttactgccacagcagatacaagccgtacgggacgatgttgaaagtcagtttccagcctggattagccagttcctggctcggggcgggggcgggcgcgtcggcctgctccagagggaggagatgcaagcccagctgcgcgagctggaaagtaagatcctgacacacgtcgcggagatgcagggaaaaagcgctagagaagcagcggcctcgctgagcctcactctgcagaaagagggagtaatcggcgtcaccgaggagcaggtccatcacattgttaagcaggctctgcaaaggtactccgaggataggattggacttgccgattacgccctggagtctggtggcgcgtcagtgattagcacgcgctgctccgagacatacgagaccaagacagcccttctatctctcttcggaatccccctgtggtatcattcacagagtccccgggtcattctgcagcccgacgtccatccggggaactgctgggcctttcaaggcccacagggtttcgctgtggtccggctatccgcccgaattcgccctacggctgtgacccttgagcacgtcccaaaggcgctctctccaaactctacaattagctcggctcctaaagatttcgccattttcggctttgacgaagatcttcagcaggaagggactctactcgggaaattcacttacgatcaggatggtgaacccattcagacctttcacttccaggctccaactatggctacctatcaagtggttgagctgcgaattttaaccaactggggccacccggaatacacctgtatttacaggtttcgagtccatggagagccagctcactag

SEQ ID NO: 77731 - DNA, 2217 bp, Artificial Sequence
  derived and/or modified sequence
atgagcagaagaagccagaggctgacccgctacagccagggagatgatgatggcagcagcagcagcggcggcagctctgtggccggcagccagagcaccctcttcaaggacagccccctgcggaccctgaagaggaagagcagcaacatgaagaggctgagccctgccccccagctgggccccagcagtgatgcccacaccagctactacagcgagagcctggtgcatgagagctggttccccccaagaagcagcctggaggagctgcatggagatgccaactggggcgaggacctgcgggtgagaagaagaagaggaactggaggcagcgagagcagccgggccagcggcctggtgggcaggaaggccacagaggacttcctgggcagcagcagcggctacagcagtgaagatgattatgtggaggacagcgagggccggggcagcaaggtgacagaaacagagcctgtgtcctccttccctgctggctacagtgatgtggaccagcagagcagcagcagccggctgcggtctgctgtgtccagagctggcagcctgctgtggatggtggccaccagccctggccgcctcttccggctgctgtactggtgggccggcaccacctggtaccgcctgaccacagctgccagcctgctggatgtgtttgtgctgacccggcgcttcagcagcctgaagaccttcctgtggttcctgctgcccctgctgctgctgacctgcctgacctatggagcctggtacttctacccctacggcctgcagaccttccacccagccctggtgtcctggtgggccgccaaggacagccggcggccagatgagggctgggaggcccgggacagcagcccccacttccaggccgagcagagggtgatgagccgggtgcacagcctggagcggcggctggaggccctggccgctgagttcagcagcaactggcagaaggaggccatgaggctggagcggctggagctgcggcagggcgcccctggccagggcggcggcggcggcctgagccatgaggacaccctggccctgctggagggcctggtgtccagaagagaggccgccctgaaggaggacttcagaagagaaacagctgcccgcatccaggaggagctgagcgccctgcgggcagagcaccagcaggacagcgaggacctcttcaagaagatcgtgcgggccagccaggagagcgaggcccgcatccagcagctgaagtctgagtggcagagcatgacccaggagagcttccaggagagctctgtgaaggagctgcggcggctggaggaccagctggccggcctgcagcaggagctggccgccctggccctgaagcagagctctgtggccgaggaggtgggcctgctgccccagcagatccaggccgtgagagatgatgtggagagccagtttcctgcctggatcagccagttcctggcccggggcggcggcggccgggtgggcctgctgcagcgggaggagatgcaggcccagctgcgggagctggagagcaagatcctgacccacgtggccgagatgcagggcaagagcgcccgggaggccgccgccagcctgagcctgaccctgcagaaggagggcgtcatcggcgtgacagaggagcaggtgcaccacatcgtgaagcaggccctgcagcgctacagcgaggacagaattggcctggccgactatgccctggagagcggcggggccagcgtcatcagcacccgctgcagcgagacctatgagaccaagacagccctgctgagcctgtttggcatccccctgtggtaccacagccagagccccagggtcatcctgcagccagatgtgcaccctggcaactgctgggccttccagggcccccagggctttgctgtggtgcggctgagcgcccgcatccggcccacagctgtgaccctggagcacgtgcccaaggccctgagccccaacagcaccatcagcagcgcccccaaggactttgccatcttcggctttgatgaggacctgcagcaggagggcaccctgctgggcaagttcacctatgaccaggatggagagcccatccagaccttccacttccaggcccccaccatggccacctaccaggtggtggagctgcgcatcctgaccaactggggccaccctgagtacacctgcatctaccgcttccgggtgcatggagagcccgcccactag

SEQ ID NO: 77732 - DNA, 2217 bp, Artificial Sequence
  derived and/or modified sequence
atgagccggcggagccagcggctgacccggtacagccagggcgacgatgacggcagttcatcttctggtgggagctctgtggcgggctctcagtcaaccttattcaaggactcacccctcaggaccctgaagcggaaaagctccaacatgaagaggctctcccccgcacctcaactgggccctagtagcgatgcccatacgtcttactatagcgagtccctggtgcacgaatcttggtttcctccccgaagctctctcgaggagttacacggcgacgcaaattggggagaggacttacgcgtgcgacggcgcagaggcaccggaggctctgagagcagccgtgctagcggactggttggccggaaagctaccgaggactttcttggctcctcaagcggatactcatccgaggatgactatgtggaggactcagaaggtcgcgggtcaaaggtcacggagaccgaacccgtctcctctttccctgcaggctacagtgacgtggaccaacagtcttcatcgtcaagattgcgctctgctgtcagccgtgccggttccttactgtggatggttgctacaagccccggacggctgttccgcctcctatattggtgggcgggaaccacctggtatcgcctaacgacagccgcctcattgctggatgtatttgtcctcactcgccgattctcctcgctgaaaacatttctgtggttccttctccctctactgctgctgacctgcctgacctatggagcttggtacttctatccttatggtctgcaaaccttccatcctgctcttgtgagctggtgggccgcgaaggactctagaagaccagacgaagggtgggaggctagggattcttcgccacactttcaagccgagcagcgagtgatgagccgcgtccactcattggaacgccggcttgaggcgctcgcagctgagttctcttctaattggcagaaggaggctatgaggctggagcgattggaactccgccaaggagctccgggtcagggcggaggcgggggtctttcccatgaggacaccctggccctgttggaaggcctggtatccaggcgcgaagcagccctcaaggaagactttcggcgggagacagccgcccggattcaggaggagctctctgcgttgcgcgccgagcatcagcaggactctgaggatttgtttaagaagattgtgagagcaagtcaggagtctgaggctcggatccaacagcttaaatcagagtggcagagcatgacccaggagtcctttcaggaaagttcagtgaaagaactacggcgtctggaggaccagctggcggggttgcagcaggaattggccgcactggccttgaagcaatctagcgtggcagaggaagtcggactcctcccccagcagatccaggcggtcagagatgatgtagaatctcagtttccagcttggatatctcaattcttagccagagggggcggggggagagtgggattactccagcgagaggaaatgcaggctcaactgagggaactggagtctaaaattctaacacacgtcgccgagatgcagggaaaatcggctcgtgaggcggctgctagcctctcactgacactacagaaagagggagtcataggagtaacagaggagcaggttcatcatatcgtgaaacaggcgctccagagatactcggaagatcgcatcggactcgccgactacgctctggagtccggcggagcctccgtgatctctacacgctgttctgagacctatgaaacgaagacagccctgctgtccctgttcggcatccccttgtggtatcatagccaatccccgcgtgtcattcttcaaccagacgtgcatccaggaaactgttgggcattccagggaccacagggttttgccgttgtgcggctctcagcaagaattcggccgactgcggtgactttggagcatgtgccaaaagccctttcccccaattccacgataagcagtgcccccaaggacttcgcaatattcggatttgatgaagacctgcagcaggagggcactctcctgggtaagttcacctatgatcaagacggcgagcctatccagaccttccattttcaggccccgaccatggctacttatcaggtagtggagctgcgcattctcactaattggggccatccagagtacacgtgcatttaccggttccgcgttcacggagagccagcgcattag

SEQ ID NO: 77733 - DNA, 2217 bp, Artificial Sequence
  derived and/or modified sequence
atgtccagaagatcgcagagactaacaaggtactctcagggagacgatgatggcagcagcagttctggcggttctagcgtggctggtagccagagtactctgtttaaggacagcccattgagaacattgaagcgaaagtcaagcaatatgaagcggctcagccctgccccacagttgggcccaagcagcgacgcgcacaccagctactatagcgagagcttggtccacgagagttggtttcctcccagatcctcactagaagagcttcacggcgatgcgaattggggggaggatttgagagtaaggcgcagacgaggcactggcggaagcgagtcgtcacgggcatctgggctagttggcagaaaggcgacagaagattttctcgggagctcttctggttattcgtctgaagatgattacgttgaagattccgagggacgcggaagcaaagtgaccgagacagagcccgtgagctcatttcccgctggttatagcgacgtggatcaacagagcagctcatcaaggttacgctcagccgtatctcgcgctggctcgcttctttggatggttgcaacatctcccggtagactcttcagactcctgtattggtgggccggtactacctggtatagactcactaccgctgcaagcctactggatgtgtttgttctcacaagacggttcagctcactgaagacttttttgtggtttctgcttcctctcttgctactgacatgcctcacatatggagcctggtacttttacccttacggcctccagacgttccacccggctctggtaagctggtgggccgctaaggatagccggcgacctgatgaaggctgggaagcacgcgactcatcgccacattttcaggctgaacaaagggtgatgtccagggtccatagccttgaaaggcgtctggaggctctggccgctgagttttcctccaactggcaaaaagaggccatgaggctggaaagactggaactcagacagggagctccaggccaaggtgggggaggagggttgagccatgaagacacactggctctcctcgaaggcttggtatccaggagagaagcggctttgaaggaggatttcaggcgggaaactgcagcgaggatacaggaagagctgtccgccctgagggcagagcatcagcaggactcagaagatctgtttaaaaagattgtacgcgcttcgcaggaatcagaggccagaattcagcagttgaaatccgagtggcaatcaatgacccaggagtcctttcaggaatcaagcgtgaaagagctaaggaggcttgaggatcaacttgccggtctgcagcaggagttggctgcactcgcactcaagcagagtagcgttgcagaagaagtggggctcctaccccagcagattcaggccgtgcgagatgacgttgagtcccagttcccagcgtggatttcacagttcttagctcgcggaggaggcggaagagtgggactattgcagcgggaggagatgcaagctcagctccgggaactggagtcaaaaatcctgacgcacgtggccgaaatgcagggtaaatcagctcgtgaggctgctgcgtcgttgagcctgactttacaaaaagaaggggttattggcgtaaccgaagagcaggtgcatcacatcgtgaaacaggctctgcagcggtacagcgaagatcgcatcggcctagccgactacgccctggagtcagggggagcttccgttatttctactcgatgtagtgagacatacgagacaaagacagccctcctatctctttttggcatccccctgtggtaccactcccaaagtcctagggtaattttgcaacctgacgtgcatcctggcaactgctgggcctttcaaggtccacagggtttcgcggttgtcagactatcggcgcgaatccgcccaaccgcagtgacacttgagcatgttcccaaggcactgtcgcctaactctacaatatcctccgcccctaaagactttgcgatcttcggcttcgacgaagatttacagcaggagggaacacttctggggaagttcacgtacgatcaggatggcgagcctatccagacctttcactttcaagcgccaaccatggccacctatcaagtggtggaattacggatcctcactaattggggccacccagagtatacatgtatctatcgctttcgggttcatggcgaaccagcacactag

SEQ ID NO: 77734 - DNA, 4022 bp, Artificial Sequence
  derived and/or modified sequence
cacacgcgcgccgcccggccccactcgcgcagcgcgggcctccgccggccgcattgtccgcccgcccgccttgtcccgcgtcgccgctcttcgcgtgcccgcgcgccccgggcccggccgctgtgtcgccctgagcggagcgccgcccgcgggatccccacgcggaaagggggcgcgccccggcggcggcctggcctcggacgcccccggccgggctagaagccgccgcggcagcagattctcttcaggggaagagtccacatcccacctcatcatgtcccgaagaagccagcgcctcacgcgctactcccagggtgacgatgacggcagcagcagcagcggagggagctcggtggctgggagtcagagcaccctgtttaaagacagtcctctcaggaccttgaagaggaaatccagcaacatgaagcgcctgtccccagcgccacagctgggcccgtcctctgatgcacacacctcctactacagtgagtcgctggtccacgagtcctggttcccacccaggagctccctggaggaactgcatggtgacgccaactggggtgaggacctgcgggtgcggaggaggagaggcacgggtggctcagagagcagcagggccagcgggcttgtggggcgcaaggccaccgaggacttcctgggctcttcctcgggctactcctctgaggacgactacgtggaagacagtgaaggaagaggctcgaaagtgacagagactgagccagtgtcctcgttccccgcaggctactcggatgtggaccagcagagttccagctcgcggctccgaagcgccgtctcacgggcgggctccttactctggatggtggccacttcgccaggccggctcttcagacttctctactggtgggctggcaccacctggtaccgcctgaccacagctgcctccctccttgacgtcttcgttttaaccaggcgcttctcgtccctgaagacgttcctctggttcctgctgccgctgctcttgctgacgtgcctgacgtatggtgcttggtatttctacccctatgggctgcagacattccaccctgctttggtttcctggtgggcagcgaaggacagcaggaggccggatgagggctgggaagccagagactcatcgccacatttccaggctgagcagcgtgttatgtcccgggtacactctctggagcggcgtctggaagctcttgctgctgaattttcctccaactggcagaaggaggccatgcggctggaacgtctggagctgcggcaaggggctcctggccagggaggtggtggtggcctgagccacgaggacaccctggcgctgctggaggggctagtgagccgccgtgaagctgccctgaaggaggatttccgcagggaaactgctgctcgcatccaggaagaactgtctgccctgagagcagagcatcagcaagactcagaagacctcttcaagaagatcgtccgggcctcccaggagtccgaggctcgcatccagcagctgaagtcagagtggcaaagcatgacccaggagtccttccaggagagctctgtgaaggagctgaggcggctggaggaccagctggccggcctgcagcaggagctggcggctctggcactgaagcagagctcggtggcggaagaagtgggcctgctgccccagcagatccaggccgtgcgggacgacgtggaatctcagttcccggcctggatcagtcagttccttgcccgaggtggagggggccgcgtggggctccttcagagagaggagatgcaagctcagctgcgagagctggagagcaagatcctcacccatgtggcagagatgcagggcaagtcggccagggaagccgcggcctccctgagcctgacgctgcagaaagaaggtgtgattggagtgacagaggagcaggtgcaccacatcgtgaagcaggccctgcagcgctacagtgaggaccgcatcgggctggcagactacgccctggagtcaggaggggccagcgtcatcagcacccgatgttctgagacctacgagaccaagacggccctcctcagcctcttcggcatccccctgtggtaccactcccagtcaccccgagtcatcctccagccagatgtgcacccaggcaactgctgggccttccaggggccacaaggcttcgccgtggtccgcctctctgcccgcatccgccccacagccgttaccttagagcatgtgcccaaggccttgtcacccaacagcactatctccagtgcccccaaggacttcgccatctttgggtttgacgaagacctgcagcaggaggggacactccttggcaagttcacttacgatcaggacggcgagcctattcagacgtttcactttcaggcccctacgatggccacgtaccaggtggtggagctgcggatcctgactaactggggccaccccgagtacacctgcatctaccgcttcagagtgcatggggagcccgcccactagccctgcttactggtgcctgctgccagccatctgggagtgggtgaacagcaccccgccgcttcccccacacgcttgctcggcgctctgacttctaggagcacaagagaggagcctgtggccccatgcagatgaaaaggacgggcagggtctcctgagcagcaggtggctcgaggcggttagcaggctccagcagctcccttcttccttccctctgtgcccgtggcgtctgcttcccatcctgggagtgtgtatatatgtagcatatcatgggggactgggaagttgggagaggtaggacctgactggtcttggctggggtcaggggctggtgcctgggagctgatgaagcaggtgccagggctgtgggaggggcaagctacggcctgggctaggtgagctgcctctgcccctgggcaaggaagcgaggccctctgggaggagggtgcttagctccagagcaggatgggacttccccaggcaggaagcacttgatggagagctgcccagctctcctacaaggttagtgccctccacctagggaagcatgaaccacagggtccctgagggccttcgacaaaagtgtgtatttgtcccggggagggtagcagtgggccatggggcttcttgtgccctaaaggggactggctgctgtgatcttctaaggggcccagggccaaccctgtaggcttcccctctgctggggacggtagttgcttttctctctcctgatgctaggttggggcccaccctgctccctgttcctgctagggcctgccagtgcccctgagcttgctttccacattctcccagggtatggagacctagacctgtctttggggccattagcatctggggttatagcaagaagagtggggagcatggaactcctgggctcttgtggggacgttcagggtatcggggtgcgaggtctgtctgcaccggcccccacatctaaccaggccctgatgtaggggtcgtccgctcaggctgcccccttgggctcttgcagctcttgttcaggtagtcgcccttctggtttgttctctgtggggcagttggtgggggctgggggaagaggctggcagaagttaccctggatagggaagggggaggaggggacttttagagccagcaggccccactgtattatgtatatatttttcaaggtctgtttttctaactgaaaagctaagggcttgattcctagccccgttctgtggggcactgggtgatactcagtttcttgttcctggccgtggagaggggcctggggcactggttccggctgtgtctggtggtctggctgcggggaaggggcaagaaggcgggcaggccttcactgcagcactgagcctcaaatccgctctggagcatgaggctggatgcagtggtggtgaggccgccccgctccatcccgaggcagccagggtttgttttgcgctctcctgtcacaaatgctgcactattggttcttaagttttttatctccagatcctaatttatgcctatgcaaaaaataaatgacgcccaa

SEQ ID NO: 77735 - DNA, 2217 bp, Artificial Sequence
  derived and/or modified sequence
atgagcagaagaagccagagactgaccagatacagccagggcgacgacgacggcagcagcagcagcggcggcagcagcgtggccggcagccagagcaccctgttcaaggacagccccctgagaaccctgaagagaaagagcagcaacatgaagagactgagccccgccccccagctgggccccagcagcgacgcccacaccagctactacagcgagagcctggtgcacgagagctggttcccccccagaagcagcctggaggagctgcacggcgacgccaactggggcgaggacctgagagtgagaagaagaagaggcaccggcggcagcgagagcagcagagccagcggcctggtgggcagaaaggccaccgaggacttcctgggcagcagcagcggctacagcagcgaggacgactacgtggaggacagcgagggcagaggcagcaaggtgaccgagaccgagcccgtgagcagcttccccgccggctacagcgacgtggaccagcagagcagcagcagcagactgagaagcgccgtgagcagagccggcagcctgctgtggatggtggccaccagccccggcagactgttcagactgctgtactggtgggccggcaccacctggtacagactgaccaccgccgccagcctgctggacgtgttcgtgctgaccagaagattcagcagcctgaagaccttcctgtggttcctgctgcccctgctgctgctgacctgcctgacctacggcgcctggtacttctacccctacggcctgcagaccttccaccccgccctggtgagctggtgggccgccaaggacagcagaagacccgacgagggctgggaggccagagacagcagcccccacttccaggccgagcagagagtgatgagcagagtgcacagcctggagagaagactggaggccctggccgccgagttcagcagcaactggcagaaggaggccatgagactggagagactggagctgagacagggcgcccccggccagggcggcggcggcggcctgagccacgaggacaccctggccctgctggagggcctggtgagcagaagagaggccgccctgaaggaggacttcagaagagagaccgccgccagaatccaggaggagctgagcgccctgagagccgagcaccagcaggacagcgaggacctgttcaagaagatcgtgagagccagccaggagagcgaggccagaatccagcagctgaagagcgagtggcagagcatgacccaggagagcttccaggagagcagcgtgaaggagctgagaagactggaggaccagctggccggcctgcagcaggagctggccgccctggccctgaagcagagcagcgtggccgaggaggtgggcctgctgccccagcagatccaggccgtgagagacgacgtggagagccagttccccgcctggatcagccagttcctggccagaggcggcggcggcagagtgggcctgctgcagagagaggagatgcaggcccagctgagagagctggagagcaagatcctgacccacgtggccgagatgcagggcaagagcgccagagaggccgccgccagcctgagcctgaccctgcagaaggagggcgtgatcggcgtgaccgaggagcaggtgcaccacatcgtgaagcaggccctgcagagatacagcgaggacagaatcggcctggccgactacgccctggagagcggcggcgccagcgtgatcagcaccagatgcagcgagacctacgagaccaagaccgccctgctgagcctgttcggcatccccctgtggtaccacagccagagccccagagtgatcctgcagcccgacgtgcaccccggcaactgctgggccttccagggcccccagggcttcgccgtggtgagactgagcgccagaatcagacccaccgccgtgaccctggagcacgtgcccaaggccctgagccccaacagcaccatcagcagcgcccccaaggacttcgccatcttcggcttcgacgaggacctgcagcaggagggcaccctgctgggcaagttcacctacgaccaggacggcgagcccatccagaccttccacttccaggcccccaccatggccacctaccaggtggtggagctgagaatcctgaccaactggggccaccccgagtacacctgcatctacagattcagagtgcacggcgagcccgcccactag

SEQ ID NO: 77736 - protein, 717 aa, Artificial Sequence
  derived and/or modified sequence
MSRRSQRLTRYSQGDDDGSSSSGGSSVAGSQSTLFKDSPLRTLKRKSSNMKRLSPAPQLGPSSDAHTSYYSESLVHESWFPPRSSLEELHGDANWGEDLRVRRRRGTGGSESSRASGLVGRKATEDFLGSSSGYSSEDDYVGYSDVDQQSSSSRLRSAVSRAGSLLWMVATSPGRLFRLLYWWAGTTWYRLTTAASLLDVFVLTRRFSSLKTFLWFLLPLLLLTCLTYGAWYFYPYGLQTFHPALVSWWAAKDSRRPDEGWEARDSSPHFQAEQRVMSRVHSLERRLEALAAEFSSNWQKEAMRLERLELRQGAPGQGGGGGLSHEDTLALLEGLVSRREAALKEDFRRETAARIQEELSALRAEHQQDSEDLFKKIVRASQESEARIQQLKSEWQSMTQESFQESSVKELRRLEDQLAGLQQELAALALKQSSVAEEVGLLPQQIQAVRDDVESQFPAWISQFLARGGGGRVGLLQREEMQAQLRELESKILTHVAEMQGKSAREAAASLSLTLQKEGVIGVTEEQVHHIVKQALQRYSEDRIGLADYALESGGASVISTRCSETYETKTALLSLFGIPLWYHSQSPRVILQPDVHPGNCWAFQGPQGFAVVRLSARIRPTAVTLEHVPKALSPNSTISSAPKDFAIFGFDEDLQQEGTLLGKFTYDQDGEPIQTFHFQAPTMATYQVVELRILTNWGHPEYTCIYRFRVHGEPAH

SEQ ID NO: 77737 - protein, 101 aa, Artificial Sequence
  derived and/or modified sequence
MSRRSQRLTRYSQGDDDGSSSSGGSSVAGSQSTLFKDSPLRTLKRKSSNMKRLSPAPQLGPSSDAHTSYYSESLVHESWFPPRSSLEELHGDANWGEDLRV

SEQ ID NO: 77738 - protein, 144 aa, Artificial Sequence
  derived and/or modified sequence
MSRRSQRLTRYSQGDDDGSSSSGGSSVAGSQSTLFKDSPLRTLKRKSSNMKRLSPAPQLGPSSDAHTSYYSESLVHESWFPPRSSLEELHGDANWGEDLRVRRRRGTGGSESSRASGLVGRKATEDFLGSSSGYSSEDDYVGRR

SEQ ID NO: 77739 - protein, 205 aa, Artificial Sequence
  derived and/or modified sequence
MSRRSQRLTRYSQGDDDGSSSSGGSSVAGSQSTLFKDSPLRTLKRKSSNMKRLSPAPQLGPSSDAHTSYYSESLVHESWFPPRSSLEELHGDANWGEDLRVRRRRGTGGSESSRASGLVGRKATEDFLGSSSGYSSEDDYVGYSDVDQQSSSSRLRSAVSRAGSLLWMVATSPGRLFRLLYWWAGTTWYRLTTAASLLDVFVLTR

SEQ ID NO: 77740 - DNA, 2154 bp, Artificial Sequence
  derived and/or modified sequence
atgagcagaagaagccagagactgaccagatacagccagggcgacgacgacggcagcagcagcagcggcggcagcagcgtggccggcagccagagcaccctgttcaaggacagccccctgagaaccctgaagagaaagagcagcaacatgaagagactgagccccgccccccagctgggccccagcagcgacgcccacaccagctactacagcgagagcctggtgcacgagagctggttcccccccagaagcagcctggaggagctgcacggcgacgccaactggggcgaggacctgagagtgagaagaagaagaggcaccggcggcagcgagagcagcagagccagcggcctggtgggcagaaaggccaccgaggacttcctgggcagcagcagcggctacagcagcgaggacgactacgtgggctacagcgacgtggaccagcagagcagcagcagcagactgagaagcgccgtgagcagagccggcagcctgctgtggatggtggccaccagccccggcagactgttcagactgctgtactggtgggccggcaccacctggtacagactgaccaccgccgccagcctgctggacgtgttcgtgctgaccagaagattcagcagcctgaagaccttcctgtggttcctgctgcccctgctgctgctgacctgcctgacctacggcgcctggtacttctacccctacggcctgcagaccttccaccccgccctggtgagctggtgggccgccaaggacagcagaagacccgacgagggctgggaggccagagacagcagcccccacttccaggccgagcagagagtgatgagcagagtgcacagcctggagagaagactggaggccctggccgccgagttcagcagcaactggcagaaggaggccatgagactggagagactggagctgagacagggcgcccccggccagggcggcggcggcggcctgagccacgaggacaccctggccctgctggagggcctggtgagcagaagagaggccgccctgaaggaggacttcagaagagagaccgccgccagaatccaggaggagctgagcgccctgagagccgagcaccagcaggacagcgaggacctgttcaagaagatcgtgagagccagccaggagagcgaggccagaatccagcagctgaagagcgagtggcagagcatgacccaggagagcttccaggagagcagcgtgaaggagctgagaagactggaggaccagctggccggcctgcagcaggagctggccgccctggccctgaagcagagcagcgtggccgaggaggtgggcctgctgccccagcagatccaggccgtgagagacgacgtggagagccagttccccgcctggatcagccagttcctggccagaggcggcggcggcagagtgggcctgctgcagagagaggagatgcaggcccagctgagagagctggagagcaagatcctgacccacgtggccgagatgcagggcaagagcgccagagaggccgccgccagcctgagcctgaccctgcagaaggagggcgtgatcggcgtgaccgaggagcaggtgcaccacatcgtgaagcaggccctgcagagatacagcgaggacagaatcggcctggccgactacgccctggagagcggcggcgccagcgtgatcagcaccagatgcagcgagacctacgagaccaagaccgccctgctgagcctgttcggcatccccctgtggtaccacagccagagccccagagtgatcctgcagcccgacgtgcaccccggcaactgctgggccttccagggcccccagggcttcgccgtggtgagactgagcgccagaatcagacccaccgccgtgaccctggagcacgtgcccaaggccctgagccccaacagcaccatcagcagcgcccccaaggacttcgccatcttcggcttcgacgaggacctgcagcaggagggcaccctgctgggcaagttcacctacgaccaggacggcgagcccatccagaccttccacttccaggcccccaccatggccacctaccaggtggtggagctgagaatcctgaccaactggggccaccccgagtacacctgcatctacagattcagagtgcacggcgagcccgcccactag

SEQ ID NO: 77741 - DNA, 2154 bp, Artificial Sequence
  derived and/or modified sequence
atgagcagaaggtcccagagactgacgagatactcacagggcgacgacgatggatcaagttcctccgggggaagttccgtcgccgggtcacagtcgactctgtttaaggatagtccactccgaacgttgaagaggaaaagtagcaacatgaaacgattgagcccagctccgcagttgggcccatcctccgatgctcacactagttactacagtgagagcctggtccacgagtcatggtttccaccgagatcttctctcgaagaactgcacggagacgccaactggggtgaagatttgagggttaggcgcaggaggggaaccggcgggtctgagagtagtagagcttccgggcttgtgggacgaaaggctactgaagattttttgggaagctccagcggttactcttccgaggacgattatgttgggtatagcgacgtggatcagcagagctcatctagccggcttcggtccgcagtgagtcgtgctggaagcctgttgtggatggtcgctaccagtccgggaagactctttcgcctgctctactggtgggctggtaccacgtggtatcgactgaccacagcagcttcactcctggacgtgttcgtcctgaccagaagattctctagtcttaaaaccttcctctggttcttgctgcctctgctgctgttgacctgtctgacctacggtgcttggtatttttacccttatggcctgcagacattccatccagcattggttagctggtgggcagctaaagattcccgccggcctgatgaggggtgggaagctagagatagctccccccatttccaagcagagcagagagtcatgagtcgcgtgcacagcctggaacgtagattggaggctctggccgccgagttcagctctaattggcagaaagaggccatgaggttggaaagactggagctgcggcagggggctcccggtcaaggaggtggaggaggcctgtcacacgaggacacactggcgctgctggaggggttagtctccagacgagaggctgcgctgaaagaagatttcaggagggaaacagcggcgaggatccaggaggagctaagcgctctgagggccgagcatcagcaagactccgaggatctctttaagaagatcgtgcgagcctcacaggagtctgaagctagaattcagcagcttaaaagtgaatggcagtcgatgactcaggaatcattccaggagtccagtgtcaaggaactgcgaaggctggaggatcaactcgccggacttcagcaggagctggcggcccttgccctcaagcaatcatctgtagcagaagaggttgggttgctgcctcagcagatccaggccgtccgggatgacgtggagtcgcagtttcctgcttggatctcccaatttctcgctcggggcggcgggggtagagtaggattgctacagagggaggagatgcaagcccagctcagagagctggagtccaagatcttgacacatgtggcagagatgcaggggaagagtgcccgggaggccgccgcctcgctctcacttaccctgcagaaagagggtgtgatcggcgtcacggaggaacaggtccaccacattgtaaagcaagcactccagcgttactccgaggatcggataggtctcgctgattatgccctcgaatccggaggagcctctgttatctcaacgcggtgctctgagacctacgaaacaaaaacagcccttctaagcctcttcgggatcccactgtggtaccatagccagagtccccgggtgatcctgcagcctgatgtacaccccggaaactgctgggccttccagggaccccagggcttcgcagtggttagactcagcgctagaatccgcccaaccgcagtgacactggaacacgtgccaaaagcactctctcccaacagcacgatcagctctgcccctaaggatttcgcaatctttggcttcgacgaagatctgcaacaagaaggcacattgctgggcaagttcacatatgatcaggacggcgagcccattcagacttttcactttcaggcccccaccatggccacctatcaagtggtggagcttagaatcctgacgaactgggggcaccctgaatatacttgcatctataggtttagagttcacggtgagccggcacattag

SEQ ID NO: 77742 - DNA, 2154 bp, Artificial Sequence
  derived and/or modified sequence
atgagcagaagaagccagaggctgacccgctacagccagggagatgatgatggcagcagcagcagcggcggcagctctgtggccggcagccagagcaccctcttcaaggacagccccctgcggaccctgaagaggaagagcagcaacatgaagaggctgagccctgccccccagctgggccccagcagtgatgcccacaccagctactacagcgagagcctggtgcatgagagctggttccccccaagaagcagcctggaggagctgcatggagatgccaactggggcgaggacctgcgggtgagaagaagaagaggaactggaggcagcgagagcagccgggccagcggcctggtgggcaggaaggccacagaggacttcctgggcagcagcagcggctacagcagtgaagatgattatgtgggctacagtgatgtggaccagcagagcagcagcagccggctgcggtctgctgtgtcccgggccggcagcctgctgtggatggtggccaccagccctggccgcctcttccggctgctgtactggtgggccggcaccacctggtaccgcctgaccacagctgccagcctgctggatgtgtttgtgctgacccggcgcttcagcagcctgaagaccttcctgtggttcctgctgcccctgctgctgctgacctgcctgacctacggggcctggtacttctacccctacggcctgcagaccttccacccagccctggtgtcctggtgggccgccaaggacagcagaagaccagatgagggctgggaggcccgggacagcagcccccacttccaggccgagcagagggtgatgagccgggtgcacagcctggagcggcggctggaggccctggccgctgagttcagcagcaactggcagaaggaggccatgaggctggagcggctggagctgcggcagggcgcccctggccagggcggcggcggcggcctgagccatgaggacaccctggccctgctggagggcctggtgtcccggcgggaggccgccctgaaggaggacttccggcgggagacagctgcccgcatccaggaggagctgagcgccctgcgggcagagcaccagcaggacagtgaagatctcttcaagaagatcgtgcgggccagccaggagagcgaggcccgcatccagcagctgaagtctgagtggcagagcatgacccaggagagcttccaggagagctctgtgaaggagctgcggcggctggaggaccagctggccggcctgcagcaggagctggccgccctggccctgaagcagagctctgtggccgaggaggtgggcctgctgccccagcagatccaggccgtgagagatgatgtggagagccagtttcctgcctggatcagccagttcctggcccggggcggcggcggccgggtgggcctgctgcagcgggaggagatgcaggcccagctgcgggagctggagagcaagatcctgacccacgtggccgagatgcagggcaagagcgcccgggaggccgccgccagcctgagcctgaccctgcagaaggagggcgtgattggagtgacagaggagcaggtgcaccacatcgtgaagcaggccctgcagcgctacagtgaagatcgcatcggcctggccgactatgccctggagagcggcggggccagcgtcatcagcacccgctgcagcgagacctatgagaccaagacagccctgctgagcctgtttggcatccccctgtggtaccacagccagagccccagggtcatcctgcagccagatgtgcaccctggcaactgctgggccttccagggcccccagggctttgctgtggtgcggctgagcgcccgcatccggcccacagctgtgaccctggagcacgtgcccaaggccctgagccccaacagcaccatcagcagcgcccccaaggactttgccatctttggatttgatgaggacctgcagcaggagggcaccctgctgggcaagttcacctatgaccaggatggagagcccatccagaccttccacttccaggcccccaccatggccacctaccaggtggtggagctgcgcatcctgaccaactggggccaccctgagtacacctgcatctaccgcttccgggtgcacggggagcccgcccactag

SEQ ID NO: 77743 - DNA, 2154 bp, Artificial Sequence
  derived and/or modified sequence
atgagccggcggagccagcggctgacccggtacagccagggcgacgacgatggatcctcttcaagcgggggttcttcagtcgcaggaagccagtctacactcttcaaagatagccctcttcgtacgctgaaacgtaagagttcaaatatgaagcgcttatcacctgctcctcagcttggccctagctccgatgcccatacctcctactattccgaatccctggtgcatgaatcatggtttcccccaagatcctctctcgaggagttgcacggcgatgctaactggggggaggacctccgggtgcgcaggcgacggggcaccggtggctccgagtctagtagagcaagtggcctcgtagggcgtaaagctacagaagactttcttgggagcagttctggttattccagcgaagatgattacgtggggtattcagatgtcgaccagcaatcttcttcttccagacttaggtctgccgtttcacgggccggcagtctgttgtggatggtagctactagccccggaagactgtttcgattactctactggtgggccggcaccacttggtatagactgacaactgcagcctctttactcgatgtctttgtgcttacacgcagattttctagtcttaagacgttcttatggttccttctccccttattgctgctaacgtgcctgacctacggtgcatggtatttttatccgtacggcctacagacattccacccagcccttgtgagctggtgggctgccaaagacagcagaaggcccgacgagggttgggaggcaagggactcctccccccactttcaggcagagcaacgtgtcatgagcagagttcactctttggaaaggcgattagaggccttggctgccgaattttcttctaattggcagaaggaggccatgcggttagagaggttagaattaagacagggcgcacccgggcaagggggtggtggcggcctgtctcacgaagacacgctggcgctcttggaaggtcttgtgagcagacgtgaggcggccctcaaagaagactttaggcgggaaacagctgcaaggatccaggaggaactctctgccttgcgggccgaacatcagcaggatagcgaagatctgttcaaaaagattgtccgagctagtcaggaatcagaggctcgaattcagcagctgaagagcgagtggcaatccatgactcaggagtcctttcaggaatcaagcgtcaaggaactgaggcgtctggaggatcagctggcaggcctgcagcaagagctagcggccctggcgctgaagcagagtagcgtcgccgaggaggtgggtttgctaccacaacagatacaagccgtgagagatgatgtggaaagtcagtttccagcatggataagtcagtttctcgcccggggaggggggggtcgggtgggtctgttacagcgagaggagatgcaagcgcagctccgcgaacttgagtctaaaatcctcacccacgtggcagaaatgcagggcaagtccgccagggaggccgcggcaagtcttagtctgaccttgcagaaggagggggttatcggtgttacagaagaacaagtccatcatattgttaaacaagcgctgcagaggtattccgaggacagaataggtttagcagactatgccctggaatccggaggagctagcgttatttccactcggtgctcggaaacttacgagaccaagaccgcactcctgagcttgttcggcatcccgctgtggtaccattctcagtccccgagggtcatccttcaacctgatgttcatccaggcaactgttgggcttttcaggggccccagggattcgccgtggtgcgactgagcgcacgaatcaggcccacagctgtgactttggagcatgtgcccaaagccctttccccaaactcaaccatctcctcagcacctaaggatttcgccatattcgggtttgatgaagacctgcaacaggaaggcaccttactgggaaagttcacctacgaccaagatggagagcctatccagacattccactttcaggcaccaactatggccacctaccaggtcgttgagctgagaattctcactaactggggtcatccggagtacacctgtatatatcggtttcgggtgcacggagagccagcccactag

SEQ ID NO: 77744 - DNA, 2154 bp, Artificial Sequence
  derived and/or modified sequence
atgtcccgtcggagccagcgactaacacgctatagccaaggagatgatgatgggagctcttcgagtggtgggtcatcagtcgctggatcgcaatcgacgttattcaaggacagtccattgcgtacccttaagagaaaatccagtaatatgaaaagactgagcccggcaccccaacttggtccgtcatccgacgcccatacgagctattacagcgaaagtctggtgcatgagtcctggtttcccccacggtccagtcttgaggagctgcatggtgacgccaactggggggaggatctgagagtgcggaggaggaggggtaccggtggatcggagtccagccgcgcatccggcttagtgggccgaaaggctacagaagactttctgggttcctctagtggctatagttcagaagacgactacgttgggtattcagacgtggaccagcaatccagctcctcccggctccgctccgctgtaagccgggctggatctctgctgtggatggtggcgacatccccagggcgactgtttcgtttgctctactggtgggctggcaccacatggtacagattgactactgcagcctccctcctggacgtgttcgtgctgacccgtcgattctcctcactgaagacgttcttatggtttctgcttccactcctgttattgacctgcctcacatatggggcttggtacttctacccctacggcctccaaacctttcatccagctttggtgtcatggtgggccgcaaaggacagccggcgacctgacgaaggctgggaagccagggacagctctccccactttcaagcggaacaaagagtcatgtctcgggtgcactccctcgaaaggagactggaggcccttgcagccgagttctcctctaactggcagaaagaggcaatgcgattggagcggctagagctgcgtcagggcgctcctggccagggcggaggcggtggactaagccacgaagacactctggccctattagagggactggtcagcagaagggaagccgctttgaaagaagactttcgtagggaaaccgctgccaggatccaagaggagctgagtgcccttcgcgcagagcaccagcaagactctgaggacctgtttaaaaagatcgtgagggcaagccaggagagcgaggctcggattcaacaacttaagagtgagtggcaatctatgacacaggagtccttccaagagagctccgtcaaggagcttcgcaggctggaggaccagctagcagggctgcagcaagaacttgccgctctggccctcaaacagagctccgttgcagaggaggtgggcctgctgcctcagcagatccaggctgtgagggacgacgtggaaagccagtttcccgcttggatttcacagtttctggcgcgtgggggagggggaagagtgggattgctccagagagaagagatgcaggctcagttgagggagttggaaagtaagatcctcacccatgtagccgagatgcagggaaaatcggctcgcgaagcagccgcttccctgtcactgactttacagaaggaaggcgtgatcggcgtcaccgaagagcaggtgcatcacatcgtgaaacaggcattgcaaaggtattccgaggacagaattggactggccgactacgccctagagtccggaggggctagcgtcattagtacccggtgctctgaaacctacgaaacaaagacagctctcctctccctcttcggtatcccactgtggtaccattcacaaagccccagggtgatcctgcagcccgacgtgcatcctggcaattgctgggccttccaggggccacagggttttgcagtcgtgcgacttagtgccagaattagaccaacagccgtaactttagaacacgtaccaaaagctctgtcaccaaatagcaccataagcagcgctccaaaagacttcgcgatcttcggattcgacgaggatcttcaacaggaagggacgcttctgggaaaattcacctatgaccaggacggtgagcccatacagacatttcacttccaagctcctaccatggccacctatcaggtggtggagttaaggattctaaccaattggggacaccccgagtatacctgcatctataggttccgcgtccacggtgaacctgcacactag

SEQ ID NO: 77745 - DNA, 2154 bp, Artificial Sequence
  derived and/or modified sequence
atgagcagacgctcccaaagacttactcgctattctcagggcgatgacgacggatcatccagtagcggaggcagctccgtagccggatctcagtccacgttgtttaaggatagccctttacgaacactaaaacgcaaaagctccaacatgaaacggctgtctcccgcacctcagctcggaccctcatcagacgcccacacatcttactatagcgaaagcctagtccacgagagctggttcccaccacgctctagcctcgaggaactccatggcgatgccaactggggcgaggatcttagagttaggagacggcgcgggaccggcgggtctgaatcatctcgagcctcaggtcttgttgggagaaaagcaacagaggattttttaggtagcagttccggctacagcagcgaagatgactacgttggctactcagacgtggaccagcagagctctagcagcagattacgaagtgccgtctctagagctggaagcctcctatggatggtagcgacgagcccagggcggctctttagacttttatactggtgggctggaaccacatggtatcggctcaccaccgcagcttccttgcttgacgtgtttgtcctcacgcggagattcagcagtctgaagacgttcctgtggtttttgctgccgcttctcttactgacctgcctcacctacggcgcttggtatttctacccctatggactgcaaacgtttcaccctgcactggtgagttggtgggctgcaaaggacagcaggagaccagacgaagggtgggaggcccgggacagttcaccacactttcaggccgaacagcgtgtgatgtccagagtgcactccctcgagcgacggttagaagctctggcagccgagttttcttcgaactggcaaaaagaagcgatgcgcctggagagactcgagctgcggcagggcgctcccggccaaggaggcggtggcggattaagccatgaggatacactggccctgctggaggggctcgtcagtagaagggaggcagctctgaaggaagatttccgtcgcgagacagcggcccgaattcaggaggagttgtccgcactgcgggccgaacaccagcaggactccgaggacttgttcaaaaagatagtcagggcatcacaggaatcagaagcacggattcagcagttgaagtctgagtggcaatccatgacacaggagtcgtttcaagagagcagcgtgaaggaattgagaagactggaggatcagttagcagggttgcagcaagagctcgctgcccttgccctgaaacagtcatctgtcgcagaggaggttggcctgctgccacagcagatccaagccgtgcgggatgacgttgagagccagtttcccgcttggattagccaattcctggcgcggggtggcgggggcagagtgggccttctgcagcgagaagagatgcaggcccagttgcgggagctggaatctaagatcttaacccacgtggccgagatgcaagggaagagtgccagagaggcagctgcttcactgagcctgacattacagaaggagggagtgatcggcgtgactgaagaacaggtacaccacatcgtgaagcaagccctacaaagatactccgaagacaggatcggcctggccgactacgcattggaatcgggcggcgctagcgtgattagtacacggtgtagtgagacttatgagacaaagactgccctgctgtcactttttgggatacctctatggtaccacagccaatcaccacgcgtaatactgcagccggacgttcaccccggtaattgctgggccttccaagggcctcagggctttgccgttgtgcgtctgtctgctagaattcgtcccacagccgtgacgctggagcacgtgccaaaggcgctctcccctaacagtaccatcagctcagcacccaaggactttgcaatttttgggttcgatgaggacctccagcaagaaggaactttactgggcaaatttacttacgatcaggacggcgagcccatccagacattccacttccaagcgcccactatggccacctatcaggttgtcgaactccggattctgaccaattggggccatccggagtacacctgcatttacaggttcagggtccacggagaaccagcacactag

SEQ ID NO: 77746 - DNA, 2154 bp, Artificial Sequence
  derived and/or modified sequence
atgtccaggcgctcccagagactcacgaggtactcccagggtgacgatgacggatcctctagctccggcggaagcagcgtggccggatctcagtctaccctatttaaggatagccctttgaggacccttaagcgtaaatcctctaacatgaagaggctgtctccagctccacaactggggccttctagcgacgcacatacatcgtattatagtgagtccctcgtccatgagtcctggtttcctcccaggtcgagtctggaggaactccatggagacgcgaattggggggaagatctccgggtgaggcgaagaagagggactggtggctcagaaagctcccgggcctcgggactggtagggcggaaagcaaccgaggacttcctcgggagtagcagcggctatagcagcgaggacgattacgttgggtatagcgatgtggatcagcagtcgtctagcagccgtctgagatcggccgtatcccgggcgggctcacttctgtggatggtggcaacgtccccgggccggctgttcaggctgctttactggtgggcaggcacgacctggtaccgcctcaccaccgctgcatccttgctagacgtgttcgtcctgaccagaaggttctcctccctgaagacctttctgtggtttctactgccactcctgctactgacctgcctgacctatggcgcctggtatttctacccttatggtctgcagacctttcatcctgctctggtgtcctggtgggccgcgaaggactcccggcgccctgacgagggttgggaggcccgtgattcaagtcctcactttcaagctgagcagcgggttatgagtcgcgtgcactccttagagcgaagactggaggctctggccgcggagtttagcagcaactggcaaaaggaagccatgagactggagcgcctggagctcaggcagggagcacccggtcagggcggagggggcgggctttctcacgaagacactcttgcgttattggaggggctggtgtcccgccgagaagctgccctcaaagaggacttccgacgtgagaccgcagcgcgaatccaggaagaattatcagcattgcgcgctgagcaccagcaagactctgaagatttgtttaaaaagatcgtgcgagctagtcaggaatctgaggctcgtatccagcagctcaaaagtgaatggcagtcaatgacacaggagtcctttcaggagtcttcagtcaaagaactacggaggttagaagaccagcttgccggattgcagcaggagcttgccgctcttgccctgaagcagtcatcagtcgctgaagaagttgggttgttgcctcagcagattcaggcagtgagggacgatgtggagtcccagttccccgcttggatcagccagttccttgctcgcggaggaggcggccgtgtgggtttgctgcagcgtgaggagatgcaggctcaactgagagaattggaaagcaaaattctgactcatgttgccgaaatgcaggggaaatccgcgcgggaagcagcggctagcctcagccttacgctccaaaaggagggcgtgattggggtgacggaagagcaggtccatcacattgtgaagcaggccttgcagcgctacagtgaggaccgtatcggcctggccgattacgcactggagtcaggtggagcttccgtgatttcaacgagatgttcggagacatatgagaccaagacagcactcctgtctctctttggtattcccttatggtaccacagccagagccctagagtcatattacaaccggatgttcaccctggaaactgctgggcattccagggtccccaggggtttgcagttgtccggctgtctgcccgaattcgacctaccgctgtgaccctagaacacgtgcctaaagcactcagtcccaattctacaatatctagcgctccaaaagactttgcgatatttgggttcgatgaggatctgcagcaagaagggacgctccttggtaagttcacatatgatcaggacggggaacccatacagaccttccatttccaagctcctacgatggcgacgtatcaggttgtggaactcagaatcctgaccaattgggggcatcctgaatatacttgcatctatagatttcgagtccacggggaacctgcccattag

SEQ ID NO: 77747 - DNA, 333 bp, Artificial Sequence
  derived and/or modified sequence
atgagccggcgttcccagcgcttaacacggtacagccaaggagatgatgatggttctagcagcagtggcgggtctagcgtggccggcagtcagtcaactctttttaaggattctccacttcgtaccctgaagagaaagtcctccaacatgaagaggctgtctcctgcccctcagctgggaccctcaagcgacgcacatacaagttattattctgaatctttagtacatgaaagctggtttcccccccgaagcagtctggaagagctacacggagatgcaaactggggggaggacctgagggtcagacggcggaggggaacagggggatcatag

SEQ ID NO: 77748 - DNA, 306 bp, Artificial Sequence
  derived and/or modified sequence
atgagccggcgatcacagcgcctgacgcggtatagccagggggatgatgacggttcctcttcctctggcggcagttctgtcgccggcagccagagtaccctgtttaaggactccccgcttcggacacttaaaagaaagtcaagtaatatgaaaaggttgagtccggcccctcagctcggccctagctccgacgcccataccagttattattccgaaagtcttgtgcacgagtcatggtttccccctcggtcctctctggaagagctgcacggagacgccaattggggggaagacctgagagtctag

SEQ ID NO: 77749 - DNA, 435 bp, Artificial Sequence
  derived and/or modified sequence
atgtcaagacggagtcagaggctgacacggtattcacagggagacgacgacggatcgtcctcaagcggaggatctagtgttgctggaagccagtcaaccttgtttaaggactcccctttgcggacccttaagcgaaagtctagcaacatgaagaggctgagccccgcgccacaattaggcccgtcgtcagacgcccatacgtcctattattcagagagcctggtgcacgaatcctggttcccaccacgatcatcccttgaagagctccacggtgatgccaattggggggaagacctccgagtccgaagaaggcggggtactggaggatctgaatcatctagggctagcggtctcgtgggccgtaaagctactgaggacttcttgggctcttcttctggttactcgtcggaggatgattacgtaggccggagatag

SEQ ID NO: 77750 - DNA, 618 bp, Artificial Sequence
  derived and/or modified sequence
atgagtcgacgttcacagcgcttgacccggtatagtcaaggagatgacgatggctcttcatccagcggaggctctagtgtggctggttctcagagcactctgtttaaagattcacccctgcggacccttaaaaggaagagttctaatatgaagcggctttctccggctcctcagttgggcccatctagtgatgctcatactagctattactctgaaagcctcgttcacgaaagctggttccccccccgttcttccctggaagagctgcatggggacgctaactggggggaggacctcagggtccgacgccggcgggggacgggcggatcagagtcatctcgggctagcggtctcgtagggcgtaaagccactgaggacttcctaggatccagctccggatactccagtgaggatgactacgtcggctactcagacgttgatcaacagagttctagcagcaggctgaggagcgctgtgtccagggccggctctctgctgtggatggtggcgacgtctcctggacggctctttcgactgctgtactggtgggcgggtacaacgtggtatcgtcttacgaccgcagcttcactgttggatgtcttcgtgctcacccggtag

SEQ ID NO: 77751 - DNA, 333 bp, Artificial Sequence
  derived and/or modified sequence
atgagcagaagaagccagaggctgacccgctacagccagggagatgatgatggcagcagcagcagcggcggcagctctgtggccggcagccagagcaccctcttcaaggacagccccctgcggaccctgaagaggaagagcagcaacatgaagaggctgagccctgccccccagctgggccccagcagtgatgcccacaccagctactacagcgagagcctggtgcatgagagctggttccccccaagaagcagcctggaggagctgcatggagatgccaactggggcgaggacctgcgggtgagaagaagaagaggaactggaggcagctag

SEQ ID NO: 77752 - DNA, 306 bp, Artificial Sequence
  derived and/or modified sequence
atgagcagaagaagccagaggctgacccgctacagccagggagatgatgatggcagcagcagcagcggcggcagctctgtggccggcagccagagcaccctcttcaaggacagccccctgcggaccctgaagaggaagagcagcaacatgaagaggctgagccctgccccccagctgggccccagcagtgatgcccacaccagctactacagcgagagcctggtgcatgagagctggttccccccaagaagcagcctggaggagctgcatggagatgccaactggggcgaggacctgcgggtgtag

SEQ ID NO: 77753 - DNA, 435 bp, Artificial Sequence
  derived and/or modified sequence
atgagcagaagaagccagaggctgacccgctacagccagggagatgatgatggcagcagcagcagcggcggcagctctgtggccggcagccagagcaccctcttcaaggacagccccctgcggaccctgaagaggaagagcagcaacatgaagaggctgagccctgccccccagctgggccccagcagtgatgcccacaccagctactacagcgagagcctggtgcatgagagctggttccccccaagaagcagcctggaggagctgcatggagatgccaactggggcgaggacctgcgggtgagaagaagaagaggaactggaggcagcgagagcagccgggccagcggcctggtgggcaggaaggccacagaggacttcctgggcagcagcagcggctacagcagtgaagatgattatgtgggcagaagatag

SEQ ID NO: 77754 - DNA, 618 bp, Artificial Sequence
  derived and/or modified sequence
atgagcagaagaagccagaggctgacccgctacagccagggagatgatgatggcagcagcagcagcggcggcagctctgtggccggcagccagagcaccctcttcaaggacagccccctgcggaccctgaagaggaagagcagcaacatgaagaggctgagccctgccccccagctgggccccagcagtgatgcccacaccagctactacagcgagagcctggtgcatgagagctggttccccccaagaagcagcctggaggagctgcatggagatgccaactggggcgaggacctgcgggtgagaagaagaagaggaactggaggcagcgagagcagccgggccagcggcctggtgggcaggaaggccacagaggacttcctgggcagcagcagcggctacagcagtgaagatgattatgtgggctacagtgatgtggaccagcagagcagcagcagccggctgcggtctgctgtgtcccgggccggcagcctgctgtggatggtggccaccagccctggccgcctcttccggctgctgtactggtgggccggcaccacctggtaccgcctgaccacagctgccagcctgctggatgtgtttgtgctgaccaggtag

SEQ ID NO: 77755 - DNA, 2154 bp, Artificial Sequence
  derived and/or modified sequence
atgagccggcggagccagcggctgacccggtacagccagggcgacgacgacggctccagttcaagcggaggctcttccgtggccgggtcccagagcacactcttcaaggattcaccgctgagaactttgaagcgtaaatcttctaatatgaagcgattaagtcccgcccctcagctgggtcctagtagcgatgcgcacacatcttactactctgagagcctcgtgcacgagtcctggtttccccctcgcagctcactggaagaactgcatggtgacgcaaattggggagaggatctgcgggtgcgacggaggaggggtacagggggatccgagtcttcacgggcttctgggttggttggccgtaaagccactgaggatttcttgggtagctcttccggctacagttcagaggatgactatgttgggtatagcgatgtggatcaacagtcttcctcctccaggcttcgctcggcagtctcccgagctggcagtctgctgtggatggtcgctacgtcacctggacgactctttcgcctgttgtattggtgggccggcactacctggtatagactgacaaccgccgccagtctgctcgacgtctttgtgcttactcgtagatttagttcactgaaaacattcctctggttcctgctgccgttgctcttactcacgtgcttgacctacggggcctggtatttctacccttatggcctgcaaacattccaccccgcgttggtatcctggtgggcggccaaggatagtaggcgaccggatgagggatgggaagctcgcgattcgagtccacactttcaggccgagcagagagtgatgagtcgcgtgcactctttagagcgaagactcgaggccctagcagcggaattctcctctaactggcagaaagaggcgatgcggctggagcgcctcgaacttcggcagggagcccccggccagggcggcggaggtggtctgtcacatgaggacacgctcgctcttctggaagggctggtctcaagacgcgaggctgctttgaaagaggatttcaggcgcgaaaccgccgctcgtatccaggaagagttatcggcacttagggcagaacatcagcaagacagcgaggacctgttcaaaaaaatagtgagggctagccaagaatccgaggctcgcattcaacagctcaaatccgaatggcagagcatgacccaggagtcattccaggaatcatccgtgaaggaactacggaggctcgaggaccagctagctggcttgcaacaagagctggccgctctagctcttaaacagtcctctgtcgctgaggaggttgggctgctcccccagcagattcaagccgtgagggacgatgtggagtcacagtttcccgcatggatcagtcagtttctcgccagaggaggcggggggcgtgtcggactgctgcagcgagaagaaatgcaggcacagctccgagaacttgagagtaagatcctcacccatgtcgcggagatgcagggaaaaagcgctcgcgaagccgccgctagtctctctctgacattgcagaaggagggtgtcattggggtgacagaagaacaagtgcatcacatcgtgaaacaggccctgcagcgctactctgaagaccgcataggtctcgcggactatgcacttgagtctggaggcgctagcgtaatttctacgagatgctcagagacatatgagaccaagactgctctgctgtccctattcggtattccactgtggtatcactctcaatcaccgcgcgtgatactccagcctgatgtgcaccctggtaattgttgggctttccaagggccacaaggctttgcggtggtgagattatccgcacgcatcagacccaccgctgtcaccctggagcacgtgcccaaggccctgagccccaactcaaccatctctagcgcccccaaagatttcgcgatcttcggtttcgacgaagatttacagcaagaaggaacgcttctgggcaagttcacttatgatcaggatggtgagcccatccagacttttcatttccaagctcccactatggcaacctatcaggtggtcgaactccgtatcttgacgaactgggggcaccctgaatacacatgtatctaccgctttcgggttcacggggagcccgctcactag

SEQ ID NO: 77756 - DNA, 2154 bp, Artificial Sequence
  derived and/or modified sequence
atgagccggcggagccagcggctgacccggtacagccagggcgacgacgacggctcctctagttccggcggctcctctgttgctggaagtcagagtactttgtttaaagattctcctctgcgtacactgaaacgtaaatcctctaacatgaagagattgtccccagccccacagcttggcccttcatcggacgcacacacgtcttactactccgaatctctggtccacgaatcctggtttccacccagaagttccctggaggagctgcatggggatgcaaactggggtgaggacctccgtgtgaggcgcagacgtggaactggtgggagtgaaagcagccgggcctcaggcttagtcgggcgcaaggccacagaggactttttaggatcctcttccggttactctagcgaagatgattacgtgggatattctgatgtagaccagcagagcagttcaagccggttgcgttccgccgtctcacgtgccggtagcctgctatggatggttgcaacttctcccggtcgtctgtttcgattattatactggtgggccggcacaacctggtacagactgacgactgctgcatcacttctggatgtcttcgtcttgacccgcaggttttcaagcctgaaaacatttctctggtttctcctcccacttttactcctaacctgcttgacctacggagcgtggtacttctacccatatggcctgcaaacattccatcctgctcttgtttcctggtgggctgcaaaagattccagaagacccgatgaggggtgggaggcccgcgactcatcccctcacttccaggcggagcagagggtgatgtctagggtccatagtctggagaggagacttgaggcactagcagccgagtttagctctaactggcagaaggaggcaatgcggttggaacggttagagctgcggcagggcgcgcccggacaaggggggggaggtgggctctctcatgaagataccttagcactcctggaggggctggtttctagacgcgaagcagcccttaaggaggactttcgtcgggagactgctgcaaggattcaagaggagctgagcgcccttagagccgagcatcagcaagacagcgaggacctgttcaagaagattgtaagagcttcacaagaaagcgaagcccggattcagcaattgaagtccgagtggcagtctatgactcaggagtcattccaggaaagttcagtgaaagaactcaggagattggaggaccagttggccggtctccagcaagaacttgccgccctcgcccttaaacagtcatcagtggcagaggaagtggggttacttccacagcaaatccaggccgtgagggacgatgtcgagagtcaattccctgcatggatcagccagtttctcgccagaggggggggaggacgggtgggtttgctccagagagaagagatgcaagcccagctgagggagctcgaatcaaagatcctgacccacgtcgctgagatgcagggcaaaagcgcgcgggaggcagccgccagtctctcccttacactgcagaaagaaggcgtgattggtgttactgaggaacaagttcaccacatagttaagcaggcattgcagcggtacagtgaggatcggattggcttagcagactacgccctggagtctggaggggcgtctgttatatccacgcggtgtagcgaaacctatgagacaaagactgcattgctcagcctgtttggcatacccctttggtaccattcacagtctccgcgcgtaatcttgcagcctgacgtgcaccccggtaattgttgggccttccagggtccacaggggttcgcggtggtgcgtctgagtgcgcgcattcgaccaacagcagtgacgctcgaacatgtaccaaaggccctgagtcccaattccaccatctccagtgcacccaaggattttgcgatattcggattcgatgaggatctgcagcaggaaggaactctgctcggcaagtttacctacgaccaagatggcgagcccatccagacttttcattttcaggccccaacaatggccacgtatcaggtcgttgaactcagaatcctgactaattggggacaccctgaatacacctgcatatatcgcttccgcgtgcacggagaacccgcccactag

SEQ ID NO: 77757 - DNA, 333 bp, Artificial Sequence
  derived and/or modified sequence
atgagccggcggagccagcggctgacccggtacagccagggcgacgacgatggatcatctagttcgggggggtcctctgttgccgggtctcagtcgacactctttaaagactcgcctctgaggacactaaagaggaagagttctaacatgaaacgacttagccctgccccgcaactgggaccgagcagcgacgcccacacctcatattacagcgaatcccttgttcatgagagttggtttccgccaaggagcagcttggaagagctccacggtgatgcaaattggggggaggacttaagggtgagaaggcgacgcggcacgggaggatcttag

SEQ ID NO: 77758 - DNA, 306 bp, Artificial Sequence
  derived and/or modified sequence
atgagccggcggagccagcggctgacccggtacagccagggcgacgacgacggctcttcaagcagtggggggtcctcagttgccggcagtcagtcaacactgtttaaggattctcccttacgaacccttaaacggaagtcttctaatatgaaaaggctaagccctgcacctcagctggggccttccagcgacgctcacactagttactactcagaaagcctcgtgcacgagagttggttccctccgagatcaagcctagaggaacttcatggggatgctaactggggcgaagacttaagggtctag

SEQ ID NO: 77759 - DNA, 435 bp, Artificial Sequence
  derived and/or modified sequence
atgagccggcggagccagcggctgacccggtacagccagggcgacgatgacggcagctcatctagtggtggatcctccgtcgctggctcgcagagcacactgtttaaggacagccctcttagaactctcaagagaaaatctagcaacatgaaaaggttgtctcccgcaccacagcttggtccctctagtgatgcccacacatcttactattctgagtccctagtgcatgaaagttggttcccaccaagatcttcccttgaagaactccacggggatgccaactggggggaagaccttagggtgcggaggcgaaggggtacgggaggaagcgagagctctcgagcctcagggttagtgggacgcaaggccacagaagatttcctgggatcaagtagtggctattcctctgaggatgattacgttgggagaaggtag

SEQ ID NO: 77760 - DNA, 618 bp, Artificial Sequence
  derived and/or modified sequence
atgagccggcggagccagcggctgacccggtacagccagggcgacgacgacggatctagcagttcaggaggaagttccgtggcaggtagtcagtccacattattcaaggactcgccccttagaactttaaaacggaaatcttctaacatgaagcgcctgtcacctgcaccccagctcggcccttcgtcagatgctcatactagctactactctgaaagtctcgtccacgagtcatggttcccgcccaggtcctcccttgaggaactgcacggagacgctaattggggtgaggacctgcgagtccggagacgcagggggacaggcggttctgaatcttcaagggcatcaggcttggtgggccgcaaggccactgaagatttcttgggttcctcatcaggatacagttctgaagatgactatgtaggatattccgacgtagaccagcagtcctcctcctcacggctcaggtccgctgtgtcacgggccggatccctgctttggatggtagcaactagtcccggcaggctctttcgtttgctgtactggtgggccggcacaacttggtatagattaactactgcagcaagtctactggacgtattcgtgctgacgaggtag

SEQ ID NO: 77761 - DNA, 2154 bp, Artificial Sequence
  derived and/or modified sequence
atgtcccgacgatctcagagactgacacggtattcccagggcgacgacgatggctccagtagtagtgggggtagctcagtggccggatctcagtccaccctctttaaagactccccgttgcgcactctgaaaagaaagtcctccaacatgaagcgtctcagccctgcaccacagctgggccctagctcggacgcccacacatcatactatagtgaaagcttggtgcacgagagctggttccctcctaggtctagtctcgaagaactccacggggacgctaactggggagaagatctcagagtgaggcggaggagagggactggaggatccgagagttctcgcgcatctggattagtgggcaggaaagcaactgaagacttcctagggagctcgtccggatactctagtgaagacgattatgtgggatactcagacgtggaccagcagagctcctcatctagattgcgctcagccgtcagtcgggcaggttcgctgctgtggatggtcgcgaccagccccggaagactgttccggctgctctattggtgggccggaactacttggtatcgcctcacgacggcagcgagtctgctggacgtttttgtcttgacacgcagattctcgtccctcaaaacattcctctggttcctgctgcccttattgctactcacatgcctgacgtacggggcttggtatttctatccgtacggactgcagaccttccaccccgcactcgttagttggtgggcagcaaaagattcaagacgtcccgatgaaggttgggaggccagggattccagtccacacttccaggcggaacagcgggtgatgtccagagttcactcgctggagaggcgactggaggctctcgctgctgagttcagcagcaattggcagaaggaagccatgcgcctggagcgcctcgaattgcgccagggcgctcccggtcagggaggcggagggggactgagccatgaggatacactggctcttctggaaggcctagtcagccggagagaggctgccttgaaagaagactttaggagagaaaccgctgcaaggattcaggaggagctgtcagcgcttcgcgcagagcaccagcaggacagcgaagatctattcaagaagatcgtgcgggctagccaggagtccgaggcacggatccagcagctgaaatcagagtggcagtccatgacacaggagagctttcaggaatcctccgtgaaggagctgcgcaggctcgaggaccaacttgctggactgcagcaggaactggccgcacttgcccttaaacaatctagtgttgcagaggaggtcggcttgctgccccaacagatccaggcagtgcgggatgatgtggaatcacagttcccagcttggatctcccagttcctagctcgcggaggcggagggagagtcggattactgcagcgggaggaaatgcaggcgcagctgcgggagctggagtcaaaaatcctgacccacgtggcggagatgcaaggtaagagcgcacgcgaagccgctgcctcccttagtctgacgttgcagaaggaaggagtgatcggcgttaccgaggagcaagtccatcatatcgtcaagcaggccctgcaacggtacagcgaggatagaataggtttagcagactatgccctagaatcaggtggcgcatcagtgattagcactaggtgctctgagacatatgagaccaagacagccttgttatcccttttcggcattcccctgtggtaccattcacagtcgccacgcgttattctccagcccgatgtgcatcccggaaactgctgggcattccaaggccctcaggggtttgcagtggtaagacttagtgcacgcattaggcccacagctgtgacgttagaacatgtaccaaaggccctctctccaaactcgacgatctccagcgcccctaaggactttgcaatcttcgggtttgacgaagaccttcagcaggaggggacgttactgggaaaatttacatacgaccaggatggcgaaccgatccagacgtttcatttccaggcacccacaatggccacataccaggtggtggaacttcggattctgacgaactggggccacccagaatacacgtgcatataccgatttcgggtgcatggagagccggctcactag

SEQ ID NO: 77762 - DNA, 2154 bp, Artificial Sequence
  derived and/or modified sequence
atgagcaggaggtcacagcgcctgactcggtattcccagggagacgacgacgggtcttcatccagtgggggtagcagtgtcgcgggaagccagtcaactttgttcaaagactccccgctgaggacccttaagcgcaaatctagcaatatgaaaagactcagtccagcccctcagctgggaccgagctctgatgctcatacctcatattactctgagtctctggtccacgagagctggttccctcctcgctccagcctggaggagctgcacggggacgccaattggggcgaggatctcagggttcggaggcgcagagggacgggtggctccgagtcttcccgagcatctggtctcgtcggtcggaaagcaacagaggacttccttggaagcagcagcgggtatagctcagaggacgactacgtcggctactctgatgtggaccagcagtcttcctcgagccgtctgcgaagcgcagtctctcgcgcaggcagcctgctgtggatggtggccaccagccccggtaggttattccgcttgctgtactggtgggccggaactacatggtaccggctgacaacagcagcatcactcctggatgtgttcgttctaaccaggcggtttagttccttaaagacttttttgtggttcctgctgccattgttattgctgacatgcctcacttatggtgcctggtacttttatccatacggtttgcagaccttccaccctgctcttgttagctggtgggccgctaaggacagcaggaggcccgacgagggttgggaggcccgagacagttctccacattttcaggctgaacaacgggttatgtcccgcgtccattcccttgagaggcgcctggaggcgttagcagccgagtttagcagcaactggcagaaggaagctatgcgcctagagcggctcgagctgagacagggcgctccgggtcaggggggtgggggtggcttgtcccacgaagacacacttgcattgctagagggactggtctcccggcgagaagcagcactcaaagaggactttagacgtgagaccgcagcgagaatccaagaggaattaagtgcccttcgcgctgagcaccagcaggacagtgaagacttgttcaagaaaattgtacgggcatcccaggaatcagaggctaggatccaacagcttaaatccgagtggcagtccatgacccaggaatcattccaggagagctccgtcaaagagttacgtagactcgaagaccagctcgccggactccagcaagagctcgccgctctagcactgaagcaatcatccgtcgcagaagaggtgggcctgctgccccaacaaatacaagccgttcgggatgatgtcgagtcgcagttccccgcatggattagccaattccttgctaggggcggaggtgggcgtgtgggactgctgcagcgagaagaaatgcaggcacagcttcgcgaacttgaatccaaaatcctgacccatgttgccgagatgcaaggaaagtctgccagggaagctgccgctagcctgtcactgacactgcaaaaggagggcgtgatcggagtgaccgaagagcaggtacaccatatagtgaagcaagctctccagagatatagcgaggatcgtattggcctcgccgattatgccctcgaatccggtggagcctccgttatatctactcgctgtagcgaaacatacgagaccaagactgccttgctttcactattcggaattcccctgtggtaccacagccagtccccacgagtgatcctgcaaccagacgtgcatcccggaaactgctgggccttccaagggcctcagggtttcgccgtcgtgcgcctaagcgctcgtatacgtccgacggctgtgacattggagcatgtgcccaaggcgctcagtccaaacagcacaatttccagcgcccctaaggacttcgctatcttcggtttcgatgaggacctccagcaggagggaaccttgttggggaagttcacttatgaccaggacggagagccaattcaaacctttcactttcaagctcctacaatggccacctatcaggtcgtggaactccggatattgaccaactggggtcatccagagtatacttgtatatataggtttagggtgcatggggagccagctcactag

SEQ ID NO: 77763 - DNA, 333 bp, Artificial Sequence
  derived and/or modified sequence
atgagtcgcaggagccagcgcctcactaggtacagtcaaggggatgacgatggctctagttcgtctggaggctcctcggtggcgggttcccaaagcacactattcaaggatagtcccctgaggacactgaaaaggaagtcaagcaatatgaagagactcagcccagctcctcagttgggcccatctagtgatgcgcacactagttattattccgaatcactcgtccacgagtcctggtttcccccacgctccagcttagaggagcttcacggggacgccaattggggtgaagatttgcgagtcagaaggaggcgtggtaccggaggttcttag

SEQ ID NO: 77764 - DNA, 306 bp, Artificial Sequence
  derived and/or modified sequence
atgagcagacgttcacagcggctaacgagatattcacagggcgacgacgatggatctagctctagtggcggttcatctgtggcagggagtcagtccacactcttcaaagatagtccactccgcacccttaagagaaagagtagcaatatgaaacggcttagtccagctccacaattaggtccatcctcagatgcccatacatcctactactctgagagcctagtccacgagtcctggttccccccaaggtcatcacttgaggaactgcacggcgacgctaactggggcgaggatctgcgcgtatag

SEQ ID NO: 77765 - DNA, 435 bp, Artificial Sequence
  derived and/or modified sequence
atgtcgcgacggtcccagagacttacacgctatagccagggtgatgacgacggctcttccagttcgggtgggagcagtgtggccggtagccaatcaacattgtttaaggactcacccctcagaacactgaagaggaagtcctccaacatgaagagactttcacccgcacctcagctagggcctagctcggatgcccacaccagctactactctgaatcactggtacacgaatcatggtttcctcctagaagctccttggaggagctgcatggcgatgccaactggggcgaggatttgcgtgtgaggcggagacggggaaccggcggatcagaatcatcccgggcttcaggcttggtgggacggaaggccaccgaagattttctcggctcaagcagtgggtacagtagtgaagacgattacgtgggtagacggtag

SEQ ID NO: 77766 - DNA, 618 bp, Artificial Sequence
  derived and/or modified sequence
atgagccgtcgatctcagcggcttacacgctatagtcagggcgatgatgacggttcaagcagcagcggagggagttcagttgcaggtagccaatccacactctttaaggattctcccctgcggactctaaagcggaagtctagtaacatgaaaagactcagtcccgcaccgcagctgggccctagctccgatgcacacacctcctattactccgagtccctggtgcacgaatcttggttcccacccagaagcagcctggaggagctccatggcgatgccaactggggggaagatctgagggtccgcagaagaaggggaaccggcggaagcgagtcttctcgggcaagtggactggttggcagaaaggctaccgaagatttccttggcagcagctccggatactcctcagaagatgactacgtcgggtattctgacgtggatcagcagtctagcagttctcgccttaggagtgccgtgagccgagctggctccctcctatggatggtagctactagcccgggacgcctgttccgcctactctactggtgggctgggactacatggtaccgattaactaccgccgcttcactcctggatgttttcgttctcacccgttag

SEQ ID NO: 77767 - DNA, 3908 bp, Artificial Sequence
  derived and/or modified sequence
ccgcccgcccgccttgtcccgcgtcgccgctcttcgcgtgcccgcgcgccccgggcccggccgctgtgtcgccctgagcggagcgccgcccgcgggatccccacgcggaaagggggcgcgccccggcggcggcctggcctcggacgcccccggccgggctagaagccgccgcggcagcagattctcttcaggggaagagtccacatcccacctcatcatgtcccgaagaagccagcgcctcacgcgctactcccagggtgacgatgacggcagcagcagcagcggagggagctcggtggctgggagtcagagcaccctgtttaaagacagtcctctcaggaccttgaagaggaaatccagcaacatgaagcgcctgtccccagcgccacagctgggcccgtcctctgatgcacacacctcctactacagtgagtcgctggtccacgagtcctggttcccacccaggagctccctggaggaactgcatggtgacgccaactggggtgaggacctgcgggtgcggaggaggagaggcacgggtggctcagagagcagcagggccagcgggcttgtggggcgcaaggccaccgaggacttcctgggctcttcctcgggctactcctctgaggacgactacgtgggctactcggatgtggaccagcagagttccagctcgcggctccgaagcgccgtctcacgggcgggctccttactctggatggtggccacttcgccaggccggctcttcagacttctctactggtgggctggcaccacctggtaccgcctgaccacagctgcctccctccttgacgtcttcgttttaaccaggcgcttctcgtccctgaagacgttcctctggttcctgctgccgctgctcttgctgacgtgcctgacgtatggtgcttggtatttctacccctatgggctgcagacattccaccctgctttggtttcctggtgggcagcgaaggacagcaggaggccggatgagggctgggaagccagagactcatcgccacatttccaggctgagcagcgtgttatgtcccgggtacactctctggagcggcgtctggaagctcttgctgctgaattttcctccaactggcagaaggaggccatgcggctggaacgtctggagctgcggcaaggggctcctggccagggaggtggtggtggcctgagccacgaggacaccctggcgctgctggaggggctagtgagccgccgtgaagctgccctgaaggaggatttccgcagggaaactgctgctcgcatccaggaagaactgtctgccctgagagcagagcatcagcaagactcagaagacctcttcaagaagatcgtccgggcctcccaggagtccgaggctcgcatccagcagctgaagtcagagtggcaaagcatgacccaggagtccttccaggagagctctgtgaaggagctgaggcggctggaggaccagctggccggcctgcagcaggagctggcggctctggcactgaagcagagctcggtggcggaagaagtgggcctgctgccccagcagatccaggccgtgcgggacgacgtggaatctcagttcccggcctggatcagtcagttccttgcccgaggtggagggggccgcgtggggctccttcagagagaggagatgcaagctcagctgcgagagctggagagcaagatcctcacccatgtggcagagatgcagggcaagtcggccagggaagccgcggcctccctgagcctgacgctgcagaaagaaggtgtgattggagtgacagaggagcaggtgcaccacatcgtgaagcaggccctgcagcgctacagtgaggaccgcatcgggctggcagactacgccctggagtcaggaggggccagcgtcatcagcacccgatgttctgagacctacgagaccaagacggccctcctcagcctcttcggcatccccctgtggtaccactcccagtcaccccgagtcatcctccagccagatgtgcacccaggcaactgctgggccttccaggggccacaaggcttcgccgtggtccgcctctctgcccgcatccgccccacagccgttaccttagagcatgtgcccaaggccttgtcacccaacagcactatctccagtgcccccaaggacttcgccatctttgggtttgacgaagacctgcagcaggaggggacactccttggcaagttcacttacgatcaggacggcgagcctattcagacgtttcactttcaggcccctacgatggccacgtaccaggtggtggagctgcggatcctgactaactggggccaccccgagtacacctgcatctaccgcttcagagtgcatggggagcccgcccactagccctgcttactggtgcctgctgccagccatctgggagtgggtgaacagcaccccgccgcttcccccacacgcttgctcggcgctctgacttctaggagcacaagagaggagcctgtggccccatgcagatgaaaaggacgggcagggtctcctgagcagcaggtggctcgaggcggttagcaggctccagcagctcccttcttccttccctctgtgcccgtggcgtctgcttcccatcctgggagtgtgtatatatgtagcatatcatgggggactgggaagttgggagaggtaggacctgactggtcttggctggggtcaggggctggtgcctgggagctgatgaagcaggtgccagggctgtgggaggggcaagctacggcctgggctaggtgagctgcctctgcccctgggcaaggaagcgaggccctctgggaggagggtgcttagctccagagcaggatgggacttccccaggcaggaagcacttgatggagagctgcccagctctcctacaaggttagtgccctccacctagggaagcatgaaccacagggtccctgagggccttcgacaaaagtgtgtatttgtcccggggagggtagcagtgggccatggggcttcttgtgccctaaaggggactggctgctgtgatcttctaaggggcccagggccaaccctgtaggcttcccctctgctggggacggtagttgcttttctctctcctgatgctaggttggggcccaccctgctccctgttcctgctagggcctgccagtgcccctgagcttgctttccacattctcccagggtatggagacctagacctgtctttggggccattagcatctggggttatagcaagaagagtggggagcatggaactcctgggctcttgtggggacgttcagggtatcggggtgcgaggtctgtctgcaccggcccccacatctaaccaggccctgatgtaggggtcgtccgctcaggctgcccccttgggctcttgcagctcttgttcaggtagtcgcccttctggtttgttctctgtggggcagttggtgggggctgggggaagaggctggcagaagttaccctggatagggaagggggaggaggggacttttagagccagcaggccccactgtattatgtatatatttttcaaggtctgtttttctaactgaaaagctaagggcttgattcctagccccgttctgtggggcactgggtgatactcagtttcttgttcctggccgtggagaggggcctggggcactggttccggctgtgtctggtggtctggctgcggggaaggggcaagaaggcgggcaggccttcactgcagcactgagcctcaaatccgctctggagcatgaggctggatgcagtggtggtgaggccgccccgctccatcccgaggcagccagggtttgttttgcgctctcctgtcacaaatgctgcactattggttcttaagttttttatctccagatcctaatttatgcctatgcaaaaaataaatgacgcccaagagctg

SEQ ID NO: 77768 - DNA, 4055 bp, Artificial Sequence
  derived and/or modified sequence
ggacttcccgggcagcctcccgggaggaggagggcaaaggccgactgccccaacccggccccgggcagcgcctacgggttttgtgccagacaggccgtttccagggacaggcagttcccagcctctgcctgtcagaactcagggcctcagaggaaggcccgttttgttcagttctaaaacaaaacaaaacaaagcaatggggggcgcggtgtgacttagagagccaggaggcgcgcctttggtgacaatttctgcaggtgtcacctccttcagcaggacagaggctaagaggagtccctgtgtgggcagctggagccttcagattctcttcaggggaagagtccacatcccacctcatcatgtcccgaagaagccagcgcctcacgcgctactcccagggtgacgatgacggcagcagcagcagcggagggagctcggtggctgggagtcagagcaccctgtttaaagacagtcctctcaggaccttgaagaggaaatccagcaacatgaagcgcctgtccccagcgccacagctgggcccgtcctctgatgcacacacctcctactacagtgagtcgctggtccacgagtcctggttcccacccaggagctccctggaggaactgcatggtgacgccaactggggtgaggacctgcgggtgcggaggaggagaggcacgggtggctcagagagcagcagggccagcgggcttgtggggcgcaaggccaccgaggacttcctgggctcttcctcgggctactcctctgaggacgactacgtgggctactcggatgtggaccagcagagttccagctcgcggctccgaagcgccgtctcacgggcgggctccttactctggatggtggccacttcgccaggccggctcttcagacttctctactggtgggctggcaccacctggtaccgcctgaccacagctgcctccctccttgacgtcttcgttttaaccaggcgcttctcgtccctgaagacgttcctctggttcctgctgccgctgctcttgctgacgtgcctgacgtatggtgcttggtatttctacccctatgggctgcagacattccaccctgctttggtttcctggtgggcagcgaaggacagcaggaggccggatgagggctgggaagccagagactcatcgccacatttccaggctgagcagcgtgttatgtcccgggtacactctctggagcggcgtctggaagctcttgctgctgaattttcctccaactggcagaaggaggccatgcggctggaacgtctggagctgcggcaaggggctcctggccagggaggtggtggtggcctgagccacgaggacaccctggcgctgctggaggggctagtgagccgccgtgaagctgccctgaaggaggatttccgcagggaaactgctgctcgcatccaggaagaactgtctgccctgagagcagagcatcagcaagactcagaagacctcttcaagaagatcgtccgggcctcccaggagtccgaggctcgcatccagcagctgaagtcagagtggcaaagcatgacccaggagtccttccaggagagctctgtgaaggagctgaggcggctggaggaccagctggccggcctgcagcaggagctggcggctctggcactgaagcagagctcggtggcggaagaagtgggcctgctgccccagcagatccaggccgtgcgggacgacgtggaatctcagttcccggcctggatcagtcagttccttgcccgaggtggagggggccgcgtggggctccttcagagagaggagatgcaagctcagctgcgagagctggagagcaagatcctcacccatgtggcagagatgcagggcaagtcggccagggaagccgcggcctccctgagcctgacgctgcagaaagaaggtgtgattggagtgacagaggagcaggtgcaccacatcgtgaagcaggccctgcagcgctacagtgaggaccgcatcgggctggcagactacgccctggagtcaggaggggccagcgtcatcagcacccgatgttctgagacctacgagaccaagacggccctcctcagcctcttcggcatccccctgtggtaccactcccagtcaccccgagtcatcctccagccagatgtgcacccaggcaactgctgggccttccaggggccacaaggcttcgccgtggtccgcctctctgcccgcatccgccccacagccgttaccttagagcatgtgcccaaggccttgtcacccaacagcactatctccagtgcccccaaggacttcgccatctttgggtttgacgaagacctgcagcaggaggggacactccttggcaagttcacttacgatcaggacggcgagcctattcagacgtttcactttcaggcccctacgatggccacgtaccaggtggtggagctgcggatcctgactaactggggccaccccgagtacacctgcatctaccgcttcagagtgcatggggagcccgcccactagccctgcttactggtgcctgctgccagccatctgggagtgggtgaacagcaccccgccgcttcccccacacgcttgctcggcgctctgacttctaggagcacaagagaggagcctgtggccccatgcagatgaaaaggacgggcagggtctcctgagcagcaggtggctcgaggcggttagcaggctccagcagctcccttcttccttccctctgtgcccgtggcgtctgcttcccatcctgggagtgtgtatatatgtagcatatcatgggggactgggaagttgggagaggtaggacctgactggtcttggctggggtcaggggctggtgcctgggagctgatgaagcaggtgccagggctgtgggaggggcaagctacggcctgggctaggtgagctgcctctgcccctgggcaaggaagcgaggccctctgggaggagggtgcttagctccagagcaggatgggacttccccaggcaggaagcacttgatggagagctgcccagctctcctacaaggttagtgccctccacctagggaagcatgaaccacagggtccctgagggccttcgacaaaagtgtgtatttgtcccggggagggtagcagtgggccatggggcttcttgtgccctaaaggggactggctgctgtgatcttctaaggggcccagggccaaccctgtaggcttcccctctgctggggacggtagttgcttttctctctcctgatgctaggttggggcccaccctgctccctgttcctgctagggcctgccagtgcccctgagcttgctttccacattctcccagggtatggagacctagacctgtctttggggccattagcatctggggttatagcaagaagagtggggagcatggaactcctgggctcttgtggggacgttcagggtatcggggtgcgaggtctgtctgcaccggcccccacatctaaccaggccctgatgtaggggtcgtccgctcaggctgcccccttgggctcttgcagctcttgttcaggtagtcgcccttctggtttgttctctgtggggcagttggtgggggctgggggaagaggctggcagaagttaccctggatagggaagggggaggaggggacttttagagccagcaggccccactgtattatgtatatatttttcaaggtctgtttttctaactgaaaagctaagggcttgattcctagccccgttctgtggggcactgggtgatactcagtttcttgttcctggccgtggagaggggcctggggcactggttccggctgtgtctggtggtctggctgcggggaaggggcaagaaggcgggcaggccttcactgcagcactgagcctcaaatccgctctggagcatgaggctggatgcagtggtggtgaggccgccccgctccatcccgaggcagccagggtttgttttgcgctctcctgtcacaaatgctgcactattggttcttaagttttttatctccagatcctaatttatgcctatgcaaaaaataaatgacgcccaagagctgtggga

SEQ ID NO: 77769 - DNA, 2725 bp, Artificial Sequence
  derived and/or modified sequence
actcttgtttcgctccttgacaaccctggcgggggttcgctggctgcggccccggctccggcccccgcaggagcagctgcccctagggggagacagactcgcctgctgtgcctgggtcggaaggattcccgctgctcatcctcatcctggatacaggtggcaggcgccaagccaggattctcttcaggggaagagtccacatcccacctcatcatgtcccgaagaagccagcgcctcacgcgctactcccagggtgacgatgacggcagcagcagcagcggagggagctcggtggctgggagtcagagcaccctgtttaaagacagtcctctcaggaccttgaagaggaaatccagcaacatgaagcgcctgtccccagcgccacagctgggcccgtcctctgatgcacacacctcctactacagtgagtcgctggtccacgagtcctggttcccacccaggagctccctggaggaactgcatggtgacgccaactggggtgaggacctgcgggtgcggaggaggagaggcacgggtggctcagagagcagcagggccagcgggcttgtggggcgcaaggccaccgaggacttcctgggctcttcctcgggctactcctctgaggacgactacgtgggctactcggatgtggaccagcagagttccagctcgcggctccgaagcgccgtctcacgggcgggctccttactctggatggtggccacttcgccaggccggctcttcagacttctctactggtgggctggcaccacctggtaccgcctgaccacagctgcctccctccttgacgtcttcgttttaaccaggcgcttctcgtccctgaagacgttcctctggttcctgctgccgctgctcttgctgacgtgcctgacgtatggtgcttggtatttctacccctatgggctgcagacattccaccctgctttggtttcctggtgggcagcgaaggacagcaggaggccggatgagggctgggaagccagagactcatcgccacatttccaggctgagcagcgtgttatgtcccgggtacactctctggagcggcgtctggaagctcttgctgctgaattttcctccaactggcagaaggaggccatgcggctggaacgtctggagctgcggcaaggggctcctggccagggaggtggtggtggcctgagccacgaggacaccctggcgctgctggaggggctagtgagccgccgtgaagctgccctgaaggaggatttccgcagggaaactgctgctcgcatccaggaagaactgtctgccctgagagcagagcatcagcaagactcagaagacctcttcaagaagatcgtccgggcctcccaggagtccgaggctcgcatccagcagctgaagtcagagtggcaaagcatgacccaggagtccttccaggagagctctgtgaaggagctgaggcggctggaggaccagctggccggcctgcagcaggagctggcggctctggcactgaagcagagctcggtggcggaagaagtgggcctgctgccccagcagatccaggccgtgcgggacgacgtggaatctcagttcccggcctggatcagtcagttccttgcccgaggtggagggggccgcgtggggctccttcagagagaggagatgcaagctcagctgcgagagctggagagcaagatcctcacccatgtggcagagatgcagggcaagtcggccagggaagccgcggcctccctgagcctgacgctgcagaaagaaggtgtgattggagtgacagaggagcaggtgcaccacatcgtgaagcaggccctgcagcgctacagtgaggaccgcatcgggctggcagactacgccctggagtcaggaggggccagcgtcatcagcacccgatgttctgagacctacgagaccaagacggccctcctcagcctcttcggcatccccctgtggtaccactcccagtcaccccgagtcatcctccagccagatgtgcacccaggcaactgctgggccttccaggggccacaaggcttcgccgtggtccgcctctctgcccgcatccgccccacagccgttaccttagagcatgtgcccaaggccttgtcacccaacagcactatctccagtgcccccaaggacttcgccatctttgggtttgacgaagacctgcagcaggaggggacactccttggcaagttcacttacgatcaggacggcgagcctattcagacgtttcactttcaggcccctacgatggccacgtaccaggtggtggagctgcggatcctgactaactggggccaccccgagtacacctgcatctaccgcttcagagtgcatggggagcccgcccactagccctgcttactggtgcctgctgccagccatctgggagtgggtgaacagcaccccgccgcttcccccacacgcttgctcggcgctctgacttctaggagcacaagagaggagcctgtggccccatgcagatgaaaaggacgggcagggtctcctgagcagcaggtggctcgaggcggttagcaggctccagcagctcccttcttccttccctctgtgcccgtggcgtctgcttcccatcctgggagtgtgtatatatgtagcatatcatgggggactgggaagttgggagaggtaggacctgactggtcttggctggggtcaggggctggtgcctgggagctgatgaagcaggtgccag

SEQ ID NO: 77770 - DNA, 444 bp, Artificial Sequence
  derived and/or modified sequence
ggatccagcctccacccgggtccgcggcccgcgccctgactcacctcctggcccccgccccgcctgccgcgccactgattctcttcaggggaagagtccacatcccacctcatcatgtcccgaagaagccagcgcctcacgcgctactcccagggtgacgatgacggcagcagcagcagcggagggagctcggtggctgggagtcagagcaccctgtttaaagacagtcctctcaggaccttgaagaggaaatccagcaacatgaagcgcctgtccccagcgccacagctgggcccgtcctctgatgcacacacctcctactacagtgagtcgctggtccacgagtcctggttcccacccaggagctccctggaggaactgcatggtgacgccaactggggtgaggacctgcgggtgcggaggaggagaggcacgggtggctca

SEQ ID NO: 77771 - DNA, 1004 bp, Artificial Sequence
  derived and/or modified sequence
gattcgcagtagtagatttcagctcccagaggctcacttcttgttttggagaatggggcctcgacctttttcatcttgtgaaacccagactcaatggtaaactgttttgtgatgccaggatgccgcaggaaagactgagaggcatctctgggagttctgggagggcggaggcgggtgctgacagttttcagcactccccgctcaacctccatcagaatatttagttcttcccagcggcagcttgggtatggtataaacatgttgccttgtttctgccctgggcaaaggtgtcacctccttcagcaggacagaggctaagaggagtccctgtgtgggcagctggagccttcagattctcttcaggggaagagtccacatcccacctcatcatgtcccgaagaagccagcgcctcacgcgctactcccagggtgacgatgacggcagcagcagcagcggagggagctcggtggctgggagtcagagcaccctgtttaaagacagtcctctcaggaccttgaagaggaaatccagcaacatgaagcgcctgtccccagcgccacagctgggcccgtcctctgatgcacacacctcctactacagtgagtcgctggtccacgagtcctggttcccacccaggagctccctggaggaactgcatggtgacgccaactggggtgaggacctgcgggtgcggaggaggagaggcacgggtggctcagagagcagcagggccagcgggcttgtggggcgcaaggccaccgaggacttcctgggctcttcctcgggctactcctctgaggacgactacgtgggctactcggatgtggaccagcagagttccagctcgcggctccgaagcgccgtctcacgggcgggctccttactctggatggtggccacttcgccaggccggctcttcagacttctctactggtgggctggcaccacctggtaccgcctgaccacagctgcctccctccttgacgtcttcgttttaaccagg

SEQ ID NO: 77772 - DNA, 333 bp, Artificial Sequence
  derived and/or modified sequence
atgagcagaagaagccagagactgaccagatacagccagggcgacgacgacggcagcagcagcagcggcggcagcagcgtggccggcagccagagcaccctgttcaaggacagccccctgagaaccctgaagagaaagagcagcaacatgaagagactgagccccgccccccagctgggccccagcagcgacgcccacaccagctactacagcgagagcctggtgcacgagagctggttcccccccagaagcagcctggaggagctgcacggcgacgccaactggggcgaggacctgagagtgagaagaagaagaggcaccggcggcagctag

SEQ ID NO: 77773 - DNA, 306 bp, Artificial Sequence
  derived and/or modified sequence
atgagcagaagaagccagagactgaccagatacagccagggcgacgacgacggcagcagcagcagcggcggcagcagcgtggccggcagccagagcaccctgttcaaggacagccccctgagaaccctgaagagaaagagcagcaacatgaagagactgagccccgccccccagctgggccccagcagcgacgcccacaccagctactacagcgagagcctggtgcacgagagctggttcccccccagaagcagcctggaggagctgcacggcgacgccaactggggcgaggacctgagagtgtag

SEQ ID NO: 77774 - DNA, 435 bp, Artificial Sequence
  derived and/or modified sequence
atgagcagaagaagccagagactgaccagatacagccagggcgacgacgacggcagcagcagcagcggcggcagcagcgtggccggcagccagagcaccctgttcaaggacagccccctgagaaccctgaagagaaagagcagcaacatgaagagactgagccccgccccccagctgggccccagcagcgacgcccacaccagctactacagcgagagcctggtgcacgagagctggttcccccccagaagcagcctggaggagctgcacggcgacgccaactggggcgaggacctgagagtgagaagaagaagaggcaccggcggcagcgagagcagcagagccagcggcctggtgggcagaaaggccaccgaggacttcctgggcagcagcagcggctacagcagcgaggacgactacgtgggcagaagatag

SEQ ID NO: 77775 - DNA, 618 bp, Artificial Sequence
  derived and/or modified sequence
atgagcagaagaagccagagactgaccagatacagccagggcgacgacgacggcagcagcagcagcggcggcagcagcgtggccggcagccagagcaccctgttcaaggacagccccctgagaaccctgaagagaaagagcagcaacatgaagagactgagccccgccccccagctgggccccagcagcgacgcccacaccagctactacagcgagagcctggtgcacgagagctggttcccccccagaagcagcctggaggagctgcacggcgacgccaactggggcgaggacctgagagtgagaagaagaagaggcaccggcggcagcgagagcagcagagccagcggcctggtgggcagaaaggccaccgaggacttcctgggcagcagcagcggctacagcagcgaggacgactacgtgggctacagcgacgtggaccagcagagcagcagcagcagactgagaagcgccgtgagcagagccggcagcctgctgtggatggtggccaccagccccggcagactgttcagactgctgtactggtgggccggcaccacctggtacagactgaccaccgccgccagcctgctggacgtgttcgtgctgaccagatag

SEQ ID NO: 77776 - DNA, 2484 bp, Artificial Sequence
  derived and/or modified sequence
atggtggtgcagaagccccacggcaccatggagtacaccgccggcaaccaggacaccctgaacagcatcgccctgaagttcaacatcacccccaacaagctggtggagctgaacaagctgttcacccacaccatcgtgcccggccaggtgctgttcgtgcccgacgccaacagccccagcagcaccctgagactgagcagcagcagccccggcgccaccgtgagccccagcagcagcgacgccgagtacgacaagctgcccgacgccgacctggccagaaaggccctgaagcccatcgagagagtgctgagcagcaccagcgaggaggacgagcccggcgtggtgaagttcctgaagatgaactgcagatacttcaccgacggcaagggcgtggtgggcggcgtgatgatcgtgacccccaacaacatcatgttcgacccccacaagagcgaccccctggtgatcgagaacggctgcgaggagtacggcctgatctgccccatggaggaggtggtgagcatcgccctgtacaacgacatcagccacatgaagatcaaggacgccctgcccagccccggcgagtgggaggacctggccagcgagaaggacatcaaccccttcagcaagttcaagagcatcaacaaggagaagagacagcagaacggcgagaagatcatgaccagcgacagcagacccatcgtgcccctggagaagagcaccggccacacccccaccaagcccagcggcagcagcgtgagcgagaagctgaagaagctggacagcagcagagagaccagccacggcagccccaccgtgaccaagctgagcaaggagcccagcgacaccagcagcgccttcgagagcaccgccaaggagaacttcctgggcgaggacgacgacttcgtggacctggaggagctgagcagccagaccggcggcggcatgcacaagaaggacaccctgaaggagtgcctgagcctggaccccgaggagagaaagaaggccgagagccagatcaacaacagcgccgtggagatgcaggtgcagagcgccctggccttcctgggcaccgagaacgacgtggagctgaagggcgccctggacctggagacctgcgagaagcaggacatcatgcccgaggtggacaagcagagcggcagccccgagagcagagtggagaacaccctgaacatccacgaggacctggacaaggtgaagctgatcgagtactacctgaccaagaacaaggagggcccccaggtgagcgagaacctgcagaagaccgagctgagcgacggcaagagcatcgagcccggcggcatcgacatcaccctgagcagcagcctgagccaggccggcgaccccatcaccgagggcaacaaggagcccgacaagacctgggtgaagaagggcgagcccctgcccgtgaagctgaacagcagcaccgaggccaacgtgatcaaggaggccctggacagcagcctggagagcaccctggacaacagctgccagggcgcccagatggacaacaagagcgaggtgcagctgtggctgctgaagagaatccaggtgcccatcgaggacatcctgcccagcaaggaggagaagagcaagaccccccccatgttcctgtgcatcaaggtgggcaagcccatgagaaagagcttcgccacccacaccgccgccatggtgcagcagtacggcaagagaagaaagcagcccgagtactggttcgccgtgcccagagagagagtggaccacctgtacaccttcttcgtgcagtggagccccgacgtgtacggcaaggacgccaaggagcagggcttcgtggtggtggagaaggaggagctgaacatgatcgacaacttcttcagcgagcccaccaccaagagctgggagatcatcaccgtggaggaggccaagagaagaaagagcacctgcagctactacgaggacgaggacgaggaggtgctgcccgtgctgagaccccacagcgccctgctggagaacatgcacatcgagcagctggccagaagactgcccgccagagtgcagggctacccctggagactggcctacagcaccctggagcacggcaccagcctgaagaccctgtacagaaagagcgccagcctggacagccccgtgctgctggtgatcaaggacatggacaaccagatcttcggcgcctacgccacccaccccttcaagttcagcgaccactactacggcaccggcgagaccttcctgtacaccttcagcccccacttcaaggtgttcaagtggagcggcgagaacagctacttcatcaacggcgacatcagcagcctggagctgggcggcggcggcggcagattcggcctgtggctggacgccgacctgtaccacggcagaagcaacagctgcagcaccttcaacaacgacatcctgagcaagaaggaggacttcatcgtgcaggacctggaggtgtgggccttcgactag

SEQ ID NO: 77777 - DNA, 552 bp, Artificial Sequence
  derived and/or modified sequence
atgggagccgcacatagtgtgtgggaagtggatcacctatataccttctttgtgcagtggtcaccggatgtttacggcaaagacgcaaaagagcaggggtttgtggtggtggagaaagaggagcttaatatgatagataatttttttagcgagccgaccaccaaatcgtgggaaataatcacggtggaggaagccaaaaggcgcaagtcaacctgtagctattatgaggacgaggatgaggaggtgcttcccgtgctccgtccccattctgccttgctcgagaacatgcacattgaacagctcgcacggcgcctacccgcccgtgtacagggctatccctggcgtctggcctactccacgctggaacatgggacatccctgaagacgttataccggaagagcgcatccctggacagtccggtgctcctggttatcaaggatatggacaatcagattttcggtgcctatgctacccacccatttaagtttagtgatcattactacggaaccggagagacttttctgtatacgttttcgccacactttaaatag

SEQ ID NO: 77778 - DNA, 1323 bp, Artificial Sequence
  derived and/or modified sequence
gacgctgatctcgctcggaaggctctgaaaccaattgaacgggtgttgagttcgacctcggaggaggacgagcccggtgtggtgaagtttttgaaaatgaattgccggtacttcacagacgggaagggtgtcgtgggaggcgtgatgattgtgaccccgaacaatatcatgttcgatccccacaagtccgatcctttggttatagagaatggctgtgaagaatacggacttatatgtcctatggaggaagtcgtctcgattgccctgtataatgatatttcgcacatgaaaatcaaagacgccctgccttcacccggtgagtgggaggaccttgcctctgagaaggacattaatcccttctctaagtttaagtccatcaataaggaaaaaagacaacagaatggcgaaaagatcatgacgtccgactcaaggccgatcgtccccctcgagaaaagtacaggccatactcctaccaagccctccggttcaagcgtgtccgagaaactcaagaagttagactcctctagggagacgtcccacggatcaccaacagtgacaaagctgtccaaggagccatctgacaccagctcagcctttgaatccaccgccaaggagaatttcttaggcgaggatgacgattttgtggacctggaggaattgagttctcaaacaggtggcggcatgcataagaaggacacgctcaaggagtgtctgagtttagacccagaagaacgcaaaaaggccgagtctcagatcaataacagcgcagtggaaatgcaggtccaatctgccctggccttcctgggaacggagaatgatgttgaactaaagggagctctggatcttgagacatgcgaaaagcaggacattatgccggaagtggacaagcaatctggttccccagagtccagggtggagaacaccttgaatatacacgaggaccttgacaaagtgaagcttatcgaatactatctgacaaagaacaaggaaggccctcaagtgagcgaaaacctccaaaaaacagaattatctgatggaaagtccattgaaccggggggtattgatattaccctctcttcatcactcagccaggccggcgaccctatcactgaaggcaataaggaaccagacaaaacgtgggtaaaaaaaggggaaccactacccgtgaagctcaattcctcgactgaggcaaatgttatcaaggaagccctagattcatcattagagagtacactggataatagctgtcagggtgctcagatggacaataaatctgaagtgcagctgtggttactcaagagaatccaggttccgattgagtag

SEQ ID NO: 77779 - DNA, 552 bp, Artificial Sequence
  derived and/or modified sequence
atgggggccgctcattccgtttgggaggtggatcatctatatacgttctttgtacagtggtctccagatgtgtacggtaaggatgccaaggaacagggattcgtagtcgtcgagaaggaagaacttaacatgattgataacttctttagtgaacccacgacaaaatcatgggaaattattaccgttgaggaagccaagagaagaaagtctacatgcagttattacgaggacgaagatgaggaggtgctacccgtgctgcggcctcactcggcattgttggagaatatgcacattgaacagctagcacgaagactgcccgccagggtgcagggctatccttggagattagcctactccaccctagagcacggtacatcccttaaaaccctctatcggaagtccgctagtctggatagccccgtcttactggtgatcaaagatatggataatcaaatctttggcgcatatgccacacatccatttaagttctccgatcactactatgggaccggtgagaccttcctatatacatttagcccccatttcaaatag

SEQ ID NO: 77780 - DNA, 2484 bp, Artificial Sequence
  derived and/or modified sequence
atggtagtgcaaaagcctcacggtacaatggaatatacagccggcaaccaggacaccctgaactctattgctctcaagtttaacatcacgcccaataaactcgtggaactcaacaaactcttcacccatactatcgtgcccggccaggtgctcttcgtacccgacgccaattccccctcatcgacactgagactatctagtagttcccccggcgcgactgtctcgccctcgagctccgatgcggagtacgataagctccctgacgccgatctcgccagaaaggccctgaaacctatcgagcgcgtgctttcaagcactagcgaggaggatgaacctggagtcgtaaaattccttaagatgaattgtcgctattttaccgatggcaaaggggtggtaggcggagtgatgatcgtaactcccaacaacatcatgtttgaccctcacaagagcgatcccctcgttatagaaaatgggtgcgaggagtacggtctcatttgtcctatggaggaggtggtgtccatcgctttatacaatgatatcagtcacatgaagatcaaagatgctctgcccagtcctggcgaatgggaagatctggcgtccgagaaggatatcaaccctttcagcaagtttaagtccatcaataaagaaaaaaggcagcagaacggtgaaaaaataatgacatctgatagccggcccatcgtaccactagaaaaatcaacaggacacacacctactaaaccttccggctcatccgtgtccgaaaagctaaaaaaactggattcgagtagggaaacatcccatggctccccaaccgtgactaagctgagtaaggagccatccgataccagtagcgctttcgaatctacagcaaaggaaaacttcctgggcgaagatgacgacttcgtggacttggaggaattaagctctcaaaccggcggcgggatgcacaagaaggacaccctaaaggaatgtctcagcctggaccccgaggaaagaaagaaagcagaatcccagataaacaactctgccgtggaaatgcaggtgcaatctgccctggcctttctggggaccgaaaatgacgtagaattgaagggcgccctggacctggaaacatgcgaaaagcaggacatcatgcctgaagtggacaaacagtccggatcacccgagtcccgggtggagaataccttgaacatccatgaggatctggacaaggtgaagttgatcgaatactacctaactaagaacaaggaaggcccacaggtgtccgaaaacctccagaagaccgaactgtctgacgggaaaagcattgaacccggtggtatagatatcacactctcttctagtctctctcaggcaggggaccctataacagaggggaataaggaaccagacaagacatgggttaaaaaaggggaacccctgcctgttaagctcaattctagtacagaggccaacgtcataaaggaagcccttgatagctccctggagtcaaccctggataactcatgccaaggcgcccagatggataataagtccgaagtccagctctggctcttaaaacgcatccaggtgccgattgaggacatacttccatccaaagaagaaaagagcaagacacctcctatgtttctgtgcattaaagtgggaaaaccaatgcggaagtcttttgctacgcataccgccgcaatggtgcagcagtatggaaagcgaaggaaacaaccagaatactggttcgccgtgccacgcgagagagttgatcacctgtataccttcttcgttcaatggtcccctgacgtgtatgggaaggacgcgaaagaacaaggattcgtcgtggtggagaaagaagagctcaatatgattgacaacttttttagcgaacctacaaccaaaagttgggagataattaccgttgaagaagcaaagagaaggaagtcaacgtgctcatattatgaggacgaagatgaggaggtcttgccagtgctaaggccgcattcagctctacttgagaatatgcatattgagcagctcgcacgtagactgcccgcccgggtgcagggctacccatggaggctggcctattccactttagagcacgggacctccctgaagactctgtaccggaaatcagcatcactggactcgccagtactcctagtgatcaaggacatggacaaccaaatttttggcgcatacgctactcatcctttcaagttctctgatcactactatggcacgggagaaacatttctgtacacattctcacctcactttaaagttttcaaatggagtggggagaattcttatttcatcaacggcgatattagttccctggagttgggcggtggggggggccggtttgggttatggttggacgcagacctgtaccatgggcgctccaatagctgcagcacttttaacaatgacattctctccaaaaaggaggattttatcgtgcaggatctggaagtctgggcttttgactag

SEQ ID NO: 77781 - DNA, 552 bp, Artificial Sequence
  derived and/or modified sequence
atgggcgccgcccacagcgtgtgggaggtggaccacctgtacaccttctttgtgcagtggagcccagatgtgtatggcaaggatgccaaggagcagggctttgtggtggtggagaaggaggagctgaacatgattgacaacttcttcagcgagcccaccaccaagtcctgggagatcatcaccgtggaggaggccaagaggaggaagagcacctgcagctactatgaagatgaagatgaggaggtgctgcctgtgctgcggccccacagcgccctgctggagaacatgcacatcgagcagctggcccggcggctgcctgcccgggtgcagggctacccctggaggctggcctacagcaccctggagcacggcaccagcctgaagaccctgtacaggaagagcgccagcctggacagccctgtgctgctggtgatcaaggacatggacaaccagatctttggagcctatgccacccaccccttcaagttcagtgaccactactacggcaccggggagaccttcctgtacaccttcagcccccacttcaagtag

SEQ ID NO: 77782 - DNA, 1323 bp, Artificial Sequence
  derived and/or modified sequence
gatgctgacctggccaggaaggccctgaagcccatcgagcgggtgctgagcagcaccagcgaggaggatgagcccggggtggtgaagttcctgaagatgaactgccgctacttcacagatggcaagggcgtggtgggcggcgtgatgattgtgacccccaacaacatcatgtttgacccccacaagagtgaccccctggtgattgaaaatggctgtgaggagtatggcctcatctgccccatggaggaggtggtgtccatcgccctgtacaatgacatcagccacatgaagatcaaggatgccctgcccagccctggagagtgggaggacctggccagcgagaaggacatcaaccccttcagcaagttcaagagcatcaacaaggagaagaggcagcagaatggagagaagatcatgaccagtgacagccggcccatcgtgcccctggagaagagcacaggccacacccccaccaagcccagcggcagctctgtgtctgagaagctgaagaagctggacagcagccgggagaccagccacggcagccccaccgtgaccaagctgagcaaggagcccagcgacaccagcagcgcctttgagagcacagccaaggagaacttcctgggggaggatgatgactttgtggacctggaggagctgagcagccagacaggaggcggcatgcacaagaaggacaccctgaaggagtgcctgagcctggaccctgaggagaggaagaaggccgagagccagatcaacaacagcgctgtggagatgcaggtgcagagcgccctggccttcctgggcacagaaaatgatgtggagctgaagggggccctggacctggagacctgtgagaagcaggacatcatgcctgaggtggacaagcagagcggcagccctgagagccgggtggagaacaccctgaacatccacgaggacctggacaaggtgaagctgattgagtactacctgaccaagaacaaggagggcccccaggtgtctgagaacctgcagaagacagagctgagtgatggcaagagcattgagcccggcggcatcgacatcaccctgagcagcagcctgagccaggccggggaccccatcacagagggcaacaaggagccagacaagacctgggtgaagaagggggagcccctgcctgtgaagctgaacagcagcacagaggccaacgtcatcaaggaggccctggacagcagcctggagagcaccctggacaacagctgccagggcgcccagatggacaacaagtctgaggtgcagctgtggctgctgaagaggatccaggtgcccattgaatag

SEQ ID NO: 77783 - DNA, 2484 bp, Artificial Sequence
  derived and/or modified sequence
atggtggtgcagaagccccacggcaccatggagtacacagctggcaaccaggacaccctgaacagcatcgccctgaagttcaacatcacccccaacaagctggtggagctgaacaagctgttcacccacaccatcgtgcccggccaggtgctgtttgtgcctgatgccaacagccccagcagcaccctgcggctgagcagcagcagccctggggccaccgtgagccccagcagcagtgatgctgaatatgacaagctgcctgatgctgacctggccaggaaggccctgaagcccatcgagcgggtgctgagcagcaccagtgaagaagatgagcccggggtggtgaagttcctgaagatgaactgccgctacttcacagatggaaaaggagtggtgggcggcgtgatgattgtgacccccaacaacatcatgtttgacccccacaagagtgaccccctggtgattgaaaatggctgtgaggagtatggcctcatctgccccatggaggaggtggtgtccatcgccctgtacaatgacatcagccacatgaagatcaaggatgccctgcccagccctggagagtgggaggacctggccagcgagaaggacatcaaccccttcagcaagttcaagagcatcaacaaggagaagaggcagcagaatggagagaagatcatgaccagtgacagccggcccatcgtgcccctggagaagagcacaggccacacccccaccaagcccagcggcagctctgtgtctgagaagctgaagaagctggacagcagccgggagaccagccacggcagccccaccgtgaccaagctgagcaaggagcccagcgacaccagcagcgcctttgagagcacagccaaggagaacttcctgggagaagatgatgactttgtggacctggaggagctgagcagccagacaggaggcggcatgcacaagaaggacaccctgaaggaatgtctgagcctggaccctgaggagaggaagaaggccgagagccagatcaacaacagcgctgtggagatgcaggtgcagagcgccctggccttcctgggcacagaaaatgatgtggagctgaagggggccctggacctggagacctgtgagaagcaggacatcatgcctgaggtggacaagcagagcggcagccctgagagccgggtggagaacaccctgaacatccacgaggacctggacaaggtgaagctgattgagtactacctgaccaagaacaaggagggcccccaggtgtctgagaacctgcagaagacagagctgagtgatggcaagagcattgagcccggcggcatcgacatcaccctgagcagcagcctgagccaggccggggaccccatcacagagggcaacaaggagccagacaagacctgggtgaagaagggggagcccctgcctgtgaagctgaacagcagcacagaggccaacgtcatcaaggaggccctggacagcagcctggagagcaccctggacaacagctgccagggcgcccagatggacaacaagtctgaggtgcagctgtggctgctgaagaggatccaggtgcccatcgaggacatcctgcccagcaaggaggagaagagcaagaccccacccatgttcctgtgcatcaaggtgggcaagcccatgaggaagagctttgccacccacacagctgccatggtgcagcagtatggcaagaggaggaagcagcctgagtactggtttgctgtgccccgggagcgggtggaccacctgtacaccttctttgtgcagtggagcccagatgtgtatggcaaggatgccaaggagcagggctttgtggtggtggagaaggaggagctgaacatgattgacaacttcttcagcgagcccaccaccaagtcctgggagatcatcaccgtggaggaggccaagaggaggaagagcacctgcagctactatgaagatgaagatgaggaggtgctgcctgtgctgcggccccacagcgccctgctggagaacatgcacatcgagcagctggcccggcggctgcctgcccgggtgcagggctacccctggaggctggcctacagcaccctggagcacggcaccagcctgaagaccctgtacaggaagagcgccagcctggacagccctgtgctgctggtgatcaaggacatggacaaccagatctttggagcctatgccacccaccccttcaagttcagtgaccactactatggaactggagagaccttcctgtacaccttcagcccccacttcaaggtgttcaagtggagcggagaaaattcctacttcatcaatggagacatcagcagcctggagctgggcggcggcggcggccgcttcggcctgtggctggatgctgacctgtaccacggccgcagcaacagctgcagcaccttcaacaatgacatcctgagcaagaaggaggacttcatcgtgcaggacctggaggtgtgggcctttgattag

SEQ ID NO: 77784 - DNA, 552 bp, Artificial Sequence
  derived and/or modified sequence
atgggcgccgcccacagcgtgtgggaggtggaccacctgtacaccttttttgtgcaatggtccccagacgtttacggtaaggacgcaaaggaacagggctttgtggttgtggagaaggaggagttgaatatgatagataattttttctctgagcccacaacaaaatcctgggagatcatcaccgtggaggaggctaagcgcaggaagagtacctgctcatattacgaagatgaggacgaggaagtgttacccgtgctgcgtccacatagtgcactgcttgaaaatatgcatattgagcagctcgcccggcggctgcccgctcgggtgcagggctacccatggcgcctggcctattctaccctggagcacggtacctcactgaagacactgtaccgaaagtctgcttcactggacagtcctgtgcttctggtcataaaggacatggataatcaaatcttcggtgcctacgcaacacatccattcaaattctctgaccattattacgggaccggcgagacgtttctttatactttcagcccacattttaagtag

SEQ ID NO: 77785 - DNA, 1323 bp, Artificial Sequence
  derived and/or modified sequence
gacgccgacctggcccggaaggccctgaagcccatcgagcgggtgctctcatctacatccgaagaggatgagccaggcgtggttaaatttctcaagatgaactgcaggtactttactgacggcaagggagtggtcggcggagtgatgatcgtgacacctaacaacatcatgttcgatccacacaaatccgatcccctggtgatcgaaaatggctgcgaggagtatggattgatctgtcctatggaagaagtggtctccattgcgctttacaatgacatcagccacatgaagataaaggatgcactgccaagccctggggaatgggaggacctcgccagtgagaaagacattaatccgttctcaaagttcaagtctatcaacaaggagaagagacagcaaaacggcgagaagattatgacttccgattcccggcccattgtccccctagaaaaaagcacaggtcatacacccaccaagccttctggaagtagtgtttccgagaagttgaagaaattggactcatcccgcgagacgagtcatggctcccctactgtgaccaagctatccaaggagccatctgatacaagtagcgccttcgagagcactgccaaggaaaactttctgggcgaagacgacgattttgttgatctggaggagctatccagccagactggcggcgggatgcataaaaaagataccctaaaagagtgtttgtctctagaccctgaggagcggaaaaaggccgaatcacagatcaacaattccgccgtagagatgcaggtccaatccgcactggccttccttggcaccgaaaatgatgtagagctgaagggggctctggacctggaaacgtgcgagaagcaggacatcatgcccgaagtggacaaacagagcggcagccccgagtcacgcgtggaaaatactctgaatatccatgaggatctggataaggtgaaactaatcgagtactatctcacaaagaataaagaaggcccacaggtaagcgagaatctccaaaagactgaactcagtgacggaaaaagcatcgagcctgggggcattgacataacattgtcgtccagtttgtcccaggccggcgatcctatcacagaaggcaataaggagcccgacaagacatgggtcaagaagggtgaaccactaccggtgaaactaaattctagtacagaggctaatgtaattaaggaggccctagattctagcctggaaagtacactggataactcctgccagggcgcccaaatggacaacaaaagcgaggtacagctctggctactgaagcgtatccaagtgcctatagaatag

SEQ ID NO: 77786 - DNA, 552 bp, Artificial Sequence
  derived and/or modified sequence
atgggcgccgcccacagcgtgtgggaggtggaccacctgtacaccttcttcgtacagtggtcgccagatgtgtacggcaaggacgccaaagagcaagggtttgtggtggtggaaaaggaggaactgaacatgattgacaacttcttttccgaacccactacgaagtcgtgggaaattatcaccgtggaggaggcaaagaggcggaagtcgacttgctcttattatgaggatgaagacgaggaggtacttccggtactgagaccccacagtgccctgttggaaaacatgcacatcgaacagctggctcgccgtctgcccgcccgtgtgcaaggttacccctggcgcctcgcctatagcacactggagcacggtacctccctgaagacgctgtatcgaaaaagtgctagcctcgactctcctgtgctccttgtgatcaaggacatggataatcaaatcttcggcgcgtatgctactcatcccttcaaattttctgaccattactatggaaccggagagaccttcctatacaccttttccccccacttcaagtag

SEQ ID NO: 77787 - DNA, 3108 bp, Artificial Sequence
  derived and/or modified sequence
atgggtgctgcacacagtgtttgggaggtggatcatttgtacacattctttgttcagtggtctcccgatgtctatggaaaagatgccaaagagcaaggctttgtggtggtggagaaggaagaactgaacatgattgacaacttcttcagtgagccaacaaccaagagctgggagatcatcactgttgaagaggcaaagcgcaggaagagcacatgcagctactatgaagacgaggacgaagaggtgctgcctgtcctacggccccacagcgcgctcctggagaatatgcacatcgagcagctggcccgacgccttcctgcaagggtgcaagggtatccatggagactggcctatagcacgttagagcacgggaccagcttaaagacgctctaccggaaatcggcatcactagacagtcctgtcctattggtcatcaaagatatggataatcagatttttggagcatatgcaactcatcctttcaagttcagtgaccactattatggcacaggcgaaacttttctctacacattcagccctcattttaaggtctttaagtggagtggagaaaattcatactttatcaatggagacataagttctttagaacttggtggtggagggggacgatttggtttatggctagatgctgatttataccacggacgaagcaactcttgcagcactttcaataatgatattctttccaaaaaggaagacttcatagttcaggatctggaggtgtgggcatttgattgaaattcagactgccttaaaatataacattaaaaagactgggttcgatcagccctcctaaagctggctggaaaaagaagccccagcccagcctgcctcatcccaccccaatgcttcctttctgccatcatctcagagcatgatcacattgcagaaagattctggaaggtccatgtagagggcagacattgaagaaagaaacttaaaatccaggttgttgaaaagactttgtactcccacttcctccaaatccatacagtgaggaatcagagtgtttatagatatatgagttgaatgcaatttttatttttggtaactgtgaaaaataagatactgtggatatatacatgccttgtgtatttatcagcataattttcattaccaaaatgtacagctattatttgccatggaaaaggttagtctcatttagaaaaatcgaaagtgcacagcacttaaagggaatatatgaggtttttttttttttaaaaaaaaacttttatttattatttgtagtatattgtctgaaatgtgtcggcagttttttttcttttaatgtgtcaaatcttgaaatattaaatgtatacattttgtgctatgttttgggaacaaatctgtttgatttatatagttttatattgaattttttttgccctgattgtttagggtgataggtcttaagcagcatatatctatatatctgtatgtgggtatatagagatatatgtgtgtgtgtatgtatatgtacatatacatatatatgagtgtataattctaaatttctaaaaactcattatgaatgttcatcaatttgactattataggccagctttccatttagtcaataaaagcgtacatttttagttacttaccttgaacatattcgtgtgaaaaagaatacatcatttctcacagtcttaagttgatatttatagaaatgaatacctttgtgaacctagacttagaacaaatcctgcttttgaaaaaaaatgttttgcttcttacaaaatcatttgtgttaataacaaaaactttattttcggagtgttctttgtataacttttccaagcttttacattaacgagcaggcctctgtcttaaaagggactcagtatattaatttctgcattttttaaatcaaatgaaaaacgtcaaattggaccaattgtcttggtttcttgattcatttatttgagaaaaaaacaatacaaagaaatgcattcatatcaaaattggaatagaaaggaaaacctatttttaagatatcaacctattttcacatcataaaacatctattacataaaataaaggtccaggcatagtggctcttgcctgtaatcccagcactttgggaggccgaggcaggtggatcactcaaggtcacaagtttgagaccagtctggccaacatggtgaaaccccatctctactaaaagtacaaatattagccgactatgtggcgggcacctgtaatcccacctactcgggaggctgaggcaggagaattgcttgaatccgggaagcagaggttgtagtgagccaagatcgtgccactgcactctatcctgggtaacagcgagactctgtcttaaaaataataacaataataataataataaagacttacttaaccaatattattgattaccagacttttatgaaagccaaagactgcttgctagtaggaaaaaatttcaaataataaccaaagctgaaaaatggtctgtcataaattatttccccggtaatttttgaaaggaaaaatgtataacaagtactatttacatatctgcatttaaaaaagcaattcttagaatacttcctttacattattctcctattttagacattttgtgaaagagaacaaattgtccagtggcctcctgtcagatcaacaattattatactccttaattccatgcaaatttaaatgaatgctataaaattttaaatctgtagcctgggtgtacgtttcactcaagttctcctactgaggactcttgactaacagcatactggcagtttcaccttaacctgctcgttaaataatgtgttggtgtgagatatcaggaatgtctcatgatatcacgtttaccatttacaccatctgcaaccatatgctattaataaaatggaaaaaaacaaaatggtcattttgcatatacttcactctgacctagtttagtccatgatactataattgtgagagcatatccagatgctgtgttctctatgtaaaacagtattgtccattcagaaatgtgtgacccttcatttatggatattgactatatgtaatgcagtgctatcccaatattttcaataaaggactttatgcattcagtgattttctttc

SEQ ID NO: 77788 - DNA, 1321 bp, Artificial Sequence
  derived and/or modified sequence
gatgctgacttagcacgaaaggccttgaaacccattgaaagagtcttatcgtctacttctgaagaagatgagccaggtgtggtgaaatttttaaaaatgaattgtcgatacttcaccgatggaaagggtgtggttggcggtgttatgatagtgactcctaacaacatcatgtttgaccctcataaatctgatcctctggttattgaaaatgggtgtgaggagtatggtctcatctgccccatggaagaggttgtttccattgcgctctacaatgacatttctcacatgaagatcaaagatgccttgccatcgcctggagaatgggaagacctggcttcagaaaaggatatcaacccattcagtaagttcaaatctatcaacaaggaaaaacgacagcagaatggagagaaaattatgacttcggattccagaccaatagtacctttggagaagtccacaggacatacacctacaaagccctcaggcagctctgtgtcagagaaattaaagaaactggactcctctagggagacatcccatggttctcccacagtgactaagctcagcaaggaaccttccgacacttcttctgcatttgaatctacagccaaagaaaactttctaggggaagatgatgattttgttgacttggaagaactttcttctcaaactggtggtggaatgcacaaaaaagacaccttgaaggagtgcctttctcttgacccagaggaacgaaagaaagctgagtcacaaataaacaattctgccgtggaaatgcaggtgcagtcagccctagcctttttgggaacagagaatgatgttgaactgaagggggcgctagatttagaaacctgtgagaagcaagatataatgccagaagtggacaagcagtctggttcgccagaaagccgagtagaaaacacactgaacatacatgaagatttagataaagttaaactcattgaatattacctgactaagaacaaagaagggccacaggtatctgaaaatttgcagaaaacagaattaagtgatggaaaaagtattgaaccagggggaatagacattacccttagtagttctctttcccaggcgggtgatcccataactgagggcaataaagagccagataagacctgggtgaaaaagggagagcccctcccggtaaaactgaactcttctacagaagcaaatgtgattaaagaggctctagactcctctttggaatctactctggacaacagctgtcaaggtgcacaaatggataataaatctgaagttcagttgtggctgttaaagagaattcaggtacccattgaag

SEQ ID NO: 77789 - DNA, 636 bp, Artificial Sequence
  derived and/or modified sequence
tgctttctggtggcggagcaagcttggagacaagtagctttggagaatagctgagggtccatttccactgcagactaatccctgccaatgggtgctgcacacagtgtttgggaggtggatcatttgtacacattctttgttcagtggtctcccgatgtctatggaaaagatgccaaagagcaaggctttgtggtggtggagaaggaagaactgaacatgattgacaacttcttcagtgagccaacaaccaagagctgggagatcatcactgttgaagaggcaaagcgcaggaagagcacatgcagctactatgaagacgaggacgaagaggtgctgcctgtcctacggccccacagcgcgctcctggagaatatgcacatcgagcagctggcccgacgccttcctgcaagggtgcaagggtatccatggagactggcctatagcacgttagagcacgggaccagcttaaagacgctctaccggaaatcggcatcactagacagtcctgtcctattggtcatcaaagatatggataatcagatttttggagcatatgcaactcatcctttcaagttcagtgaccactattatggcacaggcgaaacttttctctacacattcagccctcattttaag

SEQ ID NO: 77790 - DNA, 2484 bp, Artificial Sequence
  derived and/or modified sequence
atggtggtgcagaagccccacggcaccatggagtacaccgccggcaaccaggacacattgaattccattgccctgaaattcaatatcacccctaacaaactggtggagctcaataaactgtttacccataccattgtcccgggccaggtgctgttcgtgcctgacgccaatagtcctagtagcacgctgaggctgagttccagctcacctggagccaccgtttcccccagcagctctgacgccgaatacgataagctccctgacgcagacctggcccggaaggccctgaagcctattgaacgtgtcctgagtagtacatcagaggaagacgagccgggggtggttaagttcttaaagatgaactgccggtacttcaccgacgggaagggggtggttggaggcgttatgattgtgactcctaataacatcatgttcgatccacacaagagcgatccactcgtcattgagaacgggtgcgaggaatacggcctgatttgccccatggaggaagtggtgtcaatcgccctatacaacgacatctctcatatgaagattaaggacgctctgccttcccccggggaatgggaagacctggccagcgagaaggatataaatcccttttccaagtttaagagtattaataaagagaagaggcagcagaacggagaaaagattatgacgagcgacagccgccccatagtgcccctggaaaagtccacaggccacacaccaacaaaaccctcaggtagctccgttagcgagaagttgaagaaattggacagctcacgggagacgagtcacggatcacctacagtgactaaactgagcaaggaaccttcggataccagtagcgcctttgaatcaaccgcaaaggagaacttcctcggggaagacgacgactttgtcgacctggaagaactgtcctctcaaacaggaggtggaatgcacaagaaggacactctgaaggagtgcctgtcactcgatccggaggagcggaaaaaagccgagagtcagattaacaacagtgccgtggagatgcaggtgcagtccgcccttgccttcctggggaccgaaaacgatgtggaactaaaaggggccctagaccttgagacttgcgagaagcaggacatcatgcccgaagtggacaaacagtccggtagccccgagagccgcgtagaaaacacattgaacatccacgaggatctcgataaagtgaaactcatcgagtattacctaaccaagaacaaggaaggccctcaggtcagcgagaacctgcagaaaaccgaactgtccgacggtaagtctatcgaacctggcggtatcgacattactttatcgagcagcctttcccaggccggcgatcccatcacagaaggcaacaaggaacctgacaagacctgggtgaaaaagggcgaacctctacccgtgaaactgaatagttcaaccgaggctaacgtgataaaggaagccctcgactcgtctcttgaaagtaccttggataattcttgtcaaggcgcccagatggacaacaaaagcgaagtgcagctctggctgcttaagcgaattcaggtgcccatcgaggatatcttgccctctaaggaggagaagtctaagacccccccaatgtttctatgcatcaaggtgggaaagcccatgaggaagtcctttgcaacccacaccgccgctatggtccaacaatatggtaagcgaagaaagcagccagaatattggtttgctgtaccccgggaacgcgtcgaccacttgtacaccttctttgtccagtggtcaccagatgtatatggaaaggatgccaaggagcaaggcttcgtggtcgtagagaaagaggagttgaatatgatcgataacttcttctctgaacctaccaccaagtcctgggagatcatcaccgtggaggaggctaagcgccggaagagtacctgttcttactacgaggatgaggacgaggaggtactgccagtactgaggccacattcggccttgttggagaacatgcatattgagcagctcgcgcggagactgccagcaagggttcagggatacccctggcggctcgcttattctactctcgagcatgggactagcctgaaaactctctacaggaaatccgcctctctggacagcccagttctattagtaattaaagacatggataaccagattttcggtgcttacgccacacatcctttcaagttcagcgaccattattatggaacaggcgaaacatttctttacaccttctccccacatttcaaggtgtttaaatggagcggagaaaactcttatttcattaatggagacattagtagcctggagctcggtgggggtggaggaagatttggtctctggctggatgccgacctgtatcatgggaggagcaattcctgttcaacattcaataacgatattctcagtaaaaaggaagatttcatcgtccaagatctggaggtgtgggcattcgattag

SEQ ID NO: 77791 - DNA, 552 bp, Artificial Sequence
  derived and/or modified sequence
atgggcgctgcccattccgtttgggaagtggaccacctgtatacgttctttgttcagtggagcccggacgtgtacggaaaagatgctaaagagcaaggatttgtggtagtggaaaaggaggagctgaacatgatcgacaactttttctcagaacccactactaagtcctgggagatcatcactgtggaggaggccaagcgaaggaagagcacttgttcttattacgaggatgaggatgaggaagtccttcctgtgctgcgaccacactctgccctcctggaaaacatgcacatagaacagctggcacgtagattgccggctcgggtgcaaggctatccctggcgactcgcttatagcactctggaacatgggacctcacttaagaccctttataggaaatctgcatccctcgattcgcccgtattgctggtgattaaagatatggataaccaaatcttcggagcttacgcaactcacccctttaagttctccgatcactattacggcaccggcgaaacatttctctacaccttctctcctcatttcaagtag

SEQ ID NO: 77792 - DNA, 1323 bp, Artificial Sequence
  derived and/or modified sequence
gacgctgatttagcgagaaaggcactcaagccaattgaacgggttctgagctccacttctgaggaagacgagcccggagtggttaagtttctcaaaatgaattgtcgttactttactgacggcaaaggcgttgtgggaggtgtgatgattgtgacgcctaacaacattatgtttgacccacacaaatccgatcccctagttatagaaaacggatgcgaggagtacggactcatctgccccatggaggaagttgtgtctatagcactgtacaacgatatttctcacatgaagatcaaggatgcccttccttcacccggagagtgggaggacctggcttctgaaaaagacattaatccattcagtaagttcaagagtataaacaaagagaagaggcaacagaatggtgaaaaaatcatgaccagcgactctagaccaattgtgcccctggagaagagcaccggccatacccctactaaaccaagtggctcctccgtatccgagaaacttaaaaaattagactcaagccgagaaactagtcatggttcgcccaccgttacaaaactttcgaaagagcctagcgacacgtcctccgcattcgaaagcactgccaaggaaaacttcctgggtgaggacgacgacttcgtggatctggaggaactgtccagtcagacaggcggagggatgcacaaaaaggataccctcaaagagtgcttaagcctggacccagaggagaggaagaaggccgaaagccagatcaacaattcagcggtggaaatgcaagtgcagtcagctctagcctttctcggcacagagaatgatgtggagttgaagggcgctctggatttggagacgtgcgagaagcaggatataatgcccgaggtggataaacagagcggcagtcctgagtcacgagtcgagaataccttgaatatccacgaagacttagataaagttaagctgattgagtactacctcaccaaaaataaggagggaccccaggttagtgagaatctccagaaaacggagctcagcgatgggaagagcatcgaaccaggagggattgacatcaccctgtcctcgtcactttcccaggcaggcgaccctattaccgagggcaacaaagagccagataagacctgggtaaagaagggcgagcctctccctgtgaaactgaactcttcaactgaagccaacgtcatcaaagaggctcttgattcctccctcgaatctaccctggacaacagctgccaaggtgcgcagatggataacaagtctgaagtccagttgtggctgctgaagcggatccaggttcctatcgagtag

SEQ ID NO: 77793 - DNA, 552 bp, Artificial Sequence
  derived and/or modified sequence
atgggcgctgcacatagcgtgtgggaggtggatcacctgtatacatttttcgtgcagtggtcccctgacgtgtatggcaaggacgccaaagagcaggggttcgttgtggtagagaaagaagaactgaacatgattgacaattttttctccgagcctacaacaaaatcttgggagatcataaccgttgaggaagcaaaaaggcgtaagtctacctgtagctattacgaagatgaagatgaggaagttttgcctgtgctgcggcctcactcagcactcctggaaaacatgcacattgagcagcttgcaagacgcctgcccgctcgtgtacagggttacccctggcggctggcttactccaccctcgaacacggtacttcccttaaaaccctgtatcgcaagagtgcgagcctcgattctcccgtattactggtaatcaaggatatggacaatcagatttttggggcatacgctactcatccgttcaagttctccgaccactattatggtacaggagagacttttctgtacacattttccccccactttaaatag

SEQ ID NO: 77794 - DNA, 2484 bp, Artificial Sequence
  derived and/or modified sequence
atggtcgtccagaagccgcatgggaccatggagtatactgctggcaaccaagatacactcaacagcatagcattgaagtttaacattactcctaataaattggtggagctcaataagttattcacgcacacaattgtacccggtcaggtgctttttgtgcctgacgctaacagtccaagctcgacacttcggctgagttcatccagccctggtgcaaccgtttctccatcttctagcgacgcagaatatgataagctcccagacgcagacctagccaggaaggcccttaagccaatcgagagagtcctgtccagtacctctgaagaggacgagcccggagtggtaaagtttctcaagatgaattgtcgctatttcacagatggcaaaggcgtggttgggggagtaatgatagttacaccgaataatataatgttcgacccacacaagtcagaccccttagtaattgaaaacgggtgcgaagagtacggcctgatatgtcctatggaggaggtggtctctatcgcgctctataatgatatcagccatatgaagatcaaggatgcactcccaagccccggagagtgggaagaccttgcgtctgagaaagatattaacccattcagtaagttcaagagcatcaataaggaaaaacgtcagcagaatggagaaaaaattatgacatctgacagtagaccgatcgtgccgctcgagaaatcgacgggacacacacctaccaagccttccgggtcatccgtatccgagaagctgaaaaagctcgacagttctagagagactagccatggctctcccaccgtcacaaaactctcaaaagagccgagcgatacttcatccgcctttgagtcgactgcgaaagagaacttcctgggggaggatgatgatttcgtcgatttggaagagttgagcagccagaccggtgggggaatgcacaaaaaggatacactgaaggaatgcttgtcactcgatccagaagagcgcaagaaggcagagtcccagatcaacaactctgctgtggaaatgcaggtccaaagcgcccttgcattccttggcacagaaaatgatgttgagctgaagggcgcactggatttggaaacttgtgaaaagcaagacattatgccagaggtggacaaacagagcggatcaccagaaagcagagttgaaaacaccctgaacattcatgaggacttagacaaggttaaactcatcgagtactacctcaccaagaacaaggaaggccctcaggtgtccgaaaatctgcagaaaacagagttaagcgatgggaagtccattgagcctggaggcattgatatcacattgtcctcttcactgtcacaggctggcgatccaatcacagagggcaacaaagagccggacaagacctgggtgaagaaaggtgagcccctgcctgtcaagctcaatagctctaccgaggcaaacgttattaaagaagccctggattctagcttggagagtacgctggataactcatgccagggggctcagatggacaataagtccgaggtccagctgtggcttctgaagcggatccaggtgcccatcgaggatatcctccctagcaaagaagagaaatccaagacacccccaatgtttttatgtataaaagtcggtaagcctatgagaaagtcatttgccacccacaccgccgcaatggtgcagcagtacgggaagaggcgaaaacaaccagaatactggtttgcagtgccacgcgagagggtggatcacctttatacatttttcgtccagtggagcccagatgtctacggaaaggatgccaaagagcagggcttcgtcgtggtggagaaagaagaactaaatatgattgacaactttttctccgagcctacgaccaagtcctgggagataatcaccgtagaagaggccaagcgtagaaaaagtacatgtagctattatgaggatgaagatgaagaggtgttacccgtcctgcggcctcatagtgctctcctggagaacatgcacatagagcagctcgccaggcgactccctgctagggtacagggatacccctggcgcctggcatacagcacgctggaacatggcacgagtctaaaaaccctctacagaaaatccgcatcactggatagtccggtcctccttgtgattaaggatatggataaccagatcttcggtgcctatgcaacgcaccctttcaagttctcagaccactactacggtacaggtgagactttcctctacacatttagccctcattttaaggtgttcaagtggtctggagagaactcttactttatcaacggcgatatctcctctttggaactgggcggaggcggaggccgatttggcctctggctcgatgccgacctgtatcatgggagatcaaacagctgctctacatttaacaatgatatcttgagcaaaaaggaggacttcattgttcaggatctggaggtctgggcatttgactag

SEQ ID NO: 77795 - DNA, 552 bp, Artificial Sequence
  derived and/or modified sequence
atgggcgccgcccacagcgtgtgggaggtggaccacctgtacaccttcttcgtgcagtggagccccgacgtgtacggcaaggacgccaaggagcagggcttcgtggtggtggagaaggaggagctgaacatgatcgacaacttcttcagcgagcccaccaccaagagctgggagatcatcaccgtggaggaggccaagagaagaaagagcacctgcagctactacgaggacgaggacgaggaggtgctgcccgtgctgagaccccacagcgccctgctggagaacatgcacatcgagcagctggccagaagactgcccgccagagtgcagggctacccctggagactggcctacagcaccctggagcacggcaccagcctgaagaccctgtacagaaagagcgccagcctggacagccccgtgctgctggtgatcaaggacatggacaaccagatcttcggcgcctacgccacccaccccttcaagttcagcgaccactactacggcaccggcgagaccttcctgtacaccttcagcccccacttcaagtag

SEQ ID NO: 77796 - DNA, 1323 bp, Artificial Sequence
  derived and/or modified sequence
gacgccgacctggccagaaaggccctgaagcccatcgagagagtgctgagcagcaccagcgaggaggacgagcccggcgtggtgaagttcctgaagatgaactgcagatacttcaccgacggcaagggcgtggtgggcggcgtgatgatcgtgacccccaacaacatcatgttcgacccccacaagagcgaccccctggtgatcgagaacggctgcgaggagtacggcctgatctgccccatggaggaggtggtgagcatcgccctgtacaacgacatcagccacatgaagatcaaggacgccctgcccagccccggcgagtgggaggacctggccagcgagaaggacatcaaccccttcagcaagttcaagagcatcaacaaggagaagagacagcagaacggcgagaagatcatgaccagcgacagcagacccatcgtgcccctggagaagagcaccggccacacccccaccaagcccagcggcagcagcgtgagcgagaagctgaagaagctggacagcagcagagagaccagccacggcagccccaccgtgaccaagctgagcaaggagcccagcgacaccagcagcgccttcgagagcaccgccaaggagaacttcctgggcgaggacgacgacttcgtggacctggaggagctgagcagccagaccggcggcggcatgcacaagaaggacaccctgaaggagtgcctgagcctggaccccgaggagagaaagaaggccgagagccagatcaacaacagcgccgtggagatgcaggtgcagagcgccctggccttcctgggcaccgagaacgacgtggagctgaagggcgccctggacctggagacctgcgagaagcaggacatcatgcccgaggtggacaagcagagcggcagccccgagagcagagtggagaacaccctgaacatccacgaggacctggacaaggtgaagctgatcgagtactacctgaccaagaacaaggagggcccccaggtgagcgagaacctgcagaagaccgagctgagcgacggcaagagcatcgagcccggcggcatcgacatcaccctgagcagcagcctgagccaggccggcgaccccatcaccgagggcaacaaggagcccgacaagacctgggtgaagaagggcgagcccctgcccgtgaagctgaacagcagcaccgaggccaacgtgatcaaggaggccctggacagcagcctggagagcaccctggacaacagctgccagggcgcccagatggacaacaagagcgaggtgcagctgtggctgctgaagagaatccaggtgcccatcgagtag

SEQ ID NO: 77797 - protein, 237 aa, Artificial Sequence
  derived and/or modified sequence
  misc_feature (1)..(1): Xaa can be any naturally occurring amino acid
XEKTCSSLEREPHFSLLTMRGQRLPLDIQIFYCARPDEEPFVKIITVEEAKRRKSTCSYYEDEDEEVLPVLRPHSALLENMHIEQLARRLPARVQGYPWRLAYSTLEHGTSLKTLYRKSASLDSPVLLVIKDMDNQIFGAYATHPFKFSDHYYGTGETFLYTFSPHFKVFKWSGENSYFINGDISSLELGGGGGRFGLWLDADLYHGRSNSCSTFNNDILSKKEDFIVQDLEVWAFD

SEQ ID NO: 77798 - protein, 177 aa, Artificial Sequence
  derived and/or modified sequence
  misc_feature (1)..(1): Xaa can be any naturally occurring amino acid
XEKTCSSLEREPHFSLLTMRGQRLPLDIQIFYCARPDEEPFVKIITVEEAKRRKSTCSYYEDEDEEVLPVLRPHSALLENMHIEQLARRLPARVQGYPWRLAYSTLEHGTSLKTLYRKSASLDSPVLLVIKDMDNQIFGAYATHPFKFSDHYYGTGETFLYTFSPHFKGTIWFMARC

SEQ ID NO: 77799 - protein, 190 aa, Artificial Sequence
  derived and/or modified sequence
  misc_feature (1)..(1): Xaa can be any naturally occurring amino acid
XEKTCSSLEREPHFSLLTMRGQRLPLDIQIFYCARPDEEPFVKIITVEEAKRRKSTCSYYEDEDEEVLPVLRPHSALLENMHIEQLARRLPARVQGYPWRLAYSTLEHGTSLKTLYRKSASLDSPVLLVIKDMDNQIFGAYATHPFKFSDHYYGTGETFLYTFSPHFKWSGENSYFINGDISSLELGGGG

SEQ ID NO: 77800 - DNA, 714 bp, Artificial Sequence
  derived and/or modified sequence
taagagaagacttgttctagtctggaaagagagcctcacttcagtttgctcactatgagggggcaaaggctacccctggatattcagatattctactgcgccagaccagacgaagagcctttcgtcaagattatcaccgtcgaagaagcgaaaaggcgaaagtctacctgttcctattacgaagatgaggatgaagaggtgctgccagtacttcgcccgcactctgccctgctagagaacatgcatattgagcagctggcaagaagactgccagcacgagtgcaaggctacccgtggaggttggcttattcaaccctcgaacacggcacttctctaaaaacactttataggaaaagtgcctccttagatagtcccgtcctgctggtgataaaggacatggataatcagatctttggggcgtacgccactcatccttttaagttttctgaccattattacggtacgggcgagaccttcctgtatactttctcaccccacttcaaagtgtttaagtggtccggggagaactcttacttcattaacggagacatctcctctctcgagcttggcgggggaggcgggaggttcggcctgtggctcgacgcagacctgtatcatgggcggtcgaattcttgttcaaccttcaacaatgacatcctgagcaagaaagaggattttatagtccaggatcttgaggtctgggcattcgattag

SEQ ID NO: 77801 - DNA, 534 bp, Artificial Sequence
  derived and/or modified sequence
taagagaagacttgctctagcttggagagggaaccccattttagcttactcacgatgcgcgggcagcgtctcccactcgacattcaaattttttattgcgcaagacccgatgaggagcctttcgtgaaaattatcactgtggaggaagccaaacgacgcaaatccacttgttcttactatgaagacgaagacgaagaagtcctgccagttctgaggcctcacagcgcattgcttgagaacatgcatattgaacagttggcccgacggctccccgcccgcgtgcagggatacccctggcggcttgcatattccacactggaacatggaacaagcctaaaaacactttatcggaaaagcgcctctctagactcccccgtactcctggtgatcaaagatatggataatcagatcttcggcgcatatgccactcacccatttaaattttcagaccactactacgggactggtgagacattcttatacactttctcgccacacttcaaggggactatatggtttatggccagatgttag

SEQ ID NO: 77802 - DNA, 573 bp, Artificial Sequence
  derived and/or modified sequence
taggaaaagacatgctcatctttagagagggaaccccacttcagcctgctgaccatgagaggccagcggctgcccctcgatatacagatcttttactgcgctcgacccgatgaagagccatttgtgaagatcatcacggtcgaggaagccaagaggagaaaatctacatgcagctactatgaggacgaagatgaagaagtgttacccgtcttgagaccacactccgccctgctggaaaacatgcacattgaacagctggcccggcgactgccagccagagtgcagggctacccgtggagactggcctattctactttggagcacggaacctcactcaagaccctgtaccgcaaaagtgcctctctcgattcgcctgtcctgcttgtgataaaggatatggataatcagatctttggcgcttatgcaactcaccccttcaagttctcagaccactactatggtacaggtgaaaccttcctgtatacgttttcaccccacttcaagtggtcaggcgagaatagttatttcatcaacggcgatatctcgagcctggagctgggggggggcggttag

SEQ ID NO: 77803 - DNA, 714 bp, Artificial Sequence
  derived and/or modified sequence
tgagagaagacctgcagcagcctggagcgggagccccacttcagcctgctgaccatgaggggccagaggctgcccctggacatccagatcttctactgtgcccggccagatgaggagccctttgtgaagatcatcaccgtggaggaggccaagaggaggaagagcacctgcagctactatgaagatgaagatgaggaggtgctgcctgtgctgcggccccacagcgccctgctggagaacatgcacatcgagcagctggcccggcggctgcctgcccgggtgcagggctacccctggaggctggcctacagcaccctggagcacggcaccagcctgaagaccctgtacaggaagagcgccagcctggacagccctgtgctgctggtgatcaaggacatggacaaccagatctttggagcctatgccacccaccccttcaagttcagtgaccactactatggaactggagagaccttcctgtacaccttcagcccccacttcaaggtgttcaagtggagcggagaaaattcctacttcatcaatggagacatcagcagcctggagctgggcggcggcggcggccgcttcggcctgtggctggatgctgacctgtaccacggccgcagcaacagctgcagcaccttcaacaatgacatcctgagcaagaaggaggacttcatcgtgcaggacctggaggtgtgggcctttgattag

SEQ ID NO: 77804 - DNA, 534 bp, Artificial Sequence
  derived and/or modified sequence
tgagagaagacctgcagcagcctggagcgggagccccacttcagcctgctgaccatgaggggccagaggctgcccctggacatccagatcttctactgtgcccggccagatgaggagccctttgtgaagatcatcaccgtggaggaggccaagaggaggaagagcacctgcagctactatgaagatgaagatgaggaggtgctgcctgtgctgcggccccacagcgccctgctggagaacatgcacatcgagcagctggcccggcggctgcctgcccgggtgcagggctacccctggaggctggcctacagcaccctggagcacggcaccagcctgaagaccctgtacaggaagagcgccagcctggacagccctgtgctgctggtgatcaaggacatggacaaccagatctttggagcctatgccacccaccccttcaagttcagtgaccactactatggaactggagagaccttcctgtacaccttcagcccccacttcaagggcaccatctggttcatggcccgctgctag

SEQ ID NO: 77805 - DNA, 573 bp, Artificial Sequence
  derived and/or modified sequence
tgagagaagacctgcagcagcctggagcgggagccccacttcagcctgctgaccatgaggggccagaggctgcccctggacatccagatcttctactgtgcccggccagatgaggagccctttgtgaagatcatcaccgtggaggaggccaagaggaggaagagcacctgcagctactatgaagatgaagatgaggaggtgctgcctgtgctgcggccccacagcgccctgctggagaacatgcacatcgagcagctggcccggcggctgcctgcccgggtgcagggctacccctggaggctggcctacagcaccctggagcacggcaccagcctgaagaccctgtacaggaagagcgccagcctggacagccctgtgctgctggtgatcaaggacatggacaaccagatctttggagcctatgccacccaccccttcaagttcagtgaccactactatggaactggagagaccttcctgtacaccttcagcccccacttcaagtggagcggggagaacagctacttcatcaacggggacatcagcagcctggagctgggcggcggcggctag

SEQ ID NO: 77806 - DNA, 714 bp, Artificial Sequence
  derived and/or modified sequence
tgagagaagacctgcagcagcctggagcgggagccccacttcagcttactgaccatgcgaggtcagcggctgcctctagatatccagatcttttactgcgcaaggccagatgaggaacctttcgtcaaaataattacagtggaggaggcaaagaggagaaagtcaacctgcagttactacgaggacgaagacgaagaggtgcttcctgtgttgcgcccccactccgccttgttggagaatatgcatatagaacaacttgcccggcgtctcccagccagggtccaaggttacccatggcggttggcatactctacactggagcacggcacgtccctcaagaccttatacaggaaaagcgccagcctcgattcacccgtccttctcgtgattaaggacatggataaccagatctttggggcatacgcaacacacccctttaaattctccgaccactattacggaacaggcgaaacttttctgtacactttcagcccacatttcaaggtgttcaaatggtccggagaaaacagctactttattaacggagacatctctagtctggagctagggggcggtggtggaaggtttgggctgtggctcgatgctgacttgtatcatggtcggagcaactcctgctctacgtttaacaatgatattctaagcaagaaggaggacttcatcgtccaggacctggaagtgtgggcatttgactag

SEQ ID NO: 77807 - DNA, 534 bp, Artificial Sequence
  derived and/or modified sequence
tgagagaagacctgcagcagcctggagcgggagccccacttcagcctattaactatgcggggccagagactccctctggacatccagatcttttactgcgcgagacccgatgaagagcccttcgtcaagatcataactgtggaggaggccaaacgacgaaagtccacatgcagttactatgaggacgaggatgaggaagtgttgcccgtactgcggccacacagtgctctgcttgagaatatgcacattgaacagttagcccgccgactgcccgctcgtgtacaggggtatccctggagactggcttattctacactggaacacgggacaagcctcaaaacactgtacagaaaaagtgccagccttgactcaccggtgttgttggttataaaggacatggacaatcaaatcttcggggcttacgccactcacccattcaaattcagcgatcactattacggcacaggcgagacctttttgtatactttttctcctcactttaagggcacgatctggtttatggcacgctgctag

SEQ ID NO: 77808 - DNA, 573 bp, Artificial Sequence
  derived and/or modified sequence
tgagagaagacctgcagcagcctggagcgggagccccacttcagcctcttgaccatgcgcgggcagcgactgcccctagatattcagatcttctattgcgcccgacctgacgaagagcccttcgtgaagatcattactgtggaagaagccaagcgcagaaaatccacctgcagttactatgaggatgaggacgaagaagttctgccagtcctgagaccccactctgcacttttggaaaatatgcatatcgagcagctggcacgccgtctgcccgcacgtgtgcagggctatccgtggcgcctcgcttattctacactagagcatggcacttcactgaagaccctgtatcgcaagtccgcttctctcgattctccggtgctgcttgtaataaaagatatggacaatcagatctttggagcatatgcaacccaccccttcaagttctcagatcattattatggaacaggagagacttttctttatacgttctccccccacttcaaatggtccggggaaaacagttactttattaacggggatattagttcattggagctgggcggcggcggttag

SEQ ID NO: 77809 - DNA, 3052 bp, Artificial Sequence
  derived and/or modified sequence
agagaaaacttgttcctcattagagagagagccacacttctcactgctcacaatgagaggccaaagattacccttggacatccagattttctattgtgccagacctgacgaagagccttttgtgaagatcatcactgttgaagaggcaaagcgcaggaagagcacatgcagctactatgaagacgaggacgaagaggtgctgcctgtcctacggccccacagcgcgctcctggagaatatgcacatcgagcagctggcccgacgccttcctgcaagggtgcaagggtatccatggagactggcctatagcacgttagagcacgggaccagcttaaagacgctctaccggaaatcggcatcactagacagtcctgtcctattggtcatcaaagatatggataatcagatttttggagcatatgcaactcatcctttcaagttcagtgaccactattatggcacaggcgaaacttttctctacacattcagccctcattttaaggtctttaagtggagtggagaaaattcatactttatcaatggagacataagttctttagaacttggtggtggagggggacgatttggtttatggctagatgctgatttataccacggacgaagcaactcttgcagcactttcaataatgatattctttccaaaaaggaagacttcatagttcaggatctggaggtgtgggcatttgattgaaattcagactgccttaaaatataacattaaaaagactgggttcgatcagccctcctaaagctggctggaaaaagaagccccagcccagcctgcctcatcccaccccaatgcttcctttctgccatcatctcagagcatgatcacattgcagaaagattctggaaggtccatgtagagggcagacattgaagaaagaaacttaaaatccaggttgttgaaaagactttgtactcccacttcctccaaatccatacagtgaggaatcagagtgtttatagatatatgagttgaatgcaatttttatttttggtaactgtgaaaaataagatactgtggatatatacatgccttgtgtatttatcagcataattttcattaccaaaatgtacagctattatttgccatggaaaaggttagtctcatttagaaaaatcgaaagtgcacagcacttaaagggaatatatgaggtttttttttttttaaaaaaaaacttttatttattatttgtagtatattgtctgaaatgtgtcggcagttttttttcttttaatgtgtcaaatcttgaaatattaaatgtatacattttgtgctatgttttgggaacaaatctgtttgatttatatagttttatattgaattttttttgccctgattgtttagggtgataggtcttaagcagcatatatctatatatctgtatgtgggtatatagagatatatgtgtgtgtgtatgtatatgtacatatacatatatatgagtgtataattctaaatttctaaaaactcattatgaatgttcatcaatttgactattataggccagctttccatttagtcaataaaagcgtacatttttagttacttaccttgaacatattcgtgtgaaaaagaatacatcatttctcacagtcttaagttgatatttatagaaatgaatacctttgtgaacctagacttagaacaaatcctgcttttgaaaaaaaatgttttgcttcttacaaaatcatttgtgttaataacaaaaactttattttcggagtgttctttgtataacttttccaagcttttacattaacgagcaggcctctgtcttaaaagggactcagtatattaatttctgcattttttaaatcaaatgaaaaacgtcaaattggaccaattgtcttggtttcttgattcatttatttgagaaaaaaacaatacaaagaaatgcattcatatcaaaattggaatagaaaggaaaacctatttttaagatatcaacctattttcacatcataaaacatctattacataaaataaaggtccaggcatagtggctcttgcctgtaatcccagcactttgggaggccgaggcaggtggatcactcaaggtcacaagtttgagaccagtctggccaacatggtgaaaccccatctctactaaaagtacaaatattagccgactatgtggcgggcacctgtaatcccacctactcgggaggctgaggcaggagaattgcttgaatccgggaagcagaggttgtagtgagccaagatcgtgccactgcactctatcctgggtaacagcgagactctgtcttaaaaataataacaataataataataataaagacttacttaaccaatattattgattaccagacttttatgaaagccaaagactgcttgctagtaggaaaaaatttcaaataataaccaaagctgaaaaatggtctgtcataaattatttccccggtaatttttgaaaggaaaaatgtataacaagtactatttacatatctgcatttaaaaaagcaattcttagaatacttcctttacattattctcctattttagacattttgtgaaagagaacaaattgtccagtggcctcctgtcagatcaacaattattatactccttaattccatgcaaatttaaatgaatgctataaaattttaaatctgtagcctgggtgtacgtttcactcaagttctcctactgaggactcttgactaacagcatactggcagtttcaccttaacctgctcgttaaataatgtgttggtgtgagatatcaggaatgtctcatgatatcacgtttaccatttacaccatctgcaaccatatgctattaataaaatggaaaaaaacaaaatggtcattttgcatatacttcactctgacctagtttagtccatgatactataattgtgagagcatatccagatgctgtgttctctatgtaaaacagtattgtccattcagaaatgtgtgacccttcatttatggatattgactatatgtaatgcagtgctatcccaatattttcaataaaggactttatgcattcagtga

SEQ ID NO: 77810 - DNA, 2978 bp, Artificial Sequence
  derived and/or modified sequence
agagaaaacttgttcctcattagagagagagccacacttctcactgctcacaatgagaggccaaagattacccttggacatccagattttctattgtgccagacctgacgaagagccttttgtgaagatcatcactgttgaagaggcaaagcgcaggaagagcacatgcagctactatgaagacgaggacgaagaggtgctgcctgtcctacggccccacagcgcgctcctggagaatatgcacatcgagcagctggcccgacgccttcctgcaagggtgcaagggtatccatggagactggcctatagcacgttagagcacgggaccagcttaaagacgctctaccggaaatcggcatcactagacagtcctgtcctattggtcatcaaagatatggataatcagatttttggagcatatgcaactcatcctttcaagttcagtgaccactattatggcacaggcgaaacttttctctacacattcagccctcattttaaggggacgatttggtttatggctagatgctgatttataccacggacgaagcaactcttgcagcactttcaataatgatattctttccaaaaaggaagacttcatagttcaggatctggaggtgtgggcatttgattgaaattcagactgccttaaaatataacattaaaaagactgggttcgatcagccctcctaaagctggctggaaaaagaagccccagcccagcctgcctcatcccaccccaatgcttcctttctgccatcatctcagagcatgatcacattgcagaaagattctggaaggtccatgtagagggcagacattgaagaaagaaacttaaaatccaggttgttgaaaagactttgtactcccacttcctccaaatccatacagtgaggaatcagagtgtttatagatatatgagttgaatgcaatttttatttttggtaactgtgaaaaataagatactgtggatatatacatgccttgtgtatttatcagcataattttcattaccaaaatgtacagctattatttgccatggaaaaggttagtctcatttagaaaaatcgaaagtgcacagcacttaaagggaatatatgaggtttttttttttttaaaaaaaaacttttatttattatttgtagtatattgtctgaaatgtgtcggcagttttttttcttttaatgtgtcaaatcttgaaatattaaatgtatacattttgtgctatgttttgggaacaaatctgtttgatttatatagttttatattgaattttttttgccctgattgtttagggtgataggtcttaagcagcatatatctatatatctgtatgtgggtatatagagatatatgtgtgtgtgtatgtatatgtacatatacatatatatgagtgtataattctaaatttctaaaaactcattatgaatgttcatcaatttgactattataggccagctttccatttagtcaataaaagcgtacatttttagttacttaccttgaacatattcgtgtgaaaaagaatacatcatttctcacagtcttaagttgatatttatagaaatgaatacctttgtgaacctagacttagaacaaatcctgcttttgaaaaaaaatgttttgcttcttacaaaatcatttgtgttaataacaaaaactttattttcggagtgttctttgtataacttttccaagcttttacattaacgagcaggcctctgtcttaaaagggactcagtatattaatttctgcattttttaaatcaaatgaaaaacgtcaaattggaccaattgtcttggtttcttgattcatttatttgagaaaaaaacaatacaaagaaatgcattcatatcaaaattggaatagaaaggaaaacctatttttaagatatcaacctattttcacatcataaaacatctattacataaaataaaggtccaggcatagtggctcttgcctgtaatcccagcactttgggaggccgaggcaggtggatcactcaaggtcacaagtttgagaccagtctggccaacatggtgaaaccccatctctactaaaagtacaaatattagccgactatgtggcgggcacctgtaatcccacctactcgggaggctgaggcaggagaattgcttgaatccgggaagcagaggttgtagtgagccaagatcgtgccactgcactctatcctgggtaacagcgagactctgtcttaaaaataataacaataataataataataaagacttacttaaccaatattattgattaccagacttttatgaaagccaaagactgcttgctagtaggaaaaaatttcaaataataaccaaagctgaaaaatggtctgtcataaattatttccccggtaatttttgaaaggaaaaatgtataacaagtactatttacatatctgcatttaaaaaagcaattcttagaatacttcctttacattattctcctattttagacattttgtgaaagagaacaaattgtccagtggcctcctgtcagatcaacaattattatactccttaattccatgcaaatttaaatgaatgctataaaattttaaatctgtagcctgggtgtacgtttcactcaagttctcctactgaggactcttgactaacagcatactggcagtttcaccttaacctgctcgttaaataatgtgttggtgtgagatatcaggaatgtctcatgatatcacgtttaccatttacaccatctgcaaccatatgctattaataaaatggaaaaaaacaaaatggtcattttgcatatacttcactctgacctagtttagtccatgatactataattgtgagagcatatccagatgctgtgttctctatgtaaaacagtattgtccattcagaaatgtgtgacccttcatttatggatattgactatatgtaatgcagtgctatcccaatattttcaataaaggactttatgcattcagtga

SEQ ID NO: 77811 - DNA, 567 bp, Artificial Sequence
  derived and/or modified sequence
agagaaaacttgttcctcattagagagagagccacacttctcactgctcacaatgagaggccaaagattacccttggacatccagattttctattgtgccagacctgacgaagagccttttgtgaagatcatcactgttgaagaggcaaagcgcaggaagagcacatgcagctactatgaagacgaggacgaagaggtgctgcctgtcctacggccccacagcgcgctcctggagaatatgcacatcgagcagctggcccgacgccttcctgcaagggtgcaagggtatccatggagactggcctatagcacgttagagcacgggaccagcttaaagacgctctaccggaaatcggcatcactagacagtcctgtcctattggtcatcaaagatatggataatcagatttttggagcatatgcaactcatcctttcaagttcagtgaccactattatggcacaggcgaaacttttctctacacattcagccctcattttaagtggagtggagaaaattcatactttatcaatggagacataagttctttagaacttggtggtggagg

SEQ ID NO: 77812 - DNA, 714 bp, Artificial Sequence
  derived and/or modified sequence
tgagagaagacctgttcttcacttgagagggagcctcacttcagcctactaacaatgagagggcagcggctccctttggatatccagattttctattgtgccagacctgacgaggagccgttcgtaaagatcattacagtggaggaagcaaagcggaggaagagcacgtgttcgtactatgaggacgaggatgaggaggtgctgcctgtcctaagaccccactcggccctgctggaaaatatgcacatcgaacagctggccaggcggttgcctgcgcgagtccagggctacccttggcgcctggcttactctactttggaacacggcaccagcctgaagactctttatcgcaaatccgctagtttggattctccggtccttttagtgatcaaggacatggataatcaaatttttggcgcatacgccacacaccccttcaagttctctgatcattactacgggacaggcgagacctttttatacacattcagtcctcactttaaagtgttcaagtggagtggagaaaactcatatttcataaacggcgacatctcctctcttgagctggggggaggagggggacgatttggactctggctggatgctgacctgtaccatggacgcagcaactcctgttcaactttcaacaatgatatattaagcaagaaagaggatttcatagtacaggatctggaagtttgggcatttgattag

SEQ ID NO: 77813 - DNA, 534 bp, Artificial Sequence
  derived and/or modified sequence
taagagaagacatgtagttcacttgagcgtgagcctcacttttccctcctcacaatgcggggtcagcgacttccgctggatatacagattttctactgcgcaagacctgacgaagaacctttcgtgaagatcataacggtggaagaggctaagaggcggaaatcgacctgtagttattacgaagacgaggacgaagaagtgttgccagttctccggcctcattctgctctactggagaatatgcacattgaacagctggctcgcagacttccggctagagttcagggctacccttggcgcttggcctatagtaccctcgaacatggcactagcctcaagaccctctatcgaaaaagcgccagcttggactcccctgttctgcttgtaattaaagacatggacaatcagatcttcggtgcttatgcaacacacccatttaagttctctgaccactactacggaacaggtgagacttttttgtacacctttagtccgcacttcaagggcacgatttggttcatggccagatgctag

SEQ ID NO: 77814 - DNA, 573 bp, Artificial Sequence
  derived and/or modified sequence
taggagaagacctgttccagccttgaacgggagccccacttctctctccttacgatgcggggtcagcggttgccgctggatatccagatcttctactgcgccagacctgacgaagaacccttcgtaaagataatcacagtggaagaggcaaagcgtagaaagtctacctgcagctattacgaggacgaagacgaggaggttttgcccgtcctccgacctcatagcgctctccttgagaacatgcatatcgagcagcttgcaagaaggctccccgctcgagttcaaggatacccatggcgtctggcttactctaccctggagcacggtacctcactcaagaccttgtataggaagtctgcatcacttgactcaccagtgctcctagtgattaaggatatggataatcagatcttcggcgcttacgccacacaccccttcaagttcagcgatcattattacggaaccggagaaacttttctctacacgttttccccgcattttaaatggagtggagaaaattcttacttcatcaacggcgatatttcaagcctagaactcggcggtggcggatag

SEQ ID NO: 77815 - DNA, 714 bp, Artificial Sequence
  derived and/or modified sequence
tgagagaagacctgcagcagcctggagagagagccccacttcagcctgctgaccatgagaggccagagactgcccctggacatccagatcttctactgcgccagacccgacgaggagcccttcgtgaagatcatcaccgtggaggaggccaagagaagaaagagcacctgcagctactacgaggacgaggacgaggaggtgctgcccgtgctgagaccccacagcgccctgctggagaacatgcacatcgagcagctggccagaagactgcccgccagagtgcagggctacccctggagactggcctacagcaccctggagcacggcaccagcctgaagaccctgtacagaaagagcgccagcctggacagccccgtgctgctggtgatcaaggacatggacaaccagatcttcggcgcctacgccacccaccccttcaagttcagcgaccactactacggcaccggcgagaccttcctgtacaccttcagcccccacttcaaggtgttcaagtggagcggcgagaacagctacttcatcaacggcgacatcagcagcctggagctgggcggcggcggcggcagattcggcctgtggctggacgccgacctgtaccacggcagaagcaacagctgcagcaccttcaacaacgacatcctgagcaagaaggaggacttcatcgtgcaggacctggaggtgtgggccttcgactag

SEQ ID NO: 77816 - DNA, 534 bp, Artificial Sequence
  derived and/or modified sequence
tgagagaagacctgcagcagcctggagagagagccccacttcagcctgctgaccatgagaggccagagactgcccctggacatccagatcttctactgcgccagacccgacgaggagcccttcgtgaagatcatcaccgtggaggaggccaagagaagaaagagcacctgcagctactacgaggacgaggacgaggaggtgctgcccgtgctgagaccccacagcgccctgctggagaacatgcacatcgagcagctggccagaagactgcccgccagagtgcagggctacccctggagactggcctacagcaccctggagcacggcaccagcctgaagaccctgtacagaaagagcgccagcctggacagccccgtgctgctggtgatcaaggacatggacaaccagatcttcggcgcctacgccacccaccccttcaagttcagcgaccactactacggcaccggcgagaccttcctgtacaccttcagcccccacttcaagggcaccatctggttcatggccagatgctag

SEQ ID NO: 77817 - DNA, 573 bp, Artificial Sequence
  derived and/or modified sequence
tgagagaagacctgcagcagcctggagagagagccccacttcagcctgctgaccatgagaggccagagactgcccctggacatccagatcttctactgcgccagacccgacgaggagcccttcgtgaagatcatcaccgtggaggaggccaagagaagaaagagcacctgcagctactacgaggacgaggacgaggaggtgctgcccgtgctgagaccccacagcgccctgctggagaacatgcacatcgagcagctggccagaagactgcccgccagagtgcagggctacccctggagactggcctacagcaccctggagcacggcaccagcctgaagaccctgtacagaaagagcgccagcctggacagccccgtgctgctggtgatcaaggacatggacaaccagatcttcggcgcctacgccacccaccccttcaagttcagcgaccactactacggcaccggcgagaccttcctgtacaccttcagcccccacttcaagtggagcggcgagaacagctacttcatcaacggcgacatcagcagcctggagctgggcggcggcggctag

SEQ ID NO: 77818 - protein, 238 aa, Artificial Sequence
  derived and/or modified sequence
MEYAMKSLSLLYPKSLSRHVSVRTSVVTQQLLSEPSPKAPRARPCRVSTADRSVRKGIMAYSLEDLLLKVRDTLMLADKPFFLVLEEDGTTVETEEYFQALAGDTVFMVLQKGQKWQPPSEQGTRHPLSLSHKPAKKIDVARVTFDLYKLNPQDFIGCLNVKATFYDTYSLSYDLHCCGAKRIMKEAFRWALFSMQATGHVLLGTSCYLQQLLDATEEGQPPKGKASSLIPTCLKILQ

SEQ ID NO: 77819 - protein, 164 aa, Artificial Sequence
  derived and/or modified sequence
MLADKPFFLVLEEDGTTVETEEYFQALAGDTVFMVLQKGQKWQPPSEQGTRHPLSLSHKPAKKIDVARVTFDLYKLNPQDFIGCLNVKATFYDTYSLSYDLHCCGAKRIMKEAFRWALFSMQATGHVLLGTSCYLQQLLDATEEGQPPKGKASSLIPTCLKILQ

SEQ ID NO: 77820 - DNA, 1277 bp, Artificial Sequence
  derived and/or modified sequence
agaatgttcttttggccactgtgaagcctcaggaaggggctcggattgctcaaggacccatgggagagaggaggctttgactgggctgcctgcctgtgaggtctctggactagaggtccaacgcagtccagctgacaaggatggaatacgccatgaagtcccttagccttctctaccccaagtccctctccaggcatgtgtcagtgcgtacctctgtggtgacccagcagctgctgtcggagcccagccccaaggcccccagggcccggccctgccgcgtaagcacggcggatcgaagcgtgaggaagggcatcatggcttacagtcttgaggacctcctcctcaaggtccgggacactctgatgctggcagacaagcccttcttcctggtgctggaggaagatggcacaactgtagagacagaagagtacttccaagccctggcaggggatacagtgttcatggtcctccagaaggggcagaaatggcagcccccatcagaacaggggacaaggcacccactgtccctctcccataagcctgccaagaagattgatgtggcccgtgtaacgtttgatctgtacaagctgaacccacaggacttcattggctgcctgaacgtgaaggcgactttttatgatacatactccctttcctatgatctgcactgctgtggggccaagcgcatcatgaaggaagctttccgctgggccctcttcagcatgcaggccacaggccacgtactgcttggcacctcctgttacctgcagcagctcctcgatgctacggaggaagggcagccccccaagggcaaggcctcatcccttatcccgacctgtctgaagatactgcagtgaaagcccaagtccttggaagctttccccagtgaaggactgactgggggcctcacgcttaactggtagtgcccacaagcctggcagctgtagagccgcgaacctccccacacctccctcaccgcgcaggaccctgagtgaggaggaggagctggaaacctggggtgggttggccaaaggagaacctcaagctcctggcctgatccagctccttcctgcccaaggcagcttagcccatccagactggtcctgaagtctgtccctccattggcatgaagtctgccccttagcaatctggcctcgcaggctgtactttcatggtgctctctaccttctggcccccatcccggaacattcctgagtgaattcgcaagcgcactagcatgtgatattagggagtttgcaataaattattgaggctga

SEQ ID NO: 77821 - protein, 691 aa, Artificial Sequence
  derived and/or modified sequence
MELRSTAAPRAEGYSNVGFQNEENFLENENTSGNNSIRSRAVQSREHTNTKQDEEQVTVEQDSPRNREHMEDDDEEMQQKGCLERRYDTVCGFCRKHKTTLRHIIWGILLAGYLVMVISACVLNFHRALPLFVITVAAIFFVVWDHLMAKYEHRIDEMLSPGRRLLNSHWFWLKWVIWSSLVLAVIFWLAFDTAKLGQQQLVSFGGLIMYIVLLFLFSKYPTRVYWRPVLWGIGLQFLLGLLILRTDPGFIAFDWLGRQVQTFLEYTDAGASFVFGEKYKDHFFAFKVLPIVVFFSTVMSMLYYLGLMQWIIRKVGWIMLVTTGSSPIESVVASGNIFVGQTESPLLVRPYLPYITKSELHAIMTAGFSTIAGSVLGAYISFGVPSSHLLTASVMSAPASLAAAKLFWPETEKPKITLKNAMKMESGDSGNLLEAATQGASSSISLVANIAVNLIAFLALLSFMNSALSWFGNMFDYPQLSFELICSYIFMPFSFMMGVEWQDSFMVARLIGYKTFFNEFVAYEHLSKWIHLRKEGGPKFVNGVQQYISIRSEIIATYALCGFANIGSLGIVIGGLTSMAPSRKRDIASGAVRALIAGTVACFMTACIAGILSSTPVDINCHHVLENAFNSTFPGNTTKVIACCQSLLSSTVAKGPGEVIPGGNHSLYSLKGCCTLLNPSTFNCNGISNTF

SEQ ID NO: 77822 - protein, 622 aa, Artificial Sequence
  derived and/or modified sequence
MEDDDEEMQQKGCLERRYDTVCGFCRKHKTTLRHIIWGILLAGYLVMVISACVLNFHRALPLFVITVAAIFFVVWDHLMAKYEHRIDEMLSPGRRLLNSHWFWLKWVIWSSLVLAVIFWLAFDTAKLGQQQLVSFGGLIMYIVLLFLFSKYPTRVYWRPVLWGIGLQFLLGLLILRTDPGFIAFDWLGRQVQTFLEYTDAGASFVFGEKYKDHFFAFKVLPIVVFFSTVMSMLYYLGLMQWIIRKVGWIMLVTTGSSPIESVVASGNIFVGQTESPLLVRPYLPYITKSELHAIMTAGFSTIAGSVLGAYISFGVPSSHLLTASVMSAPASLAAAKLFWPETEKPKITLKNAMKMESGDSGNLLEAATQGASSSISLVANIAVNLIAFLALLSFMNSALSWFGNMFDYPQLSFELICSYIFMPFSFMMGVEWQDSFMVARLIGYKTFFNEFVAYEHLSKWIHLRKEGGPKFVNGVQQYISIRSEIIATYALCGFANIGSLGIVIGGLTSMAPSRKRDIASGAVRALIAGTVACFMTACIAGILSSTPVDINCHHVLENAFNSTFPGNTTKVIACCQSLLSSTVAKGPGEVIPGGNHSLYSLKGCCTLLNPSTFNCNGISNTF

SEQ ID NO: 77823 - DNA, 2076 bp, Artificial Sequence
  derived and/or modified sequence
atggagctgagatccacagccgcacctcgcgctgagggttatagcaatgtaggctttcagaatgaggaaaacttcctcgagaatgagaacaccagtggaaacaatagtattcgaagcagagcagtgcagagccgcgaacatactaacacaaagcaggatgaagaacaggtgacagtcgaacaagactcaccgaggaaccgagagcacatggaagacgatgatgaggaaatgcagcaaaagggatgtctggaacgcagatatgacaccgtatgcggattttgtagaaagcacaagaccaccctgaggcacataatctgggggatactgctagctggctatctggtgatggtgatttccgcctgtgtcctgaactttcatcgcgccctgcctctcttcgtgatcaccgtggccgccatcttttttgtcgtgtgggaccacttgatggccaaatacgagcatcgcatcgacgagatgctttcccctggcagaaggctgctgaatagccactggttctggttaaaatgggtcatctggtctagcctggtcctcgccgtgatcttttggttagcctttgataccgccaaactgggccagcaacaactagtgtctttcggcgggctaataatgtatatcgtattgctgtttctgttctctaaataccccacacgagtgtactggcggccggtcctgtggggtattgggctgcagttcttactagggttgctcatcttgcgaactgaccctggttttatagccttcgactggctgggacggcaggtgcagactttcctcgagtatacagacgcaggtgcctccttcgtcttcggagagaaatacaaagaccacttttttgctttcaaggtgcttcctatagtggttttctttagcacggtgatgtccatgctgtactatcttggcttgatgcaatggatcattcgtaaggtcggatggatcatgcttgtgactacaggctcctctccaattgagagcgtcgttgcttctggcaacatcttcgtcggacagacagaatcgcccttactggtgcgtccttacctgccttatattaccaagagcgagctgcatgctattatgaccgccggctttagtacaattgctggcagcgtgctcggagcttatatttcattcggagtaccttcctcacacctgcttaccgcatccgtgatgagtgcccccgctagcttggccgccgcaaaactgttttggcctgagactgaaaaacctaagattactttgaaaaacgcaatgaagatggaatccggcgattccggcaacctgctggaagcagctactcagggggcatcgtcttccatctctctggtcgccaacattgccgttaacttgattgccttcctggccctgctctcgttcatgaactctgcgctgagttggttcggcaacatgttcgactatccccagctgagctttgaacttatctgctcttatatcttcatgcccttttctttcatgatgggtgtagaatggcaggactctttcatggtggcaaggctgattggatataaaactttttttaatgaattcgtggcatacgaacacctcagcaaatggatccacctgaggaaggaaggaggccccaaattcgtcaacggggtgcagcaatacatttctatccgatccgagatcattgccacctatgccctatgtgggttcgccaacattggctcactcggaatagtcatcggtgggctcacatctatggccccatcccgtaaaagagacatagccagtggagcagttcgtgcgctcatcgctgggaccgtggcctgcttcatgaccgcatgtattgcaggcattctgtcctctaccccggtggacatcaattgccaccatgtgttagagaacgcctttaacagcacatttcctggcaacacgacaaaggtcattgcctgctgtcagagtttactcagctctaccgtggcaaaaggacccggggaggtaattccaggaggcaaccattcgctttacagcctgaaagggtgctgtacactgctaaatccctcaacctttaattgtaacggtataagcaacaccttctag

SEQ ID NO: 77824 - DNA, 1869 bp, Artificial Sequence
  derived and/or modified sequence
atggaggacgatgacgaagagatgcagcagaaaggctgtctggagcgcaggtacgatacagtttgcgggttttgccgaaaacataagacgacattacgacacatcatctggggtattcttctggctgggtacttggtgatggtgattagcgcatgcgtgctgaacttccaccgggctctgcctttgttcgtaattaccgttgcagctatttttttcgtggtgtgggatcacctgatggccaaatatgaacacaggatcgatgagatgttaagccccggccgaagactccttaactcacattggttttggctgaagtgggtgatttggtcttccttggttcttgcagtcattttctggctagcttttgatacagctaaattgggccaacagcaactggtgagttttggtggccttatcatgtacattgtgctgcttttcctcttctctaagtatcctacgcgagtttattggaggcccgtgctttggggtatcgggctacagtttctcctgggcctgctcattctgcgcacagaccctggatttattgcgtttgattggcttggccgacaggtgcagacatttctcgaatacactgatgcgggggcgtcctttgtgtttggggaaaagtacaaagatcactttttcgctttcaaggtgttacccatagtcgtgtttttcagtaccgtgatgagcatgctttactatctgggattgatgcagtggattattcggaaggttggctggataatgctggtgacaacgggctcttctccaattgaatctgtggtagccagcgggaatattttcgtcggacagactgaatcaccactgttggtcagaccttacctgccttatatcaccaagagtgaactccacgccataatgacggctgggttttccactattgccgggagcgtgttgggagcttatatctcgttcggagtgccctcgtcccacttgctgacagcaagtgtgatgagcgctcctgcctcacttgccgcagccaagctcttttggcccgaaacagagaagcccaaaattacgctgaagaacgcgatgaagatggagagtggcgacagtggtaacctcctggaagccgccacacagggagcttccagctctatatctctggtggccaatattgccgtgaacctaattgcctttctggctcttctgtctttcatgaattccgccttatcatggttcggaaacatgttcgactatccccagctctccttcgagctgatctgttcgtacatatttatgcctttctcttttatgatgggggttgagtggcaggattccttcatggttgctagattgatcggatacaagacctttttcaacgaattcgtagcgtacgaacacctcagcaagtggatacatctgaggaaagaggggggtccaaagtttgtcaacggcgtgcagcagtatatttctattcgctcagagatcattgcaacttacgccctgtgcggttttgccaacataggatccctcggaatagtgatcggcggactgacatccatggcgccatccagaaaacgggatatcgccagtggagctgttcgcgccctgatagctggtaccgtggcatgtttcatgaccgcttgcatagccggaattctgtcctcgactcctgtcgatatcaattgccaccacgtgctggagaacgcttttaacagtacttttccaggtaacaccactaaggtgatcgcttgctgtcagtccttactgtcgagcacggtcgctaagggccccggggaagttatccccggcggaaaccactccctatactctctgaaagggtgctgtacactgctgaatccatccacattcaactgtaacggaatttccaacaccttttag

SEQ ID NO: 77825 - DNA, 2076 bp, Artificial Sequence
  derived and/or modified sequence
atggagctgcggagcacagctgcccccagggctgagggctacagcaatgtgggcttccagaatgaggagaacttcctggagaatgaaaacaccagcggcaacaacagcatccgcagcagagctgtgcagagccgggagcacaccaacaccaagcaggatgaggagcaggtgacagtggagcaggacagccccaggaaccgggagcacatggaggatgatgatgaggagatgcagcagaagggctgcctggagaggagatatgacacagtgtgtggcttctgcaggaagcacaagaccaccctgcggcacatcatctggggcatcctgctggccggctacctggtgatggtgatcagcgcctgtgtgctgaacttccaccgggccctgcccctcttcgtcatcaccgtggccgccatcttctttgtggtgtgggaccacctgatggccaagtatgagcacagaattgatgagatgctgagccctggaagaaggctgctgaacagccactggttctggctgaagtgggtgatctggagcagcctggtgctggccgtcatcttctggctggcctttgacacagccaagctgggccagcagcagctggtgtcctttggaggcctcatcatgtacatcgtgctgctcttcctgttcagcaagtaccccaccagggtgtactggaggcctgtgctgtggggcatcggcctgcagttcctgctgggcctgctgatcctgaggacagaccccggcttcatcgcctttgactggctgggccggcaggtgcagaccttcctggagtacacagatgctggggccagctttgtgtttggagagaagtacaaggaccacttctttgccttcaaggtgctgcccatcgtggtgttcttcagcacagtgatgtccatgctgtactacctgggcctgatgcagtggatcatcaggaaggtgggctggatcatgctggtgaccaccggcagcagccccatcgagagcgtggtggccagcggcaacatctttgtgggccagacagagagccccctgctggtgcggccctacctgccctacatcaccaagtctgagctgcacgccatcatgacagctggcttcagcaccatcgccggctctgtgctgggcgcctacatcagctttggagtgcccagcagccacctgctgacagcctctgtgatgtctgccccagccagcctggccgccgccaagctgttctggccagagacagagaagcccaagatcaccctgaagaatgccatgaagatggagagcggggacagcggcaacctgctggaggccgccacccagggcgccagcagcagcatcagcctggtggccaacattgctgtgaacctgattgccttcctggccctgctgtccttcatgaacagcgccctgtcctggtttggaaacatgtttgactacccccagctgagctttgagctgatctgcagctacatcttcatgcccttctccttcatgatgggcgtggagtggcaggacagcttcatggtggcccggctgattggctacaagaccttcttcaatgaatttgtggcctatgagcacctgagcaagtggatccacctgaggaaggagggcggccccaagtttgtgaatggagtgcagcagtacatcagcatccgctctgagatcatcgccacctacgccctgtgtggctttgccaacatcggcagcctgggcatcgtgattggaggcctgacctccatggcccccagcaggaagagggacatcgccagcggggctgtgcgggccctgattgctggcaccgtggcctgcttcatgacagcctgcatcgccggcatcctgagcagcacccctgtggacatcaactgccaccacgtgctggagaatgccttcaacagcaccttccctggcaacaccaccaaggtgattgcctgctgccagagcctgctgagcagcacagtggccaagggccctggagaggtgattcctgggggcaaccacagcctgtacagcctgaagggctgctgcaccctgctgaaccccagcaccttcaactgcaatggcatcagcaacaccttctag

SEQ ID NO: 77826 - DNA, 1869 bp, Artificial Sequence
  derived and/or modified sequence
atggaggatgatgatgaggagatgcagcagaagggctgcctggagcggcgctatgacacagtgtgtggcttctgcaggaagcacaagaccaccctgcggcacatcatctggggcatcctgctggccggctacctggtgatggtgatcagcgcctgtgtgctgaacttccaccgggccctgcccctgtttgtgatcaccgtggccgccatcttctttgtggtgtgggaccacctgatggccaagtatgagcacagaattgatgagatgctgagccctggccggcggctgctgaacagccactggttctggctgaagtgggtgatctggagcagcctggtgctggccgtcatcttctggctggcctttgacacagccaagctgggccagcagcagctggtgtcctttggaggcctcatcatgtacatcgtgctgctcttcctgttcagcaagtaccccaccagggtgtactggaggcctgtgctgtggggcatcggcctgcagttcctgctgggcctgctgatcctgaggacagatcctggcttcatcgcctttgactggctgggccggcaggtgcagaccttcctggagtacacagatgctggggccagctttgtgtttggagagaagtacaaggaccacttctttgccttcaaggtgctgcccatcgtggtgttcttcagcacagtgatgtccatgctgtactacctgggcctgatgcagtggatcatcaggaaggtgggctggatcatgctggtgaccaccggcagcagccccattgaatctgtggtggccagcggcaacatctttgtgggccagacagagagccccctgctggtgcggccctacctgccctacatcaccaagtctgagctgcacgccatcatgacagctggcttcagcaccatcgccggctctgtgctgggcgcctacatcagctttggagtgcccagcagccacctgctgacagcctctgtgatgtctgccccagccagcctggccgccgccaagctgttctggccagagacagagaagcccaagatcaccctgaagaatgccatgaagatggagagcggggacagcggcaacctgctggaggccgccacccagggcgccagcagcagcatcagcctggtggccaacattgctgtgaacctgattgccttcctggccctgctgtccttcatgaacagcgccctgtcctggtttggaaacatgtttgactacccccagctgagctttgagctgatctgcagctacatcttcatgcccttctccttcatgatgggcgtggagtggcaggacagcttcatggtggcccggctcatcggctacaagaccttcttcaatgaatttgtggcctatgagcacctgagcaagtggatccacctgaggaaggagggcggccccaagtttgtgaatggagtgcagcagtacatcagcatccgctctgagatcatcgccacctacgccctgtgtggctttgccaacatcggcagcctgggcatcgtcatcggcggcctgacctccatggcccccagcaggaagagggacatcgccagcggggctgtgcgggccctgattgctggcaccgtggcctgcttcatgacagcctgcatcgccggcatcctgagcagcacccctgtggacatcaactgccaccacgtgctggagaatgccttcaacagcaccttccctggcaacaccaccaaggtgattgcctgctgccagagcctgctgagcagcacagtggccaagggccctggagaggtgattcctgggggcaaccacagcctgtacagcctgaagggctgctgcaccctgctgaaccccagcaccttcaactgcaatggcatcagcaacaccttctag

SEQ ID NO: 77827 - DNA, 2076 bp, Artificial Sequence
  derived and/or modified sequence
atggagctgcggagcaccgccgccccccgggccgagggctacagcaatgtggggtttcagaacgaggaaaactttctggagaacgaaaatacttctgggaataattccatccgctccagagcagtccagagtagggagcataccaacactaaacaggacgaggagcaggtgactgtagagcaggactcaccacggaaccgggagcacatggaagatgatgacgaggaaatgcaacagaagggctgtctggaaagacggtacgacacagtctgtggattctgtcggaaacataagaccacactgcgtcacataatttggggtatactcctcgccgggtacctggtgatggtgattagtgcttgcgtacttaattttcaccgcgccttgcccctctttgtcataacagtggcggcaattttcttcgttgtgtgggatcatctaatggccaagtatgaacatagaatcgacgagatgctgtctccgggtcgccgactgctcaatagccactggttttggctaaagtgggtgatttggtcctctctcgttctggctgttatcttctggctggcgttcgataccgccaagttgggacagcagcagctggtcagctttgggggcttgatcatgtatattgtcctactgttcttgtttagtaaatatccgacgcgtgtttactggaggccagtcctctgggggataggcctgcagttcctcctggggctcttgattttgcgcacagaccctgggttcatcgcctttgactggctgggaaggcaggtgcaaaccttccttgagtatactgacgctggggcgagtttcgtgttcggtgaaaagtataaggatcattttttcgccttcaaagttctgccaattgtagtgttcttcagcacagtgatgtctatgctctactacttgggacttatgcaatggatcattaggaaggtggggtggattatgttggttactactggaagtagtcctattgagtccgtggtggcctctggaaatatatttgtcggccagacagaaagcccccttctggtccggccatacctgccctacatcaccaagtccgaactgcatgcaatcatgacagccgggttttccactatcgccggctcagttttgggggcttacatctctttcggggtaccttcgtcccatctgcttactgcgagcgtgatgagcgctcctgccagccttgctgctgctaaattgttctggcctgagactgaaaaacccaagatcaccttaaagaacgctatgaagatggaaagcggggatagcggtaacttacttgaggccgcgacacagggtgccagcagcagcatttcactcgtcgcgaatattgccgtgaacctgatcgctttcctggctctcctgtctttcatgaacagcgccttgagttggttcgggaacatgtttgactatccacagctcagctttgagttgatttgcagctacattttcatgcctttctcttttatgatgggcgtggagtggcaagatagttttatggtggcccgactcattggatataagacattcttcaacgagttcgtggcatatgagcaccttagcaagtggatccacctgagaaaggaaggtgggcccaaatttgtgaatggggtccagcagtacatttcgatcaggtccgaaatcattgccacttacgcattgtgcgggttcgctaatattgggtccctcgggatcgtgatcggcggcctcacctctatggctccttctcggaagcgagatattgcttctggcgcggtccgcgctctgatcgccggcactgtcgcctgtttcatgaccgcatgcatagcagggatcctcagcagtaccccggtcgacatcaattgtcaccacgtcttggaaaatgctttcaactcaaccttcccaggcaataccacaaaagttatcgcctgctgccagtccttgctttcttccacagtggccaaaggtcctggggaagttatccctgggggcaaccacagcctttactctctgaagggttgttgtactctgctaaatccgtcaacctttaactgcaatggcataagcaataccttttag

SEQ ID NO: 77828 - DNA, 1869 bp, Artificial Sequence
  derived and/or modified sequence
atggaggacgacgacgaggagatgcagcagaagggctgcctggagagaagatatgacacagtctgtggcttttgcaggaaacacaaaactactctgaggcacatcatatgggggatactactagccggatacctcgtgatggtgattagcgcttgtgtgctgaatttccaccgggctctgccgctcttcgtgattacggtcgctgccattttcttcgtcgtgtgggaccatctgatggccaagtatgagcaccgcatcgatgaaatgctcagccctgggagacgcctgttaaacagccactggttctggctaaagtgggtgatttggagcagcttagtgctagcagtcatcttttggctagcctttgatactgcgaaactaggacagcaacagcttgtgtcattcggcggtttgattatgtatatcgtgctgttatttctgttctcaaaatatcccacccgagtgtactggcggcctgttctctggggaatcggccttcagtttctgttggggcttctgatcttgcgtacagatcccgggttcatcgcctttgactggcttggacgccaggtgcagaccttcctcgaatataccgacgcaggcgcgagctttgtctttggcgaaaaatacaaggaccacttttttgcttttaaggttctgcccatcgtggtattcttctctactgttatgtccatgctctactaccttggcctcatgcagtggataatacgtaaggtggggtggatcatgctcgttaccacgggctcgagccccatagaaagcgtggtcgccagcggtaacatcttcgtaggacagactgagtcccctctgttagtcagaccatatctcccctacatcacgaaatccgagctgcatgccataatgaccgctggattctcaaccattgcaggttccgttctgggcgcatacattagctttggggtcccatcttctcacctcctgactgcctctgtcatgtcggcccccgcctccctggctgccgccaagctgttttggccagaaactgaaaagccaaagatcaccttaaagaatgcaatgaaaatggagagcggagatagcggcaatctccttgaggccgctactcagggcgcctcttccagcatttctttggtggctaatatcgccgtgaatctgatagcgtttctggccctgctcagcttcatgaacagcgcactctcgtggttcggtaacatgtttgattatccccagctgtcgtttgagctgatctgcagctacatatttatgcccttctcttttatgatgggcgttgagtggcaggatagttttatggtcgctagactgattggctataaaacgttcttcaatgaattcgtggcctacgaacacctgtctaaatggattcatctgaggaaagagggggggccaaaattcgtcaatggcgtccaacagtacatttcaattagatccgagattattgccacatacgccctgtgcgggttcgccaacatcgggtctctcggaattgtaattggaggtctgacatccatggctccgagccgcaagcgtgacattgcttctggcgccgtgcgggccctcatagcggggactgtggcatgtttcatgacagcttgcatcgcaggaatcctgagctccaccccggttgatatcaactgccaccatgtattagagaatgcatttaattctactttccctggaaataccactaaggtgattgcatgttgtcaaagcctgctgagcagcaccgttgccaagggtcctggggaagtaatccctggcgggaaccatagtctgtatagcttgaagggttgttgtaccctcctgaatccatctacatttaactgtaatggtattagcaacaccttttag

SEQ ID NO: 77829 - DNA, 2076 bp, Artificial Sequence
  derived and/or modified sequence
atggagctgcgttctaccgccgcacccagagctgaaggctactctaacgtcggctttcagaacgaggaaaattttttagaaaatgagaatactagcggcaacaattctattcgttccagagcagtgcaaagccgggagcacaccaatacaaagcaggatgaggaacaggtcactgtcgagcaggactcacccagaaacagagagcatatggaagacgacgacgaggagatgcagcagaaaggctgcctggagcggagatacgacaccgtttgtgggttctgccggaagcacaaaactacactgaggcatatcatatggggtatcctactagcagggtatctggtgatggtaatatccgcctgcgtcctgaactttcaccgggctctgcctctttttgtaataaccgtggccgcaatcttctttgtggtttgggatcatctcatggcaaaatacgagcacaggatcgacgaaatgctgtcacctggacggagattgttgaactcacactggttttggctgaaatgggtcatatggtcgtctctagtactcgcagtgatcttttggcttgcttttgatacagcaaaattagggcagcaacagcttgtgagcttcggtggcctgatcatgtatattgtgcttctgttcttgttcagcaaataccccaccagggtatattggaggccggtgctgtggggcattggcctgcaatttctgctcggtctcctcatccttcggacggaccctggttttattgcttttgactggttaggacgacaggttcagacctttcttgagtacactgacgcaggcgcatccttcgtttttggggagaagtacaaggatcacttctttgcatttaaggtccttcccatcgtggtattttttagcacagtaatgtctatgctctactatctggggctcatgcagtggataattagaaaagtggggtggatcatgctcgtgacgaccggtagttccccaattgaaagtgtcgtggcatctggcaacatcttcgttggccagacggaatcgccgctgcttgttcggccatatctgccttacatcacgaagagtgagttgcatgcaataatgaccgccggattctcgacaatcgccggttcggtgctcggtgcttatatatcgttcggggttccatcctctcacctgctaacggctagtgtcatgtccgctcctgcatcattggctgctgctaaactgttttggccagagactgagaagcccaaaatcaccctgaagaacgcgatgaagatggagagcggggactcagggaaccttctggaagctgctacacagggggctagctcctcaataagtctagtggctaacattgccgtcaatcttattgcattcctggcactgttaagctttatgaacagcgctttatcttggtttgggaacatgtttgattaccctcagctgtcttttgaactcatctgtagctacatcttcatgcctttttcgttcatgatgggcgtggaatggcaagactctttcatggtagcacggttgattggatacaagacctttttcaacgaattcgtggcttacgagcatctcagtaaatggattcatctccgcaaagagggaggtcccaaattcgtgaacggagtgcagcaatatatcagcattaggtcagagattattgcaacatacgcactgtgtggattcgctaatatcggctcattggggatcgtaatcgggggtttaacaagtatggcccctagtaggaaaagagacatcgcttcgggagccgtgcgcgcacttatcgcagggacagtggcctgcttcatgaccgcttgcattgcaggaatactttcttcaaccccggtcgacatcaattgccatcacgtcttggaaaatgctttcaacagcactttccctgggaataccacaaaggtgattgcttgttgccagtccctcctgagttccactgtagctaaggggcctggagaagtgattcccggtgggaaccactctctgtatagtttaaaaggttgttgcaccctgcttaacccttctaccttcaactgcaatggcatcagtaacacgttctag

SEQ ID NO: 77830 - DNA, 1869 bp, Artificial Sequence
  derived and/or modified sequence
atggaagatgatgatgaggaaatgcagcaaaagggatgtctggaacgtagatacgacacggtttgtggtttctgccgaaaacataagaccacacttaggcatatcatttggggaatcctcttggcagggtacttggttatggtcattagcgcctgcgtcttaaactttcacagggccttgcccttgttcgttattaccgtcgcagccattttctttgtggtatgggatcacctgatggcaaagtatgagcaccgcatcgatgaaatgttgtctcctggcagaaggctgctgaatagccattggttctggctgaagtgggtcatttggagctctctcgtgcttgcagtgatcttttggctcgcctttgacaccgccaaattgggacaacaacagctggtgagtttcggtggacttattatgtatatcgtccttttgttcctgttcagcaaatacccaaccagagtgtactggcgtcctgtcttgtgggggattgggttacagtttttgctcgggctactaatactcagaaccgaccccggattcatcgcatttgattggcttgggaggcaggtccaaacctttcttgagtacactgacgccggagcgtcttttgtgtttggagaaaagtataaggaccacttttttgcgttcaaggtcctgcctattgttgtgtttttctccactgtgatgtcaatgctgtactatctgggcctcatgcagtggataattcgcaaagtggggtggatcatgctagtgaccactgggagctcccccatcgaaagcgtagttgcatctggcaatattttcgtgggtcagaccgagagccctctattagtgcgcccttacctaccgtacataacgaagtctgagctgcacgcaatcatgaccgctggattcagcactattgccggttctgtcctaggagcttacatcagtttcggtgtaccaagtagtcaccttttaaccgcgtcggtgatgagcgcaccggcttcactggccgcagccaaactgttctggcccgaaactgagaaacccaaaataacactcaaaaacgccatgaaaatggaatctggcgacagtggaaacctcttggaggccgcaacacagggcgcatctagttccattagcctggtggcaaatattgccgtgaatctgatcgcctttctcgcacttttgagttttatgaacagcgcgctatcatggtttgggaatatgttcgattacccacagctgagtttcgagctaatttgcagttacatctttatgccatttagtttcatgatgggcgtggaatggcaggactcttttatggtagctagactcatcggctataagactttcttcaatgagtttgtggcatacgaacatttaagcaagtggattcatttaaggaaggagggtgggccaaaattcgtgaacggtgtccagcaatatattagtatcaggtcggaaatcattgcgacttacgcgttgtgcggttttgcgaatataggcagcctcgggatagtgattggcggtctcacgtctatggcgccatcacgaaaaagggacatcgcgagtggggcagttcgggcattgattgccggaactgtggcctgctttatgaccgcatgtatcgctggaatcctgtcatccacacccgtggatattaattgtcaccatgttctcgaaaacgccttcaattctacattcccgggtaacacgactaaggtaatcgcctgctgccagtcactcctgtccagcacagtggctaagggccctggagaagtcatccctggcggtaaccattccctgtactccctgaagggatgctgtacactgctgaacccttctaccttcaattgtaatggcatcagcaataccttctag

SEQ ID NO: 77831 - DNA, 4887 bp, Artificial Sequence
  derived and/or modified sequence
cccaggtacaaaggacctccagaccagagccagccagcagcaaaaagagcatggagctgaggagtacagcagcccccagagctgagggctacagcaacgtgggcttccagaatgaagaaaactttcttgagaacgagaacacatcaggaaacaactcaataagaagcagagctgtgcaaagcagggagcacacaaacaccaaacaggatgaagaacaggtcacagttgagcaggattctccaagaaacagagaacacatggaggatgatgatgaggagatgcaacaaaaagggtgtttggaaaggaggtatgacacagtatgtggtttctgtaggaaacacaaaacaactcttcggcacatcatctggggcattttattagcaggttatctggttatggtgatttcggcctgtgtgctgaactttcacagagcccttcctctttttgtgatcaccgtggctgccatcttctttgttgtctgggatcacctgatggccaaatacgaacatcgaattgatgagatgctgtctcctggcagaaggcttctaaacagccattggttctggctgaagtgggtgatctggagctccctggtcctagcagttattttctggttggcctttgacactgccaaattgggtcaacagcagctggtgtccttcggtgggctcataatgtacattgtcctgttatttctattttccaagtacccaaccagagtttactggagacctgtcttatggggaatcgggctacagtttcttcttgggctcttgattctaaggactgaccctggatttatagcttttgattggttgggcagacaagttcagacttttctggagtacacagatgctggtgcttcatttgtctttggtgagaaatacaaagaccacttctttgcatttaaggtcctgccgatcgtggttttcttcagcactgtgatgtccatgctgtactacctgggactgatgcagtggattattagaaaggttggatggatcatgctagttactacgggatcatctcctattgaatctgtagttgcttctggcaatatatttgttggacaaacggagtctccactgctggtccgaccatatttaccttacatcaccaagtctgaactccacgccatcatgaccgccgggttctctaccattgctggaagcgtgctaggtgcatacatttcttttggggttccatcctcccacttgttaacagcgtcagttatgtcagcacctgcgtcattggctgctgctaaactcttttggcctgagacagaaaaacctaaaataaccctcaagaatgccatgaaaatggaaagtggtgattcagggaatcttctagaagctgcaacacagggagcatcctcctccatctccctggtggccaacatcgctgtgaatctgattgccttcctggccctgctgtcttttatgaattcagccctgtcctggtttggaaacatgtttgactacccacagctgagttttgagctaatctgctcctacatcttcatgcccttttccttcatgatgggagtggaatggcaggacagctttatggttgccagactcataggttataagaccttcttcaatgaatttgtggcttatgagcacctctcaaaatggatccacttgaggaaagaaggtggacccaaatttgtaaacggtgtgcagcaatatatatcaattcgttctgagataatcgccacttacgctctctgtggttttgccaatatcgggtccctaggaatcgtgatcggcggactcacatccatggctccttccagaaagcgtgatatcgcctcgggggcagtgagagctctgattgcggggaccgtggcctgcttcatgacagcctgcatcgcaggcatactctccagcactcctgtggacatcaactgccatcacgttttagagaatgccttcaactccactttccctggaaacacaaccaaggtgatagcttgttgccaaagtctgttgagcagcactgttgccaagggtcctggtgaagtcatcccaggaggaaaccacagtctgtattctttgaagggctgctgcacattgttgaatccatcgacctttaactgcaatgggatctctaatacattttgaggtcagccacttctccagtggaactctgaagtacagatgctgaattttctgctttggaaagaaaaaaaaaagaagctattgtccacagattgatgcttccataatggaatcagctttaattgcaaggaatgaagaaaaacaagagtggaccttcaaagctacaacattttcctcctcccctccctccccaccagccccttccccaccaagaactgctatgatgtcccaaagtgaggtgttgttgattccagtctcaatgggattttctgactttaatgtttgcaaggcatttcaccagaatacagctataaacggccgctcccaacaactgggctctgactcacccacacccacttagtgtccactaagtagtccagggtgactcagtttaagcacatctcaggtgaggtcactctgcatataccttggcttacctgaaatagcctgaacttgaatctcacataagggaaaactagtcatcaatcaccaactcattgactaccctcaggaagtcctgcagaaatcaagagtccttgaggagaacacgtggatcataccaaaaccagggtttaaatccattctgcttaagagttctatcagtcagtttaaccataaattacgctacagaaacaaacaacccaaaaacctcagtggcttacagatttatttttcactcacatgtttgtaatgatccatcttggttgtaatccatattgcttcagcacccagtctaaaggagcagcctctaaggggggcatgttggtcttaagagggaaaagaaaggtgggaaccacatgatggctctttcatcttccgctaggaaatgataccctttacttccatgacattccattagccaaaacaagtcctgtgacaggcacgatgtcagtcaccacagttaaattatcctgtcatagggagggatagtgaatattttgcagaagtaatatgatacaccataagggtacataatatccatgtctcccttcaaggagccatcctgttgtaggccataacggtaggcctattcatctgcacatttggtaatgtattcctggtgacaaagcagctactcttcaatcaaaagccgtgtaagaagcagttgaggaaaaaaagtcctggttgagctctgaaaaccttgcgttgataatttcattgaccaggatggcatcagtatcaaacttgaagaatgggtgtcagtgtctaagaaaaagattccagagacaatggtggtgtgctctttaacgaaatgcccatcaccactgctcttaatagcatgaagaccacatgctgtgagaaaacacaaacatcaattaccaagtcaagaaacagacactgaatgtgaaaaaggttttgaaataccttaagtaatttattttgtttctatttttccttctgtttgtgtacaagagtaatttaaaagaaaaagctatgtgaaaatagttggggttttttgtgtgttttgttttttgtggtggtgaaggaggaggcctaatgtccagaggactgtttatccctgaagtatgatatactaaaatatttcttattatttgtatcaattttccttggagctcaatgtgcccttgcagtcttcagactttattttaggaaaatatatttgcatgttttccccccattctcaatgtttggtgtcctggttcatcataccccacagaatgttatgtttatgtatcataccattcctctgtggacatgcatttactttgtttacaggttttggtttgggggttctctttttcctactctggacagtgcatgtacatttactttgcatgctggtgcttttttttctatagcaatagtgtctgatagacatatgcaagtcacatgtaatttaagatctagtagccacgctaaaaaacaagtaaaattaattttaatatatttaactcaatacattggagatattatttcagtaagatatttttcattcttatgaaactaagtctgtctggtttgcatatctcagttgagacactaaagttttactgataatacttaatccatgtttagatttcataaaatctaaatttgcaaagtaaatttacatacccatgttggtctaaatgtgcttaaaagttttccaataactgaaatgagtatcagttttaaatttaaaaatttgttacttggttactccatatttcaggtattagtggctaccatattggtcagagcagattcataggatgatttcccaggtttgaagtgtgtgtatatttctggtattataagatgtcagactggtttttggagaaatatgttgtcttaatttttacctgctttgatatgacctttctgtgtgtacgtgtgacatttctttataaatgcaacatgttcacataggtcctacgttgattccttattaatgctgtgcatccttgaactgagaaagggggtgttattcctgagctatattataagaggatagtaaaggccaaggaccaggaaaatgagctggttaagcctcttgagcttgttacccccagaaacctcaccaataccctgtgaacgtcgtaagtggcccttctcccagtgaaacaacctaatggaggtttttggtgcatggtgatgtttttattcctctttagtagacatagaagctggaggctgcttgtcttccccagtttctccttcacccatgtacatatagtgggcaaagatggcatgcctatgtttttcagctgtttgagcccgctcactgttgacagattgttgctgttggtctgtgctccccaac

SEQ ID NO: 77832 - DNA, 2481 bp, Artificial Sequence
  derived and/or modified sequence
aactgaagcaagctgtgcccaggtccctgtaacagcaggtggctttctgacatcagcagagactggtgctttttcccaggtacaaaggacctccagaccagagccagccagcagcaaaaagagcatggagctgaggagtacagcagcccccagagctgagggctacagcaacgtgggcttccagaatgaagaaaactttcttgagaacgagaacacatcaggaaacaactcaataagaagcagagctgtgcaaagcagggagcacacaaacaccaaacagagaatcaaaggccacattggatatgacagaagacaagtgctgagatttgacattatacttcttagagcacactcaaactgctccacctccatctatttcctcccccaccagcttctgtaccattggttacaagagccaggcttattatttgagacattattggagactggagacaggatgaagaacaggtcacagttgagcaggattctccaagaaacagagaacacatggaggatgatgatgaggagatgcaacaaaaagggtgtttggaaaggaggtatgacacagtatgtggtttctgtaggaaacacaaaacaactcttcggcacatcatctggggcattttattagcaggttatctggttatggtgatttcggcctgtgtgctgaactttcacagagcccttcctctttttgtgatcaccgtggctgccatcttctttgttgtctgggatcacctgatggccaaatacgaacatcgaattgatgagatgctgtctcctggcagaaggcttctaaacagccattggttctggctgaagtgggtgatctggagctccctggtcctagcagttattttctggttggcctttgacactgccaaattgggtcaacagcagctggtgtccttcggtgggctcataatgtacattgtcctgttatttctattttccaagtacccaaccagagtttactggagacctgtcttatggggaatcgggctacagtttcttcttgggctcttgattctaaggactgaccctggatttatagcttttgattggttgggcagacaagttcagacttttctggagtacacagatgctggtgcttcatttgtctttggtgagaaatacaaagaccacttctttgcatttaaggtcctgccgatcgtggttttcttcagcactgtgatgtccatgctgtactacctgggactgatgcagtggattattagaaaggttggatggatcatgctagttactacgggatcatctcctattgaatctgtagttgcttctggcaatatatttgttggacaaacggagtctccactgctggtccgaccatatttaccttacatcaccaagtctgaactccacgccatcatgaccgccgggttctctaccattgctggaagcgtgctaggtgcatacatttcttttggggttccatcctcccacttgttaacagcgtcagttatgtcagcacctgcgtcattggctgctgctaaactcttttggcctgagacagaaaaacctaaaataaccctcaagaatgccatgaaaatggaaagtggtgattcagggaatcttctagaagctgcaacacagggagcatcctcctccatctccctggtggccaacatcgctgtgaatctgattgccttcctggccctgctgtcttttatgaattcagccctgtcctggtttggaaacatgtttgactacccacagctgagttttgagctaatctgctcctacatcttcatgcccttttccttcatgatgggagtggaatggcaggacagctttatggttgccagactcataggttataagaccttcttcaatgaatttgtggcttatgagcacctctcaaaatggatccacttgaggaaagaaggtggacccaaatttgtaaacggtgtgcagcaatatatatcaattcgttctgagataatcgccacttacgctctctgtggttttgccaatatcgggtccctaggaatcgtgatcggcggactcacatccatggctccttccagaaagcgtgatatcgcctcgggggcagtgagagctctgattgcggggaccgtggcctgcttcatgacagcctgcatcgcaggcatactctccagcactcctgtggacatcaactgccatcacgttttagagaatgccttcaactccactttccctggaaacacaaccaaggtgatagcttgttgccaaagtctgttgagcagcactgttgccaagggtcctggtgaagtcatcccaggaggaaaccacagtctgtattctttgaagggctgctgcacattgttgaatccatcgacctttaactgcaatgggatctctaatacattttgaggtcagccacttctccagtggaactctgaagtacagatgctgaattttctgctttggaaagaaaaaaaaaagaagctattgtccacagattgatgcttccataat

SEQ ID NO: 77833 - DNA, 2076 bp, Artificial Sequence
  derived and/or modified sequence
atggagctgagaagcaccgccgcccccagagccgagggctacagcaacgtgggcttccagaacgaggagaacttcctggagaacgagaacaccagcggcaacaacagcatcagaagcagagccgtgcagagcagagagcacaccaacaccaagcaggacgaggagcaggtgaccgtggagcaggacagccccagaaacagagagcacatggaggacgacgacgaggagatgcagcagaagggctgcctggagagaagatacgacaccgtgtgcggcttctgcagaaagcacaagaccaccctgagacacatcatctggggcatcctgctggccggctacctggtgatggtgatcagcgcctgcgtgctgaacttccacagagccctgcccctgttcgtgatcaccgtggccgccatcttcttcgtggtgtgggaccacctgatggccaagtacgagcacagaatcgacgagatgctgagccccggcagaagactgctgaacagccactggttctggctgaagtgggtgatctggagcagcctggtgctggccgtgatcttctggctggccttcgacaccgccaagctgggccagcagcagctggtgagcttcggcggcctgatcatgtacatcgtgctgctgttcctgttcagcaagtaccccaccagagtgtactggagacccgtgctgtggggcatcggcctgcagttcctgctgggcctgctgatcctgagaaccgaccccggcttcatcgccttcgactggctgggcagacaggtgcagaccttcctggagtacaccgacgccggcgccagcttcgtgttcggcgagaagtacaaggaccacttcttcgccttcaaggtgctgcccatcgtggtgttcttcagcaccgtgatgagcatgctgtactacctgggcctgatgcagtggatcatcagaaaggtgggctggatcatgctggtgaccaccggcagcagccccatcgagagcgtggtggccagcggcaacatcttcgtgggccagaccgagagccccctgctggtgagaccctacctgccctacatcaccaagagcgagctgcacgccatcatgaccgccggcttcagcaccatcgccggcagcgtgctgggcgcctacatcagcttcggcgtgcccagcagccacctgctgaccgccagcgtgatgagcgcccccgccagcctggccgccgccaagctgttctggcccgagaccgagaagcccaagatcaccctgaagaacgccatgaagatggagagcggcgacagcggcaacctgctggaggccgccacccagggcgccagcagcagcatcagcctggtggccaacatcgccgtgaacctgatcgccttcctggccctgctgagcttcatgaacagcgccctgagctggttcggcaacatgttcgactacccccagctgagcttcgagctgatctgcagctacatcttcatgcccttcagcttcatgatgggcgtggagtggcaggacagcttcatggtggccagactgatcggctacaagaccttcttcaacgagttcgtggcctacgagcacctgagcaagtggatccacctgagaaaggagggcggccccaagttcgtgaacggcgtgcagcagtacatcagcatcagaagcgagatcatcgccacctacgccctgtgcggcttcgccaacatcggcagcctgggcatcgtgatcggcggcctgaccagcatggcccccagcagaaagagagacatcgccagcggcgccgtgagagccctgatcgccggcaccgtggcctgcttcatgaccgcctgcatcgccggcatcctgagcagcacccccgtggacatcaactgccaccacgtgctggagaacgccttcaacagcaccttccccggcaacaccaccaaggtgatcgcctgctgccagagcctgctgagcagcaccgtggccaagggccccggcgaggtgatccccggcggcaaccacagcctgtacagcctgaagggctgctgcaccctgctgaaccccagcaccttcaactgcaacggcatcagcaacaccttctag

SEQ ID NO: 77834 - DNA, 1869 bp, Artificial Sequence
  derived and/or modified sequence
atggaggacgacgacgaggagatgcagcagaagggctgcctggagagaagatacgacaccgtgtgcggcttctgcagaaagcacaagaccaccctgagacacatcatctggggcatcctgctggccggctacctggtgatggtgatcagcgcctgcgtgctgaacttccacagagccctgcccctgttcgtgatcaccgtggccgccatcttcttcgtggtgtgggaccacctgatggccaagtacgagcacagaatcgacgagatgctgagccccggcagaagactgctgaacagccactggttctggctgaagtgggtgatctggagcagcctggtgctggccgtgatcttctggctggccttcgacaccgccaagctgggccagcagcagctggtgagcttcggcggcctgatcatgtacatcgtgctgctgttcctgttcagcaagtaccccaccagagtgtactggagacccgtgctgtggggcatcggcctgcagttcctgctgggcctgctgatcctgagaaccgaccccggcttcatcgccttcgactggctgggcagacaggtgcagaccttcctggagtacaccgacgccggcgccagcttcgtgttcggcgagaagtacaaggaccacttcttcgccttcaaggtgctgcccatcgtggtgttcttcagcaccgtgatgagcatgctgtactacctgggcctgatgcagtggatcatcagaaaggtgggctggatcatgctggtgaccaccggcagcagccccatcgagagcgtggtggccagcggcaacatcttcgtgggccagaccgagagccccctgctggtgagaccctacctgccctacatcaccaagagcgagctgcacgccatcatgaccgccggcttcagcaccatcgccggcagcgtgctgggcgcctacatcagcttcggcgtgcccagcagccacctgctgaccgccagcgtgatgagcgcccccgccagcctggccgccgccaagctgttctggcccgagaccgagaagcccaagatcaccctgaagaacgccatgaagatggagagcggcgacagcggcaacctgctggaggccgccacccagggcgccagcagcagcatcagcctggtggccaacatcgccgtgaacctgatcgccttcctggccctgctgagcttcatgaacagcgccctgagctggttcggcaacatgttcgactacccccagctgagcttcgagctgatctgcagctacatcttcatgcccttcagcttcatgatgggcgtggagtggcaggacagcttcatggtggccagactgatcggctacaagaccttcttcaacgagttcgtggcctacgagcacctgagcaagtggatccacctgagaaaggagggcggccccaagttcgtgaacggcgtgcagcagtacatcagcatcagaagcgagatcatcgccacctacgccctgtgcggcttcgccaacatcggcagcctgggcatcgtgatcggcggcctgaccagcatggcccccagcagaaagagagacatcgccagcggcgccgtgagagccctgatcgccggcaccgtggcctgcttcatgaccgcctgcatcgccggcatcctgagcagcacccccgtggacatcaactgccaccacgtgctggagaacgccttcaacagcaccttccccggcaacaccaccaaggtgatcgcctgctgccagagcctgctgagcagcaccgtggccaagggccccggcgaggtgatccccggcggcaaccacagcctgtacagcctgaagggctgctgcaccctgctgaaccccagcaccttcaactgcaacggcatcagcaacaccttctag

SEQ ID NO: 77835 - protein, 496 aa, Artificial Sequence
  derived and/or modified sequence
MAGVVHVSLAALLLLPMAPAMHSDCIFKKEQAMCLEKIQRANELMGFNDSSPGCPGMWDNITCWKPAHVGEMVLVSCPELFRIFNPDQVWETETIGESDFGDSNSLDLSDMGVVSRNCTEDGWSEPFPHYFDACGFDEYESETGDQDYYYLSVKALYTVGYSTSLVTLTTAMVILCRFRKLHCTRNFIHMNLFVSFMLRAISVFIKDWILYAEQDSNHCFISTVECKAVMVFFHYCVVSNYFWLFIEGLYLFTLLVETFFPERRYFYWYTIIGWGTPTVCVTVWATLRLYFDDTGCWDMNDSTALWWVIKGPVVGSIMVNFVLFIGIIVILVQKLQSPDMGGNESSIYFSCVQKCYCKPQRAQQHSCKMSELSTITLRLARSTLLLIPLFGIHYTVFAFSPENVSKRERLVFELGLGSFQGFVVAVLYCFLNGEVQAEIKRKWRSWKVNRYFAVDFKHRHPSLASSGVNGGTQLSILSKSSSQIRMSGLPADNLAT

SEQ ID NO: 77836 - DNA, 1491 bp, Artificial Sequence
  derived and/or modified sequence
atggcaggcgtggttcacgtgagtctggccgccctcctcctgctgcccatggcccccgcgatgcattcggattgtattttcaagaaagagcaagctatgtgtttggaaaagattcagcgcgccaatgagctgatgggtttcaacgactcctcccccgggtgcccaggaatgtgggataacattacctgctggaaaccagctcacgtaggcgagatggtgctggtctcatgcccagagctctttaggattttcaatcctgatcaggtgtgggagaccgagactattggcgagtccgatttcggagatagtaattctctcgatctttcggacatgggcgtcgtaagtcgcaattgcactgaggacggctggtcagagccttttccccactatttcgatgcttgcggctttgacgagtacgagtcagaaacgggcgaccaagattactactacctgagtgtgaaagccctgtacaccgtggggtactccacctctctagtaacactgactacagccatggttatcttgtgcaggttccggaagctccactgtacgagaaacttcattcacatgaatctctttgtctcgtttatgctcagagcaatatcggtgttcataaaagactggattctctatgccgagcaagacagcaaccactgcttcatatcaacagtggaatgcaaggctgtgatggttttcttccattactgtgtggtgagtaactacttttggttgtttatcgagggcctctacctgtttacactgttggtggaaacctttttccccgagaggcgctacttctattggtatactattatagggtggggcacgcctacggtatgcgtgacagtgtgggccaccttacggctctactttgatgataccgggtgttgggatatgaatgactccaccgccctgtggtgggtgattaaagggcctgtggtgggatccatcatggtcaacttcgtcctgtttattgggatcatagtaattctggtccaaaagctgcagagtcctgatatgggaggcaacgaatcgtccatatatttctcctgtgtgcagaagtgttattgtaagcctcagagagctcagcagcattcatgcaaaatgtcggagctttccacgattaccctgagactggcacgctcgactttactcctgatccccctgttcggcatccactacacagtttttgctttctcacccgagaacgtctctaaaagggagaggcttgtgtttgagttgggattgggcagcttccaagggtttgttgtcgcagtgctctactgttttctaaacggagaagtacaggcggagatcaaacgaaagtggcggagttggaaggtgaaccggtattttgcagtcgattttaagcatagacatcctagtctggccagctccggggtgaacggggggacacagctaagcatactctcaaagtccagcagccagatccggatgtcaggcctcccagccgataacctggctacttag

SEQ ID NO: 77837 - DNA, 1587 bp, Artificial Sequence
  derived and/or modified sequence
cccagagacacattggggctgacctgccgctgctgtcagtgggaggccagtggtgctggccaagaagtgtcatggctggtgtcgtgcacgtttccctggctgctctcctcctgctgcctatggcccctgccatgcattctgactgcatcttcaagaaggagcaagccatgtgcctggagaagatccagagggccaatgagctgatgggcttcaatgattcctctccaggctgtcctgggatgtgggacaacatcacgtgttggaagcccgcccatgtgggtgagatggtcctggtcagctgccctgagctcttccgaatcttcaacccagaccaagtctgggagaccgaaaccattggagagtctgattttggtgacagtaactccttagatctctcagacatgggagtggtgagccggaactgcacggaggatggctggtcggaacccttccctcattactttgatgcctgtgggtttgatgaatatgaatctgagactggggaccaggattattactacctgtcagtgaaggccctctacacggttggctacagcacatccctcgtcaccctcaccactgccatggtcatcctttgtcgcttccggaagctgcactgcacacgcaacttcatccacatgaacctgtttgtgtcgttcatgctgagggcgatctccgtcttcatcaaagactggattctgtatgcggagcaggacagcaaccactgcttcatctccactgtggaatgtaaggccgtcatggttttcttccactactgtgttgtgtccaactacttctggctgttcatcgagggcctgtacctcttcactctgctggtggagaccttcttccctgaaaggagatacttctactggtacaccatcattggctgggggaccccaactgtgtgtgtgacagtgtgggctacgctgagactctactttgatgacacaggctgctgggatatgaatgacagcacagctctgtggtgggtgatcaaaggccctgtggttggctctatcatggttaactttgtgctttttattggcattatcgtcatccttgtgcagaaacttcagtctccagacatgggaggcaatgagtccagcatctacttcagctgcgtgcagaaatgctactgcaagccacagcgggctcagcagcactcttgcaagatgtcagaactgtccaccattactctgcgactggcccggtccaccctgctgctcatcccactattcggaatccactacacagtatttgccttctccccagagaatgtcagcaaaagggaaagactcgtgtttgagctggggctgggctccttccagggctttgtggtggctgttctctactgttttctgaatggtgaggtacaagcggagatcaagcgaaaatggcgaagctggaaggtgaaccgttacttcgctgtggacttcaagcaccgacacccgtctctggccagcagtggggtgaatgggggcacccagctctccatcctgagcaagagcagctcccaaatccgcatgtctggcctccctgctgacaatctggccacctgagccatgctcccctcctcctcctctc

SEQ ID NO: 77838 - DNA, 1491 bp, Artificial Sequence
  derived and/or modified sequence
atggccggcgtggtgcacgtgtccctggccgccctgctgctgctgcccatggccccagccatgcacagcgactgcatcttcaagaaggagcaggccatgtgcctggagaagatccagagggccaatgagctgatgggcttcaatgacagcagccctggctgccccggcatgtgggacaacatcacctgctggaagccagcccacgtgggggagatggtgctggtgtcctgcccagagctgttccgcatcttcaacccagaccaggtgtgggagacagagaccatcggggagagtgactttggagacagcaacagcctggacctgagtgacatgggcgtggtgtccaggaactgcacagaagatggctggagcgagcccttcccccactactttgatgcctgtggctttgatgaatatgaaagtgaaacaggagaccaggactactactacctgtctgtgaaggccctgtacacagtgggctacagcaccagcctggtgaccctgaccacagccatggtgatcctgtgccgcttcaggaagctgcactgcaccaggaacttcatccacatgaacctgtttgtgtccttcatgctgcgggccatcagcgtcttcatcaaggactggatcctgtatgcagagcaggacagcaaccactgcttcatcagcacagtggagtgcaaggctgtgatggtgttcttccactactgtgtggtgagcaactacttctggctgttcatcgagggcctgtacctgttcaccctgctggtggagaccttcttccctgagcggcgctacttctactggtacaccatcatcggctggggcacccccaccgtgtgtgtgacagtgtgggccaccctgcggctgtactttgatgacaccggctgctgggacatgaatgacagcacagccctgtggtgggtgatcaagggccctgtggtgggcagcatcatggtgaactttgtgctcttcatcggcatcatcgtcatcctggtgcagaagctgcagagcccagacatgggcggcaatgaaagcagcatctacttcagctgtgtgcagaagtgctactgcaagccccagagggcccagcagcacagctgcaagatgtctgagctgagcaccatcaccctgcggctggcccggagcaccctgctgctgatccccctgtttggcatccactacacagtgtttgccttctccccagaaaatgtgtccaagcgggagcggctggtgtttgagctgggcctgggcagcttccagggctttgtggtggccgtgctgtactgcttcctgaatggagaggtgcaggccgagatcaagaggaagtggaggtcctggaaggtgaaccgctactttgctgtggacttcaagcaccgccaccccagcctggccagcagcggcgtgaatggaggcacccagctgagcatcctgagcaagagcagcagccagatccgcatgagcggcctgcctgctgacaacctggccacctag

SEQ ID NO: 77839 - DNA, 1491 bp, Artificial Sequence
  derived and/or modified sequence
atggccggcgtggtgcacgtgagcctggccgccctgctgctgctgcccatggcccccgctatgcactccgactgtatttttaagaaagagcaggcgatgtgtctggagaaaatccagagggcaaacgaactcatgggcttcaatgacagctctccgggttgtccaggtatgtgggacaacatcacgtgctggaaaccggcccatgtgggtgaaatggtgctggtgagttgcccagagctgttccggatctttaatcctgatcaggtgtgggaaactgagacaattggtgagagcgactttggagacagcaacagtctggacctcagtgatatgggagttgtgtcaaggaattgcacagaagatgggtggtcagagccattcccccactatttcgacgcctgcggctttgacgaatacgagtctgaaactggtgaccaggactactactacctgagcgtgaaggcactttataccgtaggctattctacctccctggttactctcactacagcaatggtgatattgtgccgctttagaaagctgcattgcacccgcaattttattcacatgaatcttttcgtctctttcatgctgcgcgcaatttctgtgttcatcaaggattggatattgtacgcagagcaggattcaaaccactgtttcatctcaaccgtggaatgcaaagccgtgatggttttttttcactactgtgtcgtgagtaattacttttggctgtttatcgaaggcctatatctcttcacattactggttgaaacctttttcccggagagacggtatttctactggtacacaattatcgggtggggcacccctaccgtttgcgttactgtctgggccacccttcgcctgtattttgatgatacggggtgctgggacatgaatgatagcaccgcactctggtgggtcatcaaagggccagttgtaggaagcattatggtgaatttcgtgctctttatcggtattatcgttatcttagtgcagaagcttcaatcaccggacatgggcggtaacgaatcttctatttacttctcctgtgtccagaagtgctattgtaagccacagagggcacaacaacattcatgcaaaatgagcgagcttagcactattactctgagacttgcccggtcaactctgcttcttatccccctgttcgggatacactacactgtcttcgcattcagtcccgaaaatgtgtccaagagggaacgcctggtgtttgaactcggtttgggcagctttcaaggcttcgttgttgccgttctttactgttttttaaacggagaggtgcaggctgaaattaagcggaagtggcgcagttggaaggtaaacagatacttcgcagtggactttaaacaccgccatccaagcctggcttcatcaggagttaacggtggcacccaactgagcatcctctccaagagctcatcacagatccggatgtctggattacctgcggataacctggctacctag

SEQ ID NO: 77840 - DNA, 1491 bp, Artificial Sequence
  derived and/or modified sequence
atggccggtgtggtccacgttagtttggctgctctcctgctgctgcctatggctcccgctatgcattccgattgcattttcaaaaaggaacaggcaatgtgtctcgagaaaatccagagagctaacgaattaatgggatttaacgacagttccccgggatgtccagggatgtgggacaatattacctgctggaagcccgcacacgtgggagaaatggtgctcgtaagctgtccagagctttttaggatttttaatcccgaccaagtttgggagacagagaccattggagagagcgattttggggactctaacagcctggatctatccgacatgggggtggtgtcccgcaattgcacggaggatggttggtctgagcccttcccccattattttgacgcctgtgggtttgatgagtacgagtcagaaacaggagatcaggattattattatctgtcagtcaaagctctgtatacagtcggttattcaacatctctagtaacattgacgactgcaatggtgatcttgtgccggtttcgtaaactccactgcacccgaaatttcattcacatgaatctgtttgtttcttttatgctgcgagcgatatcggtgtttattaaagattggatcctgtatgccgagcaggattctaatcactgcttcatatcgacggtggaatgcaaggcagttatggtgttcttccactactgcgtcgtgtcaaattacttttggctatttattgagggactctacctgttcactttattggtcgaaacatttttcccggagaggcggtacttctactggtacaccattatcgggtggggtacacctacagtatgcgtcaccgtctgggccaccctccgtctctattttgatgatactggatgctgggacatgaacgattctactgcattgtggtgggttataaagggccctgttgtgggttcaattatggtgaatttcgtgcttttcatcggcattatcgtgatcctcgtgcagaagctccagtcccctgatatgggaggtaacgagtcaagtatctacttctcttgcgttcagaagtgctactgcaagcctcagcgcgctcagcagcactcctgcaaaatgtcagaactttccaccatcacactgagactcgcacgcagcactttactcctcatacccctgtttgggatccactataccgtgtttgctttctcgccagagaacgtgtctaaaagggagcgcctggtgtttgagctggggctcgggtcttttcagggattcgtcgttgccgtgctgtactgcttcttgaatggagaagttcaggccgaaatcaaaagaaagtggcgctcatggaaagtgaataggtatttcgccgttgacttcaagcacaggcacccatctctggcctcctctggggtgaatggtggcacgcagttaagcatacttagcaagtcatccagtcaaatcaggatgtctggcttgccggcagacaatttagctacatag

SEQ ID NO: 77841 - DNA, 1491 bp, Artificial Sequence
  derived and/or modified sequence
atggccggcgtggtgcacgtgagcctggccgccctgctgctgctgcccatggcccccgccatgcacagcgactgcatcttcaagaaggagcaggccatgtgcctggagaagatccagagagccaacgagctgatgggcttcaacgacagcagccccggctgccccggcatgtgggacaacatcacctgctggaagcccgcccacgtgggcgagatggtgctggtgagctgccccgagctgttcagaatcttcaaccccgaccaggtgtgggagaccgagaccatcggcgagagcgacttcggcgacagcaacagcctggacctgagcgacatgggcgtggtgagcagaaactgcaccgaggacggctggagcgagcccttcccccactacttcgacgcctgcggcttcgacgagtacgagagcgagaccggcgaccaggactactactacctgagcgtgaaggccctgtacaccgtgggctacagcaccagcctggtgaccctgaccaccgccatggtgatcctgtgcagattcagaaagctgcactgcaccagaaacttcatccacatgaacctgttcgtgagcttcatgctgagagccatcagcgtgttcatcaaggactggatcctgtacgccgagcaggacagcaaccactgcttcatcagcaccgtggagtgcaaggccgtgatggtgttcttccactactgcgtggtgagcaactacttctggctgttcatcgagggcctgtacctgttcaccctgctggtggagaccttcttccccgagagaagatacttctactggtacaccatcatcggctggggcacccccaccgtgtgcgtgaccgtgtgggccaccctgagactgtacttcgacgacaccggctgctgggacatgaacgacagcaccgccctgtggtgggtgatcaagggccccgtggtgggcagcatcatggtgaacttcgtgctgttcatcggcatcatcgtgatcctggtgcagaagctgcagagccccgacatgggcggcaacgagagcagcatctacttcagctgcgtgcagaagtgctactgcaagccccagagagcccagcagcacagctgcaagatgagcgagctgagcaccatcaccctgagactggccagaagcaccctgctgctgatccccctgttcggcatccactacaccgtgttcgccttcagccccgagaacgtgagcaagagagagagactggtgttcgagctgggcctgggcagcttccagggcttcgtggtggccgtgctgtactgcttcctgaacggcgaggtgcaggccgagatcaagagaaagtggagaagctggaaggtgaacagatacttcgccgtggacttcaagcacagacaccccagcctggccagcagcggcgtgaacggcggcacccagctgagcatcctgagcaagagcagcagccagatcagaatgagcggcctgcccgccgacaacctggccacctag

SEQ ID NO: 77842 - protein, 447 aa, Artificial Sequence
  derived and/or modified sequence
MAGVVHVSLAALLLLPMAPAMHSDCIFKKEQAMCLEKIQRANELMGFNDSSPGCPGMWDNITCWKPAHVGEMVLVSCPELFRIFNPDQDMGVVSRNCTEDGWSEPFPHYFDACGFDEYESETGDQDYYYLSVKALYTVGYSTSLVTLTTAMVILCRFRKLHCTRNFIHMNLFVSFMLRAISVFIKDWILYAEQDSNHCFISTVECKAVMVFFHYCVVSNYFWLFIEGLYLFTLLVETFFPERRYFYWYTIIGWGTPTVCVTVWATLRLYFDDTGCWDMNDSTALWWVIKGPVVGSIMVNFVLFIGIIVILVQKLQSPDMGGNESSIYLRLARSTLLLIPLFGIHYTVFAFSPENVSKRERLVFELGLGSFQGFVVAVLYCFLNGEVQAEIKRKWRSWKVNRYFAVDFKHRHPSLASSGVNGGTQLSILSKSSSQIRMSGLPADNLAT

SEQ ID NO: 77843 - DNA, 225 bp, Artificial Sequence
  derived and/or modified sequence
atggccggtgtggtgcatgtaagcctcgctgccctcctactgctccccatggcacctgcaatgcatagtgactgtatcttcaagaaggagcaagcaatgtgcttggaaaagattcagagggcaaatgagcttatgggctttaacgattcatcacctggttgccccggcatgtgggataacataacctgttggaaaccagcccacgttggggaaatggtactgtag

SEQ ID NO: 77844 - DNA, 1344 bp, Artificial Sequence
  derived and/or modified sequence
atggcaggcgtggtccatgtgtcactggctgccttgctgctgctgcccatggccccagcaatgcactctgattgcatcttcaaaaaggagcaggccatgtgccttgagaaaatccaacgagccaacgaactcatgggttttaacgattcctccccaggctgtcctggaatgtgggacaacataacatgctggaaaccggcacatgtgggagagatggtcttggtgtcgtgccccgaactgtttagaatattcaatccagatcaggatatgggagtcgtatcaaggaattgcacggaggatggctggtccgagccattccctcattactttgatgcttgcgggtttgacgagtatgaaagtgagacaggagaccaagattattactacctttccgtcaaggcactatataccgtgggctacagcaccagcctggtcacactgacgaccgccatggtcatcctttgtcggttccggaaactgcattgcacgaggaactttattcacatgaacctgttcgtctcgtttatgctgcgcgcaattagcgtgtttataaaggactggattttatatgccgagcaagactctaaccattgctttatctcaaccgttgagtgtaaggccgtaatggttttcttccattactgtgtggtgtcaaactacttctggctgtttatcgaaggcctttatctgttcacactgctggtggagacattcttcccagagaggagatacttttactggtatacaatcataggctggggaactcccacagtatgtgtcactgtctgggccacactcaggctctacttcgatgataccgggtgctgggatatgaatgacagtacagctttatggtgggtgatcaagggacccgtggtgggctcgatcatggtcaactttgtcctctttattggcatcattgtgatcctcgtccagaagctgcagtcccccgatatggggggtaatgagtcttctatatacctcagactggcccgatcaactcttttgctgatcccgctgttcgggattcactataccgtgttcgccttcagccccgagaatgtgagtaaaagagaaaggcttgtctttgaactgggacttggcagcttccagggctttgtggttgccgtgctctactgcttccttaacggagaagttcaggccgaaattaagaggaaatggcgcagttggaaggtgaaccgctacttcgcagttgatttcaagcacagacatccgagcctggctagtagcggtgtgaacgggggtacacagctatctatccttagtaagtcatccagccaaatccggatgtctggtctaccggcagacaacctggccacctag

SEQ ID NO: 77845 - DNA, 466 bp, Artificial Sequence
  derived and/or modified sequence
atccaggttttctgggcactcgtgtgtcttgcctgtgccaggtgctgtgggcacacgcacgtcagagctgggctcatgctcacttaggagaggctgaagcttaaccagcgtctgcacaaagggaaaggcgctcagtgcagagctactcctctccacaccacaccccctgccggcccagagacacattggggctgacctgccgctgctgtcagtgggaggccagtggtgctggccaagaagtgtcatggctggtgtcgtgcacgtttccctggctgctctcctcctgctgcctatggcccctgccatgcattctgactgcatcttcaagaaggagcaagccatgtgcctggagaagatccagagggccaatgagctgatgggcttcaatgattcctctccaggctgtcctgggatgtgggacaacatcacgtgttggaagcccgcccatgtgggtgagatggtcctg

SEQ ID NO: 77846 - DNA, 1889 bp, Artificial Sequence
  derived and/or modified sequence
cagccggccacacaggcgcggagacccggctcggcgcgcgctcctcggcgcacacgctccccatccccgcgccgcgcgggccgcggacttgcaggctgcgcgtcctttgcggagtctgccccggccccacggacaggccccgcagtgagcagcccagagacacattggggctgacctgccgctgctgtcagtgggaggccagtggtgctggccaagaagtgtcatggctggtgtcgtgcacgtttccctggctgctctcctcctgctgcctatggcccctgccatgcattctgactgcatcttcaagaaggagcaagccatgtgcctggagaagatccagagggccaatgagctgatgggcttcaatgattcctctccaggctgtcctgggatgtgggacaacatcacgtgttggaagcccgcccatgtgggtgagatggtcctggtcagctgccctgagctcttccgaatcttcaacccagaccaagacatgggagtggtgagccggaactgcacggaggatggctggtcggaacccttccctcattactttgatgcctgtgggtttgatgaatatgaatctgagactggggaccaggattattactacctgtcagtgaaggccctctacacggttggctacagcacatccctcgtcaccctcaccactgccatggtcatcctttgtcgcttccggaagctgcactgcacacgcaacttcatccacatgaacctgtttgtgtcgttcatgctgagggcgatctccgtcttcatcaaagactggattctgtatgcggagcaggacagcaaccactgcttcatctccactgtggaatgtaaggccgtcatggttttcttccactactgtgttgtgtccaactacttctggctgttcatcgagggcctgtacctcttcactctgctggtggagaccttcttccctgaaaggagatacttctactggtacaccatcattggctgggggaccccaactgtgtgtgtgacagtgtgggctacgctgagactctactttgatgacacaggctgctgggatatgaatgacagcacagctctgtggtgggtgatcaaaggccctgtggttggctctatcatggttaactttgtgctttttattggcattatcgtcatccttgtgcagaaacttcagtctccagacatgggaggcaatgagtccagcatctacttgcgactggcccggtccaccctgctgctcatcccactattcggaatccactacacagtatttgccttctccccagagaatgtcagcaaaagggaaagactcgtgtttgagctggggctgggctccttccagggctttgtggtggctgttctctactgttttctgaatggtgaggtacaagcggagatcaagcgaaaatggcgaagctggaaggtgaaccgttacttcgctgtggacttcaagcaccgacacccgtctctggccagcagtggggtgaatgggggcacccagctctccatcctgagcaagagcagctcccaaatccgcatgtctggcctccctgctgacaatctggccacctgagccatgctcccctcctcctcctctcctccatccacaggctgggaccgcaggcaggtgccagcccacgcatgtttgcgcctcttccctccccttgggcaggccctgggctggaagcttggctcctgaggggggagaaggaggcagggcacagactggaattgtcccctccttgttttggtactggtcccacccactgtggtcccctgggccctgaccccagacatgtaaatactcctcaaatttggaaaagttgtcccatcccttccccctttgccccagtgtccctgctcacttccagtcaggtctcagctccaccccactg

SEQ ID NO: 77847 - DNA, 225 bp, Artificial Sequence
  derived and/or modified sequence
atggccggcgtggtgcacgtgtccctggccgccctgctgctgctgcccatggccccagccatgcacagcgactgcatcttcaagaaggagcaggccatgtgcctggagaagatccagagggccaatgagctgatgggcttcaatgacagcagccctggctgccccggcatgtgggacaacatcacctgctggaagccagcccacgtgggggagatggtgctgtag

SEQ ID NO: 77848 - DNA, 1344 bp, Artificial Sequence
  derived and/or modified sequence
atggccggcgtggtgcacgtgtccctggccgccctgctgctgctgcccatggccccagccatgcacagcgactgcatcttcaagaaggagcaggccatgtgcctggagaagatccagagggccaatgagctgatgggcttcaatgacagcagccctggctgccccggcatgtgggacaacatcacctgctggaagccagcccacgtgggggagatggtgctggtgtcctgcccagagctgttccgcatcttcaacccagaccaggacatgggcgtggtgtccaggaactgcacagaagatggctggagcgagcccttcccccactactttgatgcctgtggctttgatgaatatgagagcgagaccggggaccaggactactactacctgtctgtgaaggccctgtacacagtgggctacagcaccagcctggtgaccctgaccacagccatggtgatcctgtgccgcttcaggaagctgcactgcaccaggaacttcatccacatgaacctgtttgtgtccttcatgctgcgggccatctctgtgttcatcaaggactggatcctgtatgcagagcaggacagcaaccactgcttcatcagcacagtggagtgcaaggctgtgatggtgttcttccactactgtgtggtgagcaactacttctggctgttcatcgagggcctgtacctgttcaccctgctggtggagaccttcttccctgagcggcgctacttctactggtacaccatcatcggctggggcacccccaccgtgtgtgtgacagtgtgggccaccctgcggctgtactttgatgacaccggctgctgggacatgaatgacagcacagccctgtggtgggtgatcaagggccctgtggtgggcagcatcatggtgaactttgtgctcttcatcggcatcatcgtcatcctggtgcagaagctgcagagcccagacatgggcggcaatgaaagcagcatctacctgcggctggcccggagcaccctgctgctgatccccctgtttggcatccactacacagtgtttgccttctccccagaaaatgtgtccaagcgggagcggctggtgtttgagctgggcctgggcagcttccagggctttgtggtggccgtgctgtactgcttcctgaatggagaggtgcaggccgagatcaagaggaagtggaggtcctggaaggtgaaccgctactttgctgtggacttcaagcaccgccaccccagcctggccagcagtggagtgaatggaggcacccagctgagcatcctgagcaagagcagcagccagatccgcatgagcggcctgcctgctgacaacctggccacctag

SEQ ID NO: 77849 - DNA, 225 bp, Artificial Sequence
  derived and/or modified sequence
atggccggcgtggtgcacgtgagcctggccgccctgctgctgctgcctatggcaccagctatgcactctgattgtattttcaaaaaggaacaagctatgtgccttgaaaaaatccaacgcgccaacgagttgatgggcttcaatgatagctcaccaggctgccccgggatgtgggataatatcacttgctggaaacctgcacatgtcggtgagatggtcttgtag

SEQ ID NO: 77850 - DNA, 1344 bp, Artificial Sequence
  derived and/or modified sequence
atggccggcgtggtgcacgtgagcctggccgccctgctgctgctgcctatggcccctgctatgcattcagactgtatttttaagaaagaacaggccatgtgcctggagaaaattcagcgcgccaacgaattgatgggcttcaacgattctagccccggctgtccggggatgtgggataacatcacatgttggaaacctgcccatgtcggcgaaatggtgttagtaagttgccctgagctgttccgcatcttcaacccagatcaggacatgggtgtggtgagcagaaactgcactgaagatgggtggtccgagcctttccctcattatttcgatgcgtgtggttttgatgagtatgagagcgagacgggagaccaggattattactacctgtcagtaaaagccttgtatacagtaggatactcaacctcactggtgacactcacgacggcgatggtgattctatgtagattccgcaagctgcactgcactagaaactttatccatatgaatctgttcgtaagctttatgctcagagcgatttccgttttcattaaggactggattctttatgccgagcaggactcgaaccattgtttcatatccaccgtagagtgtaaggccgtcatggtctttttccattactgcgtagtgagcaattacttctggctcttcattgagggcctctatttattcacactgctcgtcgagacattctttccagaacgaagatacttttattggtatacaataattgggtgggggactccaaccgtgtgtgtgacagtttgggcaacattgaggctttacttcgacgatacaggatgttgggatatgaacgatagcacagctctctggtgggttataaagggacccgtggtggggtcaatcatggtgaattttgtgttattcatcgggataatagttatcctggtgcagaagctccaatctccggatatgggtggcaatgaatctagtatttacctcagacttgctcgctctaccctgctattgattcctctgtttggaattcattacacggtttttgccttctcccctgagaatgtctctaagagggaacgcctagttttcgaattgggcctgggtagctttcagggcttcgtggtggccgtgctgtactgcttcctcaacggggaggtccaagccgagataaagaggaaatggcgctcctggaaggtgaacagatactttgctgtggatttcaaacatcgacacccatccctggccagttccggagttaacgggggcacgcagctcagtatcctgtccaaatcatcctcccagattcggatgtctgggttgcctgcagataatctcgctacatag

SEQ ID NO: 77851 - DNA, 225 bp, Artificial Sequence
  derived and/or modified sequence
atggccggagtagtgcacgtctctctggcagccttacttctcctccctatggctcctgcgatgcactcagattgtatcttcaaaaaagagcaggctatgtgtctcgaaaagatccaacgggctaacgaacttatgggattcaatgattcaagccctgggtgccccggtatgtgggataacataacctgttggaaaccagctcatgtcggagaaatggtgctctag

SEQ ID NO: 77852 - DNA, 1344 bp, Artificial Sequence
  derived and/or modified sequence
atggcaggagtcgtgcatgtatcacttgccgcactcctacttctgcccatggctcccgctatgcactccgactgcatttttaagaaagagcaggcaatgtgtcttgagaagatacaacgagctaatgagctgatgggattcaatgacagcagtcctggctgcccaggcatgtgggataatatcacatgttggaaacccgctcacgtcggtgagatggttttggtgagttgccccgaactgtttaggatctttaatcccgatcaagacatgggcgtagtgtctaggaactgtactgaggacggctggtctgaacccttcccacactactttgacgcgtgcggatttgatgagtacgagagcgaaaccggggaccaggattattactatcttagcgtgaaagcactgtacactgttggatactccactagcctagtgactcttactactgcaatggtaatcctgtgcagatttcggaaactccactgcaccaggaactttatccatatgaatctgtttgttagctttatgttgagggcaatcagtgtgttcattaaagactggatattgtatgctgagcaagatagcaaccattgcttcatctccacagtcgaatgcaaagcagtaatggtgttcttccattattgtgtagtgtcaaattacttctggctgttcattgagggcttgtacctctttacactattggtcgaaacttttttccctgaacggagatacttctactggtacacaatcatcgggtggggcaccccaactgtgtgtgtgacggtctgggcgaccctgcggctgtacttcgatgatactgggtgctgggatatgaatgactccactgcattatggtgggtgattaaggggcctgtggtgggtagcataatggtcaatttcgtgctgttcatcggtatcatcgtgattttagtgcagaagcttcaatcacctgatatgggcggaaacgagagttccatatacctccgactcgctaggtctacactgctgctaatccccctctttgggatccattacactgttttcgctttcagccctgaaaacgtaagcaaaagggagcggctggtgttcgagctgggcctcggatccttccagggcttcgttgtggctgtcctctattgcttcctaaatggagaggttcaggccgaaatcaagagaaaatggcgatcctggaaagttaaccgctactttgctgtagacttcaaacacagacacccttctttagctagtagcggtgtgaacgggggtacacagttgagcatcctgtctaaaagtagtagccagattcgcatgagcgggctcccagcggacaatctggccacgtag

SEQ ID NO: 77853 - DNA, 225 bp, Artificial Sequence
  derived and/or modified sequence
atggccggcgtggtgcacgtgagcctggccgccctgctgctgctgcccatggcccccgccatgcacagcgactgcatcttcaagaaggagcaggccatgtgcctggagaagatccagagagccaacgagctgatgggcttcaacgacagcagccccggctgccccggcatgtgggacaacatcacctgctggaagcccgcccacgtgggcgagatggtgctgtag

SEQ ID NO: 77854 - DNA, 1344 bp, Artificial Sequence
  derived and/or modified sequence
atggccggcgtggtgcacgtgagcctggccgccctgctgctgctgcccatggcccccgccatgcacagcgactgcatcttcaagaaggagcaggccatgtgcctggagaagatccagagagccaacgagctgatgggcttcaacgacagcagccccggctgccccggcatgtgggacaacatcacctgctggaagcccgcccacgtgggcgagatggtgctggtgagctgccccgagctgttcagaatcttcaaccccgaccaggacatgggcgtggtgagcagaaactgcaccgaggacggctggagcgagcccttcccccactacttcgacgcctgcggcttcgacgagtacgagagcgagaccggcgaccaggactactactacctgagcgtgaaggccctgtacaccgtgggctacagcaccagcctggtgaccctgaccaccgccatggtgatcctgtgcagattcagaaagctgcactgcaccagaaacttcatccacatgaacctgttcgtgagcttcatgctgagagccatcagcgtgttcatcaaggactggatcctgtacgccgagcaggacagcaaccactgcttcatcagcaccgtggagtgcaaggccgtgatggtgttcttccactactgcgtggtgagcaactacttctggctgttcatcgagggcctgtacctgttcaccctgctggtggagaccttcttccccgagagaagatacttctactggtacaccatcatcggctggggcacccccaccgtgtgcgtgaccgtgtgggccaccctgagactgtacttcgacgacaccggctgctgggacatgaacgacagcaccgccctgtggtgggtgatcaagggccccgtggtgggcagcatcatggtgaacttcgtgctgttcatcggcatcatcgtgatcctggtgcagaagctgcagagccccgacatgggcggcaacgagagcagcatctacctgagactggccagaagcaccctgctgctgatccccctgttcggcatccactacaccgtgttcgccttcagccccgagaacgtgagcaagagagagagactggtgttcgagctgggcctgggcagcttccagggcttcgtggtggccgtgctgtactgcttcctgaacggcgaggtgcaggccgagatcaagagaaagtggagaagctggaaggtgaacagatacttcgccgtggacttcaagcacagacaccccagcctggccagcagcggcgtgaacggcggcacccagctgagcatcctgagcaagagcagcagccagatcagaatgagcggcctgcccgccgacaacctggccacctag

SEQ ID NO: 77855 - protein, 228 aa, Artificial Sequence
  derived and/or modified sequence
MKPKMKYSTNKISTAKWKNTASKALCFKLGKSQQKAKEVCPMYFMKLRSGLMIKKEACYFRRETTKRPSLKTGRKHKRHLVLAACQQQSTVECFAFGISGVQKYTRALHDSSITDKVLLSYYESQHPSNESGDGVDGKMLMVTLSPTKDFWLHANNKEHSVELHKCEKPLPDQAFFVLHNMHSNCVSFECKTDPGVFIGVKDNHLALIKVDSSENLCTENILFKLSET

SEQ ID NO: 77856 - DNA, 687 bp, Artificial Sequence
  derived and/or modified sequence
atgaagcccaagatgaagtacagcaccaacaagatcagcaccgccaagtggaagaacaccgccagcaaggccctgtgcttcaagctgggcaagagccagcagaaggccaaggaggtgtgccccatgtacttcatgaagctgagaagcggcctgatgatcaagaaggaggcctgctacttcagaagagagaccaccaagagacccagcctgaagaccggcagaaagcacaagagacacctggtgctggccgcctgccagcagcagagcaccgtggagtgcttcgccttcggcatcagcggcgtgcagaagtacaccagagccctgcacgacagcagcatcaccgacaaggtgctgctgagctactacgagagccagcaccccagcaacgagagcggcgacggcgtggacggcaagatgctgatggtgaccctgagccccaccaaggacttctggctgcacgccaacaacaaggagcacagcgtggagctgcacaagtgcgagaagcccctgcccgaccaggccttcttcgtgctgcacaacatgcacagcaactgcgtgagcttcgagtgcaagaccgaccccggcgtgttcatcggcgtgaaggacaaccacctggccctgatcaaggtggacagcagcgagaacctgtgcaccgagaacatcctgttcaagctgagcgagacctag

SEQ ID NO: 77857 - DNA, 687 bp, Artificial Sequence
  derived and/or modified sequence
atgaaaccaaaaatgaaatatagtacaaacaaaatatccacagccaagtggaagaatacggcttcaaaggctctgtgtttcaagctcgggaaaagccaacagaaggcgaaggaggtgtgcccaatgtacttcatgaaattgaggagcggtttgatgattaaaaaggaagcgtgttattttcgcagggaaaccaccaaaagaccttctctcaaaacaggccgcaagcacaagagacaccttgtgcttgcagcctgtcagcagcagtcgactgtcgagtgtttcgcctttggaatcagcggagtgcagaagtatacccgggccctgcacgactctagcatcactgataaggttttgctgtcgtactacgagagccaacacccaagtaacgaaagtggcgacggtgtggatggcaaaatgttaatggtcaccctttccccgaccaaggatttttggctgcatgccaacaataaggagcacagcgtggagttacacaagtgtgagaagcctctcccagatcaagcattctttgtgctccacaacatgcactccaattgtgtatctttcgaatgcaagacagatcccggcgtgtttattggcgtaaaggacaatcaccttgcgttaatcaaagtcgactcttccgaaaacctgtgtacagagaacattttatttaagctatcagagacctag

SEQ ID NO: 77858 - DNA, 687 bp, Artificial Sequence
  derived and/or modified sequence
atgaagcccaagatgaagtacagcaccaacaagatcagcacagccaagtggaagaacacagccagcaaggccctgtgcttcaagctgggcaagagccagcagaaggccaaggaggtgtgccccatgtacttcatgaagctgcggagcggcctgatgatcaagaaggaggcctgctacttcagaagagagaccaccaagaggcccagcctgaagacaggcaggaagcacaagaggcacctggtgctggccgcctgccagcagcagagcacagtggagtgctttgccttcggcatctctggagtgcagaagtacacccgggccctgcatgacagcagcatcacagacaaggtgctgctgagctactatgagagccagcaccccagcaatgaaagtggagatggagtggatggcaagatgctgatggtgaccctgagccccaccaaggacttctggctgcacgccaacaacaaggagcacagcgtggagctgcacaagtgtgagaagcccctgcctgaccaggccttctttgtgctgcacaacatgcacagcaactgtgtgtcctttgagtgcaagacagaccccggggtcttcatcggcgtgaaggacaaccacctggccctgatcaaggtggacagcagcgagaacctgtgcacagagaacatcctcttcaagctgtctgagacctag

SEQ ID NO: 77859 - DNA, 687 bp, Artificial Sequence
  derived and/or modified sequence
atgaagcccaagatgaagtacagcaccaacaagatcagcaccgccaagtggaagaacacagcttctaaggcactgtgcttcaagctgggcaagtcccaacaaaaagcgaaggaggtatgcccaatgtacttcatgaaattgaggtcgggccttatgattaagaaagaggcgtgctatttcaggagggaaacaactaaacgccctagcctgaaaacaggaagaaaacataagaggcacctggtcctggcagcctgtcagcagcagtctaccgtggagtgttttgcctttggtatctccggagtgcagaaatacactagggcccttcacgactcctcgatcactgacaaagtgcttctgagctactatgagagccaacacccctctaatgaatcgggcgacggagtggatgggaagatgctaatggtgactttgtcgcccaccaaggacttttggctgcacgctaataataaggaacattcggtggagctgcataagtgcgaaaagccgctaccagatcaggctttctttgtgttgcacaatatgcattcaaactgcgtgagtttcgagtgtaagactgatccaggcgtgttcattggcgtgaaagataaccacctggccctgatcaaagtggactcttcagagaacctgtgcaccgaaaatatcctcttcaagcttagcgagacatag

SEQ ID NO: 77860 - DNA, 687 bp, Artificial Sequence
  derived and/or modified sequence
atgaaaccaaagatgaagtactccacaaacaaaatttctactgccaaatggaagaacacggcgtccaaggccctttgctttaagctaggtaaatcccagcagaaagccaaggaagtgtgccccatgtatttcatgaaactgcgcagtggtctgatgatcaagaaagaagcatgctacttccgaagggaaactacaaagcgcccatccctcaaaaccggcaggaagcacaagagacacctcgtcctggcagcttgtcagcagcagtctactgtcgagtgtttcgcctttggtatctctggtgtccagaaatataccagagcgttgcatgatagctctatcacggacaaggttctgctgagctactacgaatcccagcaccccagtaacgagtcgggggatggggtggatggcaagatgctcatggtgacactgtcacctactaaggacttttggcttcacgccaataacaaagaacactcagttgaactgcacaagtgcgagaagcccctccccgatcaggcctttttcgtgctgcataatatgcatagcaactgtgtttctttcgaatgcaaaaccgatcccggagtgttcatcggcgtaaaagacaaccaccttgctctcatcaaggttgactcatccgaaaatttatgtactgaaaatatacttttcaagctaagcgagacatag

SEQ ID NO: 77861 - DNA, 1303 bp, Artificial Sequence
  derived and/or modified sequence
agagctgcagctcttcagggaagaaatcaaaacaagatcacaagaatactgaaaaatgaagcctaaaatgaagtattcaaccaacaaaatttccacagcaaagtggaagaacacagcaagcaaagccttgtgtttcaagctgggaaaatcccaacagaaggccaaagaagtttgccccatgtactttatgaagctccgctctggccttatgataaaaaaggaggcctgttactttaggagagaaaccaccaaaaggccttcactgaaaacaggtagaaagcacaaaagacatctggtactcgctgcctgtcaacagcagtctactgtggagtgctttgcctttggtatatcaggggtccagaaatatactagagcacttcatgattcaagtatcacagataaggtgttactgagttactatgagtctcaacacccctcaaatgaatcaggtgacggtgttgatggtaagatgttaatggtaaccctgagtcctacaaaagacttctggttgcatgccaacaacaaggaacactctgtggagctccataagtgtgaaaaaccactgccagaccaggccttctttgtccttcataatatgcactccaactgtgtttcatttgaatgcaagactgatcctggagtgtttataggtgtaaaggataatcatcttgctctgattaaagtagactcttctgagaatttgtgtactgaaaatatcttgtttaagctctctgaaacttagttgatggaaacctgtgagtcttgggttgagtacccaaatgctaccactggagaaggaatgagagataaagaaagagacaggtgacatctaagggaaatgaagagtgcttagcatgtgtggaatgttttccatattatgtataaaaatattttttctaatcctccagttattcttttatttccctctgtataactgcatcttcaatacaagtatcagtatattaaatagggtattggtaaagaaacggtcaacattctaaagagatacagtctgacctttacttttctctagtttcagtccagaaagaacttcatatttagagctaaggccactgaggaaagagccatagcttaagtctctatgtagacagggatccattttaaagagctacttagagaaataattttccacagttccaaacgataggctcaaacactagagctgctagtaaaaagaagaccagatgcttcacagaattatcattttttcaactggaataaaacaccaggtttgtttgtagatgtcttaggcaacactcagagcagatctcccttactgtca

SEQ ID NO: 77862 - protein, 144 aa, Artificial Sequence
  derived and/or modified sequence
MKPKMKYSTNKISTAKWKNTASKALCFKLGNKVLLSYYESQHPSNESGDGVDGKMLMVTLSPTKDFWLHANNKEHSVELHKCEKPLPDQAFFVLHNMHSNCVSFECKTDPGVFIGVKDNHLALIKVDSSENLCTENILFKLSET

SEQ ID NO: 77863 - DNA, 435 bp, Artificial Sequence
  derived and/or modified sequence
atgaagcccaagatgaagtacagcaccaacaagatcagcaccgccaagtggaagaacaccgccagcaaggccctgtgcttcaagctgggcaacaaggtgctgctgagctactacgagagccagcaccccagcaacgagagcggcgacggcgtggacggcaagatgctgatggtgaccctgagccccaccaaggacttctggctgcacgccaacaacaaggagcacagcgtggagctgcacaagtgcgagaagcccctgcccgaccaggccttcttcgtgctgcacaacatgcacagcaactgcgtgagcttcgagtgcaagaccgaccccggcgtgttcatcggcgtgaaggacaaccacctggccctgatcaaggtggacagcagcgagaacctgtgcaccgagaacatcctgttcaagctgagcgagacctag

SEQ ID NO: 77864 - DNA, 435 bp, Artificial Sequence
  derived and/or modified sequence
atgaagccaaagatgaaatacagcacaaacaagatatctacggccaagtggaaaaatacagcttccaaagccctatgcttcaaattgggaaacaaggttctactgtcttactacgagtcacaacacccctctaatgagtccggagacggtgtggatggtaagatgcttatggttacacttagcccaacgaaagacttctggctccatgctaacaacaaggagcacagcgtcgaacttcacaaatgcgagaagccgcttcctgaccaggctttcttcgtgctgcataatatgcattccaactgcgtgtctttcgaatgtaagacggatcctggggtattcatcggcgtgaaagacaaccaccttgcgctcattaaggttgacagctccgagaatttatgtaccgagaatattttgttcaaacttagcgaaacctag

SEQ ID NO: 77865 - DNA, 435 bp, Artificial Sequence
  derived and/or modified sequence
atgaagcccaagatgaagtacagcaccaacaagatcagcacagccaagtggaagaacacagccagcaaggccctgtgcttcaagctgggcaacaaggtgctgctgagctactatgagagccagcaccccagcaatgaaagtggagatggagtggatggcaagatgctgatggtgaccctgagccccaccaaggacttctggctgcacgccaacaacaaggagcacagcgtggagctgcacaagtgtgagaagcccctgcctgaccaggccttctttgtgctgcacaacatgcacagcaactgtgtgtcctttgagtgcaagacagaccccggggtcttcatcggcgtgaaggacaaccacctggccctgatcaaggtggacagcagcgagaacctgtgcacagagaacatcctcttcaagctgtctgagacctag

SEQ ID NO: 77866 - DNA, 435 bp, Artificial Sequence
  derived and/or modified sequence
atgaagcccaagatgaagtacagcaccaacaagatcagcaccgccaagtggaagaacacagcttccaaagccctctgtttcaaactgggcaacaaggttctgttgtcctattacgaatcccaacatccgagcaacgaaagcggggacggcgttgatggcaaaatgttaatggtgaccctgtctcccactaaggacttctggctacacgccaataataaggaacactctgtcgaattacataaatgtgaaaaacccctgcccgatcaggcctttttcgtgcttcacaatatgcatagcaattgcgtgtcctttgagtgtaaaactgatcctggtgtattcataggtgtgaaggataatcacctggcacttattaaggtggacagcagcgagaatctgtgtaccgaaaatattctgtttaaacttagcgagacatag

SEQ ID NO: 77867 - DNA, 435 bp, Artificial Sequence
  derived and/or modified sequence
atgaaaccgaagatgaaatattccactaacaaaatttccaccgcgaagtggaagaataccgccagtaaggctctctgctttaagctcggcaataaagtgctcttaagctattacgagtcccagcaccccagtaatgagagcggggatggcgtggatggcaagatgctgatggtgacactctcacctacaaaagatttctggctgcatgctaataacaaagagcactctgtagaactccataagtgtgaaaaacctttacctgaccaggccttcttcgtcttacacaatatgcacagtaactgtgtgagtttcgagtgcaaaactgatccaggcgtgtttattggagtcaaggacaaccatcttgccttgatcaaggtcgactcttctgaaaacctgtgcactgagaacatcctattcaaactttcagagacatag

SEQ ID NO: 77868 - DNA, 943 bp, Artificial Sequence
  derived and/or modified sequence
acacagagctgcagctcttcagggaagaaatcaaaacaagatcacaagaatactgaaaaatgaagcctaaaatgaagtattcaaccaacaaaatttccacagcaaagtggaagaacacagcaagcaaagccttgtgtttcaagctgggaaataaggtgttactgagttactatgagtctcaacacccctcaaatgaatcaggtgacggtgttgatggtaagatgttaatggtaaccctgagtcctacaaaagacttctggttgcatgccaacaacaaggaacactctgtggagctccataagtgtgaaaaaccactgccagaccaggccttctttgtccttcataatatgcactccaactgtgtttcatttgaatgcaagactgatcctggagtgtttataggtgtaaaggataatcatcttgctctgattaaagtagactcttctgagaatttgtgtactgaaaatatcttgtttaagctctctgaaacttagttgatggaaacctgtgagtcttgggttgagtacccaaatgctaccactggagaaggaatgagagataaagaaagagacaggtgacatctaagggaaatgaagagtgcttagcatgtgtggaatgttttccatattatgtataaaaatattttttctaatcctccagttattcttttatttccctctgtataactgcatcttcaatacaagtatcagtatattaaatagggtattggtaaagaaacggtcaacattctaaagagatacagtctgacctttacttttctctagtttcagtccagaaagaacttcatatttagagctaaggccactgaggaaagagccatagcttaagtctctatgtagacagggatccattttaaagagctacttagagaaataattttccacagttccaaacgataggctcaaacactagagctgctagt

SEQ ID NO: 77869 - protein, 911 aa, Artificial Sequence
  derived and/or modified sequence
MKSQKEGCCSRGDLSIQTGPGGEWAPRRLVSNVLIFSCTNIVGVCTHYPAEVSQRQAFQETRECIQARLHSQRENQQQERLLLSVLPRHVAMEMKADINAKQEDMMFHKIYIQKHDNVSILFADIEGFTSLASQCTAQELVMTLNELFARFDKLAAENHCLRIKILGDCYYCVSGLPEARADHAHCCVEMGMDMIEAISLVREVTGVNVNMRVGIHSGRVHCGVLGLRKWQFDVWSNDVTLANHMEAGGKAGRIHITKATLNYLNGDYEVEPGCGGERNAYLKEHSIETFLILRCTQKRKEEKAMIAKMNRQRTNSIGHNPPHWGAERPFYNHLGGNQVSKEMKRMGFEDPKDKNAQESANPEDEVDEFLGRAIDARSIDRLRSEHVRKFLLTFREPDLEKKYSKQVDDRFGAYVACASLVFLFICFVQITIVPHSIFMLSFYLTCSLLLTLVVFVSVIYSCVKLFPSPLQTLSRKIVRSKMNSTLVGVFTITLVFLAAFVNMFTCNSRDLLGCLAQEHNISASQVNACHVAESAVNYSLGDEQGFCGSPWPNCNFPEYFTYSVLLSLLACSVFLQISCIGKLVLMLAIELIYVLIVEVPGVTLFDNADLLVTANAIDFFNNGTSQCPEHATKVALKVVTPIIISVFVLALYLHAQQVESTARLDFLWKLQATEEKEEMEELQAYNRRLLHNILPKDVAAHFLARERRNDELYYQSCECVAVMFASIANFSEFYVELEANNEGVECLRLLNEIIADFDEIISEDRFRQLEKIKTIGSTYMAASGLNDSTYDKVGKTHIKALADFAMKLMDQMKYINEHSFNNFQMKIGLNIGPVVAGVIGARKPQYDIWGNTVNVASRMDSTGVPDRIQVTTDMYQVLAANTYQLECRGVVKVKGKGEMMTYFLNGGPPLS

SEQ ID NO: 77870 - DNA, 2736 bp, Artificial Sequence
  derived and/or modified sequence
atgaagtcccagaaggaaggctgttgttctcgcggcgacctgtccatccagaccggacctggaggcgagtgggcaccaaggcgcctggtgtccaatgtcctgattttctcttgcaccaacattgtgggagtgtgtactcattatccagcagaagtatcgcagcggcaagcctttcaagagacccgggaatgcatccaggcccggctccactctcaacgagagaatcaacaacaggagcgactgcttctgagtgttcttccgcggcatgtagccatggagatgaaggcagacataaatgccaaacaagaggacatgatgttccataagatctacatacagaaacatgataacgtctccatcctatttgcagacatagaaggatttacctccctggcatcgcagtgtaccgcccaggagttggttatgacgttgaacgagctctttgcccgcttcgacaaactcgcagccgagaatcactgtctgaggatcaaaatattgggcgattgttactattgtgtttctgggttaccagaagcccgggcagaccacgctcactgttgtgtagaaatgggtatggacatgatcgaggccatctcattagtgcgggaagtcactggggtgaacgtgaacatgcgggtggggatccattcaggaagagtgcactgcggcgttttgggcctgagaaagtggcagtttgacgtatggagcaatgacgtcactctcgcaaatcatatggaggctggtggcaaggctgggagaatacatattaccaaggccacactgaactacctcaacggagactatgaggtcgagcctggatgtggtggcgagagaaatgcctacttaaaggaacacagcatcgagacgtttctgattctccgttgcacacagaagagaaaggaagagaaggccatgatcgctaagatgaaccgccagcggacaaactccatcgggcacaatcccccacactggggtgcagaaagaccattttacaaccatctggggggaaatcaagtttctaaagagatgaagcgaatgggttttgaagacccaaaagataagaatgctcaggaaagcgcaaaccccgaggacgaggtggatgaatttctgggcagggccatcgacgcgcgctccattgaccggcttcgctccgagcatgtcaggaagttccttctgacgttccgcgagccggacctcgagaagaaatacagtaagcaggtggatgatcgattcggagcctacgtggcatgtgcgagtctcgtgttcttgtttatctgtttcgtccaaatcaccattgtgccccattctatcttcatgctaagtttctacctcacgtgttccttgctgctcaccctcgtcgtgttcgtgagcgtgatttactcttgtgtgaaactgtttcctagccccttgcagactctcagtcgcaagatcgtgcggtccaagatgaacagcaccctagtcggcgtgtttacaatcacactggtctttctggccgcctttgttaacatgttcacatgtaactctagagacctcctaggctgcctggctcaggaacataatatctctgcatctcaggtcaacgcatgtcacgtggctgagagcgctgtcaattactctctgggagacgaacaaggcttctgcgggagcccatggcccaattgcaatttcccagagtacttcacctattctgtattgctttctctactagcttgctcggtgttccttcagatctcatgtatcggcaagctggtcctcatgctagctatcgagctgatttacgtcctgatagtggaagtccctggagtgacattattcgacaacgccgacctgctggttaccgcaaatgccattgatttcttcaacaatggcacttctcagtgccctgagcatgcgactaaggtcgctctgaaggtggtcaccccaatcattatctctgtctttgtgttggcactgtacttgcatgcacagcaggtggaatctaccgcccggcttgacttcctctggaagctgcaagccactgaggaaaaggaggaaatggaggagcttcaggcttataacaggagactgctgcataatatcctgcctaaagacgtggcagctcacttcctcgctcgggagagaaggaatgacgagctctactatcaaagttgtgagtgcgtggccgtcatgtttgcgtctatagccaatttctcagagttctacgtggagctggaggcaaataatgaaggcgtagaatgcctgaggctgttgaatgaaatcattgctgacttcgatgaaattattagcgaagaccgatttaggcagttagagaagatcaagacaatcggttcaacatatatggccgctagcggcctaaatgattcaacatacgacaaggtcgggaaaactcacattaaagcactggccgattttgctatgaagctgatggaccagatgaagtacattaatgagcatagctttaacaacttccaaatgaaaattggtctcaacatcggtccggtggtcgccggtgtaataggggctcggaaaccccagtacgatatttggggaaacactgtcaacgtagcgtcacgtatggactccacaggagtacccgataggatccaggtcacgactgatatgtatcaggtgctcgctgcgaatacctaccagctggagtgtagaggagtagtaaaggtgaagggcaagggggagatgatgacctactttctaaatgggggaccaccgctatcgtag

SEQ ID NO: 77871 - DNA, 2841 bp, Artificial Sequence
  derived and/or modified sequence
tataaatgtcctagggaaggaggttattgcctttagcccctttttggggaagcgtctggaagtaagtcctgaggaatgaagtctcagaaagagggctgttgcagcagaggtgacctgtccattcagacaggtcctggaggagaatgggccccacggaggcttgtctccaatgttctcattttctcctgcaccaacatcgtgggtgtctgcacccactatccggctgaggtctcccagagacaggctttccaggagacccgagagtgcatccaggcgcggctccactcgcagcgggagaaccagcagcaggaacggctcctgctgtctgtccttccccgtcatgttgccatggagatgaaagcagacatcaacgccaagcaggaggatatgatgttccataagatttacatccagaaacatgacaacgtgagcatcctgtttgctgacatcgagggcttcaccagcctggcgtcccagtgcactgcacaggaactggtcatgaccctcaacgagctcttcgcccgctttgacaagctggccgcagagaatcactgtttacgtattaagatccttggggattgttattactgcgtctcggggctgcctgaagcaagggctgaccacgcccactgctgtgtggagatgggcatggacatgatcgaggccatctcgttggtccgggaggtgacaggggtgaacgtgaacatgcgtgtgggaattcacagcgggcgagtacactgcggtgtccttggtctcaggaagtggcagttcgacgtctggtctaacgatgtcacgctagccaaccacatggaggctggcggcaaggcaggacgcatccacatcaccaaggctacactcaactacctgaatggggactacgaggtggagccaggctgtgggggcgagcgcaacgcctacctcaaggagcacagtatcgagaccttcctcatcctgcgctgcacccagaagcggaaagaagagaaggccatgatcgccaagatgaaccgccagagaaccaactccatcgggcacaacccaccacactggggggctgagcgccccttctacaaccacctgggtggcaaccaggtgtccaaggagatgaagcggatgggctttgaagaccccaaggacaagaacgcccaggagagtgcgaaccctgaggatgaagtggatgagtttctgggccgtgccattgacgccaggagcattgataggcttcggtctgagcacgtccgcaagttcctcctgaccttcagggagcctgacttagagaagaagtactccaagcaggtagacgaccgatttggtgcctatgtggcgtgtgcctcgctcgtcttcctcttcatctgctttgtccagatcaccatcgtgccccactccatattcatgctcagcttctacctgacctgttccctgctgctgaccttggtggtgtttgtgtctgtgatctactcctgcgtaaagctcttcccctccccactgcagaccctctccaggaagatcgtgcggtccaagatgaacagcaccctggttggggtgttcaccatcaccctggtgttcctggcggcttttgtcaacatgttcacgtgcaactccagggacctgctgggctgcttggcacaggagcacaacatcagcgcgagccaggtcaacgcgtgtcacgtggcggagtcggccgtcaactacagcctgggcgatgagcagggcttctgtggcagcccctggcccaactgcaacttccccgagtacttcacctacagcgtgctgctcagcctgctggcctgctccgtgttcctgcagatcagctgcatcgggaagctggtgctcatgctggccatcgagctcatctacgtgctcatcgtggaggtgccaggtgtcacgctcttcgacaacgccgacctgctggtcaccgccaacgccatagacttcttcaacaacgggacctcccagtgccctgagcatgcaaccaaggtggcattgaaggtggtgacgcccatcatcatctcagtctttgtgctggccctgtacctgcacgcccagcaggtggagtccactgcccgcctcgacttcctctggaaactgcaggccacagaggagaaagaggagatggaggagctgcaggcctacaaccggcggctgctgcacaacatcctgcccaaggacgtggccgctcacttcctggcccgcgagcggcgcaatgatgagctctactatcagtcctgtgagtgtgtggcggtcatgttcgcctccatcgccaacttctccgagttctacgttgagctggaggccaacaacgagggtgtcgagtgcctgcggctactcaatgagatcatcgctgactttgatgagatcatcagcgaggatcggttccggcagctggagaagatcaagaccatcggcagcacctacatggctgcctccggcctcaacgactctacctacgacaaggtgggcaagacccacatcaaggcactggccgactttgccatgaagctgatggaccagatgaagtacatcaatgagcactccttcaacaacttccagatgaagatcgggctcaacatcggccccgtggtggccggggtgataggggcacgaaagcctcagtacgacatctggggcaataccgtgaacgtggccagccgcatggacagcaccggtgtacccgaccgcatccaggtcaccacagacatgtaccaggtgctggctgccaacacgtaccagctggagtgccggggcgtggtcaaggtcaagggcaaaggcgagatgatgacctacttcctcaatggagggcccccgctcagttagcagctgttggccaatggtgccaggcagcct

SEQ ID NO: 77872 - DNA, 2736 bp, Artificial Sequence
  derived and/or modified sequence
atgaagagccagaaggagggctgctgcagcagaggagacctgagcatccagacaggccctggaggagagtgggccccccggcggctggtgtccaatgtgctgatcttcagctgcaccaacatcgtgggcgtgtgcacccactacccagctgaggtgtcccagaggcaggccttccaggagacccgggagtgcatccaggcccggctgcacagccagcgggagaaccagcagcaggagcggctgctgctgtctgtgctgcccaggcatgtggccatggagatgaaggctgacatcaatgccaagcaggaggacatgatgttccacaagatctacatccagaagcatgacaacgtgtccatcctgtttgctgacatcgagggcttcaccagcctggccagccagtgcacagcccaggagctggtgatgaccctgaatgagctgtttgccaggtttgacaagctggccgctgagaaccactgcctgcgcatcaagatcctgggggactgctactactgtgtgtctggcctgcctgaggcccgggctgaccacgcccactgctgcgtggagatgggcatggacatgattgaggccatcagcctggtgcgggaggtgactggagtgaatgtgaacatgagggtgggcatccacagcggccgggtgcactgcggcgtgctgggcctgaggaagtggcagtttgatgtgtggagcaatgatgtgaccctggccaaccacatggaggccggcggcaaggccggccgcatccacatcaccaaggccaccctgaactacctgaatggagactatgaggtggagcccggctgcggcggggagagaaatgcctacctgaaggagcacagcattgagaccttcctgatcctgcgctgcacccagaagaggaaggaggagaaggccatgattgccaagatgaaccggcagaggaccaacagcatcggccacaaccccccccactggggcgctgagcggcccttctacaaccacctgggcggcaaccaggtgtccaaggagatgaagaggatgggctttgaggaccccaaggacaagaatgcccaggagagcgccaacccagaagatgaggtggatgagttcctgggccgggccattgatgcccggagcattgaccggctgcggtctgagcacgtgaggaagttcctgctgaccttccgggagccagacctggagaagaagtacagcaagcaggtggatgacagatttggagcctacgtggcctgtgccagcctggtgttcctgttcatctgctttgtgcagatcaccatcgtgccccacagcatcttcatgctgtccttctacctgacctgcagcctgctgctgaccctggtggtgtttgtgtctgtcatctacagctgtgtgaagctgttccccagccccctgcagaccctgagcaggaagatcgtgcgcagcaagatgaacagcaccctggtgggcgtcttcaccatcaccctggtgttcctggccgcctttgtgaacatgttcacctgcaacagccgggacctgctgggctgcctggcccaggagcacaacatcagcgccagccaggtgaatgcctgccacgtggccgagagcgctgtgaactacagcctgggagatgagcagggcttctgtggcagcccctggcccaactgcaacttccctgagtacttcacctacagcgtgctgctgagcctgctggcctgcagcgtcttcctgcagatcagctgcatcggcaagctggtgctgatgctggccatcgagctgatctacgtgctgattgtggaggtgcctggggtgaccctgtttgacaatgctgacctgctggtgacagccaatgccatcgacttcttcaacaacggcaccagccagtgcccagagcacgccaccaaggtggccctgaaggtggtgacccccatcatcatctctgtgtttgtgctggccctgtacctgcacgcccagcaggtggagagcacagcccggctggacttcctgtggaagctgcaggccacagaggagaaggaggagatggaggagctgcaggcctacaacagaaggctgctgcacaacatcctgcccaaggatgtggccgcccacttcctggcccgggagaggagaaatgatgagctgtactaccagagctgtgaatgtgtggccgtgatgtttgccagcatcgccaacttcagcgagttctacgtggagctggaggccaacaatgaaggagtggagtgcctgcggctgctgaatgagatcatcgctgactttgatgagatcatcagtgaagatcgcttccggcagctggagaagatcaagaccatcggcagcacctacatggccgccagcggcctgaatgacagcacctatgacaaggtgggcaagacccacatcaaggccctggccgactttgccatgaagctgatggaccagatgaagtacatcaatgagcacagcttcaacaacttccagatgaagattggcctgaacatcggccctgtggtggccggcgtgattggagccaggaagccccagtatgacatctggggcaacacagtgaatgtggccagcaggatggacagcactggagtgcctgaccgcatccaggtgaccacagacatgtaccaggtgctggccgccaacacctaccagctggagtgccggggcgtggtgaaggtgaagggcaagggggagatgatgacctacttcctgaatggaggcccccccctgtcctag

SEQ ID NO: 77873 - DNA, 2736 bp, Artificial Sequence
  derived and/or modified sequence
atgaagagccagaaggagggctgctgcagccggggcgacctgagcattcaaaccggcccaggaggggagtgggctcctagacgacttgtcagcaacgtgctgatttttagctgcactaatatagtcggggtgtgcacccattaccctgcagaagtctcacagcggcaagcgttccaggagaccagagagtgtattcaagccaggctgcacagccagagagaaaaccaacaacaggaacggcttctactgtccgtgttgcctcgccacgtggctatggaaatgaaagctgatatcaatgccaaacaagaagatatgatgtttcacaaaatctacatccagaagcacgacaacgtgtcaattcttttcgcagacatcgaggggttcacttccttggcatctcaatgcactgcccaggagctcgtgatgacgttaaatgagctgttcgccaggttcgataagctcgctgctgagaatcattgccttaggattaagatcttgggagactgctactactgtgtctcaggccttccagaagctagggcggatcacgcccattgctgtgtggagatgggcatggacatgattgaggccatttctttggtgcgggaggtgaccggcgtgaacgtgaatatgcgggtgggaatacacagtggacgcgtccactgcggagtactcgggttgagaaagtggcaattcgatgtctggtccaacgacgtgactctcgctaaccacatggaagcgggaggaaaggctggacgcatccacatcactaaggcaactttgaactacctcaatggagactacgaggtcgaacctggatgcgggggtgaacgaaacgcttatctgaaggaacattcaatcgaaaccttcctgattctgcgctgcactcagaaacggaaggaggagaaagcgatgatagccaaaatgaaccgtcaaagaaccaattccatcggacataacccccctcattggggagccgagagacctttctacaaccatctagggggaaatcaggtgagcaaggagatgaagcgcatgggctttgaggatcccaaagacaaaaacgctcaggaatctgcaaacccggaagacgaggtggatgaatttctcggtagggccattgacgctaggtctatagacagactgagaagcgaacatgtgaggaaattcctcctaactttcagagaacccgatctggaaaagaagtacagtaagcaggtcgacgaccggtttggcgcttatgtggcatgcgctagtctggtcttcctgttcatatgtttcgtccagattacaatcgtgcctcacagcatcttcatgctctctttctatttgacttgttcattattattaaccctcgttgtgtttgtttcagtcatctactcctgtgtaaaactgtttccttccccactccagaccctgagccgtaagattgtgcgatccaagatgaacagcaccctcgtaggggtgtttaccataacactcgtcttcctggcagctttcgtgaatatgtttacctgcaacagtagagatctacttggatgcctggcccaggaacacaatattagcgcctcccaggtgaacgcgtgtcatgttgcagaaagcgccgtgaattactccctcggagatgaacagggcttttgcggcagcccttggcctaattgtaacttcccagaatacttcacctactccgttctgctcagtttactcgcctgttctgtgtttttacaaatctcctgtatcgggaaacttgtgctaatgctggctatcgagctgatctatgtactgatcgttgaggtgccaggcgttacgctctttgataacgcggacctgctggtcaccgctaacgccattgatttcttcaataatggtacatcccagtgtcccgagcacgcaaccaaggtggcgctcaaggtagtgacccccatcattatctctgtgtttgtgctcgccctctacctgcacgcacagcaggtggaatctaccgcaagacttgacttcctgtggaaactgcaagcaaccgaagagaaggaggagatggaagaactgcaggcatataatcggcgactcctccacaacatcctccctaaagatgtggctgcccactttttggctcgcgagcgaagaaacgatgagctgtactaccagtcctgcgagtgtgtggcagtgatgttcgcatcaattgctaatttcagtgaattctacgttgaactggaggctaataatgagggagtggaatgcttgcgactattaaatgaaattatagcggacttcgacgaaatcatttccgaggacaggttccgccagctcgagaaaattaagaccatcggctccacatatatggccgccagcggattgaacgactccacatacgacaaggttgggaagacacacattaaagcattagcagattttgcaatgaaattgatggatcaaatgaagtatataaatgagcactcatttaacaattttcaaatgaagattggcctgaacatcggccctgtggtcgctggcgtaataggggctcgcaaacctcagtacgatatttgggggaacacagtcaacgtggcgtctcggatggacagtacaggcgtgcctgaccgaattcaggtaacaacagatatgtaccaagtgctcgcagcaaatacatatcagctggagtgccgcggggtggtaaaagtgaagggcaaaggcgaaatgatgacctatttcctcaacgggggccctccactgagctag

SEQ ID NO: 77874 - DNA, 2736 bp, Artificial Sequence
  derived and/or modified sequence
atgaagagccagaaagagggctgttgtagtagaggagatctcagcatccaaaccggccctggcggagagtgggctcccaggcgtctcgtgtctaatgtcctgatcttttcctgcaccaatatcgtcggcgtctgcactcactatccagctgaagtgtcacagagacaggccttccaggaaaccagggaatgcattcaggctaggctccacagccaaagagagaatcagcagcaggagcgcctgctgttgagcgtcctgcccaggcatgtggctatggagatgaaagcagatatcaacgctaagcaagaagatatgatgtttcataagatttacattcaaaagcatgataacgttagtatcctatttgctgatatcgaggggttcacaagcctagccagtcagtgtaccgctcaggagctggttatgaccctaaatgagctgtttgcgcgtttcgataagctggctgcagaaaaccactgtctccgtatcaagatcctgggcgattgctattactgcgtgtctgggcttccggaagctagggccgaccatgcccactgttgcgtggagatgggaatggacatgatcgaagctatctctttggttagggaggttaccggcgtaaatgtcaacatgagagtggggatacacagcggccgagtacactgcggcgtactgggcttgcgcaaatggcagttcgacgtatggtctaacgacgtgaccctcgcgaatcatatggaggccggaggaaaggccggtcggattcacatcactaaggcgaccttgaattatctgaacggcgactacgaggtggagcctggttgtgggggagaacgcaacgcctatctgaaggagcactcaattgagacgttcctcatcttaaggtgtacacagaaaaggaaagaggagaaggcaatgattgccaaaatgaatcgccagaggactaacagtatcggtcacaatcctcctcattggggcgctgagcggcctttctataaccaccttggcggaaatcaggtctccaaggaaatgaaaaggatgggtttcgaagatcctaaggataagaacgcccaggagtcagccaaccccgaagatgaggtggacgagttcttaggcagggccatcgatgcccgaagtattgatcgccttcgctctgaacacgtgagaaaatttctgcttacatttcgggagccagacctggaaaagaaatactctaagcaggtggatgacagatttggtgcttatgtagcttgtgcctcgctcgtgtttctgttcatctgtttcgtgcagattaccatcgttccacactcaatttttatgttgagtttttatctgacctgctcccttctgctgaccctggtagtatttgtctcggtgatttatagttgcgtgaaactctttccgtcccctctacagacccttagtcggaaaattgttcgctccaagatgaatagtaccttggtcggagtgttcacgatcacactggtattcttggcggctttcgttaatatgttcacttgtaacagtcgcgatctgttgggatgtttggcccaggaacataatatatccgcctctcaggtcaatgcctgccacgtggctgaaagcgccgttaattacagtctgggggacgaacaaggcttttgtggatcaccatggcccaactgcaatttccctgagtatttcacttacagcgtcctgttgagtctcttagcgtgttccgtgtttctgcaaatctcctgcatcggtaaactggtcttaatgctggccattgagctcatttatgtgctgatagtcgaagtccctggcgtaaccctcttcgacaatgcagaccttttggtaacggccaacgctattgatttctttaacaatggaacatcgcagtgccctgagcacgcaacaaaggtagcccttaaagtggtgactcctattattatctcagttttcgtcctagccctttacctacacgcacagcaggttgagtccaccgctagactggacttcttgtggaagctgcaagccaccgaggagaaggaagaaatggaggagctacaagcttacaatcgcaggctgctccataacattcttccaaaggacgtcgccgcacatttcctggccagagaacgacgtaacgacgagctttactatcagtcctgtgagtgcgtagctgtcatgtttgcatccatcgccaatttctcagaattttatgtagagctggaagctaacaacgaaggcgtcgagtgccttaggctactgaacgagatcatcgccgatttcgacgaaattatcagtgaggaccgctttcgccaactcgagaagatcaagaccataggatccacttatatggccgcttcaggtttgaacgatagtacctacgacaaggtgggcaagacgcacataaaggctctcgcggattttgccatgaagctgatggaccagatgaaatacatcaatgagcacagttttaataatttccagatgaaaatcggcctgaacattggtcccgtcgtggcgggagtaataggtgctcggaagcctcagtatgatatatggggaaacacggtaaatgttgcctctcgtatggattctaccggggtgccagataggatccaggtgacaaccgacatgtatcaggttttggccgctaacacttatcagttagaatgcagaggagtggtgaaggtgaagggcaagggagaaatgatgacgtactttctgaacggaggacctcctctgtcatag

SEQ ID NO: 77875 - DNA, 2736 bp, Artificial Sequence
  derived and/or modified sequence
atgaagagccagaaggagggctgctgcagcagaggcgacctgagcatccagaccggccccggcggcgagtgggcccccagaagactggtgagcaacgtgctgatcttcagctgcaccaacatcgtgggcgtgtgcacccactaccccgccgaggtgagccagagacaggccttccaggagaccagagagtgcatccaggccagactgcacagccagagagagaaccagcagcaggagagactgctgctgagcgtgctgcccagacacgtggccatggagatgaaggccgacatcaacgccaagcaggaggacatgatgttccacaagatctacatccagaagcacgacaacgtgagcatcctgttcgccgacatcgagggcttcaccagcctggccagccagtgcaccgcccaggagctggtgatgaccctgaacgagctgttcgccagattcgacaagctggccgccgagaaccactgcctgagaatcaagatcctgggcgactgctactactgcgtgagcggcctgcccgaggccagagccgaccacgcccactgctgcgtggagatgggcatggacatgatcgaggccatcagcctggtgagagaggtgaccggcgtgaacgtgaacatgagagtgggcatccacagcggcagagtgcactgcggcgtgctgggcctgagaaagtggcagttcgacgtgtggagcaacgacgtgaccctggccaaccacatggaggccggcggcaaggccggcagaatccacatcaccaaggccaccctgaactacctgaacggcgactacgaggtggagcccggctgcggcggcgagagaaacgcctacctgaaggagcacagcatcgagaccttcctgatcctgagatgcacccagaagagaaaggaggagaaggccatgatcgccaagatgaacagacagagaaccaacagcatcggccacaaccccccccactggggcgccgagagacccttctacaaccacctgggcggcaaccaggtgagcaaggagatgaagagaatgggcttcgaggaccccaaggacaagaacgcccaggagagcgccaaccccgaggacgaggtggacgagttcctgggcagagccatcgacgccagaagcatcgacagactgagaagcgagcacgtgagaaagttcctgctgaccttcagagagcccgacctggagaagaagtacagcaagcaggtggacgacagattcggcgcctacgtggcctgcgccagcctggtgttcctgttcatctgcttcgtgcagatcaccatcgtgccccacagcatcttcatgctgagcttctacctgacctgcagcctgctgctgaccctggtggtgttcgtgagcgtgatctacagctgcgtgaagctgttccccagccccctgcagaccctgagcagaaagatcgtgagaagcaagatgaacagcaccctggtgggcgtgttcaccatcaccctggtgttcctggccgccttcgtgaacatgttcacctgcaacagcagagacctgctgggctgcctggcccaggagcacaacatcagcgccagccaggtgaacgcctgccacgtggccgagagcgccgtgaactacagcctgggcgacgagcagggcttctgcggcagcccctggcccaactgcaacttccccgagtacttcacctacagcgtgctgctgagcctgctggcctgcagcgtgttcctgcagatcagctgcatcggcaagctggtgctgatgctggccatcgagctgatctacgtgctgatcgtggaggtgcccggcgtgaccctgttcgacaacgccgacctgctggtgaccgccaacgccatcgacttcttcaacaacggcaccagccagtgccccgagcacgccaccaaggtggccctgaaggtggtgacccccatcatcatcagcgtgttcgtgctggccctgtacctgcacgcccagcaggtggagagcaccgccagactggacttcctgtggaagctgcaggccaccgaggagaaggaggagatggaggagctgcaggcctacaacagaagactgctgcacaacatcctgcccaaggacgtggccgcccacttcctggccagagagagaagaaacgacgagctgtactaccagagctgcgagtgcgtggccgtgatgttcgccagcatcgccaacttcagcgagttctacgtggagctggaggccaacaacgagggcgtggagtgcctgagactgctgaacgagatcatcgccgacttcgacgagatcatcagcgaggacagattcagacagctggagaagatcaagaccatcggcagcacctacatggccgccagcggcctgaacgacagcacctacgacaaggtgggcaagacccacatcaaggccctggccgacttcgccatgaagctgatggaccagatgaagtacatcaacgagcacagcttcaacaacttccagatgaagatcggcctgaacatcggccccgtggtggccggcgtgatcggcgccagaaagccccagtacgacatctggggcaacaccgtgaacgtggccagcagaatggacagcaccggcgtgcccgacagaatccaggtgaccaccgacatgtaccaggtgctggccgccaacacctaccagctggagtgcagaggcgtggtgaaggtgaagggcaagggcgagatgatgacctacttcctgaacggcggcccccccctgagctag

SEQ ID NO: 77876 - protein, 1065 aa, Artificial Sequence
  derived and/or modified sequence
MAAAYLDPNLNHTPNSSTKTHLGTGMERSPGAMERVLKVFHYFESNSEPTTWASIIRHGDATDVRGIIQKIVDSHKVKHVACYGFRLSHLRSEEVHWLHVDMGVSSVREKYELAHPPEEWKYELRIRYLPKGFLNQFTEDKPTLNFFYQQVKSDYMLEIADQVDQEIALKLGCLEIRRSYWEMRGNALEKKSNYEVLEKDVGLKRFFPKSLLDSVKAKTLRKLIQQTFRQFANLNREESILKFFEILSPVYRFDKECFKCALGSSWIISVELAIGPEEGISYLTDKGCNPTHLADFTQVQTIQYSNSEDKDRKGMLQLKIAGAPEPLTVTAPSLTIAENMADLIDGYCRLVNGTSQSFIIRPQKEGERALPSIPKLANSEKQGMRTHAVSVSETDDYAEIIDEEDTYTMPSTRDYEIQRERIELGRCIGEGQFGDVHQGIYMSPENPALAVAIKTCKNCTSDSVREKFLQEALTMRQFDHPHIVKLIGVITENPVWIIMELCTLGELRSFLQVRKYSLDLASLILYAYQLSTALAYLESKRFVHRDIAARNVLVSSNDCVKLGDFGLSRYMEDSTYYKASKGKLPIKWMAPESINFRRFTSASDVWMFGVCMWEILMHGVKPFQGVKNNDVIGRIENGERLPMPPNCPPTLYSLMTKCWAYDPSRRPRFTELKAQLSTILEEEKAQQEERMRMESRRQATVSWDSGGSDEAPPKPSRPGYPSPRSSEGFYPSPQHMVQTNHYQVSGYPGSHGITAMAGSIYPGQASLLDQTDSWNHRPQEIAMWQPNVEDSTVLDLRGIGQVLPTHLMEERLIRQQQEMEEDQRWLEKEERFLKPDVRLSRGSIDREDGSLQGPIGNQHIYQPVGKPGKEEKNWAERNPAAPPKKPPRPGAPGHLGSLASLSSPADSYNEGVKPNQLQPQEISPPPTANLDRSNDKVYENVTGLVKAVIEMSSKIQPAPPEEYVPMVKEVGLALRTLLATVDETIPLLPASTHREIEMAQKLLNSDLGELINKMKLAQQYVMTSLQQEYKKQMLTAAHALAVDAKNLLDVIDQARLKMLGQTRPH

SEQ ID NO: 77877 - protein, 1065 aa, Artificial Sequence
  derived and/or modified sequence
MAAAYLDPNLNHTPNSSTKTHLGTGMERSPGAMERVLKVFHYFESNSEPTTWASIIRHGDATDVRGIIQKIVDSHKVKHVACYGFRLSHLRSEEVHWLHVDMGVSSVREKYELAHPPEEWKYELRIRYLPKGFLNQFTEDKPTLNFFYQQVKSDYMLEIADQVDQEIALKLGCLEIRRSYWEMRGNALEKKSNYEVLEKDVGLKRFFPKSLLDSVKAKTLRKLIQQTFRQFANLNREESILKFFEILSPVYRFDKECFKCALGSSWIISVELAIGPEEGISYLTDKGCNPTHLADFTQVQTIQYSNSEDKDRKGMLQLKIAGAPEPLTVTAPSLTIAENMADLIDGYCRLVNGTSQSFIIRPQKEGERALPSIPKLANSEKQGMRTHAVSVSETDDYAEIIDEEDTYTMPSTRDYEIQRERIELGRCIGEGQFGDVHQGIYMSPENPALAVAIKTCKNCTSDSVREKFLQEALTMRQFDHPHIVKLIGVITENPVWIIMELCTLGELRSFLQVRKYSLDLASLILYAYQLSTALAYLESKRFVHRDIAARNVLVSSNDCVKLGDFGLSRYMEDSTYYKASKGKLPIKWMAPESINFRRFTSASDVWMFGVCMWEILMHGVKPFQGVKNNDVIGRIENGERLPMPPNCPPTLYSLMTKCWAYDPSRRPRFTELKAQLSTILEEEKAQQEERMRMESRRQATVSWDSGGSDEAPPKPSRPGYPSPRSSEGFYPSPQHMVQTNHYQVSGYPGSHGITAMAGSIYPGQASLLDQTDSWNHRPQEIAMWQPNVEDSTVLDLRGIGQVLPTHLMEERLIRQQQEMEEDQRWLEKEERFLKPDVRLSRGSIDREDGSLQGPIGNQHIYQPVGKPGKEEKNWAERNPAAPPKKPPRPGAPGHLGSLASLSSPADSYNEGVKPWRLQPQEISPPPTANLDRSNDKVYENVTGLVKAVIEMSSKIQPAPPEEYVPMVKEVGLALRTLLATVDETIPLLPASTHREIEMAQKLLNSDLGELINKMKLAQQYVMTSLQQEYKKQMLTAAHALAVDAKNLLDVIDQARLKMLGQTRPH

SEQ ID NO: 77878 - DNA, 3198 bp, Artificial Sequence
  derived and/or modified sequence
atggccgccgcctacctggaccccaacctgaaccacacccccaacagcagcaccaagacccacctgggcaccggcatggagagaagccccggcgccatggagagagtgctgaaggtgttccactacttcgagagcaacagcgagcccaccacctgggccagcatcatcagacacggcgacgccaccgacgtgagaggcatcatccagaagatcgtggacagccacaaggtgaagcacgtggcctgctacggcttcagactgagccacctgagaagcgaggaggtgcactggctgcacgtggacatgggcgtgagcagcgtgagagagaagtacgagctggcccacccccccgaggagtggaagtacgagctgagaatcagatacctgcccaagggcttcctgaaccagttcaccgaggacaagcccaccctgaacttcttctaccagcaggtgaagagcgactacatgctggagatcgccgaccaggtggaccaggagatcgccctgaagctgggctgcctggagatcagaagaagctactgggagatgagaggcaacgccctggagaagaagagcaactacgaggtgctggagaaggacgtgggcctgaagagattcttccccaagagcctgctggacagcgtgaaggccaagaccctgagaaagctgatccagcagaccttcagacagttcgccaacctgaacagagaggagagcatcctgaagttcttcgagatcctgagccccgtgtacagattcgacaaggagtgcttcaagtgcgccctgggcagcagctggatcatcagcgtggagctggccatcggccccgaggagggcatcagctacctgaccgacaagggctgcaaccccacccacctggccgacttcacccaggtgcagaccatccagtacagcaacagcgaggacaaggacagaaagggcatgctgcagctgaagatcgccggcgcccccgagcccctgaccgtgaccgcccccagcctgaccatcgccgagaacatggccgacctgatcgacggctactgcagactggtgaacggcaccagccagagcttcatcatcagaccccagaaggagggcgagagagccctgcccagcatccccaagctggccaacagcgagaagcagggcatgagaacccacgccgtgagcgtgagcgagaccgacgactacgccgagatcatcgacgaggaggacacctacaccatgcccagcaccagagactacgagatccagagagagagaatcgagctgggcagatgcatcggcgagggccagttcggcgacgtgcaccagggcatctacatgagccccgagaaccccgccctggccgtggccatcaagacctgcaagaactgcaccagcgacagcgtgagagagaagttcctgcaggaggccctgaccatgagacagttcgaccacccccacatcgtgaagctgatcggcgtgatcaccgagaaccccgtgtggatcatcatggagctgtgcaccctgggcgagctgagaagcttcctgcaggtgagaaagtacagcctggacctggccagcctgatcctgtacgcctaccagctgagcaccgccctggcctacctggagagcaagagattcgtgcacagagacatcgccgccagaaacgtgctggtgagcagcaacgactgcgtgaagctgggcgacttcggcctgagcagatacatggaggacagcacctactacaaggccagcaagggcaagctgcccatcaagtggatggcccccgagagcatcaacttcagaagattcaccagcgccagcgacgtgtggatgttcggcgtgtgcatgtgggagatcctgatgcacggcgtgaagcccttccagggcgtgaagaacaacgacgtgatcggcagaatcgagaacggcgagagactgcccatgccccccaactgcccccccaccctgtacagcctgatgaccaagtgctgggcctacgaccccagcagaagacccagattcaccgagctgaaggcccagctgagcaccatcctggaggaggagaaggcccagcaggaggagagaatgagaatggagagcagaagacaggccaccgtgagctgggacagcggcggcagcgacgaggccccccccaagcccagcagacccggctaccccagccccagaagcagcgagggcttctaccccagcccccagcacatggtgcagaccaaccactaccaggtgagcggctaccccggcagccacggcatcaccgccatggccggcagcatctaccccggccaggccagcctgctggaccagaccgacagctggaaccacagaccccaggagatcgccatgtggcagcccaacgtggaggacagcaccgtgctggacctgagaggcatcggccaggtgctgcccacccacctgatggaggagagactgatcagacagcagcaggagatggaggaggaccagagatggctggagaaggaggagagattcctgaagcccgacgtgagactgagcagaggcagcatcgacagagaggacggcagcctgcagggccccatcggcaaccagcacatctaccagcccgtgggcaagcccggcaaggaggagaagaactgggccgagagaaaccccgccgccccccccaagaagccccccagacccggcgcccccggccacctgggcagcctggccagcctgagcagccccgccgacagctacaacgagggcgtgaagcccaaccagctgcagccccaggagatcagccccccccccaccgccaacctggacagaagcaacgacaaggtgtacgagaacgtgaccggcctggtgaaggccgtgatcgagatgagcagcaagatccagcccgccccccccgaggagtacgtgcccatggtgaaggaggtgggcctggccctgagaaccctgctggccaccgtggacgagaccatccccctgctgcccgccagcacccacagagagatcgagatggcccagaagctgctgaacagcgacctgggcgagctgatcaacaagatgaagctggcccagcagtacgtgatgaccagcctgcagcaggagtacaagaagcagatgctgaccgccgcccacgccctggccgtggacgccaagaacctgctggacgtgatcgaccaggccagactgaagatgctgggccagaccagaccccactag

SEQ ID NO: 77879 - DNA, 3198 bp, Artificial Sequence
  derived and/or modified sequence
atggccgccgcctacctggaccccaacctgaaccacacccccaacagcagcaccaagacccacctgggcaccggcatggagagaagccccggcgccatggagagagtgctgaaggtgttccactacttcgagagcaacagcgagcccaccacctgggccagcatcatcagacacggcgacgccaccgacgtgagaggcatcatccagaagatcgtggacagccacaaggtgaagcacgtggcctgctacggcttcagactgagccacctgagaagcgaggaggtgcactggctgcacgtggacatgggcgtgagcagcgtgagagagaagtacgagctggcccacccccccgaggagtggaagtacgagctgagaatcagatacctgcccaagggcttcctgaaccagttcaccgaggacaagcccaccctgaacttcttctaccagcaggtgaagagcgactacatgctggagatcgccgaccaggtggaccaggagatcgccctgaagctgggctgcctggagatcagaagaagctactgggagatgagaggcaacgccctggagaagaagagcaactacgaggtgctggagaaggacgtgggcctgaagagattcttccccaagagcctgctggacagcgtgaaggccaagaccctgagaaagctgatccagcagaccttcagacagttcgccaacctgaacagagaggagagcatcctgaagttcttcgagatcctgagccccgtgtacagattcgacaaggagtgcttcaagtgcgccctgggcagcagctggatcatcagcgtggagctggccatcggccccgaggagggcatcagctacctgaccgacaagggctgcaaccccacccacctggccgacttcacccaggtgcagaccatccagtacagcaacagcgaggacaaggacagaaagggcatgctgcagctgaagatcgccggcgcccccgagcccctgaccgtgaccgcccccagcctgaccatcgccgagaacatggccgacctgatcgacggctactgcagactggtgaacggcaccagccagagcttcatcatcagaccccagaaggagggcgagagagccctgcccagcatccccaagctggccaacagcgagaagcagggcatgagaacccacgccgtgagcgtgagcgagaccgacgactacgccgagatcatcgacgaggaggacacctacaccatgcccagcaccagagactacgagatccagagagagagaatcgagctgggcagatgcatcggcgagggccagttcggcgacgtgcaccagggcatctacatgagccccgagaaccccgccctggccgtggccatcaagacctgcaagaactgcaccagcgacagcgtgagagagaagttcctgcaggaggccctgaccatgagacagttcgaccacccccacatcgtgaagctgatcggcgtgatcaccgagaaccccgtgtggatcatcatggagctgtgcaccctgggcgagctgagaagcttcctgcaggtgagaaagtacagcctggacctggccagcctgatcctgtacgcctaccagctgagcaccgccctggcctacctggagagcaagagattcgtgcacagagacatcgccgccagaaacgtgctggtgagcagcaacgactgcgtgaagctgggcgacttcggcctgagcagatacatggaggacagcacctactacaaggccagcaagggcaagctgcccatcaagtggatggcccccgagagcatcaacttcagaagattcaccagcgccagcgacgtgtggatgttcggcgtgtgcatgtgggagatcctgatgcacggcgtgaagcccttccagggcgtgaagaacaacgacgtgatcggcagaatcgagaacggcgagagactgcccatgccccccaactgcccccccaccctgtacagcctgatgaccaagtgctgggcctacgaccccagcagaagacccagattcaccgagctgaaggcccagctgagcaccatcctggaggaggagaaggcccagcaggaggagagaatgagaatggagagcagaagacaggccaccgtgagctgggacagcggcggcagcgacgaggccccccccaagcccagcagacccggctaccccagccccagaagcagcgagggcttctaccccagcccccagcacatggtgcagaccaaccactaccaggtgagcggctaccccggcagccacggcatcaccgccatggccggcagcatctaccccggccaggccagcctgctggaccagaccgacagctggaaccacagaccccaggagatcgccatgtggcagcccaacgtggaggacagcaccgtgctggacctgagaggcatcggccaggtgctgcccacccacctgatggaggagagactgatcagacagcagcaggagatggaggaggaccagagatggctggagaaggaggagagattcctgaagcccgacgtgagactgagcagaggcagcatcgacagagaggacggcagcctgcagggccccatcggcaaccagcacatctaccagcccgtgggcaagcccggcaaggaggagaagaactgggccgagagaaaccccgccgccccccccaagaagccccccagacccggcgcccccggccacctgggcagcctggccagcctgagcagccccgccgacagctacaacgagggcgtgaagccctggagactgcagccccaggagatcagccccccccccaccgccaacctggacagaagcaacgacaaggtgtacgagaacgtgaccggcctggtgaaggccgtgatcgagatgagcagcaagatccagcccgccccccccgaggagtacgtgcccatggtgaaggaggtgggcctggccctgagaaccctgctggccaccgtggacgagaccatccccctgctgcccgccagcacccacagagagatcgagatggcccagaagctgctgaacagcgacctgggcgagctgatcaacaagatgaagctggcccagcagtacgtgatgaccagcctgcagcaggagtacaagaagcagatgctgaccgccgcccacgccctggccgtggacgccaagaacctgctggacgtgatcgaccaggccagactgaagatgctgggccagaccagaccccactag

SEQ ID NO: 77880 - DNA, 3198 bp, Artificial Sequence
  derived and/or modified sequence
atggctgcggcttacttggaccccaatttaaaccatacgcccaacagctccacaaagacacacctcggaacaggaatggagcgatctcctggcgcgatggagagggtcctgaaggttttccattattttgagagcaattctgaacccaccacgtgggctagtatcattcgccacggcgacgccactgatgtccgggggatcattcagaagatcgtggattcacacaaagtaaagcacgtcgcctgctacgggtttcgtctgtcacacctgcgctctgaggaggtgcactggttgcatgtagatatgggagtatcttcggtgcgcgagaagtacgagctcgctcacccaccagaagagtggaagtatgagttgcggataagataccttccaaagggctttctgaatcaattcaccgaggataaaccaaccctgaacttcttctatcagcaggttaagtctgactatatgttagaaatcgccgaccaggtggaccaggaaattgctctcaaattaggctgtctggaaattagaagatcatattgggaaatgaggggtaatgctcttgaaaagaagagtaactacgaagttctggagaaagacgtcggcctgaagagattcttcccaaaatctcttttagattccgttaaggctaagaccctgcgcaaattgatccaacagacctttcggcagttcgcgaatctgaaccgtgaagagagtattctcaaattttttgagattctatcccccgtctaccggtttgataaagagtgctttaaatgtgctctgggttctagttggatcatttctgttgaactggccataggccctgaagaggggatctcttacctgacagataaggggtgtaacccaacacacctggcagactttacacaagtgcagacaatccagtactccaattctgaagacaaggatcgaaaaggaatgttgcaactgaaaatcgcaggggcccctgaaccccttaccgtgacagctccttccctgaccattgccgagaatatggccgatttaatcgacggatattgtcgcctcgtgaatggaaccagtcagagtttcattatcaggccccaaaaggagggcgagagggctctgccatcgattcctaaactggctaatagcgagaaacaaggtatgagaactcatgcggtttctgtgagcgagaccgatgattatgccgaaatcattgatgaagaggatacatataccatgccatccacgagagattatgagatccagcgcgaaaggatcgagcttgggcgctgcatcggagagggccagttcggcgatgtacaccaaggaatctacatgtcacccgagaatcccgctctcgctgtcgccatcaaaacgtgcaagaattgcacaagcgattctgtgcgtgaaaaattcttgcaggaggctctcaccatgcgccaattcgaccacccccacattgtgaaactcattggagtaattactgagaacccggtgtggataattatggagctgtgtaccctaggagaactccgcagcttccttcaggtgaggaaatacagtttggacctggcatctttgatcctttacgcataccaactgtccaccgccttggcatacctcgaatctaaacgcttcgttcaccgcgatattgctgcccggaacgttctggtgtccagtaatgattgcgtcaagttaggagacttcgggctatctcgctatatggaggacagtacttattataaagcgtcaaagggaaaactccccatcaaatggatggctccagagagcattaattttcgaagatttacgagtgcaagcgatgtgtggatgttcggggtgtgcatgtgggaaattctgatgcatggggtaaagccattccaaggcgttaaaaataatgatgttattggacgcatagagaacggcgaaagactcccaatgcccccgaactgcccaccaaccctgtactctctaatgacgaaatgctgggcttatgatccctcaaggcgtcccagatttaccgaactgaaggctcaactgtccaccatcctcgaggaggagaaagctcaacaggaggagcgcatgagaatggagtctcggaggcaagcaacggtctcctgggattccggcggtagcgatgaagccccacccaagccaagccgaccaggttacccttcaccgaggtccagtgagggcttctacccctccccacagcacatggtgcagacgaaccactaccaggtgtcgggatatccggggtcgcatggaattactgcaatggctggaagtatctacccgggtcaggcctcactgctggatcagactgattcctggaaccaccgcccccaggaaatcgctatgtggcagccaaacgttgaggactccaccgtgctggacctcaggggcatcggtcaggtcctgcctactcacttaatggaggaaagactgatccgacagcagcaggagatggaagaggatcagagatggctcgagaaagaggaacgatttctgaagccggacgtgaggcttagccgtgggagtattgacagagaggatggatctctgcaaggcccaattggcaatcagcacatctatcagcccgtaggaaaaccaggcaaggaagaaaagaactgggcagaaaggaatccagccgcgccacctaagaaaccacctagaccgggggctccaggccatctaggctctcttgcatccttaagctcccccgccgacagctacaatgagggcgttaagcctaatcagctgcagccccaagagatctctccacccccaaccgccaatctcgataggtctaacgacaaggtatatgagaacgtgacaggccttgttaaggcagtaattgagatgtccagtaaaatacagcccgcgccgccagaggaatacgtgccgatggtcaaggaggtgggcctggccctcagaactctgttggcaaccgtggatgagacaatccccctgcttcctgcctcaacccatagggaaatagagatggcacagaaactgctaaacagcgacctcggtgaactgattaacaagatgaaacttgcccaacagtatgtgatgacttccctgcagcaggagtataagaagcagatgctcactgcggcacatgctttggctgtcgatgcaaaaaatcttcttgacgtcattgatcaggcacggctgaaaatgttggggcagactagacctcattag

SEQ ID NO: 77881 - DNA, 3198 bp, Artificial Sequence
  derived and/or modified sequence
atggctgcagcatatctcgaccctaacctgaaccataccccaaattcttcaacaaagacacacttgggcactggcatggagcgatctcccggtgccatggaacgtgtgctgaaagtattccactacttcgaatcgaactccgaaccaaccacttgggcatctataatcaggcacggggacgccacagacgtacgaggcattattcagaagatcgtggactctcataaagtgaagcatgttgcttgttacggatttcgtctcagccaccttcgcagtgaagaggtacactggctgcacgtggacatgggagtctcctcagtgagggagaaatacgagctcgcacatcccccggaggaatggaaatacgaattacggataaggtacttgcctaagggcttcctcaatcagtttaccgaagataaacccacacttaatttcttttatcaacaggtaaaatccgactacatgctggaaattgccgaccaggtggatcaggagattgctctgaagctcggctgcctggagattcggcgttcttattgggagatgcggggaaacgcactggagaagaagtcaaattacgaagtcctggagaaggacgtgggactgaagcgcttctttcccaagtccctcctggactctgtcaaggccaaaaccttgcgaaagcttattcagcaaacttttaggcaatttgctaatctgaacagggaggagtctatcctaaaattttttgaaatcctgagtcccgtgtacaggtttgacaaggagtgttttaaatgtgctctgggcagctcatggatcatctccgtagaactggctattggcccggaggaaggaatctcctatctcaccgataaaggttgcaatccaactcatctagccgatttcacccaagtgcagacaatccaatacagtaattcggaagataaagacagaaagggcatgctgcaacttaagatagctggtgcccccgagcccctcaccgttacagcacccagtctgaccattgcagagaatatggccgatctaatcgacggctactgccggctggttaatggaaccagccaatcgttcataataaggccacaaaaggaaggagagagggccctacctagcattcctaagcttgcaaattcagagaagcagggaatgagaacccacgctgtctcggtctctgaaactgatgattatgctgaaatcatagacgaggaggacacctacacaatgccctcaacacgtgactatgaaatccagcgcgagcggatcgagctcggacggtgcattggggagggccagttcggtgatgtgcatcagggcatctatatgagcccagagaacccagcccttgctgtcgctattaagacatgtaaaaactgcacttccgactccgtgagggaaaagttcttgcaggaggcgctcacaatgcgacaatttgaccatccccatattgtgaagcttataggggtgatcaccgagaaccccgtgtggatcataatggagctgtgcactttgggtgagctgcggagttttttacaggtgcgaaaatactccctggacctggccagcctgatactgtatgcctaccagttgtccactgcactcgcctatctggagtccaaacggtttgttcaccgggatatagctgctagaaacgttctggtaagctctaacgattgcgtgaagttgggcgatttcggcctctcacgatacatggaggattctacatactataaagcatcgaaggggaagctgccgattaagtggatggcccctgaaagtattaattttcggcgttttaccagtgcatccgacgtctggatgtttggcgtctgcatgtgggagattctcatgcacggcgtgaaaccttttcagggggttaaaaataacgatgtcattggccgaatcgaaaatggtgagaggctgcctatgccccccaattgcccccctacattatacagtcttatgaccaaatgctgggcttatgaccctagcaggcgccctcgtttcacagaattgaaagcacagctgagtaccatcctcgaggaagagaaggctcaacaggaggagagaatgcgtatggagtcacgacggcaagcaacggtctcctgggatagtggcgggtcggatgaggctccgcccaaaccgtcacgccctggttatccctccccgcggtctagtgaagggttttacccaagcccacaacatatggttcagaccaaccactaccaagtgtccggatacccagggtcacacgggatcacagctatggctggctctatataccccggacaggctagtcttctggatcagacggacagttggaatcatcgcccccaagaaattgctatgtggcagccaaatgttgaggattctaccgttttagacctgagaggcataggacaggtgttacccacacacttgatggaggagcgcctaatccgacagcagcaagaaatggaagaagaccaaaggtggttagagaaagaggaacgattcctgaagcccgatgtaagactttcacggggctcaattgatcgggaagacggcagcctgcagggccccattgggaatcagcacatttaccagccagtgggaaagccgggaaaggaggaaaagaattgggctgaacgcaatcccgccgcgcccccaaagaagccgcctagacctggcgcacctggacatctgggatccctggcaagcctgtcttctcccgccgactcttacaatgaaggtgtcaaaccgtggcgactgcagccacaggaaatctccccacccccaacagctaaccttgatcgctctaacgataaggtctacgaaaacgtgacaggtctggtcaaagccgtgattgaaatgtcaagcaagatacaacctgcccctccagaagagtacgttccaatggtgaaggaggtgggactagctttgagaacactgctagctaccgtcgatgagaccatacccctgttgcccgcttcgacgcaccgagagattgagatggctcagaagctgctgaactccgacttgggagaactgatcaacaaaatgaagttggctcagcagtacgtgatgacctcccttcagcaagaatacaaaaagcagatgctgaccgctgcccacgcactggccgtggatgcaaaaaatttgctggatgtgattgatcaggcacggctaaagatgcttgggcagaccagaccacactag

SEQ ID NO: 77882 - DNA, 3198 bp, Artificial Sequence
  derived and/or modified sequence
atggctgctgcctacctggaccccaacctgaaccacacccccaacagcagcaccaagacccacctgggcaccggcatggagaggagccctggggccatggagcgggtgctgaaggtgttccactactttgagagcaacagcgagcccaccacctgggccagcatcatcagacatggagatgccacagatgtgcggggcatcatccagaagatcgtggacagccacaaggtgaagcacgtggcctgctacggcttccggctgagccacctgcggtctgaggaggtgcactggctgcacgtggacatgggcgtgtcctctgtgcgggagaagtatgagctggcccaccccccagaggagtggaagtatgagctgcgcatccgctacctgcccaagggcttcctgaaccagttcacagaggacaagcccaccctgaacttcttctaccagcaggtgaagagtgactacatgctggagattgctgaccaggtggaccaggagatcgccctgaagctgggctgcctggagatcagaagaagctactgggagatgagaggaaatgccctggagaagaagagcaactatgaggtgctggagaaggatgtgggcctgaagcgcttcttccccaagagcctgctggacagcgtgaaggccaagaccctgaggaagctgatccagcagaccttccggcagtttgccaacctgaaccgggaggagagcatcctgaagttctttgagatcctgagccctgtgtacagatttgacaaggagtgcttcaagtgtgccctgggcagctcctggatcatctctgtggagctggccatcggccctgaggagggcatctcctacctgacagacaagggctgcaaccccacccacctggccgacttcacccaggtgcagaccatccagtacagcaacagcgaggacaaggacaggaagggcatgctgcagctgaagattgctggggcccctgagcccctgactgtgacagcccccagcctgaccatcgccgagaacatggctgacctgattgatggctactgccgcctggtgaatggcaccagccagagcttcatcatccggccccagaaggagggggagcgggccctgcccagcatccccaagctggccaacagcgagaagcagggcatgaggacccatgctgtgtctgtgtctgaaacagatgattatgcagagatcattgatgaggaggacacctacaccatgcccagcacccgggactatgagatccagcgggagcgcatcgagctgggccgctgcatcggggagggccagtttggagatgtgcaccagggcatctacatgagcccagaaaatcctgccctggccgtggccatcaagacctgcaagaactgcaccagtgacagcgtgcgggagaagttcctgcaggaggccctgaccatgaggcagtttgaccacccccacatcgtgaagctgattggagtcatcacagagaaccctgtgtggatcatcatggagctgtgcaccctgggggagctgcgctccttcctgcaggtgaggaagtacagcctggacctggccagcctcatcctgtatgcctaccagctgagcacagccctggcctacctggagagcaagagatttgtgcaccgggacattgctgccagaaatgtgctggtgagcagcaatgactgtgtgaagctgggggactttggcctgagccgctacatggaggacagcacctactacaaggccagcaagggcaagctgcccatcaagtggatggcccctgagagcatcaacttccgccgcttcaccagcgccagtgatgtgtggatgtttggagtgtgcatgtgggagatcctgatgcacggcgtgaagcccttccagggcgtgaagaacaatgatgtgattggaagaattgaaaatggagagcggctgcccatgccacccaactgcccccccaccctgtacagcctgatgaccaagtgctgggcctatgaccccagcagaagaccccgcttcacagagctgaaggcccagctgagcaccatcctggaggaggagaaggcccagcaggaggagaggatgaggatggagagccggcggcaggccaccgtgtcctgggacagcggcggcagtgatgaggccccacccaagcccagccggcccggctaccccagccccaggagcagcgagggcttctaccccagcccccagcacatggtgcagaccaaccactaccaggtgtctggctacccaggcagccacggcatcacagccatggccggcagcatctacccaggccaggccagcctgctggaccagacagacagctggaaccaccggccccaggagatcgccatgtggcagcccaacgtggaggacagcacagtgctggacctgcggggcatcggccaggtgctgcccacccacctgatggaggagcggctcatccggcagcagcaggagatggaggaggaccagcgctggctggagaaggaggagcgcttcctgaagccagatgtgcggctgagccggggcagcattgacagagaagatggcagcctgcagggccccatcggcaaccagcacatctaccagcctgtgggcaagccaggcaaggaggagaagaactgggccgagagaaatcctgctgccccacccaagaagccacccaggcctggggcccctggccacctgggcagcctggccagcctgagcagccctgctgacagctacaatgaaggagtgaagcccaaccagctgcagccccaggagatcagccccccacccacagccaacctggacaggagcaatgacaaggtgtatgaaaatgtgacaggcctggtgaaggctgtgattgagatgagcagcaagatccagcctgcccctcctgaggagtatgtgcccatggtgaaggaggtgggcctggccctgcggaccctgctggccaccgtggatgagaccatccccctgctgcctgccagcacccaccgggagattgagatggcccagaagctgctgaacagcgacctgggggagctgatcaacaagatgaagctggcccagcagtatgtgatgaccagcctgcagcaggagtacaagaagcagatgctgacagctgcccacgccctggccgtggatgccaagaacctgctggatgtgattgaccaggcccggctgaagatgctgggccagacccggccccactag

SEQ ID NO: 77883 - DNA, 3198 bp, Artificial Sequence
  derived and/or modified sequence
atggctgctgcctacctggaccccaacctgaaccacacccccaacagcagcaccaagacccacctgggcaccggcatggagaggagccctggggccatggagcgggtgctgaaggtgttccactactttgagagcaacagcgagcccaccacctgggccagcatcatcagacatggagatgccacagatgtgcggggcatcatccagaagatcgtggacagccacaaggtgaagcacgtggcctgctacggcttccggctgagccacctgcggtctgaggaggtgcactggctgcacgtggacatgggcgtgtcctctgtgcgggagaagtatgagctggcccaccccccagaggagtggaagtatgagctgcgcatccgctacctgcccaagggcttcctgaaccagttcacagaggacaagcccaccctgaacttcttctaccagcaggtgaagagtgactacatgctggagattgctgaccaggtggaccaggagatcgccctgaagctgggctgcctggagatcagaagaagctactgggagatgagaggaaatgccctggagaagaagagcaactatgaggtgctggagaaggatgtgggcctgaagcgcttcttccccaagagcctgctggacagcgtgaaggccaagaccctgaggaagctgatccagcagaccttccggcagtttgccaacctgaaccgggaggagagcatcctgaagttctttgagatcctgagccctgtgtacagatttgacaaggagtgcttcaagtgtgccctgggcagctcctggatcatctctgtggagctggccatcggccctgaggagggcatctcctacctgacagacaagggctgcaaccccacccacctggccgacttcacccaggtgcagaccatccagtacagcaacagcgaggacaaggacaggaagggcatgctgcagctgaagattgctggggcccctgagcccctgactgtgacagcccccagcctgaccatcgccgagaacatggctgacctgattgatggctactgccgcctggtgaatggcaccagccagagcttcatcatccggccccagaaggagggggagcgggccctgcccagcatccccaagctggccaacagcgagaagcagggcatgaggacccatgctgtgtctgtgtctgaaacagatgattatgcagagatcattgatgaggaggacacctacaccatgcccagcacccgggactatgagatccagcgggagcgcatcgagctgggccgctgcatcggggagggccagtttggagatgtgcaccagggcatctacatgagcccagaaaatcctgccctggccgtggccatcaagacctgcaagaactgcaccagtgacagcgtgcgggagaagttcctgcaggaggccctgaccatgaggcagtttgaccacccccacatcgtgaagctgattggagtcatcacagagaaccctgtgtggatcatcatggagctgtgcaccctgggggagctgcgctccttcctgcaggtgaggaagtacagcctggacctggccagcctcatcctgtatgcctaccagctgagcacagccctggcctacctggagagcaagagatttgtgcaccgggacattgctgccagaaatgtgctggtgagcagcaatgactgtgtgaagctgggggactttggcctgagccgctacatggaggacagcacctactacaaggccagcaagggcaagctgcccatcaagtggatggcccctgagagcatcaacttccgccgcttcaccagcgccagtgatgtgtggatgtttggagtgtgcatgtgggagatcctgatgcacggcgtgaagcccttccagggcgtgaagaacaatgatgtgattggaagaattgaaaatggagagcggctgcccatgccacccaactgcccccccaccctgtacagcctgatgaccaagtgctgggcctatgaccccagcagaagaccccgcttcacagagctgaaggcccagctgagcaccatcctggaggaggagaaggcccagcaggaggagaggatgaggatggagagccggcggcaggccaccgtgtcctgggacagcggcggcagtgatgaggccccacccaagcccagccggcccggctaccccagccccaggagcagcgagggcttctaccccagcccccagcacatggtgcagaccaaccactaccaggtgtctggctacccaggcagccacggcatcacagccatggccggcagcatctacccaggccaggccagcctgctggaccagacagacagctggaaccaccggccccaggagatcgccatgtggcagcccaacgtggaggacagcacagtgctggacctgcggggcatcggccaggtgctgcccacccacctgatggaggagcggctcatccggcagcagcaggagatggaggaggaccagcgctggctggagaaggaggagcgcttcctgaagccagatgtgcggctgagccggggcagcattgacagagaagatggcagcctgcagggccccatcggcaaccagcacatctaccagcctgtgggcaagccaggcaaggaggagaagaactgggccgagagaaatcctgctgccccacccaagaagccacccaggcctggggcccctggccacctgggcagcctggccagcctgagcagccctgctgacagctacaatgaaggagtgaagccctggaggctgcagccccaggagatcagccccccacccacagccaacctggacaggagcaatgacaaggtgtatgaaaatgtgacaggcctggtgaaggctgtgattgagatgagcagcaagatccagcctgcccctcctgaggagtatgtgcccatggtgaaggaggtgggcctggccctgcggaccctgctggccaccgtggatgagaccatccccctgctgcctgccagcacccaccgggagattgagatggcccagaagctgctgaacagcgacctgggggagctgatcaacaagatgaagctggcccagcagtatgtgatgaccagcctgcagcaggagtacaagaagcagatgctgacagctgcccacgccctggccgtggatgccaagaacctgctggatgtgattgaccaggcccggctgaagatgctgggccagacccggccccactag

SEQ ID NO: 77884 - DNA, 3198 bp, Artificial Sequence
  derived and/or modified sequence
atggccgccgcctacctggaccccaacctgaaccacacccccaactcctctacgaaaacccacctcgggactggcatggaacggagcccaggggcaatggaacgggtgcttaaggtattccactatttcgagagcaattccgaacccaccacatgggcttccattatcagacatggcgacgctaccgatgtgcgtggcatcatccagaaaatcgtggactcacacaaagttaagcatgtggcctgttacgggttcagactctcccacttgagatccgaggaggttcattggctgcatgttgatatgggggtctccagcgtccgtgaaaagtacgaactggcacacccgcccgaggagtggaagtacgagctacgaatacggtatctgcctaagggattcttaaatcaatttaccgaggataagccaacgctgaatttcttttatcagcaggtcaaatcagattacatgctggaaatcgcagatcaggtcgatcaggagattgccctgaaactgggatgtttggagatccgtaggtcttattgggagatgcgcggcaacgctcttgaaaagaagtcaaattatgaagtgttagagaaagatgtggggctgaaaagattcttccctaagtctctgctcgatagcgtgaaagccaagaccctgaggaagctgatccagcagacctttcgccagtttgcaaatctaaatcgggaagagagcatcctgaagttcttcgaaatcttatcacccgtttaccgattcgacaaggagtgctttaaatgtgccctgggatccagctggatcatcagcgtggagttggcaatcggaccggaggagggtatttcatacctcacagataaaggctgcaatcccacacatctggccgatttcactcaggtgcagaccatacaatattcaaactccgaagacaaagacagaaaaggaatgttgcagctgaagattgcaggtgcccctgagcctctgaccgttacagctccaagcctgacgatcgcggaaaatatggctgatttaattgacggttattgccgtcttgtgaacggtacgagccaatcctttattattcggccacagaaagaaggcgagagggctctgccttctataccaaaacttgcgaactctgagaaacagggaatgcggacacacgcggtgtctgtctctgagactgacgactatgctgagattatagacgaggaagatacctacaccatgccctctactagggactacgagatacaaagagaaagaattgagctgggacggtgtataggagaaggtcagttcggcgatgtgcaccagggcatatacatgtcacctgaaaatcctgccctcgccgtcgccatcaagacttgcaaaaactgcacctctgattcagtgagagaaaaatttctgcaggaagccctcacgatgagacagttcgaccacccccacatagtgaaacttatcggcgtcattacagaaaatcccgtgtggatcatcatggagctgtgtaccctgggcgaactccgctctttcctgcaggttagaaaatactctctagacctggcgtccctgattctgtacgcctaccaactcagcaccgccttagcttatctcgagtccaaaaggttcgttcatcgcgacattgcagctcgcaacgtcctagttagttccaatgattgtgtgaagctgggcgacttcggtctttcacgttacatggaggactccacgtactataaagcatcaaagggcaaactgccaattaaatggatggctcccgaatcaattaacttcaggcgattcacaagcgcgtccgacgtttggatgtttggggtgtgtatgtgggaaatcttaatgcacggtgtaaaacccttccagggtgtgaaaaacaatgacgtgatcgggcggatcgagaacggtgaaaggctccccatgccaccaaactgtcctcccacactgtactcattgatgactaagtgctgggcttatgacccatcaaggagaccacggtttactgagttgaaggctcaattatccaccatactggaagaggaaaaagcacaacaggaggaaaggatgcgaatggaatcccgccggcaagccacagtgtcctgggattccggtggatctgacgaggccccaccaaaaccctctcgccccgggtatcctagcccgagaagcagtgaaggcttttacccttcgcctcagcacatggtgcaaaccaaccactaccaggtgtctggctatccaggtagccacgggattacagctatggccggtagcatttatcctgggcaagcctcattactggaccaaaccgactcatggaaccaccggccacaagaaatagccatgtggcagccgaacgtcgaagatagcacagtgttggacctccgaggcatcggtcaggtgcttccaactcacctgatggaggagagactcattcggcagcaacaggagatggaagaggatcagagatggctagaaaaggaggaacgcttcctcaaacccgatgtccgcttgtctagagggagtatcgatagggaggacggcagcctgcaggggcccatcgggaaccagcacatctatcagcccgtagggaagccaggcaaggaggagaagaattgggcagagcggaacccagcagcaccccccaaaaagccaccccggcctggcgcccccggtcacctggggtctctagccagcctcagctcccccgcagactcctacaacgaaggtgtcaagcctaaccaactccagccccaggagatttccccacctcccaccgcgaacctggaccgcagcaacgataaagtctacgagaacgtcaccggactggtgaaagctgtgattgagatgagctccaaaattcagcccgccccccccgaggaatatgtaccaatggttaaagaagtcgggctcgctctgcggactctactggcaactgtggatgaaaccattccattgttacccgcgtccacacaccgggagatcgaaatggcacagaagctcttgaactccgatctcggcgagcttatcaataagatgaagctggcccagcagtacgtgatgacatcattgcagcaggaatataaaaagcagatgctaaccgcagcacatgcacttgcagttgatgctaagaatctactggatgtaatcgatcaggcccgtctgaaaatgcttggacagacacggccgcattag

SEQ ID NO: 77885 - DNA, 3198 bp, Artificial Sequence
  derived and/or modified sequence
atggccgccgcctacctggaccccaacctgaaccacacccccaacagcagcaccaaaacccatctgggaactgggatggagcggtcaccaggagctatggaaagggtgctgaaagtgttccactatttcgaaagcaactcggagccgacaacctgggcttcaatcatcaggcacggggacgccactgatgttaggggcattattcagaagattgtggacagccataaggtgaaacatgttgcttgctacggattccgattgagccacctgagaagcgaggaagtccactggttgcacgtggacatgggcgtctctagcgtgagagaaaagtatgaattggcgcacccgcctgaggagtggaaatatgaactccggatccggtaccttcctaagggtttcctcaaccagtttacagaagacaaaccgacattgaatttcttctaccaacaggtcaagagcgattacatgctggagatcgccgatcaagtggatcaggaaatcgccctgaaactgggttgcttggagatccgacgctcttactgggaaatgagaggtaacgcactggagaagaagagcaattacgaagtgctggagaaagacgttggcttgaagcgattcttcccgaaatctctgctggatagtgtgaaggctaaaaccttgcgcaagttaattcagcagacatttcgccagtttgcaaatctgaacagagaggagagcattcttaaattctttgagatcctgtcccccgtgtacaggtttgataaggagtgctttaagtgtgccctgggatcttcatggatcatctccgtcgaactggccatcggaccagaagaagggatcagttacctgacggataaaggctgtaatcccacccacctagcggacttcacccaggtacagactatccagtactctaacagcgaagataaagatagaaagggcatgctacagcttaagattgctggagccccagaaccgctgactgttacagcccccagcttgaccatcgccgagaatatggcagatctcatcgatggatattgtcgactcgttaacggaacaagtcagtcatttattataaggccacagaaggaaggggaacgagctttgcctagtatccctaaactagccaatagtgagaagcaaggtatgagaacccacgctgtaagcgtatccgagaccgacgattatgccgaaataatcgatgaggaggatacatataccatgcccagtacacgagactacgaaatccagagggagcgcatcgagctcggccggtgtattggggagggacagtttggagatgtgcatcaaggtatttacatgtctcccgaaaaccccgctctggcagtggccatcaagacttgtaagaactgcacatcagacagcgtccgcgaaaaattcctgcaggaggctctcacaatgagacaattcgaccaccctcatatcgtgaagctgatcggcgttattactgagaacccggtgtggatcattatggaattatgtaccctcggggaattgcgtagtttccttcaggtccggaaatactcgctagacctggcctccctgatcctgtacgcctatcaactttctactgccctggcatacctggagtcaaaacgtttcgtgcatagagatattgcagctcgcaacgtcctcgtgagctctaatgattgcgtgaagctgggagatttcggcctctccagatacatggaagatagcacatattataaagcttcaaaaggtaagttacccataaaatggatggctccagaaagcattaacttcaggcggttcacatccgcttctgacgtgtggatgttcggggtgtgcatgtgggaaatcctgatgcatggtgtgaagccttttcagggagttaaaaacaatgacgtgattgggcgaatagagaatggggagagactgcctatgcctccaaattgcccaccgacactatacagcctgatgaccaagtgttgggcttatgacccaagccgccggccacgattcactgagctgaaagcgcagttgtccactatcctggaggaagaaaaggcccaacaagaggagcgaatgcgcatggagagtcgacgtcaggcaacggtgtcatgggacagtggtggaagtgacgaagcacctcccaaaccttcacgacccgggtaccctagtcctcgctcgagcgaagggttttacccctccccccagcacatggtgcagaccaaccactaccaagtgagtggataccctggttcacatggcattactgccatggccgggagcatataccccggacaagcatcgctacttgatcagactgattcttggaaccaccggccgcaggagatcgctatgtggcagccaaacgtggaggactcaacagtgttagacttgcgcgggatcggtcaagtgctgcctacccacctgatggaggagcggcttatacgacagcagcaagaaatggaagaggaccagcgatggctcgaaaaggaagagcggttcttgaagccggatgtcaggctttcccgcggctcaatcgatagggaagacggaagcttgcaaggccccataggcaatcagcatatctaccagccagtcgggaagccaggcaaagaggaaaagaattgggctgaacgcaatccagcggcccctccaaaaaagccgccaagacccggcgcacccgggcatcttggcagcctggcttcactatcaagcccagccgacagttataatgaaggcgtgaaaccctggcggcttcagcctcaagagatctctcccccccccactgccaatctcgatagaagtaacgataaagtctatgaaaacgtaactgggctggttaaggctgtgatcgagatgtcctcaaagattcagcctgcccctcccgaagagtacgtgcctatggtgaaagaggtcggcctggctttgcggactcttttggcgactgtcgatgagaccatacccctattaccagcatccacccaccgcgagattgaaatggcccagaaattactcaattctgatctgggggagctcataaataaaatgaagttggcacagcagtacgttatgaccagcctccagcaggagtacaagaaacagatgctcaccgccgcccatgccttggccgtcgacgctaaaaatctgctggacgtcatagatcaggctcgcctgaagatgctgggacagacccgaccacactag

SEQ ID NO: 77886 - DNA, 3198 bp, Artificial Sequence
  derived and/or modified sequence
atggctgcagcctaccttgatccaaatctgaaccacaccccaaatagctcgactaagacccacctgggtaccgggatggaacgatctcccggtgcaatggaacgcgtgctaaaagtctttcactattttgaatccaattccgagcccaccacgtgggcttccataataaggcatggggacgcaactgacgtgaggggaataattcagaaaatcgtggacagccacaaggtcaaacacgtggcctgctacggctttcgcctgtctcatcttcgctccgaggaggtccattggctgcatgtcgatatgggagtgtcgtctgtccgggaaaagtacgagcttgcccatcctcctgaagagtggaagtatgagttacggattcggtatctgcccaagggattcctcaatcagtttaccgaggataaaccaacgctgaatttcttctatcaacaggttaaatcagactacatgcttgagatagctgatcaagtggaccaggagattgccctcaaattggggtgcctcgaaatacggaggtcttactgggaaatgcgcggaaatgcgttagagaaaaagagcaattatgaagtgcttgagaaggacgtcggcttaaagcgcttctttccaaaatcactgctcgacagcgtgaaagcgaagactttgcggaaactaattcaacaaacctttcgtcaattcgccaaccttaaccgggaggagagcattttgaaattcttcgagattcttagcccggtgtacagattcgataaggagtgttttaagtgtgcccttggcagttcttggattatatccgtcgaactggctatcggtcccgaggaggggatctcatacctgacagacaagggatgcaatcctacacaccttgcagattttactcaagtccagaccattcagtacagcaactccgaggacaaagaccgcaaagggatgttacagcttaagattgcaggtgccccagagccacttacggtcactgccccatcacttaccatagcggaaaatatggctgatctgatagatgggtactgccgcctcgtaaacggtactagccagtcctttataattcggcctcagaaagagggtgagagggccctgccaagtatcccaaaattagccaattccgagaaacagggcatgcgcactcacgccgtctcagtgtccgagacagatgattacgctgagataattgatgaagaggatacatataccatgccgagcaccagggattacgaaatccagagggagcggattgagctgggtaggtgcataggtgaaggacagttcggagatgtccatcagggcatttatatgagccctgaaaacccagctttagccgtagccatcaaaacatgtaaaaattgcacctcggactccgtccgagagaaatttctgcaagaggcgctgactatgagacagtttgaccacccccatattgtgaagctgataggggtcattaccgagaacccagtgtggataatcatggagctctgcacgctgggagagctgcgctcattcctgcaggtgcgcaagtactcccttgatctggctagtctgatcttgtatgcataccaactgagcacagctcttgcctatttagaatcaaagaggtttgttcaccgggatatagccgctcgaaacgtattggtttcttccaacgattgcgtgaagcttggcgacttcggactgtccaggtacatggaagactccacatactataaagccagcaaaggtaaactgccaattaaatggatggcacctgagtccatcaatttccgcagatttacctcagcttccgacgtgtggatgttcggcgtgtgcatgtgggagattctgatgcacggagtgaagccattccaaggcgtaaaaaataacgatgtgattggtcgcatcgaaaatggtgaaaggcttcccatgccccctaactgccctccgaccttgtacagtcttatgaccaagtgctgggcatatgaccccagcagacggccacggttcaccgaactgaaggcgcagctttctacaatcttggaggaagaaaaagcccagcaagaagagaggatgcgcatggaatcgagaaggcaggctacagtctcctgggactccggcggatcagacgaggcaccccctaaaccctcacgccctggctacccatcacctagatcatctgaagggttttatccttccccgcaacacatggtgcaaaccaatcactatcaggtgtctggctacccaggatctcacggaatcacagctatggcgggttccatctacccaggccaggctagtcttttggatcaaaccgattcctggaatcatagaccacaagagatagctatgtggcagcctaacgttgaggatagcactgtgttagatcttagaggaatagggcaggtgctccctacacatctgatggaggagcgacttatccgacaacagcaagaaatggaagaggatcagcgctggttggagaaggaggaaaggttcctcaagcccgacgtgcggcttagtcggggaagcatagatcgcgaggacggctccctacaaggaccaataggaaaccagcatatctaccagccggtgggtaagcctggaaaggaagagaaaaattgggccgaacggaaccccgctgccccacctaagaaacctccacgcccaggagcaccgggtcaccttggcagcctggcctcgctatcatcccctgccgatagctacaacgaaggcgtgaagcctaaccagctccagccacaggagatctcccccccaccaactgctaatctggatagaagcaacgacaaggtctatgagaacgtcactgggctggtgaaagcagtgatagaaatgagcagcaagatacagccagcacccccagaggagtacgtacctatggtcaaggaagtaggcctggctctgcgcaccctgctcgctaccgtggatgaaaccatccctttactgccagcttccacacaccgagagatcgagatggcccagaaactactgaactccgaccttggcgaactcattaacaaaatgaaattagcacagcagtatgtcatgacatccctgcaacaggagtacaagaagcagatgcttactgccgcacacgcactggcggttgatgccaaaaacctgctggatgtgattgatcaggcaaggctcaagatgctggggcaaacaagaccacattag

SEQ ID NO: 77887 - DNA, 3198 bp, Artificial Sequence
  derived and/or modified sequence
atggcagctgcttaccttgatccaaatctgaaccacactccaaattcctctacgaaaacacacctcggaaccgggatggagcgaagccccggagctatggagcgcgtgctcaaagtgttccactacttcgaaagtaactctgaaccaaccacctgggccagcatcatcaggcatggcgacgccacagatgtaagggggattattcagaaaattgtagatagccacaaggtgaaacacgtggcctgttatggtttcaggctgagccatcttcggtctgaagaagtccactggctccatgttgatatgggtgtcagttcggttcgcgagaaatatgagttggctcatcctcccgaagaatggaagtacgagctgcgcatccggtatttgcccaagggatttctcaatcagttcaccgaagacaaaccgactttaaactttttttaccagcaagtgaagtccgactacatgctagaaatcgctgatcaagtggaccaggagattgctttaaagcttggctgcttagagatccggagatcttattgggaaatgcgaggcaacgcgcttgaaaagaagtctaattatgaggtactagaaaaggatgtgggcctgaagcgcttcttcccaaaaagcttgctggactctgtgaaggctaaaacactccgcaagctcatccagcagacgtttcgccagtttgctaatctgaaccgggaggaatccatcctgaagttctttgaaatactctcccccgtttatagatttgataaagaatgttttaagtgtgcgctcggtagtagctggataattagcgtggagctggcaatcggacccgaagagggcatttcgtatctaacggacaagggctgcaatcccacacatctggctgactttactcaggtccagaccattcagtatagcaattctgaggacaaggataggaagggaatgttgcaactgaagatagctggtgccccagagccactgactgttaccgcgccaagccttaccatcgcagagaatatggccgacttaatagatggctactgtaggctggtcaatggaacctcacaatccttcattatccgtccacagaaggagggcgaaagagcccttcctagcatacctaaactggccaattctgagaaacagggtatgagaacacatgccgtctcagtgagtgagacagatgactacgctgagatcatcgacgaagaagatacatacactatgccttccaccagggattatgagattcaacgagagagaatcgaactcggcaggtgtatcggtgaaggccaatttggggacgtacatcagggcatctacatgtctcctgagaacccagccctcgccgtggctattaaaacctgcaaaaattgcacgtccgattccgtgcgtgagaagtttctccaggaagctctgaccatgcgacaattcgaccacccacacatagtgaagttgattggcgtgatcacagaaaatcccgtttggataattatggagctgtgtacactcggcgagttgagatctttcctccaggtaaggaagtattcactggacctggcgtctctgatcctgtacgcttaccagttatctaccgccttggcttacttggaaagcaagcgtttcgttcaccgcgacatcgccgctcggaatgtgttagtgagttctaatgattgcgttaagctgggggacttcggactttcccgatacatggaggatagcacctactacaaagcatccaaagggaagctaccgatcaaatggatggcgcctgagtccattaattttaggcgcttcacatccgccagcgacgtgtggatgttcggcgtgtgcatgtgggaaatcttaatgcacggagttaaacctttccagggtgttaagaataatgacgtaatcggcagaattgagaacggtgaacgcctcccaatgccacctaattgccccccaacactttacagcttaatgacgaaatgctgggcctacgacccttctaggagaccacgatttactgagctaaaagctcagctgagcactatcctcgaagaggagaaggcccagcaggaagagaggatgcgtatggagtccaggcggcaggctacagtaagttgggattccggcggtagcgacgaagccccacctaaaccttctcgcccagggtacccgagcccaagaagctccgaagggttttatccatctcctcagcatatggttcaaactaatcactatcaggtgtcgggctacccagggtcccacgggattactgccatggcagggagtatctacccaggacaggcttccctgctcgatcagacagattcttggaatcaccggccacaggagattgcaatgtggcaacctaacgtggaagacagtaccgtgttggacctacgcggtatcggccaggttctaccgacacacctgatggaagaaaggcttatccggcaacagcaggagatggaagaggaccagcggtggctggaaaaagaagagaggtttcttaagcccgacgttagattatcgaggggctccattgatagagaagacggctcgcttcagggcccaattggtaaccagcacatctaccagcccgttggcaaaccaggcaaggaggaaaagaactgggccgaacgtaatccggctgctccaccgaagaaaccaccacggccaggggcaccaggacacctcggatcactggcatccctgtccagtccagcagattcttataatgagggcgtaaaaccatggcgccttcagccgcaggaaatctctccgccacctaccgcaaacctagaccggagcaacgacaaagtttatgagaacgtgacaggcttggtgaaggccgttatagagatgtcctcaaagatccagcctgccccacccgaggaatacgtccctatggttaaggaggtggggctcgctttgagaacactgcttgccaccgttgacgaaacaattccactgctccctgcctcaacgcatcgcgaaatcgagatggcccaaaagctactgaattcggaccttggcgaactaattaataagatgaaacttgcccagcagtatgtaatgacctccctgcagcaggagtacaaaaaacaaatgttaacagctgcgcatgcactggccgtagatgcgaagaatttactggatgtgatagatcaagccagattgaaaatgctcgggcagacgaggccacactag

SEQ ID NO: 77888 - DNA, 4492 bp, Artificial Sequence
  derived and/or modified sequence
gaccactgtgagcccgcggcgtgaggcgtgggaggaagcgcggctgctgtcgcccagcgccgccccgtcgtcgtctgccttcgcttcacggcgccgagccgcggtccgagcagaactggggctcccttgcatcttccagttacaaattcagtgccttctgcagtttccccagagctcctcaagaataacggaagggagaatatgacagatacctagcatctagcaaaataatggcagctgcttaccttgaccccaacttgaatcacacaccaaattcgagtactaagactcacctgggtactggtatggaacgttctcctggtgcaatggagcgagtattaaaggtctttcattattttgaaagcaatagtgagccaaccacctgggccagtattatcaggcatggagatgctactgatgtcaggggcatcattcagaagatagtggacagtcacaaagtaaagcatgtggcctgctatggattccgcctcagtcacctgcggtcagaggaggttcactggcttcacgtggatatgggcgtctccagtgtgagggagaagtatgagcttgctcacccaccagaggagtggaaatatgaattgagaattcgttatttgccaaaaggatttctaaaccagtttactgaagataagccaactttgaatttcttctatcaacaggtgaagagcgattatatgttagagatagctgatcaagtggaccaggaaattgctttgaagttgggttgtctagaaatacggcgatcatactgggagatgcggggcaatgcactagaaaagaagtctaactatgaagtattagaaaaagatgttggtttaaagcgattttttcctaagagtttactggattctgtcaaggccaaaacactaagaaaactgatccaacaaacatttagacaatttgccaaccttaatagagaagaaagtattctgaaattctttgagatcctgtctccagtctacagatttgataaggaatgcttcaagtgtgctcttggttcaagctggattatttcagtggaactggcaatcggcccagaagaaggaatcagttacctaacggacaagggctgcaatcccacacatcttgctgacttcactcaagtgcaaaccattcagtattcaaacagtgaagacaaggacagaaaaggaatgctacaactaaaaatagcaggtgcacccgagcctctgacagtgacggcaccatccctaaccattgcggagaatatggctgacctaatagatgggtactgccggctggtgaatggaacctcgcagtcatttatcatcagacctcagaaagaaggtgaacgggctttgccatcaataccaaagttggccaacagcgaaaagcaaggcatgcggacacacgccgtctctgtgtcagaaacagatgattatgctgagattatagatgaagaagatacttacaccatgccctcaaccagggattatgagattcaaagagaaagaatagaacttggacgatgtattggagaaggccaatttggagatgtacatcaaggcatttatatgagtccagagaatccagctttggcggttgcaattaaaacatgtaaaaactgtacttcggacagcgtgagagagaaatttcttcaagaagccttaacaatgcgtcagtttgaccatcctcatattgtgaagctgattggagtcatcacagagaatcctgtctggataatcatggagctgtgcacacttggagagctgaggtcatttttgcaagtaaggaaatacagtttggatctagcatctttgatcctgtatgcctatcagcttagtacagctcttgcatatctagagagcaaaagatttgtacacagggacattgctgctcggaatgttctggtgtcctcaaatgattgtgtaaaattaggagactttggattatcccgatatatggaagatagtacttactacaaagcttccaaaggaaaattgcctattaaatggatggctccagagtcaatcaattttcgacgttttacctcagctagtgacgtatggatgtttggtgtgtgtatgtgggagatactgatgcatggtgtgaagccttttcaaggagtgaagaacaatgatgtaatcggtcgaattgaaaatggggaaagattaccaatgcctccaaattgtcctcctaccctctacagccttatgacgaaatgctgggcctatgaccccagcaggcggcccaggtttactgaacttaaagctcagctcagcacaatcctggaggaagagaaggctcagcaagaagagcgcatgaggatggagtccagaagacaggccacagtgtcctgggactccggagggtctgatgaagcaccgcccaagcccagcagaccgggttatcccagtccgaggtccagcgaaggattttatcccagcccacagcacatggtacaaaccaatcattaccaggtttctggctaccctggttcacatggaatcacagccatggctggcagcatctatccaggtcaggcatctcttttggaccaaacagattcatggaatcatagacctcaggagatagcaatgtggcagcccaatgtggaggactctacagtattggacctgcgagggattgggcaagtgttgccaacccatctgatggaagagcgtctaatccgacagcaacaggaaatggaagaagatcagcgctggctggaaaaagaggaaagatttctgaaacctgatgtgagactctctcgaggcagtattgacagggaggatggaagtcttcagggtccgattggaaaccaacatatatatcagcctgtgggtaaaccaggtaaagaagaaaagaattgggcggaaagaaatcctgcagctccaccaaagaaaccgcctcgccctggagctcccggtcatctgggaagccttgccagcctcagcagccctgctgacagctacaacgagggtgtcaagccaaatcagcttcagccccaggaaatcagcccccctcctactgccaacctggaccggtcgaatgataaggtgtacgagaatgtgacgggcctggtgaaagctgtcatcgagatgtccagtaaaatccagccagccccaccagaggagtatgtccctatggtgaaggaagtcggcttggccctgaggacattattggccactgtggatgagaccattcccctcctaccagccagcacccaccgagagattgagatggcacagaagctattgaactctgacctgggtgagctcatcaacaagatgaaactggcccagcagtatgtcatgaccagcctccagcaagagtacaaaaagcaaatgctgactgctgctcacgccctggctgtggatgccaaaaacttactcgatgtcattgaccaagcaagactgaaaatgcttgggcagacgagaccacactgagcctcccctaggagcacgtcttgctaccctcttttgaagatgttctctagccttccaccagcagcgaggaattaaccctgtgtcctcagtcgccagcacttacagctccaacttttttgaatgaccatctggttgaaaaatctttctcatataagtttaaccacactttgatttgggttcattttttgttttgtttttttcaatcatgatattcagaaaaatccaggatccaaaatgtggcgtttttctaagaatgaaaattatatgtaagcttttaagcatcatgaagaacaatttatgttcacattaagatacgttctaaagggggatggccaaggggtgacatcttaattcctaaactaccttagctgcatagtggaagaggagagcatgaagcaaagaattccaggaaacccaagaggctgagaattcttttgtctaccatagaattattatccagactggaatttttgtttgttagaacacccttcagttgcaatatgctaatcccactttacaaagaatataaaagctatattttgaagacttgagttatttcagaaaaaactacagccctttttgtcttacctgccttttactttcgtgtggatatgtgaagcattgggtcgggaactagctgtagaacacaactaaaaactcatgtcttttttcacagaataatgtgccagttttttgtagcaatgttatttctcttggaagcagaaatgctttgtaccagagcacctccaaactgcattgaggagaagttccagaaccatcccctttttccatttttatataatttataaagaaagattaaagccatgttgactattttacagccactggagttaactaacccttccttgtatctgtcttcccaggagagaatgaagcaaaacaggaatttggttttcttttgatgtccagttacaccatccattctgttaattttgaaaaaatataccctccctttagtttgttgggggatataaattattctcaggaagaatataatgaactgtacagttactttgacctattaaaaaggtgttaccagtaaa

SEQ ID NO: 77889 - DNA, 4414 bp, Artificial Sequence
  derived and/or modified sequence
tgccttcgcttcacggcgccgagccgcggtccgagcagaactggggctcccttgcatcttccagttacaaattcagtgccttctgcagtttccccagagctcctcaagaataacggaagggagaatatgacagatacctagcatctagcaaaataatggcagctgcttaccttgaccccaacttgaatcacacaccaaattcgagtactaagactcacctgggtactggtatggaacgttctcctggtgcaatggagcgagtattaaaggtctttcattattttgaaagcaatagtgagccaaccacctgggccagtattatcaggcatggagatgctactgatgtcaggggcatcattcagaagatagtggacagtcacaaagtaaagcatgtggcctgctatggattccgcctcagtcacctgcggtcagaggaggttcactggcttcacgtggatatgggcgtctccagtgtgagggagaagtatgagcttgctcacccaccagaggagtggaaatatgaattgagaattcgttatttgccaaaaggatttctaaaccagtttactgaagataagccaactttgaatttcttctatcaacaggtgaagagcgattatatgttagagatagctgatcaagtggaccaggaaattgctttgaagttgggttgtctagaaatacggcgatcatactgggagatgcggggcaatgcactagaaaagaagtctaactatgaagtattagaaaaagatgttggtttaaagcgattttttcctaagagtttactggattctgtcaaggccaaaacactaagaaaactgatccaacaaacatttagacaatttgccaaccttaatagagaagaaagtattctgaaattctttgagatcctgtctccagtctacagatttgataaggaatgcttcaagtgtgctcttggttcaagctggattatttcagtggaactggcaatcggcccagaagaaggaatcagttacctaacggacaagggctgcaatcccacacatcttgctgacttcactcaagtgcaaaccattcagtattcaaacagtgaagacaaggacagaaaaggaatgctacaactaaaaatagcaggtgcacccgagcctctgacagtgacggcaccatccctaaccattgcggagaatatggctgacctaatagatgggtactgccggctggtgaatggaacctcgcagtcatttatcatcagacctcagaaagaaggtgaacgggctttgccatcaataccaaagttggccaacagcgaaaagcaaggcatgcggacacacgccgtctctgtgtcagaaacagatgattatgctgagattatagatgaagaagatacttacaccatgccctcaaccagggattatgagattcaaagagaaagaatagaacttggacgatgtattggagaaggccaatttggagatgtacatcaaggcatttatatgagtccagagaatccagctttggcggttgcaattaaaacatgtaaaaactgtacttcggacagcgtgagagagaaatttcttcaagaagccttaacaatgcgtcagtttgaccatcctcatattgtgaagctgattggagtcatcacagagaatcctgtctggataatcatggagctgtgcacacttggagagctgaggtcatttttgcaagtaaggaaatacagtttggatctagcatctttgatcctgtatgcctatcagcttagtacagctcttgcatatctagagagcaaaagatttgtacacagggacattgctgctcggaatgttctggtgtcctcaaatgattgtgtaaaattaggagactttggattatcccgatatatggaagatagtacttactacaaagcttccaaaggaaaattgcctattaaatggatggctccagagtcaatcaattttcgacgttttacctcagctagtgacgtatggatgtttggtgtgtgtatgtgggagatactgatgcatggtgtgaagccttttcaaggagtgaagaacaatgatgtaatcggtcgaattgaaaatggggaaagattaccaatgcctccaaattgtcctcctaccctctacagccttatgacgaaatgctgggcctatgaccccagcaggcggcccaggtttactgaacttaaagctcagctcagcacaatcctggaggaagagaaggctcagcaagaagagcgcatgaggatggagtccagaagacaggccacagtgtcctgggactccggagggtctgatgaagcaccgcccaagcccagcagaccgggttatcccagtccgaggtccagcgaaggattttatcccagcccacagcacatggtacaaaccaatcattaccaggtttctggctaccctggttcacatggaatcacagccatggctggcagcatctatccaggtcaggcatctcttttggaccaaacagattcatggaatcatagacctcaggagatagcaatgtggcagcccaatgtggaggactctacagtattggacctgcgagggattgggcaagtgttgccaacccatctgatggaagagcgtctaatccgacagcaacaggaaatggaagaagatcagcgctggctggaaaaagaggaaagatttctgaaacctgatgtgagactctctcgaggcagtattgacagggaggatggaagtcttcagggtccgattggaaaccaacatatatatcagcctgtgggtaaaccaggtaaagaagaaaagaattgggcggaaagaaatcctgcagctccaccaaagaaaccgcctcgccctggagctcccggtcatctgggaagccttgccagcctcagcagccctgctgacagctacaacgagggtgtcaagccatggaggcttcagccccaggaaatcagcccccctcctactgccaacctggaccggtcgaatgataaggtgtacgagaatgtgacgggcctggtgaaagctgtcatcgagatgtccagtaaaatccagccagccccaccagaggagtatgtccctatggtgaaggaagtcggcttggccctgaggacattattggccactgtggatgagaccattcccctcctaccagccagcacccaccgagagattgagatggcacagaagctattgaactctgacctgggtgagctcatcaacaagatgaaactggcccagcagtatgtcatgaccagcctccagcaagagtacaaaaagcaaatgctgactgctgctcacgccctggctgtggatgccaaaaacttactcgatgtcattgaccaagcaagactgaaaatgcttgggcagacgagaccacactgagcctcccctaggagcacgtcttgctaccctcttttgaagatgttctctagccttccaccagcagcgaggaattaaccctgtgtcctcagtcgccagcacttacagctccaacttttttgaatgaccatctggttgaaaaatctttctcatataagtttaaccacactttgatttgggttcattttttgttttgtttttttcaatcatgatattcagaaaaatccaggatccaaaatgtggcgtttttctaagaatgaaaattatatgtaagcttttaagcatcatgaagaacaatttatgttcacattaagatacgttctaaagggggatggccaaggggtgacatcttaattcctaaactaccttagctgcatagtggaagaggagagcatgaagcaaagaattccaggaaacccaagaggctgagaattcttttgtctaccatagaattattatccagactggaatttttgtttgttagaacacccttcagttgcaatatgctaatcccactttacaaagaatataaaagctatattttgaagacttgagttatttcagaaaaaactacagccctttttgtcttacctgccttttactttcgtgtggatatgtgaagcattgggtcgggaactagctgtagaacacaactaaaaactcatgtcttttttcacagaataatgtgccagttttttgtagcaatgttatttctcttggaagcagaaatgctttgtaccagagcacctccaaactgcattgaggagaagttccagaaccatcccctttttccatttttatataatttataaagaaagattaaagccatgttgactattttacagccactggagttaactaacccttccttgtatctgtcttcccaggagagaatgaagcaaaacaggaatttggttttcttttgatgtccagttacaccatccattctgttaattttgaaaaaatataccctccctttagtttgttgggggatataaattattctcaggaagaatataatgaactgtacagttactttgacctattaaaaaggtgttaccagt

SEQ ID NO: 77890 - protein, 180 aa, Artificial Sequence
  derived and/or modified sequence
MAEASSANLGSGCEEKRHEGSSSESVPPGTTISRVKLLDTMVDTFLQKLVAAGSYQRFTDCYKCFYQLQPAMTQQIYDKFIAQLQTSIREEISDIKEEGNLEAVLNALDKIVEEGKVRKEPACNGTPCGAMCRNRRPRTSSWQMPSWQGGGRWRSCSYRSRPSSRPGRLYTENRGSWLLC

SEQ ID NO: 77891 - DNA, 543 bp, Artificial Sequence
  derived and/or modified sequence
atggccgaggccagcagcgccaacctgggcagcggctgcgaggagaagagacacgagggcagcagcagcgagagcgtgccccccggcaccaccatcagcagagtgaagctgctggacaccatggtggacaccttcctgcagaagctggtggccgccggcagctaccagagattcaccgactgctacaagtgcttctaccagctgcagcccgccatgacccagcagatctacgacaagttcatcgcccagctgcagaccagcatcagagaggagatcagcgacatcaaggaggagggcaacctggaggccgtgctgaacgccctggacaagatcgtggaggagggcaaggtgagaaaggagcccgcctgcaacggcaccccctgcggcgccatgtgcagaaacagaagacccagaaccagcagctggcagatgcccagctggcagggcggcggcagatggagaagctgcagctacagaagcagacccagcagcagacccggcagactgtacaccgagaacagaggcagctggctgctgtgctag

SEQ ID NO: 77892 - DNA, 543 bp, Artificial Sequence
  derived and/or modified sequence
atggctgaagcatcatccgcaaacctgggctccggttgtgaagaaaagagacatgagggttcctcatcagaatctgttccccccggtaccacgatttcccgcgttaaacttctggataccatggtcgacacttttttgcagaagctcgtggcagccggatcataccaacgttttaccgactgttacaaatgcttctaccagctgcagccagccatgacgcagcagatttacgataaatttatagctcagctccagacctcaatccgtgaggaaattagtgatatcaaagaagaggggaatttagaagccgtgctgaacgctttagataaaatcgtggaagagggaaaagtcagaaaggagccagcatgtaatggcaccccttgcggagccatgtgccggaataggaggccccggacctcttcgtggcagatgccatcttggcagggaggaggccgctggaggtcctgcagttatcgctcaaggccttcgtcccgcccagggcgactgtatactgaaaataggggaagctggctgctgtgttag

SEQ ID NO: 77893 - DNA, 1019 bp, Artificial Sequence
  derived and/or modified sequence
agatttggaggttcaacttcaacatggccgaagcaagtagcgccaatctaggcagcggctgtgaggaaaaaaggcatgaggggtcgtcttcggaatctgtgccacccggcactaccatttcgagggtgaagctcctcgacaccatggtggacacttttcttcagaagctggtcgccgccggcagctaccagagattcactgactgctataagtgcttctaccagttgcagcctgcgatgacacagcaaatctatgacaagtttatagctcagttgcagacatctatccgggaggaaatctctgacatcaaagaggaggggaacctagaagctgtcttgaatgccttggataaaattgtggaagaaggcaaagtccgcaaagagccagcctgcaacgggacaccctgcggcgccatgtgcagaaacaggaggccgagaaccagcagctggcagatgccgtcctggcagggcggaggcaggtggaggagctgcagctacaggtccaggcccagcagcaggcctggcaggctctacacagagaacagagggagctggttgctgtgctgagggagcctgagtgaggagaccgccagccccagaagcagagggcagtcaaggtcaagagcctgtggtccagcatgcctggcctgggcgggctacctctgagaacggctgaaatggtgcccagtccatcagcagtgatggaatttgctggaggactaggccagagcaagcctcactgccactgtgcctttggggcacccttggggttggacatacaccccctttagattcctctgtttcttctacctggataattcttggccatgttctctcttctctaggttcaggtcagctctgcccctccgcccccctcctgctggttccccagcccttttccctggccctggcttggagaatctgttttcaatctccactgattgcccccttgctggccagcccaggggcctttaccatgttctctccacatccgtaaataaacttccttcactacactgt

SEQ ID NO: 77894 - DNA, 543 bp, Artificial Sequence
  derived and/or modified sequence
atggccgaggccagcagcgccaacctgggcagcggctgtgaggagaagagacatgagggcagcagcagcgagagcgtgcccccaggcaccaccatcagccgggtgaagctgctggacaccatggtggacaccttcctgcagaagctggtggccgccggcagctaccagcgcttcacagactgctacaagtgcttctaccagctgcagcctgccatgacccagcagatctatgacaagttcatcgcccagctgcagaccagcatccgggaggagatcagtgacatcaaggaggagggcaacctggaggccgtgctgaatgccctggacaagatcgtggaggagggcaaggtgaggaaggagcccgcctgcaatggcaccccctgtggggccatgtgcaggaacagaagacccaggaccagctcctggcagatgcccagctggcagggcggcggccgctggaggagctgcagctaccgcagccggcccagcagccggcccggccgcctgtacacagagaacagaggctcctggctgctgtgctag

SEQ ID NO: 77895 - DNA, 543 bp, Artificial Sequence
  derived and/or modified sequence
atggccgaggccagcagcgccaacctgggcagcggctgcgaggagaaacggcacgagggaagcagcagtgagagtgtgccaccaggtaccacaatcagtcgtgttaaactgcttgatacaatggtggatacatttctgcagaagctggtagctgcaggcagttatcagcggttcactgactgttacaaatgtttttaccaattgcagccagccatgacccaacagatctatgataagtttattgcacagctgcaaacctctattagagaagagataagtgatattaaggaggaggggaaccttgaggctgtcctgaatgcccttgataagatcgtggaagagggtaaggttcgcaaagagccagcatgcaacggaactccttgcggcgccatgtgccggaatcgtaggcccaggacatcatcctggcagatgccgtcttggcagggcggtggcagatggcggagctgctcctaccgctcccgaccctcttccagaccggggcgcctgtataccgagaatagaggtagctggctcttgtgttag

SEQ ID NO: 77896 - DNA, 543 bp, Artificial Sequence
  derived and/or modified sequence
atggcagaggccagcagcgccaaccttggaagtggctgtgaggagaaacgccatgaaggttcaagctctgaatccgtgcctcccggaaccaccatcagccgagtgaagctgctagacaccatggtcgacacattcctgcaaaaactggtcgctgcaggaagttaccagcgtttcactgattgctacaagtgtttctatcagctgcagcctgctatgacccaacagatctacgataagtttatagcccaactgcaaacatctatccgggaagaaatctcagacattaaagaagagggtaacctggaggctgtgctcaacgctctcgacaaaattgtcgaggaggggaaggtgagaaaggagccagcttgcaacggtaccccatgtggcgcaatgtgtagaaacaggcgccctcggaccagcagttggcagatgccctcctggcagggcggtggaaggtggaggagctgtagttaccgtagtaggccgtcttcccggcctgggcgactatacaccgagaacagaggaagttggctgctgtgctag

SEQ ID NO: 77897 - protein, 207 aa, Artificial Sequence
  derived and/or modified sequence
MAEASSANLGSGCEEKRHEGSSSESVPPGTTISRVKLLDTMVDTFLQKLVAAGSSPLLHWDGSAGPRLPSGGQSVKQAFSWAACRLPQGRKEEISDIKEEGNLEAVLNALDKIVEEGKVRKEPAWRPSGIPEKDLHSVMAPYFLQQRDTLRRHVQKQEAENQQLADAVLAGRRQVEELQLQVQAQQQAWQALHREQRELVAVLREPE

SEQ ID NO: 77898 - DNA, 624 bp, Artificial Sequence
  derived and/or modified sequence
atggccgaggccagcagcgccaacctgggcagcggctgcgaggagaagagacacgagggcagcagcagcgagagcgtgccccccggcaccaccatcagcagagtgaagctgctggacaccatggtggacaccttcctgcagaagctggtggccgccggcagcagccccctgctgcactgggacggcagcgccggccccagactgcccagcggcggccagagcgtgaagcaggccttcagctgggccgcctgcagactgccccagggcagaaaggaggagatcagcgacatcaaggaggagggcaacctggaggccgtgctgaacgccctggacaagatcgtggaggagggcaaggtgagaaaggagcccgcctggagacccagcggcatccccgagaaggacctgcacagcgtgatggccccctacttcctgcagcagagagacaccctgagaagacacgtgcagaagcaggaggccgagaaccagcagctggccgacgccgtgctggccggcagaagacaggtggaggagctgcagctgcaggtgcaggcccagcagcaggcctggcaggccctgcacagagagcagagagagctggtggccgtgctgagagagcccgagtag

SEQ ID NO: 77899 - DNA, 624 bp, Artificial Sequence
  derived and/or modified sequence
atggccgaggcctcctccgcaaatcttggctctggctgtgaggagaaaagacacgagggtagtagctcagagagcgtgcctccgggcacaacaattagcagagtgaagctgttggatacaatggttgataccttcctccagaaactggtcgccgcgggtagcagtcctctcctgcactgggatggctccgccggccctcggctacctagcggtggacaaagcgtgaagcaggccttttcttgggcagcgtgcaggctgccccagggaagaaaagaagagattagcgacataaaggaggaggggaatctcgaagcggtcctgaatgctctggataagatcgtggaagagggtaaggttcgtaaggaaccagcatggagaccctcaggaattcctgaaaaagacttacattccgttatggccccttattttttgcagcagcgcgacactctacgccgccatgtgcagaagcaggaagcggagaaccaacagctcgcagacgcggttctcgctggacggcgccaggtagaggagttacagttgcaggtgcaagcgcagcaacaggcttggcaggccctgcaccgggaacagcgggagttggtagcagtgctgagagagcctgagtag

SEQ ID NO: 77900 - DNA, 884 bp, Artificial Sequence
  derived and/or modified sequence
caacttcaacatggccgaagcaagtagcgccaatctaggcagcggctgtgaggaaaaaaggcatgaggggtcgtcttcggaatctgtgccacccggcactaccatttcgagggtgaagctcctcgacaccatggtggacacttttcttcagaagctggtcgccgccggcagctctccactccttcattgggacggaagtgctggtccccgcctgccctctggtggacagtctgtgaaacaggccttcagttgggcggcgtgcaggttaccacaggggaggaaggaggaaatctctgacatcaaagaggaggggaacctagaagctgtcttgaatgccttggataaaattgtggaagaaggcaaagtccgcaaagagccagcctggcgccccagcgggatcccagagaaggatctgcacagtgttatggcaccctacttcctgcagcaacgggacaccctgcggcgccatgtgcagaaacaggaggccgagaaccagcagctggcagatgccgtcctggcagggcggaggcaggtggaggagctgcagctacaggtccaggcccagcagcaggcctggcaggctctacacagagaacagagggagctggttgctgtgctgagggagcctgagtgaggagaccgccagccccagaagcagagggcagtcaaggtcaagagcctgtggtccagcatgcctggcctgggcgggctacctctgagaacggctgaaatggtgcccagtccatcagcagtgatggaatttgctggaggactaggccagagcaagcctcactgccactgtgcctttggggcacccttggggttggacatacaccccctttagattcctctgtttcttctacctggataattcttggccatgt

SEQ ID NO: 77901 - DNA, 624 bp, Artificial Sequence
  derived and/or modified sequence
atggccgaggccagcagcgccaacctgggcagcggctgtgaggagaagagacatgagggcagcagcagcgagagcgtgcccccaggcaccaccatcagccgggtgaagctgctggacaccatggtggacaccttcctgcagaagctggtggccgccggcagcagccccctgctgcactgggatggcagcgctggcccccggctgcccagcggcggccagagcgtgaagcaggccttctcctgggccgcctgccgcctgccccagggcaggaaggaggagatcagtgacatcaaggaggagggcaacctggaggccgtgctgaatgccctggacaagatcgtggaggagggcaaggtgaggaaggagcccgcctggaggcccagcggcatccctgagaaggacctgcacagcgtgatggccccctacttcctgcagcagagggacaccctgcggagacatgtgcagaagcaggaggccgagaaccagcagctggctgatgctgtgctggccggccggcggcaggtggaggagctgcagctgcaggtgcaggcccagcagcaggcctggcaggccctgcaccgggagcagcgggagctggtggccgtgctgcgggagcctgagtag

SEQ ID NO: 77902 - DNA, 624 bp, Artificial Sequence
  derived and/or modified sequence
atggccgaggccagcagcgccaacctgggcagcggctgcgaggagaaacgccacgaggggtcttccagtgaaagcgtaccccctgggactacgatttcacgggtaaagctgctggataccatggtcgatacattcctgcagaaactggtggcagccggctcctccccgctgttacactgggacggctctgccggcccaagactgccatccggcggacaatccgtgaagcaagccttttcatgggccgcctgtcggctgccccagggcaggaaagaagagatctccgacatcaaggaggaaggaaatcttgaggccgtgctgaacgcacttgataaaattgtggaggaggggaaagtgcgcaaggagcctgcatggcggcccagtggtatacctgagaaggatctgcacagtgtgatggcaccgtactttttgcaacagagagacacactgcggcgtcacgtccagaagcaggaggcagagaatcagcaattagccgacgcggtgctggccggtcggcggcaggtcgaggagcttcagcttcaagttcaggcccagcagcaggcatggcaggcactgcatagagagcagcgtgagctggttgccgtgctgcgcgagccagagtag

SEQ ID NO: 77903 - DNA, 624 bp, Artificial Sequence
  derived and/or modified sequence
atggccgaggcgtctagtgccaacctcgggagtggctgtgaggagaagcgccatgaaggctcgtcatcagaatcagttccccctggtactaccatcagcagagtaaagctgctagataccatggtagatacctttttgcagaagctggtggccgcaggctcaagcccgcttctgcactgggacggctccgcgggaccacgccttccctcaggtggtcagagtgtgaagcaggcattctcctgggccgcttgcaggctcccacagggcagaaaggaagagatctccgacatcaaggaggagggaaatctggaagccgtcctgaacgcactggacaagattgtggaggaggggaaagtgcggaaagaacccgcttggcgaccttccgggattccagagaaagatctccactcagtcatggccccttactttttgcagcaaagagacactttgaggagacacgtgcaaaaacaagaagccgaaaatcagcaactggctgacgctgtgttggccggacgccgtcaggtcgaggagctgcaactgcaggtccaagcacagcagcaggcctggcaggcccttcaccgcgaacaacgtgagctggtcgccgtcctgcgcgaaccagagtag

SEQ ID NO: 77904 - protein, 220 aa, Artificial Sequence
  derived and/or modified sequence
MAEASSANLGSGCEEKRHEGSSSESVPPGTTISRVKLLDTMVDTFLQKLVAAGSYQRFTDCYKCFYQLQPAMTQQIYDKFIAQLQTSIREEISDIKEEGNLEAVLNALDKIVEEGKVRKEPACNGTPCGAMCRNRRPRTSSWQMPSWQGGGRWRSCSYRSRPSSRPGRCEAQRCRVQQRCSLCVQAGGQRGSEETQALPVSMAGSPSPLPGSPGAQEGGV

SEQ ID NO: 77905 - DNA, 663 bp, Artificial Sequence
  derived and/or modified sequence
atggccgaggccagcagcgccaacctgggcagcggctgcgaggagaagagacacgagggcagcagcagcgagagcgtgccccccggcaccaccatcagcagagtgaagctgctggacaccatggtggacaccttcctgcagaagctggtggccgccggcagctaccagagattcaccgactgctacaagtgcttctaccagctgcagcccgccatgacccagcagatctacgacaagttcatcgcccagctgcagaccagcatcagagaggagatcagcgacatcaaggaggagggcaacctggaggccgtgctgaacgccctggacaagatcgtggaggagggcaaggtgagaaaggagcccgcctgcaacggcaccccctgcggcgccatgtgcagaaacagaagacccagaaccagcagctggcagatgcccagctggcagggcggcggcagatggagaagctgcagctacagaagcagacccagcagcagacccggcagatgcgaggcccagagatgcagagtgcagcagagatgcagcctgtgcgtgcaggccggcggccagagaggcagcgaggagacccaggccctgcccgtgagcatggccggcagccccagccccctgcccggcagccccggcgcccaggagggcggcgtgtag

SEQ ID NO: 77906 - DNA, 663 bp, Artificial Sequence
  derived and/or modified sequence
atggccgaggcatcatccgctaatctgggatctggctgcgaggaaaagcgccacgaaggatcctcgtcagaaagcgtccccccaggaaccactatctcaagagtaaaactcttggacacaatggtcgacacgttcctgcaaaagttagtggctgcagggtcctatcagcgctttaccgattgctacaagtgcttttaccagctccaaccagctatgacccagcaaatatatgataagtttattgcccagctgcaaacttcaatcagagaagagattagtgacatcaaggaagaaggtaatctggaggcggtactgaatgccctggacaagatagtagaggagggaaaggtacgcaaggaacctgcatgtaacggcacaccgtgcggggccatgtgtagaaatagaagacctagaacaagcagttggcagatgccaagctggcagggcggaggtagatggagatcatgctcctataggtcaaggcctagttcaaggccgggcagatgcgaggctcagagatgtagagtgcagcagcggtgttcattatgcgtgcaagcaggtggccaaaggggatcagaggagacacaggctctgcccgtcagcatggccggatccccatcaccgctccccggttctcctggggctcaagaaggaggagtctag

SEQ ID NO: 77907 - DNA, 663 bp, Artificial Sequence
  derived and/or modified sequence
atggccgaggccagcagcgccaacctgggcagcggctgtgaggagaagagacatgagggcagcagcagcgagagcgtgcccccaggcaccaccatcagccgggtgaagctgctggacaccatggtggacaccttcctgcagaagctggtggccgccggcagctaccagcgcttcacagactgctacaagtgcttctaccagctgcagcctgccatgacccagcagatctatgacaagttcatcgcccagctgcagaccagcatccgggaggagatcagtgacatcaaggaggagggcaacctggaggccgtgctgaatgccctggacaagatcgtggaggagggcaaggtgaggaaggagcccgcctgcaatggcaccccctgtggggccatgtgcaggaacagaagacccaggaccagctcctggcagatgcccagctggcagggcggcggccgctggaggagctgcagctaccgcagccggcccagcagccggcccggccgctgtgaggcccagcgctgccgggtgcagcagcgctgcagcctgtgtgtgcaggccggcggccagaggggcagcgaggagacccaggccctgcctgtgtccatggccggcagccccagccccctgcccggcagccctggggcccaggagggcggcgtgtag

SEQ ID NO: 77908 - DNA, 663 bp, Artificial Sequence
  derived and/or modified sequence
atggccgaggccagcagcgccaacctgggcagcggctgcgaggagaaaaggcatgagggatcaagctctgagtcagttccaccaggcaccacgatctcccgcgttaaactattagacaccatggttgatacctttttgcagaagctcgtagcagcggggagctatcagcgcttcacggactgttataagtgcttttaccagctgcagcctgcaatgactcaacagatctacgacaagtttatagcacagttgcagaccagtatcagagaagaaatttcagatatcaaggaggagggcaacctggaagctgtgcttaacgcacttgacaagatcgtcgaggaagggaaggtgcgcaaagaaccagcctgcaacggcaccccttgtggcgctatgtgccgcaatagaagacctcgcacaagcagctggcaaatgccctcatggcagggtggaggcaggtggcgatcttgcagttataggtctcgccccagtagccggccaggcagatgcgaagcgcagcggtgtagagttcagcagcggtgttcgctttgcgtccaggcgggcggacagcgcggatccgaggaaacacaggctctgcccgtgtctatggccggaagtccctcgcctctccccggaagtcctggggctcaggagggtggagtgtag

SEQ ID NO: 77909 - DNA, 852 bp, Artificial Sequence
  derived and/or modified sequence
aacttcaacatggccgaagcaagtagcgccaatctaggcagcggctgtgaggaaaaaaggcatgaggggtcgtcttcggaatctgtgccacccggcactaccatttcgagggtgaagctcctcgacaccatggtggacacttttcttcagaagctggtcgccgccggcagctaccagagattcactgactgctataagtgcttctaccagttgcagcctgcgatgacacagcaaatctatgacaagtttatagctcagttgcagacatctatccgggaggaaatctctgacatcaaagaggaggggaacctagaagctgtcttgaatgccttggataaaattgtggaagaaggcaaagtccgcaaagagccagcctgcaacgggacaccctgcggcgccatgtgcagaaacaggaggccgagaaccagcagctggcagatgccgtcctggcagggcggaggcaggtggaggagctgcagctacaggtccaggcccagcagcaggcctggcaggtgcgaagcccagcggtgcagagtccagcaaaggtgcagcctttgtgtccaagcaggagggcagcgaggtagtgaagagacccaggcgctacctgtatcaatggctgggagccccagtcccctacccggatcccctggagcccaggagggaggtgtgtgagctcaatccggactgtgacgagttggctgaccacatcggctttcaggaggcctatcggcgcttctacggcccggtctagggtgtcgctctgctggcctggccggcaaccccagttctgctcctctccaggcacccttctttcctcttccccttgcccttgccctgacctcccagccctat

SEQ ID NO: 77910 - DNA, 663 bp, Artificial Sequence
  derived and/or modified sequence
atggccgaggcaagctccgcaaacctgggctccgggtgtgaagagaagcgccacgaagggtcttcctccgagtccgtcccccctggcaccacaataagcagagtgaagcttttggacactatggtggacacgtttttgcaaaagctggtggcagccggtagttatcagcggttcaccgattgttacaagtgtttttatcagctgcagcccgctatgacacaacagatctacgacaagttcattgcacaactccagacttccattcgggaggagatttcagacatcaaagaagaagggaatctggaggctgttctcaacgcacttgacaaaatagtggaggaggggaaggtgcggaaggaacccgcttgtaacggtactccttgcggtgctatgtgtcgcaatcgaagaccccgtacatccagctggcagatgccatcatggcagggaggtggtaggtggaggtcctgctcttatcgcagtagaccatccagccggcctggtaggtgcgaagcccagagatgccgtgtccaacagagatgtagcctgtgcgtccaggctggcggacagcgaggcagtgaagagacccaggccctacccgtcagcatggccggtagccccagcccactgccaggctccccaggggctcaggaaggcggagtctag

SEQ ID NO: 77911 - protein, 175 aa, Artificial Sequence
  derived and/or modified sequence
MAEASSANLGSGCEEKRHEGSSSESVPPGTTISRVKLLDTMVDTFLQKLVAAGSYQRFTDCYKCFYQLQPAMTQQIYDKFIAQLQTSIREEISDIKEEGNLEAVLNALDKIVEEGKVRKEPAWCEAQRCRVQQRCSLCVQAGGQRGSEETQALPVSMAGSPSPLPGSPGAQEGGV

SEQ ID NO: 77912 - DNA, 528 bp, Artificial Sequence
  derived and/or modified sequence
atggccgaggccagcagcgccaacctgggcagcggctgcgaggagaagagacacgagggcagcagcagcgagagcgtgccccccggcaccaccatcagcagagtgaagctgctggacaccatggtggacaccttcctgcagaagctggtggccgccggcagctaccagagattcaccgactgctacaagtgcttctaccagctgcagcccgccatgacccagcagatctacgacaagttcatcgcccagctgcagaccagcatcagagaggagatcagcgacatcaaggaggagggcaacctggaggccgtgctgaacgccctggacaagatcgtggaggagggcaaggtgagaaaggagcccgcctggtgcgaggcccagagatgcagagtgcagcagagatgcagcctgtgcgtgcaggccggcggccagagaggcagcgaggagacccaggccctgcccgtgagcatggccggcagccccagccccctgcccggcagccccggcgcccaggagggcggcgtgtag

SEQ ID NO: 77913 - DNA, 528 bp, Artificial Sequence
  derived and/or modified sequence
atggccgaagcatcttcagctaatctgggctcgggttgcgaggaaaagcgtcatgaaggaagcagctccgagtcggtgccacccggcaccactatatcccgtgttaaattgttggacaccatggtggatacttttctgcagaagctggtcgctgctggctcctaccagcgatttacagactgctacaagtgtttctatcagctccagccagcaatgacccagcagatctacgataagtttattgcccaactgcagacaagtattagagaggaaatcagtgatattaaggaggaagggaatctggaagctgtcctgaatgccctcgacaagattgtggaagagggtaaagtgcgaaaagagcccgcctggtgtgaggcacagagatgcagagtgcagcagcggtgttccctgtgcgtacaagcgggaggccaacggggctctgaggaaacacaggcactgcctgtgtctatggcaggtagtcctagccccctgcccggctcccctggcgctcaagaagggggtgtctag

SEQ ID NO: 77914 - DNA, 528 bp, Artificial Sequence
  derived and/or modified sequence
atggccgaggccagcagcgccaacctgggcagcggctgtgaggagaagagacatgagggcagcagcagcgagagcgtgcccccaggcaccaccatcagccgggtgaagctgctggacaccatggtggacaccttcctgcagaagctggtggccgccggcagctaccagcgcttcacagactgctacaagtgcttctaccagctgcagcctgccatgacccagcagatctatgacaagttcatcgcccagctgcagaccagcatccgggaggagatcagtgacatcaaggaggagggcaacctggaggccgtgctgaatgccctggacaagatcgtggaggagggcaaggtgaggaaggagcccgcctggtgtgaggcccagcgctgccgggtgcagcagcgctgcagcctgtgtgtgcaggccggcggccagaggggcagcgaggagacccaggccctgcctgtgtccatggccggcagccccagccccctgcccggcagccctggggcccaggagggcggcgtgtag

SEQ ID NO: 77915 - DNA, 528 bp, Artificial Sequence
  derived and/or modified sequence
atggccgaggccagcagcgccaacctgggcagcggctgcgaggagaagaggcatgaaggttcaagcagcgaatcggtacccccaggcaccactattagtcgggtgaaattactggacaccatggtcgatacgtttcttcaaaagctcgtggcagcaggctcctaccaacgtttcacagattgctataaatgtttttaccagttacagcctgctatgacccaacaaatttacgataaatttatcgctcaactgcaaacatccatccgcgaagagatttctgacattaaagaagagggaaacctcgaggcggtgctgaacgcactcgacaaaatagtggaggaaggcaaagtgcggaaggagccagcctggtgtgaggctcagcgctgtagggtacaacagagatgttccctgtgtgtgcaagcagggggccaaaggggcagcgaggaaacccaggcacttcctgtgagtatggcaggatctccttcccccctgccgggctccccaggagcacaagaggggggcgtatag

SEQ ID NO: 77916 - DNA, 773 bp, Artificial Sequence
  derived and/or modified sequence
cttcaacatggccgaagcaagtagcgccaatctaggcagcggctgtgaggaaaaaaggcatgaggggtcgtcttcggaatctgtgccacccggcactaccatttcgagggtgaagctcctcgacaccatggtggacacttttcttcagaagctggtcgccgccggcagctaccagagattcactgactgctataagtgcttctaccagttgcagcctgcgatgacacagcaaatctatgacaagtttatagctcagttgcagacatctatccgggaggaaatctctgacatcaaagaggaggggaacctagaagctgtcttgaatgccttggataaaattgtggaagaaggcaaagtccgcaaagagccagcctggtgcgaagcccagcggtgcagagtccagcaaaggtgcagcctttgtgtccaagcaggagggcagcgaggtagtgaagagacccaggcgctacctgtatcaatggctgggagccccagtcccctacccggatcccctggagcccaggagggaggtgtgtgagctcaatccggactgtgacgagttggctgaccacatcggctttcaggaggcctatcggcgcttctacggcccggtctagggtgtcgctctgctggcctggccggcaaccccagttctgctcctctccaggcacccttctttcctcttccccttgcccttgccctgacctcccagccctatggatgtggggtccccatcatcccagctgctcccaaataaactccagaagaggaatctg

SEQ ID NO: 77917 - DNA, 528 bp, Artificial Sequence
  derived and/or modified sequence
atggccgaagcctcatccgctaatctgggttctggatgcgaagaaaaaaggcatgagggctcctcaagtgaatcagtgccacccggtactaccattagccgggtcaaactgctggataccatggtggacactttcctgcaaaaactcgtggccgcaggttcttaccagcggtttacagattgctataagtgtttttaccagctgcagccagccatgacgcaacagatctatgataaattcattgcccaactgcagacttccattcgtgaagagatcagcgacatcaaggaggagggtaacctagaggccgtgcttaatgctcttgacaagatcgttgaggagggaaaagtgcgcaaggaaccagcctggtgcgaagcccaacggtgccgcgtgcagcaacgctgtagcctgtgtgttcaggccggaggccagcggggatcagaagaaacacaggcactgccagtatcaatggctggctcgccttcccctctgcccggatcccccggagctcaggagggcggagtgtag

SEQ ID NO: 77918 - protein, 315 aa, Artificial Sequence
  derived and/or modified sequence
MDLRQFLMCLSLCTAFALSKPTEKKDRVHHEPQLSDKVHNDAQSFDYDHDAFLGAEEAKTFDQLTPEESKERLGKIVSKIDGDKDGFVTVDELKDWIKFAQKRWIYEDVERQWKGHDLNEDGLVSWEEYKNATYGYVLDDPDPDDGFNYKQMMVRDERRFKMADKDGDLIATKEEFTAFLHPEEYDYMKDIVVQETMEDIDKNADGFIDLEEYIGDMYSHDGNTDEPEWVKTEREQFVEFRDKNRDGKMDKEETKDWILPSDYDHAEAEARHLVYESDQNKDGKLTKEEIVDKYDLFVGSQATDFGEALVRHDEF

SEQ ID NO: 77919 - protein, 154 aa, Artificial Sequence
  derived and/or modified sequence
MDLRQFLMCLSLCTAFALSKPTEKKDRVHHEPQLSDKVHNDAQSFDYDHDAFLGAEEAKTFDQLTPEESKERLGKIVSKIDGDKDGFVTVDELKDWILPSDYDHAEAEARHLVYESDQNKDGKLTKEEIVDKYDLFVGSQATDFGEALVRHDEF

SEQ ID NO: 77920 - protein, 323 aa, Artificial Sequence
  derived and/or modified sequence
MKETDLIIMDLRQFLMCLSLCTAFALSKPTEKKDRVHHEPQLSDKVHNDAQSFDYDHDAFLGAEEAKTFDQLTPEESKERLGKIVSKIDGDKDGFVTVDELKDWIKFAQKRWIYEDVERQWKGHDLNEDGLVSWEEYKNATYGYVLDDPDPDDGFNYKQMMVRDERRFKMADKDGDLIATKEEFTAFLHPEEYDYMKDIVVQETMEDIDKNADGFIDLEEYIGDMYSHDGNTDEPEWVKTEREQFVEFRDKNRDGKMDKEETKDWILPSDYDHAEAEARHLVYESDQNKDGKLTKEEIVDKYDLFVGSQATDFGEALVRHDEF

SEQ ID NO: 77921 - protein, 147 aa, Artificial Sequence
  derived and/or modified sequence
MKETDLIIMDLRQFLMCLSLCTAFALSKPTEKKDRVHHEPQLSDKVHNDAQSFDYDHDAFLGAEEAKTFDQLTPEESKERLGKIVSKIDGDKDGFVTVDELKDWIKFAQKRWIYEDVERQWKGHDLNEDGLVSWEEYKNATYGYVLE

SEQ ID NO: 77922 - protein, 265 aa, Artificial Sequence
  derived and/or modified sequence
MDLRQFLMCLSLCTAFALSKPTEKKDRVHHEPQLSDKVHNDAQSFDYDHDAFLGAEEAKTFDQLTPEESKERLGKIVSKIDGDKDGFVTVDELKDWIKFAQKRWIYEDVERQWKGHDLNEDGLVSWEEYKNATYGYVLDDPDPDDGFNYKQMMVRDERRFKMADKDGDLIATKEEFTAFLHPEEYDYMKDIVVQETMEDIDKNADGFIDLEEYIGDMYSHDGNTDESDQNKDGKLTKEEIVDKYDLFVGSQATDFGEALVRHDEF

SEQ ID NO: 77923 - DNA, 972 bp, Artificial Sequence
  derived and/or modified sequence
atgaaagagaccgacctgatcataatggacctgcgtcagttcttgatgtgtctttcattgtgcacggcgttcgctctatctaaacctacagagaagaaagatagggtgcaccatgaaccccagctgagcgacaaagtgcacaacgacgctcagtctttcgattacgaccacgatgcgtttctgggggctgaggaagcaaagacatttgatcagctgacacccgaagagagcaaggaaaggttgggaaaaatcgttagtaagatcgacggcgacaaggatggattcgttacagtggacgagctcaaagattggatcaagttcgcccagaagagatggatctatgaggatgtggaaaggcagtggaagggccacgacttgaatgaagatggcctcgtgagctgggaagaatacaagaacgctacatacggctatgtgctggacgatcctgacccagatgacggcttcaattacaagcagatgatggtgagggacgagcgacgtttcaagatggctgataaggacggagacctgatagccaccaaggaagaattcacagcttttctgcatccagaagagtatgattatatgaaagacattgtggtccaggagacaatggaggacattgacaaaaatgccgacgggttcattgatctcgaagaatacataggtgacatgtatagtcacgatgggaataccgacgagccagagtgggtaaagaccgagagggagcagttcgtcgaatttagggataagaatagggacggcaagatggacaaggaggagactaaagattggattctcccatctgactacgatcacgctgaagccgaggctagacacctagtgtacgaatccgaccaaaataaggacggaaagctgactaaggaagagatagtggacaaatacgacctgttcgtgggctctcaagccacagatttcggcgaagctcttgtgcgtcatgatgagttctag

SEQ ID NO: 77924 - DNA, 444 bp, Artificial Sequence
  derived and/or modified sequence
atgaaagagacagatctcattattatggacctccgtcaatttcttatgtgcctgtccttatgcacagccttcgcactatccaagccaactgagaaaaaagatcgggttcatcatgaaccacagctgtccgacaaggtccataacgacgctcagagctttgactacgatcacgatgcatttctgggtgccgaggaagcaaaaaccttcgatcagctgacccctgaagaatccaaggaacgcctgggcaaaatagtctcgaaaatcgacggcgacaaagacggatttgtgaccgtggatgagctgaaagattggattaaattcgctcagaaacggtggatatacgaggacgtggaaaggcagtggaagggacatgacctcaacgaggatgggctggttagctgggaggagtataagaacgcaacctacggttatgtccttgaatag

SEQ ID NO: 77925 - DNA, 972 bp, Artificial Sequence
  derived and/or modified sequence
atgaaggagacagacctgatcatcatggacctgcggcagttcctgatgtgcctgagcctgtgcacagcctttgccctgagcaagcccacagagaagaaggacagagtgcaccacgagccccagctgagtgacaaggtgcacaatgatgcccagagctttgattatgaccatgatgccttcctgggcgctgaggaggccaagacctttgaccagctgaccccagaggagagcaaggagcggctgggcaagatcgtgtccaagattgatggagacaaggatggctttgtgacagtggatgagctgaaggactggatcaagtttgcccagaagcgctggatctatgaagatgtggagcggcagtggaagggccatgacctgaatgaagatggcctggtgtcctgggaggagtacaagaatgccacctacggctacgtgctggatgatcctgaccctgatgatggcttcaactacaagcagatgatggtgagagatgagcggcgcttcaagatggctgacaaggatggagacctgattgccaccaaggaggagttcaccgccttcctgcaccctgaggagtatgactacatgaaggacatcgtggtgcaggagaccatggaggacatcgacaagaatgctgatggcttcatcgacctggaggagtacatcggggacatgtacagccatgatggcaacacagatgagcctgagtgggtgaagacagagcgggagcagtttgtggagttccgggacaagaacagagatggcaagatggacaaggaggagaccaaggactggatcctgcccagcgactatgaccacgccgaggccgaggcccggcacctggtgtatgaaagtgaccagaacaaggatggcaagctgaccaaggaggagatcgtggacaagtatgacctgtttgtgggcagccaggccacagactttggagaggccctggtgagacatgatgagttctag

SEQ ID NO: 77926 - DNA, 444 bp, Artificial Sequence
  derived and/or modified sequence
atgaaggagacagacctgatcatcatggacctgcggcagttcctgatgtgcctgagcctgtgcacagcctttgccctgagcaagcccacagagaagaaggacagagtgcaccacgagccccagctgagtgacaaggtgcacaatgatgcccagagctttgattatgaccatgatgccttcctgggcgctgaggaggccaagacctttgaccagctgaccccagaggagagcaaggagcggctgggcaagatcgtgtccaagattgatggagacaaggatggctttgtgacagtggatgagctgaaggactggatcaagtttgcccagaagcgctggatctatgaagatgtggagcggcagtggaagggccatgacctgaatgaagatggcctggtgtcctgggaggagtacaagaatgccacctacggctacgtgctggagtag

SEQ ID NO: 77927 - DNA, 972 bp, Artificial Sequence
  derived and/or modified sequence
atgaaggagaccgacctgatcatcatggacctgcggcagttcctgatgtgtctttcattgtgcacagcttttgcattgtctaaacctacggaaaagaaggaccgggtgcaccacgagccccagctctcggataaagtgcacaatgatgcgcaaagtttcgattatgatcatgacgcctttctgggggccgaggaagccaagactttcgatcaactgacccccgaagaaagcaaggagagactcgggaaaatagtcagcaagatagacggtgacaaggacggcttcgtcaccgtggacgaactgaaggactggataaagttcgcccagaagagatggatttacgaagacgttgagcgacagtggaaaggtcatgatctaaatgaggacggactggtgagctgggaggagtacaagaacgccacgtacggttacgtcttggacgaccccgatccagacgatgggttcaattacaagcagatgatggttcgggatgaacggaggtttaaaatggccgataaagacggggacttaatcgctacgaaagaagagttcacagcctttctccaccccgaggaatatgactatatgaaagatatagtggttcaggagacaatggaagacatcgataaaaacgccgacggcttcattgacctagaagagtacataggggatatgtatagccatgatggcaatacagatgagccagagtgggtcaaaaccgagcgagagcagttcgttgagttccgggataaaaaccgcgacggcaagatggataaagaagagaccaaggactggattctgcctagcgattatgatcatgccgaggcagaagctcggcacctggtatacgagtcagatcagaacaaggacggcaaactgacaaaggaggagattgtggacaagtacgatttgttcgtgggaagccaggcaaccgatttcggagaggccctcgtgcgccacgatgagttttag

SEQ ID NO: 77928 - DNA, 444 bp, Artificial Sequence
  derived and/or modified sequence
atgaaggagaccgacctgatcatcatggacctgcggcagttcctgatgtgtctgtcactttgtacagcctttgctcttagcaagccaacagagaaaaaagatcgagtgcaccatgaacctcaactgagcgacaaagtgcataatgacgctcagagctttgactacgatcatgatgccttcttgggcgctgaagaggccaaaaccttcgatcaattaacccccgaggaatccaaggagcgtctcggtaagatcgtaagcaagatcgacggggataaggacggtttcgtgacggtcgatgagctgaaagactggattaaatttgcacagaaaagatggatatacgaggatgtcgagcgccagtggaagggccatgatctgaatgaagacggcctcgtgtcctgggaggagtacaagaatgctacctacgggtatgtgcttgaatag

SEQ ID NO: 77929 - DNA, 972 bp, Artificial Sequence
  derived and/or modified sequence
atgaaggaaactgatctgattataatggatttgcggcaatttttgatgtgcttgtcactgtgtaccgcctttgctctgagcaaaccaacagagaagaaggatagggttcaccatgagcctcagctctccgataaggtccataacgacgcccagagcttcgattatgaccacgatgcctttctgggtgcagaggaggctaagaccttcgatcagttgacacctgaggagtcaaaggagcggttaggaaaaattgtttccaagatcgacggcgacaaggatggattcgtaactgtggatgagctgaaggactggattaagtttgcgcagaaacgctggatctatgaagatgtcgaacgacagtggaaggggcacgatctgaatgaggatggactggtgagttgggaggagtacaaaaacgctacatacggatatgtcttagacgacccagatccagatgacggtttcaactacaaacagatgatggttcgggacgagcgtcgtttcaagatggccgacaaggatggtgaccttatcgcaacgaaagaagaatttaccgcgtttcttcaccctgaagaatatgactacatgaaggacatcgtggtgcaggagacaatggaggatatagacaaaaatgccgatggttttatcgatctggaagagtatataggggatatgtacagtcacgacgggaatactgatgagcctgagtgggtgaaaacagagcgcgagcagtttgttgagttcagagataagaatagggatggtaagatggacaaggaagagacaaaggattggattttgcccagcgattatgaccacgcagaggccgaggccaggcacttggtgtatgagagtgaccagaacaaagatgggaagctcactaaggaggagatcgtagacaaatatgacctttttgtgggctctcaggcgactgactttggcgaggctctcgtacggcatgacgaattttag

SEQ ID NO: 77930 - DNA, 444 bp, Artificial Sequence
  derived and/or modified sequence
atgaaagagaccgatctcattatcatggatctcagacaatttttgatgtgtctatctctgtgtaccgcgtttgccttgtccaagcccaccgaaaagaaagaccgcgtccaccacgagcctcagttgagcgacaaagtccataacgatgcacagtctttcgactatgaccacgacgcctttctgggagctgaggaggcaaagacctttgaccagttaaccccagaggagagtaaggagaggctggggaagattgtatcgaagatcgacggggataaggacggctttgttaccgtggatgagctgaaagattggattaagttcgcccaaaaacgatggatctatgaagatgtggagaggcagtggaaagggcacgacctgaatgaagacggattggtttcatgggaagagtataagaatgccacatatggatatgtgctcgagtag

SEQ ID NO: 77931 - DNA, 972 bp, Artificial Sequence
  derived and/or modified sequence
atgaaggagacagatctaattataatggacctgaggcaatttctgatgtgcttatctctatgcactgctttcgctttgtcaaaaccaactgaaaagaaagaccgagtccatcacgagccccagctctcagacaaagtgcataacgatgcccagtccttcgactatgaccatgacgcctttctgggcgccgaggaggccaaaacattcgaccaacttacccccgaggaaagtaaagaacgcttaggaaaaatcgtatccaaaatcgatggagataaagatggcttcgtcacagttgatgaactcaaggactggatcaaatttgcacagaaaagatggatttacgaggacgtggagaggcagtggaaaggtcacgacctgaacgaggacggccttgtctcatgggaggaatacaagaatgctacctatggatacgtgttggatgacccagacccagacgatggctttaattacaaacagatgatggtgcgcgacgaaaggaggtttaaaatggctgataaagatggcgacctgatagccaccaaggaggagtttactgccttcctccatcccgaagagtacgactacatgaaggatatcgtcgttcaagagactatggaagacatcgacaagaacgccgacggatttatcgacctggaggagtatatcggagatatgtattcacatgatggcaacacagacgaacccgagtgggtgaaaactgagcgagaacagtttgtagaattcagagacaagaaccgtgatggaaaaatggacaaagaagaaactaaagactggatactgccctctgattatgaccacgctgaggctgaggctaggcacttagtgtacgagtccgaccaaaataaagacggcaagttaaccaaagaagaaatcgtggacaagtacgatctgttcgtaggatctcaggctaccgactttggagaagcactggtgcgacacgacgagttctag

SEQ ID NO: 77932 - DNA, 444 bp, Artificial Sequence
  derived and/or modified sequence
atgaaagaaacagatctgattattatggacctacgtcagttcctgatgtgtctatccctatgtacggcattcgctctctctaaacctaccgaaaaaaaagacagagtgcaccatgagccccagctctctgacaaggttcataacgacgcacaatctttcgactacgaccatgatgcctttctgggggccgaagaggcaaagacatttgatcaactgacacctgaagaaagtaaggagaggctgggtaagattgtgagtaaaattgatggcgacaaagacggctttgtcactgtggatgaattaaaagactggatcaaattcgcacaaaagagatggatttatgaggatgtggagagacaatggaaagggcatgatctgaatgaagatggtctggtgtcatgggaagaatataagaatgcgacctatggctacgtactggaatag

SEQ ID NO: 77933 - DNA, 972 bp, Artificial Sequence
  derived and/or modified sequence
atgaaggagacagatctaattataatggacctgaggcaatttctgatgtgcttatctctatgcactgctttcgctttgtcaaaaccaactgaaaagaaagaccgagtccatcacgagccccagctctcagacaaagtgcataacgatgcccagtccttcgactatgaccatgacgcctttctgggcgccgaggaggccaaaacattcgaccaacttacccccgaggaaagtaaagaacgcttaggaaaaatcgtatccaaaatcgatggagataaagatggcttcgtcacagttgatgaactgaaagactggatcaaattcgcacagaagcgctggatttacgaggacgtcgaaaggcaatggaaaggacacgatttaaatgaggatggattggttagttgggaagaatataaaaacgcaacctatggatacgtgctggacgaccccgatccagacgacggctttaactataaacagatgatggtgagagatgaaaggcggtttaagatggccgataaggatggagatctcatcgctactaaagaggaatttacagctttcctgcatcctgaggaatacgactacatgaaggatattgtggttcaagagactatggaagacatcgacaagaacgccgacggatttatcgacctggaggagtatatcggagatatgtattcacatgatggcaacacagacgaacccgagtgggtgaaaactgagcgagaacagtttgtagaattcagagacaagaaccgtgatggaaaaatggacaaagaagaaactaaagactggatactgccctctgattatgaccacgctgaggctgaggctaggcacttagtgtacgagtccgaccaaaataaagacggcaagttaaccaaagaagaaatcgtggacaagtacgacctctttgttggctcacaagctactgatttcggcgaagccttagttcgacatgatgagttttag

SEQ ID NO: 77934 - DNA, 444 bp, Artificial Sequence
  derived and/or modified sequence
atgaaagaaaccgacctgataataatggacttgagacaatttcttatgtgcctctcgctgtgcacagcgtttgctctgagcaaacctactgaaaaaaaagatagggtgcaccacgaaccccaactctcagataaagtacacaatgatgcccagtctttcgattacgaccatgacgctttccttggagcagaagaagccaagacattcgaccaactgacccccgaagaaagcaaagagcggcttggcaagatagtgtcgaagatcgacggagacaaggatggctttgtaacagtcgacgaactcaaggactggattaaattcgcgcaaaaacggtggatctatgaagatgtggaacgtcaatggaaagggcacgatctaaatgaggatggcctggtgagctgggaggaatataagaatgccacatacggatatgtactggaatag

SEQ ID NO: 77935 - DNA, 3357 bp, Artificial Sequence
  derived and/or modified sequence
gcttccggttgggcggtgcttgcgcgcgtgagctgagccggtgggtgagcggcggccacggcatcctgtgctgtgggggctacgaggaaagatctaattatcatggacctgcgacagtttcttatgtgcctgtccctgtgcacagcctttgccttgagcaaacccacagaaaagaaggaccgtgtacatcatgagcctcagctcagtgacaaggttcacaatgatgctcagagttttgattatgaccatgatgccttcttgggtgctgaagaagcaaagacctttgatcagctgacaccagaagagagcaaggaaaggcttggaaagattgtaagtaaaatagatggcgacaaggacgggtttgtcactgtggatgagctcaaagactggattaaatttgcacaaaagcgctggatttacgaggatgtagagcgacagtggaaggggcatgacctcaatgaggacggcctcgtttcctgggaggagtataaaaatgccacctacggctacgttttagatgatccagatcctgatgatggatttaactataaacagatgatggttagagatgagcggaggtttaaaatggcagacaaggatggagacctcattgccaccaaggaggagttcacagctttcctgcaccctgaggagtatgactacatgaaagatatagtagtacaggaaacaatggaagatatagataagaatgctgatggtttcattgatctagaagagtatattggtgacatgtacagccatgatgggaatactgatgagccagaatgggtaaagacagagcgagagcagtttgttgagtttcgggataagaaccgtgatgggaagatggacaaggaagagaccaaagactggatccttccctcagactatgatcatgcagaggcagaagccaggcacctggtctatgaatcagaccaaaacaaggatggcaagcttaccaaggaggagatcgttgacaagtatgacttatttgttggcagccaggccacagattttggggaggccttagtacggcatgatgagttctgagctacggaggaaccctcatttcctcaaaagtaatttatttttacagcttctggtttcacatgaaattgtttgcgctactgagactgttactacaaactttttaagacatgaaaaggcgtaatgaaaaccatcccgtccccattcctcctcctctctgagggactggagggaagccgtgcttctgaggaacaactctaattagtacacttgtgtttgtagatttacactttgtattatgtattaacatggcgtgtttatttttgtatttttctctggttgggagtatgatatgaaggatcaagatcctcaactcacacatgtagacaaacattagctctttactctttctcaaccccttttatgattttaataattctcacttaactaattttgtaagcctgagatcaataagaaatgttcaggagagaggaaagaaaaaaaatatatgctccacaatttatatttagagagagaacacttagtcttgcctgtcaaaaagtccaacatttcataggtagtaggggccacatattacattcagttgctataggtccagcaactgaacctgccattacctgggcaaggaaagatccctttgctctaggaaagcttggcccaaattgattttcttctttttccccctgtaggactgactgttggctaattttgtcaagcacagctgtggtgggaagagttagggccagtgtcttgaaaatcaatcaagtagtgaatgtgatctctttgcagagctatagatagaaacagctggaaaactaaaggaaaaatacaagtgttttcggggcatacattttttttctgggtgtgcatctgttgaaatgctcaagacttaattatttgccttttgaaatcactgtaaatgcccccatccggttcctcttcttcccaggtgtgccaaggaattaatcttggtttcactacaattaaaattcactcctttccaatcatgtcattgaaagtgcctttaacgaaagaaatggtcactgaatgggaattctcttaagaaaccctgagattaaaaaaagactatttggataacttataggaaagcctagaacctcccagtagagtggggatttttttcttcttccctttctcttttggacaatagttaaattagcagtattagttatgagtttggttgcagtgttcttatcttgtgggctgatttccaaaaaccacatgctgctgaatttaccagggatcctcatacctcacaatgcaaaccacttactaccaggcctttttctgtgtccactggagagcttgagctcacactcaaagatcagaggacctacagagagggctctttggtttgaggaccatggcttacctttcctgcctttgacccatcacaccccatttcctcctctttccctctccccgctgccaaaaaaaaaaaaaaaggaaacgtttatcatgaatcaacagggtttcagtccttatcaaagagagatgtggaaagagctaaagaaaccaccctttgttcccaactccactttacccatattttatgcaacacaaacactgtccttttgggtccctttcttacagatggacctcttgagaagaattatcgtattccacgtttttagccctcaggttaccaagataaatatatgtatatataacctttattattgctatatctttgtggataatacattcaggtggtgctgggtgatttattataatctgaacctaggtatatcctttggtcttccacagtcatgttgaggtgggctccctggtatggtaaaaagccaggtataatgtaacttcaccccagcctttgtactaagctcttgatagtggatatactcttttaagtttagccccaatatagggtaatggaaatttcctgccctctgggttccccatttttactattaagaagaccagtgataatttaataatgccaccaactctggcttagttaagtgagagtgtgaactgtgtggcaagagagcctcacacctcactaggtgcagagagcccaggccttatgttaaaatcatgcacttgaaaagcaaaccttaatctgcaaagacagcagcaagcattatacggtcatcttgaatgatccctttgaaattttttttttgtttgtttgtttaaatcaagcctgaggctggtgaacagtagctacacacccatattgtgtgttctgtgaatgctagctctcttgaatttggatattggttattttttatagagtgtaaaccaagttttatattctgcaatgcgaacaggtacctatctgtttctaaataaaactgtttacattca

SEQ ID NO: 77936 - DNA, 1955 bp, Artificial Sequence
  derived and/or modified sequence
gcgcgcgtgagctgagccggtgggtgagcggcggccacggcatcctgtgctgtgggggctacgaggaaagatctaattatcatggacctgcgacagtttcttatgtgcctgtccctgtgcacagcctttgccttgagcaaacccacagaaaagaaggaccgtgtacatcatgagcctcagctcagtgacaaggttcacaatgatgctcagagttttgattatgaccatgatgccttcttgggtgctgaagaagcaaagacctttgatcagctgacaccagaagagagcaaggaaaggcttggaaagattgtaagtaaaatagatggcgacaaggacgggtttgtcactgtggatgagctcaaagactggatccttccctcagactatgatcatgcagaggcagaagccaggcacctggtctatgaatcagaccaaaacaaggatggcaagcttaccaaggaggagatcgttgacaagtatgacttatttgttggcagccaggccacagattttggggaggccttagtacggcatgatgagttctgagctacggaggaaccctcatttcctcaaaagtaatttatttttacagcttctggtttcacatgaaattgtttgcgctactgagactgttactacaaactttttaagacatgaaaaggcgtaatgaaaaccatcccgtccccattcctcctcctctctgagggactggagggaagccgtgcttctgaggaacaactctaattagtacacttgtgtttgtagatttacactttgtattatgtattaacatggcgtgtttatttttgtatttttctctggttgggagtatgatatgaaggatcaagatcctcaactcacacatgtagacaaacattagctctttactctttctcaaccccttttatgattttaataattctcacttaactaattttgtaagcctgagatcaataagaaatgttcaggagagaggaaagaaaaaaaatatatgctccacaatttatatttagagagagaacacttagtcttgcctgtcaaaaagtccaacatttcataggtagtaggggccacatattacattcagttgctataggtccagcaactgaacctgccattacctgggcaaggaaagatccctttgctctaggaaagcttggcccaaattgattttcttctttttccccctgtaggactgactgttggctaattttgtcaagcacagctgtggtgggaagagttagggccagtgtcttgaaaatcaatcaagtagtgaatgtgatctctttgcagagctatagatagaaacagctggaaaactaaaggaaaaatacaagtgttttcggggcatacattttttttctgggtgtgcatctgttgaaatgctcaagacttaattatttgccttttgaaatcactgtaaatgcccccatccggttcctcttcttcccaggtgtgccaaggaattaatcttggtttcactacaattaaaattcactcctttccaatcatgtcattgaaagtgcctttaacgaaagaaatggtcactgaatgggaattctcttaagaaaccctgagattaaaaaaagactatttggataacttataggaaagcctagaacctcccagtagagtggggatttttttcttcttccctttctcttttggacaatagttaaattagcagtattagttatgagtttggttgcagtgttcttatcttgtgggctgatttccaaaaaccacatgctgctgaatttaccagggatcctcatacctcacaatgcaaaccacttactaccaggcctttttctgtgtccactggagagcttgagctcacactcaaagatcagaggacctacagagagggctctttggtttgaggaccatggcttacctttcctgcctttgacccatcacaccccatttcctcctctttccctctccccgctgcc

SEQ ID NO: 77937 - DNA, 2572 bp, Artificial Sequence
  derived and/or modified sequence
atcctgtgctgtgggggctacgaggaaaggacctcccaccctcccccactgagctgccttcccagtgatgaaagaaaaaatgtaaaagcctgaaaacccttcttcttgatttttaatttttttttttccctctaagaccttaaccactctggatagtatcacggggtatcagtagagtgtgctaaacagatgtgtactctgcagcttctttgcaggttttttgtcacatttttcagtcaagtgttccagctttgtgcttgttcattagagtcacctgtgactacagagattctgaaagtttgaatcagggcctgggaatctgtactttgaacagtactacaggtggtatttatgcctaggcaagtatgggaaacaactgtgcagaaggataaagacgttcttatctatgactagaccatctgaatgatttggcctttgaaggtgactcaaggttgagcctggatgttggagacttggtgctatagaccaaggaagctgccaagtatttcgctggttcctaatctcatgaacatcagaatcacctgaaaaacatttaaagctacgaatgtctgaattcagcttcagagactctaaatcaataggagaaacttaaagcttcctagatgattctaataaccagccatgtttgaagaccagaccaccaatgcgtacaagaagtaaaggatttggagtcaacatttaaaccttggttctttcacttttaattcttatgaacttgggcaaaaggattaaaattctactttggtatcttttgaaagaaaacagaaagtggacattttaactataagtttcttatcagcctacaatcagatgaaggaaactgatctaattatcatggacctgcgacagtttcttatgtgcctgtccctgtgcacagcctttgccttgagcaaacccacagaaaagaaggaccgtgtacatcatgagcctcagctcagtgacaaggttcacaatgatgctcagagttttgattatgaccatgatgccttcttgggtgctgaagaagcaaagacctttgatcagctgacaccagaagagagcaaggaaaggcttggaaagattgtaagtaaaatagatggcgacaaggacgggtttgtcactgtggatgagctcaaagactggattaaatttgcacaaaagcgctggatttacgaggatgtagagcgacagtggaaggggcatgacctcaatgaggacggcctcgtttcctgggaggagtataaaaatgccacctacggctacgttttagatgatccagatcctgatgatggatttaactataaacagatgatggttagagatgagcggaggtttaaaatggcagacaaggatggagacctcattgccaccaaggaggagttcacagctttcctgcaccctgaggagtatgactacatgaaagatatagtagtacaggaaacaatggaagatatagataagaatgctgatggtttcattgatctagaagagtatattggtgacatgtacagccatgatgggaatactgatgagccagaatgggtaaagacagagcgagagcagtttgttgagtttcgggataagaaccgtgatgggaagatggacaaggaagagaccaaagactggatccttccctcagactatgatcatgcagaggcagaagccaggcacctggtctatgaatcagaccaaaacaaggatggcaagcttaccaaggaggagatcgttgacaagtatgacttatttgttggcagccaggccacagattttggggaggccttagtacggcatgatgagttctgagctacggaggaaccctcatttcctcaaaagtaatttatttttacagcttctggtttcacatgaaattgtttgcgctactgagactgttactacaaactttttaagacatgaaaaggcgtaatgaaaaccatcccgtccccattcctcctcctctctgagggactggagggaagccgtgcttctgaggaacaactctaattagtacacttgtgtttgtagatttacactttgtattatgtattaacatggcgtgtttatttttgtatttttctctggttgggagtatgatatgaaggatcaagatcctcaactcacacatgtagacaaacattagctctttactctttctcaaccccttttatgattttaataattctcacttaactaattttgtaagcctgagatcaataagaaatgttcaggagagaggaaagaaaaaaaatatatgctccacaatttatatttagagagagaacacttagtcttgcctgtcaaaaagtccaacatttcataggtagtaggggccacatattacattcagttgctataggtccagcaactgaacctgccattacctgggcaaggaaagatccctttgctctaggaaagcttggcccaaattgattttcttctttttccccctgtaggactgactgttggctaattttgtcaagcacagctgtggtgggaagagttagggccagtgtcttgaaaatcaatcaagtagtgaatgtgatctctttgcagagctatagatagaaacagctgg

SEQ ID NO: 77938 - DNA, 3259 bp, Artificial Sequence
  derived and/or modified sequence
gattggtcgggaggccgccggcgaggcggatgagggcggggtgcggacccgcttccggttgggcggtgcttgcgcgcgtgagctgagccggtgggtgagcggcggccacggcatcctgtgctgtgggggctacgaggaaagatctaattatcatggacctgcgacagtttcttatgtgcctgtccctgtgcacagcctttgccttgagcaaacccacagaaaagaaggaccgtgtacatcatgagcctcagctcagtgacaaggttcacaatgatgctcagagttttgattatgaccatgatgccttcttgggtgctgaagaagcaaagacctttgatcagctgacaccagaagagagcaaggaaaggcttggaaagattgtaagtaaaatagatggcgacaaggacgggtttgtcactgtggatgagctcaaagactggattaaatttgcacaaaagcgctggatttacgaggatgtagagcgacagtggaaggggcatgacctcaatgaggacggcctcgtttcctgggaggagtataaaaatgccacctacggctacgttttagatgatccagatcctgatgatggatttaactataaacagatgatggttagagatgagcggaggtttaaaatggcagacaaggatggagacctcattgccaccaaggaggagttcacagctttcctgcaccctgaggagtatgactacatgaaagatatagtagtacaggaaacaatggaagatatagataagaatgctgatggtttcattgatctagaagagtatattggtgacatgtacagccatgatgggaatactgatgaatcagaccaaaacaaggatggcaagcttaccaaggaggagatcgttgacaagtatgacttatttgttggcagccaggccacagattttggggaggccttagtacggcatgatgagttctgagctacggaggaaccctcatttcctcaaaagtaatttatttttacagcttctggtttcacatgaaattgtttgcgctactgagactgttactacaaactttttaagacatgaaaaggcgtaatgaaaaccatcccgtccccattcctcctcctctctgagggactggagggaagccgtgcttctgaggaacaactctaattagtacacttgtgtttgtagatttacactttgtattatgtattaacatggcgtgtttatttttgtatttttctctggttgggagtatgatatgaaggatcaagatcctcaactcacacatgtagacaaacattagctctttactctttctcaaccccttttatgattttaataattctcacttaactaattttgtaagcctgagatcaataagaaatgttcaggagagaggaaagaaaaaaaatatatgctccacaatttatatttagagagagaacacttagtcttgcctgtcaaaaagtccaacatttcataggtagtaggggccacatattacattcagttgctataggtccagcaactgaacctgccattacctgggcaaggaaagatccctttgctctaggaaagcttggcccaaattgattttcttctttttccccctgtaggactgactgttggctaattttgtcaagcacagctgtggtgggaagagttagggccagtgtcttgaaaatcaatcaagtagtgaatgtgatctctttgcagagctatagatagaaacagctggaaaactaaaggaaaaatacaagtgttttcggggcatacattttttttctgggtgtgcatctgttgaaatgctcaagacttaattatttgccttttgaaatcactgtaaatgcccccatccggttcctcttcttcccaggtgtgccaaggaattaatcttggtttcactacaattaaaattcactcctttccaatcatgtcattgaaagtgcctttaacgaaagaaatggtcactgaatgggaattctcttaagaaaccctgagattaaaaaaagactatttggataacttataggaaagcctagaacctcccagtagagtggggatttttttcttcttccctttctcttttggacaatagttaaattagcagtattagttatgagtttggttgcagtgttcttatcttgtgggctgatttccaaaaaccacatgctgctgaatttaccagggatcctcatacctcacaatgcaaaccacttactaccaggcctttttctgtgtccactggagagcttgagctcacactcaaagatcagaggacctacagagagggctctttggtttgaggaccatggcttacctttcctgcctttgacccatcacaccccatttcctcctctttccctctccccgctgccaaaaaaaaaaaaaaaggaaacgtttatcatgaatcaacagggtttcagtccttatcaaagagagatgtggaaagagctaaagaaaccaccctttgttcccaactccactttacccatattttatgcaacacaaacactgtccttttgggtccctttcttacagatggacctcttgagaagaattatcgtattccacgtttttagccctcaggttaccaagataaatatatgtatatataacctttattattgctatatctttgtggataatacattcaggtggtgctgggtgatttattataatctgaacctaggtatatcctttggtcttccacagtcatgttgaggtgggctccctggtatggtaaaaagccaggtataatgtaacttcaccccagcctttgtactaagctcttgatagtggatatactcttttaagtttagccccaatatagggtaatggaaatttcctgccctctgggttccccatttttactattaagaagaccagtgataatttaataatgccaccaactctggcttagttaagtgagagtgtgaactgtgtggcaagagagcctcacacctcactaggtgcagagagcccaggccttatgttaaaatcatgcacttgaaaagcaaaccttaatctgcaaagacagcagcaagcattatacggtcatcttgaatgatccctttgaaattttttttttgtttgtttgtttaaatcaagcctgaggctggtgaacagtagctacacacccatattgtgtgttctgtgaatgctagctctcttgaatttggatattggttattttttatagagtgtaaaccaagttttatattctgcaatgcgaacaggtacctatctgtttctaaataaaactgtttacattcatt

SEQ ID NO: 77939 - DNA, 972 bp, Artificial Sequence
  derived and/or modified sequence
atgaaggagaccgacctgatcatcatggacctgagacagttcctgatgtgcctgagcctgtgcaccgccttcgccctgagcaagcccaccgagaagaaggacagagtgcaccacgagccccagctgagcgacaaggtgcacaacgacgcccagagcttcgactacgaccacgacgccttcctgggcgccgaggaggccaagaccttcgaccagctgacccccgaggagagcaaggagagactgggcaagatcgtgagcaagatcgacggcgacaaggacggcttcgtgaccgtggacgagctgaaggactggatcaagttcgcccagaagagatggatctacgaggacgtggagagacagtggaagggccacgacctgaacgaggacggcctggtgagctgggaggagtacaagaacgccacctacggctacgtgctggacgaccccgaccccgacgacggcttcaactacaagcagatgatggtgagagacgagagaagattcaagatggccgacaaggacggcgacctgatcgccaccaaggaggagttcaccgccttcctgcaccccgaggagtacgactacatgaaggacatcgtggtgcaggagaccatggaggacatcgacaagaacgccgacggcttcatcgacctggaggagtacatcggcgacatgtacagccacgacggcaacaccgacgagcccgagtgggtgaagaccgagagagagcagttcgtggagttcagagacaagaacagagacggcaagatggacaaggaggagaccaaggactggatcctgcccagcgactacgaccacgccgaggccgaggccagacacctggtgtacgagagcgaccagaacaaggacggcaagctgaccaaggaggagatcgtggacaagtacgacctgttcgtgggcagccaggccaccgacttcggcgaggccctggtgagacacgacgagttctag

SEQ ID NO: 77940 - DNA, 444 bp, Artificial Sequence
  derived and/or modified sequence
atgaaggagaccgacctgatcatcatggacctgagacagttcctgatgtgcctgagcctgtgcaccgccttcgccctgagcaagcccaccgagaagaaggacagagtgcaccacgagccccagctgagcgacaaggtgcacaacgacgcccagagcttcgactacgaccacgacgccttcctgggcgccgaggaggccaagaccttcgaccagctgacccccgaggagagcaaggagagactgggcaagatcgtgagcaagatcgacggcgacaaggacggcttcgtgaccgtggacgagctgaaggactggatcaagttcgcccagaagagatggatctacgaggacgtggagagacagtggaagggccacgacctgaacgaggacggcctggtgagctgggaggagtacaagaacgccacctacggctacgtgctggagtag

SEQ ID NO: 77941 - protein, 315 aa, Artificial Sequence
  derived and/or modified sequence
MDLRQFLMCLSLCTAFALSKPTEKKDRVHHEPQLSDKVHNDAQSFDYDHDAFLGAEEAKTFDQLTPEESKERLGMIVDKIDADKDGFVTEGELKSWIKHAQKKYIYDNVENQWQEFDMNQDGLISWDEYRNVTYGTYLDDPDPDDGFNYKQMMVRDERRFKMADKDGDLIATKEEFTAFLHPEEYDYMKDIVVQETMEDIDKNADGFIDLEEYIGDMYSHDGNTDEPEWVKTEREQFVEFRDKNRDGKMDKEETKDWILPSDYDHAEAEARHLVYESDQNKDGKLTKEEIVDKYDLFVGSQATDFGEALVRHDEF

SEQ ID NO: 77942 - protein, 147 aa, Artificial Sequence
  derived and/or modified sequence
  misc_feature (1)..(1): Xaa can be any naturally occurring amino acid
XIATKEEFTAFLHPEEYDYMKDIVVQETMEDIDKNADGFIDLEEYIGDMYSHDGNTDEPEWVKTEREQFVEFRDKNRDGKMDKEETKDWILPSDYDHAEAEARHLVYESDQNKDGKLTKEEIVDKYDLFVGSQATDFGEALVRHDEF

SEQ ID NO: 77943 - protein, 170 aa, Artificial Sequence
  derived and/or modified sequence
MDLRQFLMCLSLCTAFALSKPTEKKDRVHHEPQLSDKVHNDAQSFDYDHDAFLGAEEAKTFDQLTPEESKERLGMIVDKIDADKDGFVTEGELKSWIKHAQKKYIYDNVENQWQEFDMNQDGLISWDEYRNVTYGTYLDDPDPDDGFNYKQMMVRDERRFKMADRARAVC

SEQ ID NO: 77944 - protein, 201 aa, Artificial Sequence
  derived and/or modified sequence
MDLRQFLMCLSLCTAFALSKPTEKKDRVHHEPQLSDKVHNDAQSFDYDHDAFLGAEEAKTFDQLTPEESKERLGMIVDKIDADKDGFVTEGELKSWIKHAQKKYIYDNVENQWQEFDMNQDGLISWDEYRNVTYGTYLDDPDPDDGFNYKQMMVRDERRFKMADKDGDLIATKEEIVDKYDLFVGSQATDFGEALVRHDEF

SEQ ID NO: 77945 - protein, 323 aa, Artificial Sequence
  derived and/or modified sequence
MKETDLIIMDLRQFLMCLSLCTAFALSKPTEKKDRVHHEPQLSDKVHNDAQSFDYDHDAFLGAEEAKTFDQLTPEESKERLGMIVDKIDADKDGFVTEGELKSWIKHAQKKYIYDNVENQWQEFDMNQDGLISWDEYRNVTYGTYLDDPDPDDGFNYKQMMVRDERRFKMADKDGDLIATKEEFTAFLHPEEYDYMKDIVVQETMEDIDKNADGFIDLEEYIGDMYSHDGNTDEPEWVKTEREQFVEFRDKNRDGKMDKEETKDWILPSDYDHAEAEARHLVYESDQNKDGKLTKEEIVDKYDLFVGSQATDFGEALVRHDEF

SEQ ID NO: 77946 - DNA, 972 bp, Artificial Sequence
  derived and/or modified sequence
atgaaggagacagatctaatcattatggacctgagacagtttctcatgtgcctgtcactatgcacggcctttgcattatccaaacctactgagaagaaagacagagtccaccacgagccacagctgagcgacaaggtacacaacgatgcccaaagctttgattacgatcacgacgccttcctcggagccgaggaagcaaaaacgtttgatcagttgactcctgaagaaagtaaagagcgcctgggcatgatcgtcgataaaatcgatgcagacaaggatggctttgttaccgaaggggagctcaagtcgtggatcaagcatgcacagaagaaatatatttatgataatgtggagaaccaatggcaagagttcgatatgaaccaggatggtctgatctcctgggacgagtacaggaacgtgacatacggcacctatttggacgacccagacccagatgatggctttaactataagcaaatgatggtacgagacgagaggagattcaagatggctgataaagacggcgacctcattgctactaaggaggagttcacagccttcctccaccccgaagagtatgactatatgaaagacattgtggtgcaggagacaatggaggacatcgacaagaatgcagacggctttattgatttggaggagtatatcggagacatgtattcccacgatgggaatactgacgagccggaatgggttaaaacagaacgggagcagtttgttgagttcagagataagaaccgcgacggaaagatggacaaagaggaaacaaaagactggattttaccaagcgattatgatcacgccgaagccgaagctagacacctggtatacgagtctgatcagaataaggacggcaaacttactaaggaagaaatcgtcgacaaatacgacctctttgtcggttcccaggcaacagacttcggcgaagctttggtaaggcacgacgagttttag

SEQ ID NO: 77947 - DNA, 972 bp, Artificial Sequence
  derived and/or modified sequence
atgaaggagacagacctgatcatcatggacctgcggcagttcctgatgtgcctgagcctgtgcacagcctttgccctgagcaagcccacagagaagaaggacagagtgcaccacgagccccagctgagtgacaaggtgcacaatgatgcccagagctttgattatgaccatgatgccttcctgggcgctgaggaggccaagacctttgaccagctgaccccagaggagagcaaggagcggctgggcatgattgtggacaagattgatgctgacaaggatggctttgtgacagaaggagagctgaagtcctggatcaagcacgcccagaagaagtacatctatgacaacgtggagaaccagtggcaggagtttgacatgaaccaggacggcctcatctcctgggatgagtacagaaatgtgacctacggcacctacctggatgatcctgaccctgatgatggcttcaactacaagcagatgatggtgagagatgagcggcgcttcaagatggctgacaaggatggagacctgattgccaccaaggaggagttcaccgccttcctgcaccctgaggagtatgactacatgaaggacatcgtggtgcaggagaccatggaggacatcgacaagaatgctgatggcttcatcgacctggaggagtacatcggggacatgtacagccatgatggcaacacagatgagcctgagtgggtgaagacagagcgggagcagtttgtggagttccgggacaagaacagagatggcaagatggacaaggaggagaccaaggactggatcctgcccagcgactatgaccacgccgaggccgaggcccggcacctggtgtatgaaagtgaccagaacaaggatggcaagctgaccaaggaggagatcgtggacaagtatgacctgtttgtgggcagccaggccacagactttggagaggccctggtgagacatgatgagttctag

SEQ ID NO: 77948 - DNA, 972 bp, Artificial Sequence
  derived and/or modified sequence
atgaaggagaccgacctgatcatcatggacctgcggcagttcctgatgtgcttgtccctctgtaccgcttttgctctcagtaagcccaccgaaaagaaggaccgggtccaccatgagccgcaactcagcgacaaagtgcacaacgacgctcagagcttcgattacgatcacgatgctttcttaggagccgaggaggctaaaacattcgatcagctgactcccgaagaatctaaggagaggctaggcatgattgtcgataagattgacgcggataaggatggcttcgtaaccgaaggcgagctgaagtcttggatcaagcatgctcagaagaagtacatttatgacaacgtagagaatcagtggcaagagttcgatatgaatcaggatggtttaataagctgggacgagtaccgcaacgtcacttatgggacctatctggatgatcccgaccctgacgatggattcaattataagcagatgatggtgagggatgaacgaagattcaaaatggcggacaaggatggtgacttgatagctaccaaggaggagtttaccgctttcttgcacccggaggaatatgattacatgaaggatatcgtggtccaggagaccatggaggacatcgataagaacgccgacggatttatagatcttgaggagtacattggcgacatgtactcccatgatggaaacaccgatgaacccgagtgggtgaaaaccgaaagagagcagtttgttgagttcagagataagaacagagatgggaaaatggacaaggaggagaccaaagattggatcctgccctcggactacgaccacgccgaagcggaagcaaggcacttggtatatgagagtgatcagaataaggatgggaaacttacgaaggaggagattgtcgataaatatgaccttttcgtgggctcacaagctacagacttcggggaagctctggtgaggcacgacgaattttag

SEQ ID NO: 77949 - DNA, 972 bp, Artificial Sequence
  derived and/or modified sequence
atgaaagagacagatcttattatcatggacctgcgtcagtttctcatgtgcttgagcctctgcaccgccttcgccctcagcaagcccacagaaaaaaaagatagagtgcatcatgaaccccagctcagcgataaggttcacaatgacgcccagagctttgactatgaccatgacgcttttctgggggcagaggaagccaaaacttttgatcagctgaccccagaggaatccaaggagaggctgggcatgattgtggacaaaattgacgccgacaaggacggattcgtaaccgagggcgagctaaagtcatggatcaagcacgctcaaaagaaatacatatacgataacgtggagaatcaatggcaagagtttgatatgaatcaggacggattgatttcgtgggatgagtacagaaacgtcacctacggcacatacctcgatgaccccgatcccgacgacgggttcaactataaacagatgatggtccgcgatgaaaggcgcttcaaaatggccgataaagatggagatctgatcgctaccaaggaagaattcaccgccttcctgcatcccgaggagtacgactatatgaaggatatagtggtccaggagactatggaggacattgacaagaatgcggatgggttcatagatctggaggaatacattggggacatgtactcacatgacggaaacacggacgagcccgaatgggtcaagacggagcgggagcagttcgttgagtttagagataagaaccgagacggcaagatggataaggaggaaaccaaagattggattctgcctagcgattacgaccacgccgaggccgaggccaggcatctcgtttatgagagcgatcagaacaaggacggaaagttgacaaaggaggagatcgtcgacaagtatgatctctttgtgggctcccaagccaccgacttcggcgaagctctggtgcgacatgatgaattttag

SEQ ID NO: 77950 - DNA, 972 bp, Artificial Sequence
  derived and/or modified sequence
atgaaagagaccgacctcataattatggatctgcgtcagttcctgatgtgtctatcactatgcactgcatttgccctttcaaaacccacagagaagaaggacagggtgcatcatgaaccacaactctccgataaagttcataatgacgcacaaagctttgattacgatcacgatgccttccttggtgccgaggaggctaaaacgttcgatcaattgactcccgaagagagtaaagaaagactcgggatgattgtagacaaaatcgatgctgacaaggacgggttcgttaccgagggtgagctgaaaagctggattaaacatgctcagaagaagtatatctatgataacgtggagaaccagtggcaggagtttgacatgaaccaggacggtctgatttcttgggacgagtatcgcaacgttacatacggaacctacttggacgaccccgatcctgacgatggcttcaactacaagcaaatgatggtcagagacgagcgacgatttaaaatggcagacaaggacggtgacttgatagccaccaaagaggagtttaccgcctttctccatcctgaagaatatgactacatgaaagatatcgtagtgcaggagactatggaagatattgacaagaacgcggatggcttcatcgatcttgaggaatacatcggagatatgtactctcatgatggcaacaccgacgagccagagtgggtgaagacagaacgcgagcaattcgttgaatttcgagataagaatagagacggcaaaatggacaaagaggaaacgaaggattggatcttgcctagtgactacgaccacgctgaagccgaggcccgacacttggtctatgaaagcgaccagaacaaagacggcaagttgacgaaagaggaaatcgtggataagtacgacctcttcgtgggtagccaagcaaccgattttggcgaggctctggtgcgacatgacgagttttag

SEQ ID NO: 77951 - DNA, 972 bp, Artificial Sequence
  derived and/or modified sequence
atgaaggagaccgacttgatcatcatggatttacgacaatttttaatgtgcctgtccctgtgcaccgctttcgctctaagtaagccgacagaaaaaaaagatcgggttcatcacgaaccacagttgtctgacaaagtgcacaacgacgctcagtcttttgactatgatcatgacgcttttctgggagccgaggaagctaaaacgttcgaccagttgacacctgaggagtccaaagaacgtcttggaatgattgtggataaaatagacgccgataaagacggctttgtaacggaaggagaattaaaaagctggatcaaacatgcccaaaaaaagtacatctatgacaatgtcgaaaaccagtggcaagaattcgacatgaaccaggacggcctgattagctgggacgagtatcggaacgttacatatggtacgtacctggacgatcccgacccggacgacggttttaattataaacagatgatggtgagagacgagaggaggttcaagatggctgataaggatggtgatctcatagcaacaaaggaagaattcaccgcatttttgcatcctgaagagtacgactacatgaaagatattgttgtgcaggaaaccatggaagatatagataagaacgccgatggctttattgatttggaggaatacataggcgatatgtattctcacgatgggaacactgacgaacccgaatgggtaaaaacagagagagaacagtttgtcgagttccgcgacaagaatcgcgacgggaaaatggataaggaagaaaccaaagattggatcctgccctcagactatgaccacgcagaagccgaagctaggcatcttgtgtatgagagtgatcagaataaggatggaaaactgaccaaagaagaaatagtggacaagtatgacctctttgttggctcccaggctactgacttcggcgaggcactagttagacatgacgaattctag

SEQ ID NO: 77952 - DNA, 2438 bp, Artificial Sequence
  derived and/or modified sequence
gcgcgcgtgagctgagccggtgggtgagcggcggccacggcatcctgtgctgtgggggctacgaggaaagatctaattatcatggacctgcgacagtttcttatgtgcctgtccctgtgcacagcctttgccttgagcaaacccacagaaaagaaggaccgtgtacatcatgagcctcagctcagtgacaaggttcacaatgatgctcagagttttgattatgaccatgatgccttcttgggtgctgaagaagcaaagacctttgatcagctgacaccagaagagagcaaggaaaggcttggaatgattgtagataaaatagacgcggataaagatgggtttgtgacggagggggagctgaaatcctggattaagcacgcccagaagaaatacatatatgacaatgttgaaaaccaatggcaggagtttgatatgaatcaagacggcttaatctcctgggatgagtacagaaacgtgacttatggcacttacctggatgatccagatcctgatgatggatttaactataaacagatgatggttagagatgagcggaggtttaaaatggcagacaaggatggagacctcattgccaccaaggaggagttcacagctttcctgcaccctgaggagtatgactacatgaaagatatagtagtacaggaaacaatggaagatatagataagaatgctgatggtttcattgatctagaagagtatattggtgacatgtacagccatgatgggaatactgatgagccagaatgggtaaagacagagcgagagcagtttgttgagtttcgggataagaaccgtgatgggaagatggacaaggaagagaccaaagactggatccttccctcagactatgatcatgcagaggcagaagccaggcacctggtctatgaatcagaccaaaacaaggatggcaagcttaccaaggaggagatcgttgacaagtatgacttatttgttggcagccaggccacagattttggggaggccttagtacggcatgatgagttctgagctacggaggaaccctcatttcctcaaaagtaatttatttttacagcttctggtttcacatgaaattgtttgcgctactgagactgttactacaaactttttaagacatgaaaaggcgtaatgaaaaccatcccgtccccattcctcctcctctctgagggactggagggaagccgtgcttctgaggaacaactctaattagtacacttgtgtttgtagatttacactttgtattatgtattaacatggcgtgtttatttttgtatttttctctggttgggagtatgatatgaaggatcaagatcctcaactcacacatgtagacaaacattagctctttactctttctcaaccccttttatgattttaataattctcacttaactaattttgtaagcctgagatcaataagaaatgttcaggagagaggaaagaaaaaaaatatatgctccacaatttatatttagagagagaacacttagtcttgcctgtcaaaaagtccaacatttcataggtagtaggggccacatattacattcagttgctataggtccagcaactgaacctgccattacctgggcaaggaaagatccctttgctctaggaaagcttggcccaaattgattttcttctttttccccctgtaggactgactgttggctaattttgtcaagcacagctgtggtgggaagagttagggccagtgtcttgaaaatcaatcaagtagtgaatgtgatctctttgcagagctatagatagaaacagctggaaaactaaaggaaaaatacaagtgttttcggggcatacattttttttctgggtgtgcatctgttgaaatgctcaagacttaattatttgccttttgaaatcactgtaaatgcccccatccggttcctcttcttcccaggtgtgccaaggaattaatcttggtttcactacaattaaaattcactcctttccaatcatgtcattgaaagtgcctttaacgaaagaaatggtcactgaatgggaattctcttaagaaaccctgagattaaaaaaagactatttggataacttataggaaagcctagaacctcccagtagagtggggatttttttcttcttccctttctcttttggacaatagttaaattagcagtattagttatgagtttggttgcagtgttcttatcttgtgggctgatttccaaaaaccacatgctgctgaatttaccagggatcctcatacctcacaatgcaaaccacttactaccaggcctttttctgtgtccactggagagcttgagctcacactcaaagatcagaggacctacagagagggctctttggtttgaggaccatggcttacctttcctgcctttgacccatcacaccccatttcctcctctttccctctccccgctgcc

SEQ ID NO: 77953 - DNA, 3206 bp, Artificial Sequence
  derived and/or modified sequence
gattggtcgggaggccgccggcgaggcggatgagggcggggtgcggacccgcttccggttgggcggtgcttgcgcgcgtgagctgagccggtgggtgagcggcggccacggcatcctgtgctgtgggggctacgaggaaagatctaattatcatggacctgcgacagtttcttatgtgcctgtccctgtgcacagcctttgccttgagcaaacccacagaaaagaaggaccgtgtacatcatgagcctcagctcagtgacaaggttcacaatgatgctcagagttttgattatgaccatgatgccttcttgggtgctgaagaagcaaagacctttgatcagctgacaccagaagagagcaaggaaaggcttggaatgattgtagataaaatagacgcggataaagatgggtttgtgacggagggggagctgaaatcctggattaagcacgcccagaagaaatacatatatgacaatgttgaaaaccaatggcaggagtttgatatgaatcaagacggcttaatctcctgggatgagtacagaaacgtgacttatggcacttacctggatgatccagatcctgatgatggatttaactataaacagatgatggttagagatgagcggaggtttaaaatggcagacagagcgagagcagtttgttgagtttcgggataagaaccgtgatgggaagatggacaaggaagagaccaaagactggatccttccctcagactatgatcatgcagaggcagaagccaggcacctggtctatgaatcagaccaaaacaaggatggcaagcttaccaaggaggagatcgttgacaagtatgacttatttgttggcagccaggccacagattttggggaggccttagtacggcatgatgagttctgagctacggaggaaccctcatttcctcaaaagtaatttatttttacagcttctggtttcacatgaaattgtttgcgctactgagactgttactacaaactttttaagacatgaaaaggcgtaatgaaaaccatcccgtccccattcctcctcctctctgagggactggagggaagccgtgcttctgaggaacaactctaattagtacacttgtgtttgtagatttacactttgtattatgtattaacatggcgtgtttatttttgtatttttctctggttgggagtatgatatgaaggatcaagatcctcaactcacacatgtagacaaacattagctctttactctttctcaaccccttttatgattttaataattctcacttaactaattttgtaagcctgagatcaataagaaatgttcaggagagaggaaagaaaaaaaatatatgctccacaatttatatttagagagagaacacttagtcttgcctgtcaaaaagtccaacatttcataggtagtaggggccacatattacattcagttgctataggtccagcaactgaacctgccattacctgggcaaggaaagatccctttgctctaggaaagcttggcccaaattgattttcttctttttccccctgtaggactgactgttggctaattttgtcaagcacagctgtggtgggaagagttagggccagtgtcttgaaaatcaatcaagtagtgaatgtgatctctttgcagagctatagatagaaacagctggaaaactaaaggaaaaatacaagtgttttcggggcatacattttttttctgggtgtgcatctgttgaaatgctcaagacttaattatttgccttttgaaatcactgtaaatgcccccatccggttcctcttcttcccaggtgtgccaaggaattaatcttggtttcactacaattaaaattcactcctttccaatcatgtcattgaaagtgcctttaacgaaagaaatggtcactgaatgggaattctcttaagaaaccctgagattaaaaaaagactatttggataacttataggaaagcctagaacctcccagtagagtggggatttttttcttcttccctttctcttttggacaatagttaaattagcagtattagttatgagtttggttgcagtgttcttatcttgtgggctgatttccaaaaaccacatgctgctgaatttaccagggatcctcatacctcacaatgcaaaccacttactaccaggcctttttctgtgtccactggagagcttgagctcacactcaaagatcagaggacctacagagagggctctttggtttgaggaccatggcttacctttcctgcctttgacccatcacaccccatttcctcctctttccctctccccgctgccaaaaaaaaaaaaaaaggaaacgtttatcatgaatcaacagggtttcagtccttatcaaagagagatgtggaaagagctaaagaaaccaccctttgttcccaactccactttacccatattttatgcaacacaaacactgtccttttgggtccctttcttacagatggacctcttgagaagaattatcgtattccacgtttttagccctcaggttaccaagataaatatatgtatatataacctttattattgctatatctttgtggataatacattcaggtggtgctgggtgatttattataatctgaacctaggtatatcctttggtcttccacagtcatgttgaggtgggctccctggtatggtaaaaagccaggtataatgtaacttcaccccagcctttgtactaagctcttgatagtggatatactcttttaagtttagccccaatatagggtaatggaaatttcctgccctctgggttccccatttttactattaagaagaccagtgataatttaataatgccaccaactctggcttagttaagtgagagtgtgaactgtgtggcaagagagcctcacacctcactaggtgcagagagcccaggccttatgttaaaatcatgcacttgaaaagcaaaccttaatctgcaaagacagcagcaagcattatacggtcatcttgaatgatccctttgaaattttttttttgtttgtttgtttaaatcaagcctgaggctggtgaacagtagctacacacccatattgtgtgttctgtgaatgctagctctcttgaatttggatattggttattttttatagagtgtaaaccaagttttatattctgcaatgcgaacaggtacctatctgtttctaaataaaactgtttacattcatt

SEQ ID NO: 77954 - DNA, 3067 bp, Artificial Sequence
  derived and/or modified sequence
gattggtcgggaggccgccggcgaggcggatgagggcggggtgcggacccgcttccggttgggcggtgcttgcgcgcgtgagctgagccggtgggtgagcggcggccacggcatcctgtgctgtgggggctacgaggaaagatctaattatcatggacctgcgacagtttcttatgtgcctgtccctgtgcacagcctttgccttgagcaaacccacagaaaagaaggaccgtgtacatcatgagcctcagctcagtgacaaggttcacaatgatgctcagagttttgattatgaccatgatgccttcttgggtgctgaagaagcaaagacctttgatcagctgacaccagaagagagcaaggaaaggcttggaatgattgtagataaaatagacgcggataaagatgggtttgtgacggagggggagctgaaatcctggattaagcacgcccagaagaaatacatatatgacaatgttgaaaaccaatggcaggagtttgatatgaatcaagacggcttaatctcctgggatgagtacagaaacgtgacttatggcacttacctggatgatccagatcctgatgatggatttaactataaacagatgatggttagagatgagcggaggtttaaaatggcagacaaggatggagacctcattgccaccaaggaggagatcgttgacaagtatgacttatttgttggcagccaggccacagattttggggaggccttagtacggcatgatgagttctgagctacggaggaaccctcatttcctcaaaagtaatttatttttacagcttctggtttcacatgaaattgtttgcgctactgagactgttactacaaactttttaagacatgaaaaggcgtaatgaaaaccatcccgtccccattcctcctcctctctgagggactggagggaagccgtgcttctgaggaacaactctaattagtacacttgtgtttgtagatttacactttgtattatgtattaacatggcgtgtttatttttgtatttttctctggttgggagtatgatatgaaggatcaagatcctcaactcacacatgtagacaaacattagctctttactctttctcaaccccttttatgattttaataattctcacttaactaattttgtaagcctgagatcaataagaaatgttcaggagagaggaaagaaaaaaaatatatgctccacaatttatatttagagagagaacacttagtcttgcctgtcaaaaagtccaacatttcataggtagtaggggccacatattacattcagttgctataggtccagcaactgaacctgccattacctgggcaaggaaagatccctttgctctaggaaagcttggcccaaattgattttcttctttttccccctgtaggactgactgttggctaattttgtcaagcacagctgtggtgggaagagttagggccagtgtcttgaaaatcaatcaagtagtgaatgtgatctctttgcagagctatagatagaaacagctggaaaactaaaggaaaaatacaagtgttttcggggcatacattttttttctgggtgtgcatctgttgaaatgctcaagacttaattatttgccttttgaaatcactgtaaatgcccccatccggttcctcttcttcccaggtgtgccaaggaattaatcttggtttcactacaattaaaattcactcctttccaatcatgtcattgaaagtgcctttaacgaaagaaatggtcactgaatgggaattctcttaagaaaccctgagattaaaaaaagactatttggataacttataggaaagcctagaacctcccagtagagtggggatttttttcttcttccctttctcttttggacaatagttaaattagcagtattagttatgagtttggttgcagtgttcttatcttgtgggctgatttccaaaaaccacatgctgctgaatttaccagggatcctcatacctcacaatgcaaaccacttactaccaggcctttttctgtgtccactggagagcttgagctcacactcaaagatcagaggacctacagagagggctctttggtttgaggaccatggcttacctttcctgcctttgacccatcacaccccatttcctcctctttccctctccccgctgccaaaaaaaaaaaaaaaggaaacgtttatcatgaatcaacagggtttcagtccttatcaaagagagatgtggaaagagctaaagaaaccaccctttgttcccaactccactttacccatattttatgcaacacaaacactgtccttttgggtccctttcttacagatggacctcttgagaagaattatcgtattccacgtttttagccctcaggttaccaagataaatatatgtatatataacctttattattgctatatctttgtggataatacattcaggtggtgctgggtgatttattataatctgaacctaggtatatcctttggtcttccacagtcatgttgaggtgggctccctggtatggtaaaaagccaggtataatgtaacttcaccccagcctttgtactaagctcttgatagtggatatactcttttaagtttagccccaatatagggtaatggaaatttcctgccctctgggttccccatttttactattaagaagaccagtgataatttaataatgccaccaactctggcttagttaagtgagagtgtgaactgtgtggcaagagagcctcacacctcactaggtgcagagagcccaggccttatgttaaaatcatgcacttgaaaagcaaaccttaatctgcaaagacagcagcaagcattatacggtcatcttgaatgatccctttgaaattttttttttgtttgtttgtttaaatcaagcctgaggctggtgaacagtagctacacacccatattgtgtgttctgtgaatgctagctctcttgaatttggatattggttattttttatagagtgtaaaccaagttttatattctgcaatgcgaacaggtacctatctgtttctaaataaaactgtttacattcatt

SEQ ID NO: 77955 - DNA, 4224 bp, Artificial Sequence
  derived and/or modified sequence
gattggtcgggaggccgccggcgaggcggatgagggcggggtgcggacccgcttccggttgggcggtgcttgcgcgcgtgagctgagccggtgggtgagcggcggccacggcatcctgtgctgtgggggctacgaggaaaggacctcccaccctcccccactgagctgccttcccagtgatgaaagaaaaaatgtaaaagcctgaaaacccttcttcttgatttttaatttttttttttccctctaagaccttaaccactctggatagtatcacggggtatcagtagagtgtgctaaacagatgtgtactctgcagcttctttgcaggttttttgtcacatttttcagtcaagtgttccagctttgtgcttgttcattagagtcacctgtgactacagagattctgaaagtttgaatcagggcctgggaatctgtactttgaacagtactacaggtggtatttatgcctaggcaagtatgggaaacaactgtgcagaaggataaagacgttcttatctatgactagaccatctgaatgatttggcctttgaaggtgactcaaggttgagcctggatgttggagacttggtgctatagaccaaggaagctgccaagtatttcgctggttcctaatctcatgaacatcagaatcacctgaaaaacatttaaagctacgaatgtctgaattcagcttcagagactctaaatcaataggagaaacttaaagcttcctagatgattctaataaccagccatgtttgaagaccagaccaccaatgcgtacaagaagtaaaggatttggagtcaacatttaaaccttggttctttcacttttaattcttatgaacttgggcaaaaggattaaaattctactttggtatcttttgaaagaaaacagaaagtggacattttaactataagtttcttatcagcctacaatcagatgaaggaaactgatctaattatcatggacctgcgacagtttcttatgtgcctgtccctgtgcacagcctttgccttgagcaaacccacagaaaagaaggaccgtgtacatcatgagcctcagctcagtgacaaggttcacaatgatgctcagagttttgattatgaccatgatgccttcttgggtgctgaagaagcaaagacctttgatcagctgacaccagaagagagcaaggaaaggcttggaatgattgtagataaaatagacgcggataaagatgggtttgtgacggagggggagctgaaatcctggattaagcacgcccagaagaaatacatatatgacaatgttgaaaaccaatggcaggagtttgatatgaatcaagacggcttaatctcctgggatgagtacagaaacgtgacttatggcacttacctggatgatccagatcctgatgatggatttaactataaacagatgatggttagagatgagcggaggtttaaaatggcagacaaggatggagacctcattgccaccaaggaggagttcacagctttcctgcaccctgaggagtatgactacatgaaagatatagtagtacaggaaacaatggaagatatagataagaatgctgatggtttcattgatctagaagagtatattggtgacatgtacagccatgatgggaatactgatgagccagaatgggtaaagacagagcgagagcagtttgttgagtttcgggataagaaccgtgatgggaagatggacaaggaagagaccaaagactggatccttccctcagactatgatcatgcagaggcagaagccaggcacctggtctatgaatcagaccaaaacaaggatggcaagcttaccaaggaggagatcgttgacaagtatgacttatttgttggcagccaggccacagattttggggaggccttagtacggcatgatgagttctgagctacggaggaaccctcatttcctcaaaagtaatttatttttacagcttctggtttcacatgaaattgtttgcgctactgagactgttactacaaactttttaagacatgaaaaggcgtaatgaaaaccatcccgtccccattcctcctcctctctgagggactggagggaagccgtgcttctgaggaacaactctaattagtacacttgtgtttgtagatttacactttgtattatgtattaacatggcgtgtttatttttgtatttttctctggttgggagtatgatatgaaggatcaagatcctcaactcacacatgtagacaaacattagctctttactctttctcaaccccttttatgattttaataattctcacttaactaattttgtaagcctgagatcaataagaaatgttcaggagagaggaaagaaaaaaaatatatgctccacaatttatatttagagagagaacacttagtcttgcctgtcaaaaagtccaacatttcataggtagtaggggccacatattacattcagttgctataggtccagcaactgaacctgccattacctgggcaaggaaagatccctttgctctaggaaagcttggcccaaattgattttcttctttttccccctgtaggactgactgttggctaattttgtcaagcacagctgtggtgggaagagttagggccagtgtcttgaaaatcaatcaagtagtgaatgtgatctctttgcagagctatagatagaaacagctggaaaactaaaggaaaaatacaagtgttttcggggcatacattttttttctgggtgtgcatctgttgaaatgctcaagacttaattatttgccttttgaaatcactgtaaatgcccccatccggttcctcttcttcccaggtgtgccaaggaattaatcttggtttcactacaattaaaattcactcctttccaatcatgtcattgaaagtgcctttaacgaaagaaatggtcactgaatgggaattctcttaagaaaccctgagattaaaaaaagactatttggataacttataggaaagcctagaacctcccagtagagtggggatttttttcttcttccctttctcttttggacaatagttaaattagcagtattagttatgagtttggttgcagtgttcttatcttgtgggctgatttccaaaaaccacatgctgctgaatttaccagggatcctcatacctcacaatgcaaaccacttactaccaggcctttttctgtgtccactggagagcttgagctcacactcaaagatcagaggacctacagagagggctctttggtttgaggaccatggcttacctttcctgcctttgacccatcacaccccatttcctcctctttccctctccccgctgccaaaaaaaaaaaaaaaggaaacgtttatcatgaatcaacagggtttcagtccttatcaaagagagatgtggaaagagctaaagaaaccaccctttgttcccaactccactttacccatattttatgcaacacaaacactgtccttttgggtccctttcttacagatggacctcttgagaagaattatcgtattccacgtttttagccctcaggttaccaagataaatatatgtatatataacctttattattgctatatctttgtggataatacattcaggtggtgctgggtgatttattataatctgaacctaggtatatcctttggtcttccacagtcatgttgaggtgggctccctggtatggtaaaaagccaggtataatgtaacttcaccccagcctttgtactaagctcttgatagtggatatactcttttaagtttagccccaatatagggtaatggaaatttcctgccctctgggttccccatttttactattaagaagaccagtgataatttaataatgccaccaactctggcttagttaagtgagagtgtgaactgtgtggcaagagagcctcacacctcactaggtgcagagagcccaggccttatgttaaaatcatgcacttgaaaagcaaaccttaatctgcaaagacagcagcaagcattatacggtcatcttgaatgatccctttgaaattttttttttgtttgtttgtttaaatcaagcctgaggctggtgaacagtagctacacacccatattgtgtgttctgtgaatgctagctctcttgaatttggatattggttattttttatagagtgtaaaccaagttttatattctgcaatgcgaacaggtacctatctgtttctaaataaaactgtttacattcatt

SEQ ID NO: 77956 - DNA, 972 bp, Artificial Sequence
  derived and/or modified sequence
atgaaggagaccgacctgatcatcatggacctgagacagttcctgatgtgcctgagcctgtgcaccgccttcgccctgagcaagcccaccgagaagaaggacagagtgcaccacgagccccagctgagcgacaaggtgcacaacgacgcccagagcttcgactacgaccacgacgccttcctgggcgccgaggaggccaagaccttcgaccagctgacccccgaggagagcaaggagagactgggcatgatcgtggacaagatcgacgccgacaaggacggcttcgtgaccgagggcgagctgaagagctggatcaagcacgcccagaagaagtacatctacgacaacgtggagaaccagtggcaggagttcgacatgaaccaggacggcctgatcagctgggacgagtacagaaacgtgacctacggcacctacctggacgaccccgaccccgacgacggcttcaactacaagcagatgatggtgagagacgagagaagattcaagatggccgacaaggacggcgacctgatcgccaccaaggaggagttcaccgccttcctgcaccccgaggagtacgactacatgaaggacatcgtggtgcaggagaccatggaggacatcgacaagaacgccgacggcttcatcgacctggaggagtacatcggcgacatgtacagccacgacggcaacaccgacgagcccgagtgggtgaagaccgagagagagcagttcgtggagttcagagacaagaacagagacggcaagatggacaaggaggagaccaaggactggatcctgcccagcgactacgaccacgccgaggccgaggccagacacctggtgtacgagagcgaccagaacaaggacggcaagctgaccaaggaggagatcgtggacaagtacgacctgttcgtgggcagccaggccaccgacttcggcgaggccctggtgagacacgacgagttctag

SEQ ID NO: 77957 - protein, 224 aa, Artificial Sequence
  derived and/or modified sequence
MDLRQFLMCLSLCTAFALSKPTEKKDRVHHEPQLSDKVHNDAQSFDYDHDAFLGAEEAKTFDQLTPEESKERLGKIVSKIDGDKDGFVTVDELKDWIKFAQKRWIYEDVERQWKGHDLNEDGLVSWEEYKNATYGYVLDDPDPDDGFNYKQMMVRDERRFKMADKDGDLIATKEEFTAFLHPEEYDYMKDIVVQETMEDIDKNADGFIDLEEYIGWQAYQGGDR

SEQ ID NO: 77958 - DNA, 465 bp, Artificial Sequence
  derived and/or modified sequence
atggatctgcgacagttccttatgtgtctcagtctttgcacagcgttcgctctgtctaaacccactgagaaaaaagaccgggtgcatcacgagccacagctttcagataaggtgcacaacgacgctcagtccttcgactacgatcacgatgcgtttcttggagcggaagaagcaaagacattcgatcaattaacaccagaggaatccaaagagaggctcggaaagatcgtttctaagatcgacggcgataaagatggttttgtcactgtagatgagctcaaagactggatcctgccaagcgactacgaccacgccgaagccgaggccagacacctcgtctacgagagtgatcagaataaggatggaaagttaacgaaggaagagattgtggacaagtatgatctgtttgttggctcacaagcaaccgacttcggcgaggcgctggtgaggcacgacgagttctag

SEQ ID NO: 77959 - DNA, 675 bp, Artificial Sequence
  derived and/or modified sequence
atggacctaaggcagtttctgatgtgtctgtccctttgcacagcattcgcactgtccaagccaacagagaagaaggaccgggtccaccacgaaccacagctgtcggacaaagtccataacgacgcgcaaagctttgactatgatcacgacgccttccttggtgcagaggaggctaagaccttcgatcagctgactcccgaggagtcaaaagagcggcttggaaaaatcgttagcaaaatcgatggcgacaaggacgggttcgtgactgtagacgaattgaaagattggatcaagtttgcacagaagagatggatctatgaggatgtagaacgtcaatggaaagggcacgacctaaacgaggatggcctggtaagctgggaggagtataagaatgctacgtacggctatgtgctagacgatccagatcctgacgatggtttcaactataagcagatgatggttcgagatgaacgtcgctttaagatggccgacaaggatggggacctgatcgcgacaaaagaagagtttaccgccttccttcaccccgaggaatatgactatatgaaggacattgtagtgcaggaaaccatggaagacatagacaagaatgcagacggctttatcgatttggaggaatacattgggtggcaagcctatcagggaggtgaccgctag

SEQ ID NO: 77960 - DNA, 465 bp, Artificial Sequence
  derived and/or modified sequence
atggacctgcggcagttcctgatgtgcctgagcctgtgcacagcctttgccctgagcaagcccacagagaagaaggacagagtgcaccacgagccccagctgagtgacaaggtgcacaatgatgcccagagctttgattatgaccatgatgccttcctgggcgctgaggaggccaagacctttgaccagctgaccccagaggagagcaaggagcggctgggcaagatcgtgtccaagattgatggagacaaggatggctttgtgacagtggatgagctgaaggactggatcctgcccagcgactatgaccatgctgaggccgaggcccggcacctggtgtatgaaagtgaccagaacaaggatggcaagctgaccaaggaggagatcgtggacaagtatgacctgtttgtgggcagccaggccacagactttggagaggccctggtgagacatgatgagttctag

SEQ ID NO: 77961 - DNA, 675 bp, Artificial Sequence
  derived and/or modified sequence
atggacctgcggcagttcctgatgtgcctgagcctgtgcacagcctttgccctgagcaagcccacagagaagaaggacagagtgcaccacgagccccagctgagtgacaaggtgcacaatgatgcccagagctttgattatgaccatgatgccttcctgggcgctgaggaggccaagacctttgaccagctgaccccagaggagagcaaggagcggctgggcaagatcgtgtccaagattgatggagacaaggatggctttgtgacagtggatgagctgaaggactggatcaagtttgcccagaagcgctggatctatgaagatgtggagcggcagtggaagggccatgacctgaatgaagatggcctggtgtcctgggaggagtacaagaatgccacctacggctacgtgctggatgatcctgaccctgatgatggcttcaactacaagcagatgatggtgagagatgagcggcgcttcaagatggctgacaaggatggagacctgattgccaccaaggaggagttcaccgccttcctgcaccctgaggagtatgactacatgaaggacatcgtggtgcaggagaccatggaggacatcgacaagaatgctgatggcttcatcgacctggaggagtacatcggctggcaggcctaccagggcggggacagatag

SEQ ID NO: 77962 - DNA, 465 bp, Artificial Sequence
  derived and/or modified sequence
atggacctgcggcagttcctgatgtgcctgagcctgtgcaccgccttcgctctgtccaagcctaccgaaaagaaggatcgagtgcatcacgagccacaactgtcggacaaggtccacaatgatgcccaaagtttcgactatgaccacgatgccttcctcggcgccgaagaggccaaaaccttcgaccagctgaccccagaggagtccaaagaaagattgggtaagatcgtgtccaagatagacggagacaaggatggcttcgtgactgtcgatgagctgaaggactggattttgccaagtgactacgatcatgctgaggctgaagccaggcaccttgtttacgaaagcgatcagaataaagatggaaaactgaccaaggaagaaatcgtcgacaaatacgatctatttgtggggtctcaagccacggacttcggagaagctctcgtcagacacgacgagttctag

SEQ ID NO: 77963 - DNA, 675 bp, Artificial Sequence
  derived and/or modified sequence
atggacctgcggcagttcctgatgtgcctgagcctgtgcaccgccttcgcgctgtccaagccaactgaaaaaaaggaccgcgtccatcacgagccccagttgtccgacaaggtccacaatgatgcccaatcctttgattatgatcacgatgcatttctgggggctgaggaagctaaaacgttcgatcagctgactcccgaggaaagtaaagaacgcttgggcaagatagtgagcaaaatcgatggagataaggacggcttcgttaccgttgacgaacttaaggattggattaagtttgcacaaaaacggtggatttacgaggatgtcgagaggcagtggaagggccatgacttgaacgaggatggactggtctcttgggaggagtataagaatgccacctatggatacgtgctggatgatcccgaccctgatgatggcttcaattataagcaaatgatggtgcgggatgagcgaagattcaagatggcagacaaggacggcgacctgattgcaaccaaagaggaatttactgccttcctccacccggaagaatacgattatatgaaagatatcgtggtccaggaaactatggaagatattgacaaaaacgccgacgggtttatagacttggaggagtacataggatggcaggcctatcagggaggagacagatag

SEQ ID NO: 77964 - DNA, 465 bp, Artificial Sequence
  derived and/or modified sequence
atggacctcaggcaatttttgatgtgtctgagcctttgtaccgcattcgctctttccaaaccaaccgaaaaaaaggatcgcgtgcaccatgagccacagctgtctgacaaggtgcataacgacgcccaatccttcgactacgatcatgatgcttttctaggtgccgaggaagcgaaaaccttcgatcagctgacaccagaggagtcaaaggagaggctcgggaaaatcgtgtcaaagattgacggggacaaagacggcttcgttacagtagatgagctcaaagactggatcctgccatctgattacgaccacgccgaagccgaagccaggcatttagtctacgagtctgatcagaataaggacggaaaacttacaaaggaggaaatcgtggacaaatatgacctgttcgtagggagccaagcaaccgattttggcgaagctttggtcaggcacgacgaattctag

SEQ ID NO: 77965 - DNA, 675 bp, Artificial Sequence
  derived and/or modified sequence
atggatctcaggcagtttcttatgtgcctatcactgtgtaccgccttcgctctttccaaacccacagagaaaaaagatagggtacaccacgagccacagctgagtgacaaggtgcataatgatgcccagagcttcgactacgaccacgacgccttccttggcgcagaggaggctaagacgttcgaccagctcaccccagaggagagcaaggagcggctcggcaagatagtctcaaagatcgatggtgataaagatgggttcgtaaccgtagatgaactcaaagattggatcaagttcgcccagaagcggtggatttatgaggatgtggagcgccagtggaaaggacatgatctgaatgaagatggcctagtatcatgggaagagtataagaatgccacatacgggtatgtgcttgacgatccagatcccgacgatggctttaattataaacaaatgatggtacgagacgaacggcgattcaaaatggctgacaaggatggcgaccttatcgccacgaaggaagaatttacagcatttctgcaccccgaagagtacgactacatgaaagatatagtagttcaggagaccatggaagacatcgacaagaacgcagatgggttcatcgaccttgaagagtacataggatggcaggcataccagggcggtgaccgctag

SEQ ID NO: 77966 - DNA, 465 bp, Artificial Sequence
  derived and/or modified sequence
atggacctcagacagtttctgatgtgcctctctctttgcactgcctttgccctgagcaagcccactgagaaaaaagatagagtgcaccatgaaccacaattgtccgacaaagtgcataacgacgcacagtccttcgattacgatcacgacgcctttctcggggccgaggaagctaaaacatttgatcagctcacccccgaggaaagtaaggaaaggctgggtaagatagtgtcaaaaattgatggcgataaagatggattcgtgactgttgatgaactgaaggattggatcctcccatcagattatgaccacgccgaggcagaagcaagacacctcgtatacgagagcgaccagaacaaggacggaaagctgaccaaggaagaaatcgttgacaaatatgatctgtttgtgggttcacaggcgaccgattttggcgaagcactggtgagacacgatgagttctag

SEQ ID NO: 77967 - DNA, 675 bp, Artificial Sequence
  derived and/or modified sequence
atggatctgagacagttcctcatgtgcctgtctttatgcaccgctttcgcattatccaaacctacagagaaaaaggacagagttcatcacgagccccagttatcagataaagtacataacgacgcacaatcattcgattacgatcacgacgctttccttggggcagaggaggcaaagacattcgatcaacttacccctgaagagtctaaagagcgactcggcaagatcgtctctaagattgacggcgacaaggacggctttgtcactgtcgacgaactgaaagattggatcaagttcgcgcagaagcggtggatatacgaagacgtcgaaaggcaatggaaaggccacgatttgaacgaagatgggcttgtgtcctgggaagaatacaagaatgccacatatggctacgtgctcgatgaccccgatcccgatgacgggttcaattacaagcaaatgatggttagagatgagagaagatttaaaatggcagataaagacggagatcttatcgccacaaaggaagagttcactgctttcctgcaccctgaggagtacgactacatgaaggacatagttgtacaggagaccatggaagacatagacaagaatgcagacggatttatagacctggaggagtacatcggatggcaggcgtatcagggaggagatcgatag

SEQ ID NO: 77968 - DNA, 465 bp, Artificial Sequence
  derived and/or modified sequence
atggatctcagacagtttctaatgtgcctgagcctgtgtacagctttcgccctctctaaaccaactgaaaagaaagaccgggtccaccacgagccccagctgagcgataaagtgcataatgacgcgcagagtttcgactacgaccatgatgcctttctgggtgctgaagaagctaaaacctttgaccagctaacccccgaggaaagcaaagagcgcttaggcaagattgtctcaaaaatagacggggataaggatggattcgtaaccgtggatgaactgaaggattggatactgccctctgattatgaccacgccgaggcagaagcaagacacctcgtatacgagagcgaccagaacaaggacggaaagctgaccaaggaagaaatcgttgacaaatatgatctgtttgtgggttcacaggcgaccgattttggcgaagcactggtgagacacgatgagttctag

SEQ ID NO: 77969 - DNA, 675 bp, Artificial Sequence
  derived and/or modified sequence
atggatctgagacagttcctcatgtgcctgtctttatgcaccgctttcgcattatccaaacctacagagaaaaaggacagagttcatcacgagccccagttatcagataaagtacataacgacgcacaatcattcgattacgatcacgacgctttccttggggcagaggaggcaaagacattcgatcaacttacccctgaagagtctaaagagcgactcggcaagatcgtctctaagattgacggcgacaaggacggctttgtcactgtcgacgaactgaaagattggatcaagttcgcgcaaaagcgctggatatacgaggacgtagagagacaatggaaaggtcacgacctaaatgaagatggactggtaagctgggaggaatataagaacgctacctacggatacgtattagatgacccagaccccgatgatgggttcaattataagcaaatgatggttcgcgatgagcggcgattcaaaatggctgacaaagacggcgatctcatagcaaccaaggaggaatttactgcctttcttcacccagaagaatatgactatatgaaagacattgtggtgcaggaaacaatggaagacatagacaagaacgcagatggatttatagacttggaggagtatatcggttggcaggcatatcaggggggggatagatag

SEQ ID NO: 77970 - DNA, 3209 bp, Artificial Sequence
  derived and/or modified sequence
gattggtcgggaggccgccggcgaggcggatgagggcggggtgcggacccgcttccggttgggcggtgcttgcgcgcgtgagctgagccggtgggtgagcggcggccacggcatcctgtgctgtgggggctacgaggaaagatctaattatcatggacctgcgacagtttcttatgtgcctgtccctgtgcacagcctttgccttgagcaaacccacagaaaagaaggaccgtgtacatcatgagcctcagctcagtgacaaggttcacaatgatgctcagagttttgattatgaccatgatgccttcttgggtgctgaagaagcaaagacctttgatcagctgacaccagaagagagcaaggaaaggcttggaaagattgtaagtaaaatagatggcgacaaggacgggtttgtcactgtggatgagctcaaagactggattaaatttgcacaaaagcgctggatttacgaggatgtagagcgacagtggaaggggcatgacctcaatgaggacggcctcgtttcctgggaggagtataaaaatgccacctacggctacgttttagatgatccagatcctgatgatggatttaactataaacagatgatggttagagatgagcggaggtttaaaatggcagacaaggatggagacctcattgccaccaaggaggagttcacagctttcctgcaccctgaggagtatgactacatgaaagatatagtagtacaggaaacaatggaagatatagataagaatgctgatggtttcattgatctagaagagtatattggatggcaagcttaccaaggaggagatcgttgacaagtatgacttatttgttggcagccaggccacagattttggggaggccttagtacggcatgatgagttctgagctacggaggaaccctcatttcctcaaaagtaatttatttttacagcttctggtttcacatgaaattgtttgcgctactgagactgttactacaaactttttaagacatgaaaaggcgtaatgaaaaccatcccgtccccattcctcctcctctctgagggactggagggaagccgtgcttctgaggaacaactctaattagtacacttgtgtttgtagatttacactttgtattatgtattaacatggcgtgtttatttttgtatttttctctggttgggagtatgatatgaaggatcaagatcctcaactcacacatgtagacaaacattagctctttactctttctcaaccccttttatgattttaataattctcacttaactaattttgtaagcctgagatcaataagaaatgttcaggagagaggaaagaaaaaaaatatatgctccacaatttatatttagagagagaacacttagtcttgcctgtcaaaaagtccaacatttcataggtagtaggggccacatattacattcagttgctataggtccagcaactgaacctgccattacctgggcaaggaaagatccctttgctctaggaaagcttggcccaaattgattttcttctttttccccctgtaggactgactgttggctaattttgtcaagcacagctgtggtgggaagagttagggccagtgtcttgaaaatcaatcaagtagtgaatgtgatctctttgcagagctatagatagaaacagctggaaaactaaaggaaaaatacaagtgttttcggggcatacattttttttctgggtgtgcatctgttgaaatgctcaagacttaattatttgccttttgaaatcactgtaaatgcccccatccggttcctcttcttcccaggtgtgccaaggaattaatcttggtttcactacaattaaaattcactcctttccaatcatgtcattgaaagtgcctttaacgaaagaaatggtcactgaatgggaattctcttaagaaaccctgagattaaaaaaagactatttggataacttataggaaagcctagaacctcccagtagagtggggatttttttcttcttccctttctcttttggacaatagttaaattagcagtattagttatgagtttggttgcagtgttcttatcttgtgggctgatttccaaaaaccacatgctgctgaatttaccagggatcctcatacctcacaatgcaaaccacttactaccaggcctttttctgtgtccactggagagcttgagctcacactcaaagatcagaggacctacagagagggctctttggtttgaggaccatggcttacctttcctgcctttgacccatcacaccccatttcctcctctttccctctccccgctgccaaaaaaaaaaaaaaaggaaacgtttatcatgaatcaacagggtttcagtccttatcaaagagagatgtggaaagagctaaagaaaccaccctttgttcccaactccactttacccatattttatgcaacacaaacactgtccttttgggtccctttcttacagatggacctcttgagaagaattatcgtattccacgtttttagccctcaggttaccaagataaatatatgtatatataacctttattattgctatatctttgtggataatacattcaggtggtgctgggtgatttattataatctgaacctaggtatatcctttggtcttccacagtcatgttgaggtgggctccctggtatggtaaaaagccaggtataatgtaacttcaccccagcctttgtactaagctcttgatagtggatatactcttttaagtttagccccaatatagggtaatggaaatttcctgccctctgggttccccatttttactattaagaagaccagtgataatttaataatgccaccaactctggcttagttaagtgagagtgtgaactgtgtggcaagagagcctcacacctcactaggtgcagagagcccaggccttatgttaaaatcatgcacttgaaaagcaaaccttaatctgcaaagacagcagcaagcattatacggtcatcttgaatgatccctttgaaattttttttttgtttgtttgtttaaatcaagcctgaggctggtgaacagtagctacacacccatattgtgtgttctgtgaatgctagctctcttgaatttggatattggttattttttatagagtgtaaaccaagttttatattctgcaatgcgaacaggtacctatctgtttctaaataaaactgtttacattcatt

SEQ ID NO: 77971 - DNA, 465 bp, Artificial Sequence
  derived and/or modified sequence
atggacctgagacagttcctgatgtgcctgagcctgtgcaccgccttcgccctgagcaagcccaccgagaagaaggacagagtgcaccacgagccccagctgagcgacaaggtgcacaacgacgcccagagcttcgactacgaccacgacgccttcctgggcgccgaggaggccaagaccttcgaccagctgacccccgaggagagcaaggagagactgggcaagatcgtgagcaagatcgacggcgacaaggacggcttcgtgaccgtggacgagctgaaggactggatcctgcccagcgactacgaccacgccgaggccgaggccagacacctggtgtacgagagcgaccagaacaaggacggcaagctgaccaaggaggagatcgtggacaagtacgacctgttcgtgggcagccaggccaccgacttcggcgaggccctggtgagacacgacgagttctag

SEQ ID NO: 77972 - DNA, 675 bp, Artificial Sequence
  derived and/or modified sequence
atggacctgagacagttcctgatgtgcctgagcctgtgcaccgccttcgccctgagcaagcccaccgagaagaaggacagagtgcaccacgagccccagctgagcgacaaggtgcacaacgacgcccagagcttcgactacgaccacgacgccttcctgggcgccgaggaggccaagaccttcgaccagctgacccccgaggagagcaaggagagactgggcaagatcgtgagcaagatcgacggcgacaaggacggcttcgtgaccgtggacgagctgaaggactggatcaagttcgcccagaagagatggatctacgaggacgtggagagacagtggaagggccacgacctgaacgaggacggcctggtgagctgggaggagtacaagaacgccacctacggctacgtgctggacgaccccgaccccgacgacggcttcaactacaagcagatgatggtgagagacgagagaagattcaagatggccgacaaggacggcgacctgatcgccaccaaggaggagttcaccgccttcctgcaccccgaggagtacgactacatgaaggacatcgtggtgcaggagaccatggaggacatcgacaagaacgccgacggcttcatcgacctggaggagtacatcggctggcaggcctaccagggcggcgacagatag

SEQ ID NO: 77973 - protein, 297 aa, Artificial Sequence
  derived and/or modified sequence
MDCQENEYWDQWGRCVTCQRCGPGQELSKDCGYGEGGDAYCTACPPRRYKSSWGHHRCQSCITCAVINRVQKVNCTATSNAVCGDCLPRFYRKTRIGGLQDQECIPCTKQTPTSEVQCAFQLSLVEADTPTVPPQEATLVALVSSLLVVFTLAFLGLFFLYCKQFFNRHCQRGGLLQFEADKTAKEESLFPVPPSKETSAESQVSENIFQTQPLNPILEDDCSSTSGFPTQESFTMASCTSESHSHWVHSPIECTELDLQKFSSSASYTGAETLGGNTVESTGDRLELNVPFEVPSP

SEQ ID NO: 77974 - DNA, 894 bp, Artificial Sequence
  derived and/or modified sequence
atggactgccaggagaacgagtactgggaccagtggggcagatgcgtgacctgccagagatgcggccccggccaggagctgagcaaggactgcggctacggcgagggcggcgacgcctactgcaccgcctgcccccccagaagatacaagagcagctggggccaccacagatgccagagctgcatcacctgcgccgtgatcaacagagtgcagaaggtgaactgcaccgccaccagcaacgccgtgtgcggcgactgcctgcccagattctacagaaagaccagaatcggcggcctgcaggaccaggagtgcatcccctgcaccaagcagacccccaccagcgaggtgcagtgcgccttccagctgagcctggtggaggccgacacccccaccgtgcccccccaggaggccaccctggtggccctggtgagcagcctgctggtggtgttcaccctggccttcctgggcctgttcttcctgtactgcaagcagttcttcaacagacactgccagagaggcggcctgctgcagttcgaggccgacaagaccgccaaggaggagagcctgttccccgtgccccccagcaaggagaccagcgccgagagccaggtgagcgagaacatcttccagacccagcccctgaaccccatcctggaggacgactgcagcagcaccagcggcttccccacccaggagagcttcaccatggccagctgcaccagcgagagccacagccactgggtgcacagccccatcgagtgcaccgagctggacctgcagaagttcagcagcagcgccagctacaccggcgccgagaccctgggcggcaacaccgtggagagcaccggcgacagactggagctgaacgtgcccttcgaggtgcccagcccctag

SEQ ID NO: 77975 - DNA, 894 bp, Artificial Sequence
  derived and/or modified sequence
atggattgtcaggagaatgagtattgggaccagtggggccggtgcgtcacctgtcagagatgtggtccagggcaagagctttcaaaagattgcggctatggcgaggggggcgatgcctattgtaccgcttgtcctcctaggcggtacaagtcctcttgggggcatcacagatgtcagagttgcattacatgtgccgtgattaatagagtacagaaggtcaactgtacagccaccagcaatgccgtgtgtggggattgtctcccacgattctaccgcaaaacacgcattgggggcctgcaggatcaagaatgcataccatgtaccaagcagactcccacatcagaggtccagtgtgctttccagctaagccttgtcgaggccgacacacccaccgtcccaccccaggaagctacgttggtggctctggtgtcttccctgttggtggtgttcactctggcctttctgggcctgttctttctgtactgcaagcagtttttcaatagacattgtcagaggggcggcttgctgcagtttgaagcagataagacagcaaaagaggaatcactctttcccgttcccccttcgaaagagacctccgcagaaagccaggtctcagagaatattttccagactcagccgttaaatcccatcctcgaggatgattgttcatctacaagcggcttccccactcaggaatctttcaccatggctagttgtacatccgagagtcattcccattgggtgcattctcccatcgaatgtacagagctcgaccttcagaagtttagttcgtccgcttcatacacaggcgctgagactctgggtgggaatacagttgaatctactggcgatcgtctagagttgaacgtccccttcgaggtacccagtccctag

SEQ ID NO: 77976 - DNA, 894 bp, Artificial Sequence
  derived and/or modified sequence
atggattgtcaggaaaacgagtactgggatcagtggggaagatgtgtcacatgtcagcgttgcggcccgggccaggagctgtcaaaggattgtgggtacggtgagggaggggacgcctattgtaccgcctgtccgccccggcggtataaaagtagctggggccaccatcgctgccagtcctgtataacttgcgctgtgatcaatagggtgcagaaagtcaactgcaccgcgacctctaatgccgtgtgtggagattgcctgcctcggttttacagaaagacgcgaattggtggattacaagatcaagagtgcatcccatgcaccaaacagacacccactagtgaagtacaatgtgcattccaactgtccttagtggaagccgacacgcctaccgttcctccacaagaggccactcttgtcgctctagtgagtagccttctggtcgtttttactctggctttcctcggcttatttttcctgtactgcaaacagtttttcaaccgacactgccagagagggggcttgctccagttcgaagccgacaaaactgccaaagaggagtccctcttccctgttccaccaagtaaagagacctctgcagaatctcaagtaagcgagaacatcttccaaacacagcctcttaacccaatcttggaggacgattgtagcagcaccagcgggtttcccacccaggaatcattcacaatggccagctgcacgagcgagtctcattcacactgggtccactcacctatcgaatgcacagagctcgacctccagaagttttccagctcagcctcctatactggtgccgaaacacttggaggcaacactgtcgaatccactggcgatagactggagctgaacgtgcccttcgaagttcctagcccctag

SEQ ID NO: 77977 - DNA, 894 bp, Artificial Sequence
  derived and/or modified sequence
atggattgccaggagaacgaatattgggatcagtgggggcgatgcgttacctgccagcgctgtggtcctggccaggagttaagcaaggactgcggctacggcgagggcggtgatgcatattgcacagcctgtccacccagacgctataagtcctcctggggccaccaccgatgccagtcttgcataacttgcgctgtaatcaatagagtgcaaaaagtcaattgtactgccaccagtaatgctgtgtgcggagactgtctgccaagattctaccggaaaacccgaataggaggattgcaggatcaggagtgtataccctgcaccaaacagacacctacctcggaagtacagtgcgccttccagctgtctctcgtagaggctgacactccgaccgttcctcctcaagaggccacactggtcgccctcgtaagctcactcctggtagtgttcacgctggctttcctcgggctgtttttcctgtactgtaaacagttctttaaccgtcactgtcagcgcggtgggttgctgcagtttgaggctgacaagaccgctaaagaagaaagcctctttcccgttcctccgtcaaaggagacaagcgcagaaagtcaggtctccgagaatatatttcagacacagcccctgaaccctatcctggaagatgactgcagctccacaagcggattcccaacccaggagtctttcaccatggcctcgtgtacatcagagtcacattcccattgggttcactcgcccattgagtgtaccgagctagacctgcaaaagttttctagtagcgcctcctacacgggggcagaaaccctcggagggaacaccgtcgagagtacaggtgaccgcctggagcttaacgtgccctttgaggtccccagcccctag

SEQ ID NO: 77978 - DNA, 894 bp, Artificial Sequence
  derived and/or modified sequence
atggactgccaggagaatgagtactgggaccagtggggccgctgtgtgacctgccagagatgtggccctggccaggagctgagcaaggactgtggctatggagagggcggagatgcctactgcacagcctgccccccccggcgctacaagagctcctggggccaccaccgctgccagagctgcatcacctgtgctgtgatcaacagagtgcagaaggtgaactgcacagccaccagcaatgctgtgtgtggggactgcctgccccgcttctacaggaagacccgcatcggcggcctgcaggaccaggagtgcatcccctgcaccaagcagacccccaccagcgaggtgcagtgtgccttccagctgagcctggtggaggccgacacccccaccgtgcccccccaggaggccaccctggtggccctggtgagcagcctgctggtggtgttcaccctggccttcctgggcctcttcttcctgtactgcaagcagttcttcaacagacactgccagagaggaggcctgctgcagtttgaggccgacaagacagccaaggaggagagcctcttccctgtgccccccagcaaggagaccagcgctgagagccaggtgtctgagaacatcttccagacccagcccctgaaccccatcctggaggatgactgcagcagcaccagcggcttccccacccaggagagcttcaccatggccagctgcaccagcgagagccacagccactgggtgcacagccccattgaatgtacagagctggacctgcagaagttcagcagcagcgccagctacacaggagctgagaccctgggcggcaacacagtggagagcactggagaccggctggagctgaatgtgccctttgaggtgcccagcccctag

SEQ ID NO: 77979 - DNA, 894 bp, Artificial Sequence
  derived and/or modified sequence
atggactgccaggagaacgagtactgggaccagtggggccggtgcgtgacctgccagcgctgcgggccagggcaggaactgtctaaggattgcggctatggggagggcggcgatgcctactgcaccgcctgcccgcctaggcggtacaaaagcagttgggggcatcatcggtgccagtcttgtattacttgtgccgtgatcaatagggtccagaaggtcaattgtacggcgacaagcaacgccgtttgcggagactgtctaccccgtttctacagaaaaacccgtatcggagggttgcaggaccaggagtgcattccatgtaccaagcagactcctacttccgaggttcagtgcgccttccagctgtccctagttgaagctgatacacccacagtgcctccgcaagaggccactctagtggccctggtttcgagccttttggtggttttcaccctggcattcctggggctgtttttcctctactgcaaacagttctttaacaggcattgccagcggggggggctgctgcagttcgaggctgataagactgccaaggaagagagcctctttccggtgccgccatctaaggagacaagcgcagaaagccaagtctcagagaatatcttccagacacagccattgaatcccatccttgaggatgattgctcttccacctccggcttccccacgcaggagtccttcactatggcctcttgcacatcagaatctcactctcactgggtccatagcccaatcgagtgcaccgagctggatttacagaagttctcctcctcagccagctatacaggggctgagactctggggggcaataccgtagaatcaactggggataggctagaactcaacgtcccattcgaggttccctccccatag

SEQ ID NO: 77980 - DNA, 894 bp, Artificial Sequence
  derived and/or modified sequence
atggactgccaggagaacgagtactgggaccagtggggccggtgcgtgacatgccaacggtgtggcccgggtcaggaattgtctaaggactgcggatacggggaaggcggcgatgcctattgtactgcgtgtcctccaagaagatacaagtcctcctggggccatcacagatgccagagctgcatcacttgtgcagtgataaaccgcgttcagaaagtaaattgtaccgccacctccaacgcagtttgtggggactgtcttccaaggttttatcggaagacacgcattggggggcttcaagaccaggaatgcattccatgcacaaaacagacccccaccagtgaagttcaatgtgctttccagctctcactggtcgaggcagatacaccaacagtcccaccccaagaggctacccttgtcgccctggttagctctctcctggtggtttttacacttgcatttttgggcctgtttttcctctattgcaagcagttctttaaccgccactgtcagagggggggtttgcttcaatttgaggcggataagaccgctaaggaggagtccctattcccagttcccccctcgaaagaaactagtgcagaaagtcaggtctcagaaaacatcttccagacccagcctttgaaccccatcctcgaggatgactgctcctccacttccgggtttcctacgcaggagagctttacgatggcgagttgcacttctgaaagccactctcactgggtccacagtcccatagaatgcacagagcttgatcttcagaaattctcaagctctgcctcctataccggagcagaaaccctcgggggcaacactgtggagtctaccggcgatagactcgagctgaacgtgccatttgaagttccctccccgtag

SEQ ID NO: 77981 - DNA, 894 bp, Artificial Sequence
  derived and/or modified sequence
atggactgccaggagaacgagtactgggaccagtggggccggtgcgttacctgtcaaagatgtggacctggtcaggagctgagtaaggactgcggttatggtgagggaggcgatgcttactgtaccgcctgccctccccgaaggtataaatcaagctggggccaccaccggtgtcagtcttgtatcacctgcgccgtgatcaatagggtgcagaaagtcaactgcaccgctaccagcaacgccgtgtgtggcgactgcttacctaggttttatcggaaaacgaggataggcggcctccaggaccaagagtgcatcccatgcaccaagcagaccccaacatccgaggtgcagtgcgcatttcaactgtctcttgtcgaggctgacactcccaccgtgccaccacaggaggccacactcgttgccctcgtttcttctctgttggtagtgttcacccttgccttccttgggctgttcttcctgtattgtaaacagttcttcaatcgtcattgccagcggggcggcctgttgcaattcgaggctgataaaactgccaaggaggaaagtctcttccctgttccccctagcaaggaaacctcggcagagtcacaggtctctgagaatatctttcaaacgcagccactgaatccgatactggaggacgattgttcatccacttcaggatttccgacccaagaatcttttactatggcttcttgcacatccgagagtcatagccactgggtgcacagccctattgaatgcaccgaattagacctgcaaaagtttagcagttctgcctcttataccggggccgagacattggggggaaatactgtcgagtccactggcgatcgtctggagctgaatgtcccattcgaagtcccaagcccgtag

SEQ ID NO: 77982 - DNA, 894 bp, Artificial Sequence
  derived and/or modified sequence
atggactgtcaggaaaatgaatactgggaccagtggggtcgatgtgtgacgtgccagagatgtggccctggtcaggaactaagtaaggattgtggatatggcgaaggaggggacgcttactgtactgcctgtccacccagacggtacaaatcctcatggggccaccatcgctgtcagtcttgtattacctgtgccgtgatcaacagagtgcagaaggtaaattgcacagctaccagcaacgccgtctgtggcgattgccttcctcgcttttatcggaaaaccaggattggcggacttcaggatcaagaatgtatcccctgtactaagcagacacccacatccgaggtgcaatgcgctttccagctaagcctcgtcgaagcagacactcccactgttcctccgcaggaggctaccctggtcgccctcgtttcctccctgttagtcgtgtttacactcgccttcctgggcttatttttcctgtattgcaagcaattttttaataggcactgtcagcgtggtggccttctgcagttcgaggctgacaagaccgccaaggaggagagcctgttccctgtccctcccagcaaggaaaccagcgcagagagccaggtgtcagaaaacatctttcagacacagccactcaaccctattcttgaagacgactgcagcagtacctccggcttcccgactcaggagtctttcaccatggcctcttgcacctctgaatcccatagccactgggtgcacagcccaatcgagtgcactgagctggatctccaaaaattctcctctagcgcctcctatactggtgctgagaccttaggcggtaacaccgtagaatccactggagatagattagaattgaatgtcccgttcgaggtgcccagtccatag

SEQ ID NO: 77983 - DNA, 894 bp, Artificial Sequence
  derived and/or modified sequence
atggattgtcaggaaaatgaatactgggaccagtggggcagatgtgtaacatgccagcggtgtgggcctggccaagaactaagcaaagactgcgggtatggagaaggaggggacgcttactgtacagcttgcccccctaggaggtataaaagctcttggggacaccacagatgccagagttgtatcacatgtgctgtcatcaacagggttcagaaggtcaattgcacagccacctcaaatgccgtttgtggcgactgcctgccgagattttacaggaaaacccgcatcggcggactccaggaccaggaatgcatcccttgcaccaagcagacccctacaagcgaagtgcagtgtgcatttcagctttcgctcgtagaggctgacacacccaccgtcccaccacaagaagcaacattggtggcccttgtaagttcactgctggtggtctttacccttgccttcctgggcctcttctttctgtattgtaagcaattcttcaatcgacattgccagcggggagggcttctgcagttcgaggctgataaaaccgccaaagaagagtccctcttccctgtgccaccgagtaaagagacttcggctgaatcacaggttagtgaaaacatctttcagacacaacccctgaaccctatcctggaggatgactgtagcagtacatccggcttccccacacaagagagttttacaatggcttcgtgcaccagcgagagccattcacattgggtccattcaccaatcgaatgtacagaactggaccttcaaaagttttcttcctcagcctcctataccggagctgaaactctcgggggaaacaccgtggaaagcactggcgatagactggaactgaacgttcccttcgaagtgcccagcccatag

SEQ ID NO: 77984 - DNA, 894 bp, Artificial Sequence
  derived and/or modified sequence
atggattgccaggaaaatgagtattgggaccagtggggccgttgtgtcacatgccagcggtgtggcccagggcaggagttgagcaaagattgtgggtacggggagggtggcgatgcgtactgcaccgcgtgtcccccacggagatacaagagcagctggggtcatcataggtgccagagttgcattacatgcgcggtgattaatcgcgtccagaaagttaattgtaccgccactagtaatgccgtgtgcggggattgtctacccagattttatagaaagaccagaatcggcggactccaggatcaggagtgtatcccttgcaccaaacaaacgccgacctccgaagttcagtgcgccttccaattgtcattggtggaggctgacactcccacagtgcccccacaggaggccacattggtggccctcgtgagttccctgctcgtggtcttcaccctggctttcttggggttgtttttcctgtactgcaagcagtttttcaaccgtcattgtcagaggggcggattgctgcagttcgaggccgacaagaccgccaaggaagagagtcttttccctgtccccccttcaaaagagacctctgcggagtcccaagtctctgaaaacatttttcagacccagcctcttaaccctattctggaagatgattgctcctccacttcgggctttcccacgcaggaaagtttcacgatggcaagctgcactagcgagtctcattcacactgggtccattctccgattgaatgtaccgagttagatttgcaaaagttctcctcaagcgcctcctacaccggcgctgagaccctgggtggcaataccgttgagagcaccggagatagacttgaactgaacgttccttttgaggtcccatccccctag

SEQ ID NO: 77985 - DNA, 3418 bp, Artificial Sequence
  derived and/or modified sequence
ccggagtcccatttgggagcaagagccatctactcgtccgttaccggccttcccaccatggattgccaagaaaatgagtactgggaccaatggggacggtgtgtcacctgccaacggtgtggtcctggacaggagctatccaaggattgtggttatggagagggtggagatgcctactgcacagcctgccctcctcgcaggtacaaaagcagctggggccaccacagatgtcagagttgcatcacctgtgctgtcatcaatcgtgttcagaaggtcaactgcacagctacctctaatgctgtctgtggggactgtttgcccaggttctaccgaaagacacgcattggaggcctgcaggaccaagagtgcatcccgtgcacgaagcagacccccacctctgaggttcaatgtgccttccagttgagcttagtggaggcagatacacccacagtgccccctcaggaggccacacttgttgcactggtgagcagcctgctagtggtgtttaccctggccttcctggggctcttcttcctctactgcaagcagttcttcaacagacattgccagcgtggaggtttgctgcagtttgaggctgataaaacagcaaaggaggaatctctcttccccgtgccacccagcaaggagaccagtgctgagtcccaagtgagtgagaacatctttcagacccagccacttaaccctatcctcgaggacgactgcagctcgactagtggcttccccacacaggagtcctttaccatggcctcctgcacctcagagagccactcccactgggtccacagccccatcgaatgcacagagctggacctgcaaaagttttccagctctgcctcctatactggagctgagaccttggggggaaacacagtcgaaagcactggagacaggctggagctcaatgtgccctttgaagttcccagcccttaactctaatgaggtctcttgggcccctggcagccttgcccagttgttctctctggactctgttcctataccacaacagcagcaggggcctgaaatgtgatgtccacaagagctaataccctacagatggggcatatcctatcccatcccaccagaggattgattctccatttcacaaggactgatctggagcatttcttgcttcccttttgtagtctggggagccagattccacattcatgggactaccagacatgttcctagctcaacttgattatagagaagaggagagaggacagtgaatggggtagggttttcatgtctgcatttttggtcaggtaagcctctcaaaattgtgttggcacatctacctagcactttagggacaaaatcaaacccttctccccttttagctcctccacactgtctccctcctcaacacacacacacacacatacacacacatatacatagacacacaaacacacacacacacattaatatctatcttgggggaggcctcgtgccataattcccaagttcatgtctcagactgctgcattgcagcatgaggcagggcaaacactttccctctagatccctggggcctcaccctgtatttgaggttctcaccaccctcagcagggagaagggctgaagttcgccattttggaaccttacagaacatttctgagccaaagtaatcttccttctggggcctgagttccccaaactaccccacagcagtccctcaaagacagccctcaatccatgtagggacatctgagtatgcctctttctattgaaatgtcaattcaatcccagctttctcaccaccgttcccctttgattctttctcaattgtctttttgcctttagctcccacctatacatctcatgctcagagaaaaacaagttccttagaggttgtattctttattctccaagaatctgtctgaaacttgtacagctagttcctgtcccacaactattaagtggtttattaagtacattaggcagaatgtgcacttcatcaccaggttctagctctggcaaaggagtgctgtctacagcaagatttttgcttttagaattttattaactacatcttttgggttcatccatctacaaacactgattaagggcccctggggcaaccaattgatcagattactaaaaggacttgggaaaaagcaaaaaggtcccattgtactggactgaggattagaagcaattgaaatacaagcctgtaccaagcaagcagcctggccccacacaggtattagcaaatatgtggtaaccaaggttttaggccttggcctttaggtttcctgttttttttttgtttttgtttttgtttttgtttttctgcaacaggttattcttatctcactggctttcactgatcatgtttagaccttctggtagaagaaataatatccagacaggggatgatttggcttcagcaggctgcaggtgttcaaaggttgccatgtggctggcagtggttcaagcccacatttgacactgctgctctagaggaaagataatgatggtaacacagtaataataataataataacaaaaatatgataaagtgaaagagtaagacttcttcagtgtgcttgctcatggcatgaatgctatgtggacagcccaagccatacccagaatcaccttaattccaactttttgaggttcagcaattggaggtggcaattggctttgcattttaaagtatttcgggtaaaggtgaagtgaaggattttcgtctttataatttctgtttggccatggcaaataccatagttgagtatttgcttcaggagagttctttttacagttttacttttcaatgctgaggcatatttctttgagcactgtgcttttatgtgtctttctacaaaggggttattggtcagtggaagaacaaagtacacttgataaaaacattttcaacatacattgagcctaaacagcagttaagttgtctctaaatgaactagcaaaaaaaaaaaatgtagtttttgtttgtaaggaaggggaggtatttcctgagaatgaatttttttttttttggattactgtttttctctccatataccttgacttggattttgacaggagggagcctgggaaaataattttttcctccaagattctcagatccaggttaggaaaggattcagcactacagcatacccctctacaacatacagccctgtcacattgagatcataatccctcctgtcccactcctctctaccaaccccaccctactagctaggtcttcagtgttttacattgaatattggtacattttaattattttttctcataaatgggttatttatagaaattttgttaactcttgagccatatgcatgtgtagatactggcagggctatgtttgtttatgatgctctgcaaacatttcatattggccaataaacagaaatatatccaaaaa

SEQ ID NO: 77986 - DNA, 3367 bp, Artificial Sequence
  derived and/or modified sequence
gccttcccaccatggattgccaagaaaatgagtactgggaccaatggggacggtgtgtcacctgccaacggtgtggtcctggacaggagctatccaaggattgtggttatggagagggtggagatgcctactgcacagcctgccctcctcgcaggtacaaaagcagctggggccaccacagatgtcagagttgcatcacctgtgctgtcatcaatcgtgttcagaaggtcaactgcacagctacctctaatgctgtctgtggggactgtttgcccaggttctaccgaaagacacgcattggaggcctgcaggaccaagagtgcatcccgtgcacgaagcagacccccacctctgaggttcaatgtgccttccagttgagcttagtggaggcagatacacccacagtgccccctcaggaggccacacttgttgcactggtgagcagcctgctagtggtgtttaccctggccttcctggggctcttcttcctctactgcaagcagttcttcaacagacattgccagcgtggaggtttgctgcagtttgaggctgataaaacagcaaaggaggaatctctcttccccgtgccacccagcaaggagaccagtgctgagtcccaagtgagtgagaacatctttcagacccagccacttaaccctatcctcgaggacgactgcagctcgactagtggcttccccacacaggagtcctttaccatggcctcctgcacctcagagagccactcccactgggtccacagccccatcgaatgcacagagctggacctgcaaaagttttccagctctgcctcctatactggagctgagaccttggggggaaacacagtcgaaagcactggagacaggctggagctcaatgtgccctttgaagttcccagcccttaactctaatgaggtctcttgggcccctggcagccttgcccagttgttctctctggactctgttcctataccacaacagcagcaggggcctgaaatgtgatgtccacaagagctaataccctacagatggggcatatcctatcccatcccaccagaggattgattctccatttcacaaggactgatctggagcatttcttgcttcccttttgtagtctggggagccagattccacattcatgggactaccagacatgttcctagctcaacttgattatagagaagaggagagaggacagtgaatggggtagggttttcatgtctgcatttttggtcaggtaagcctctcaaaattgtgttggcacatctacctagcactttagggacaaaatcaaacccttctccccttttagctcctccacactgtctccctcctcaacacacacacacacacatacacacacatatacatagacacacaaacacacacacacacattaatatctatcttgggggaggcctcgtgccataattcccaagttcatgtctcagactgctgcattgcagcatgaggcagggcaaacactttccctctagatccctggggcctcaccctgtatttgaggttctcaccaccctcagcagggagaagggctgaagttcgccattttggaaccttacagaacatttctgagccaaagtaatcttccttctggggcctgagttccccaaactaccccacagcagtccctcaaagacagccctcaatccatgtagggacatctgagtatgcctctttctattgaaatgtcaattcaatcccagctttctcaccaccgttcccctttgattctttctcaattgtctttttgcctttagctcccacctatacatctcatgctcagagaaaaacaagttccttagaggttgtattctttattctccaagaatctgtctgaaacttgtacagctagttcctgtcccacaactattaagtggtttattaagtacattaggcagaatgtgcacttcatcaccaggttctagctctggcaaaggagtgctgtctacagcaagatttttgcttttagaattttattaactacatcttttgggttcatccatctacaaacactgattaagggcccctggggcaaccaattgatcagattactaaaaggacttgggaaaaagcaaaaaggtcccattgtactggactgaggattagaagcaattgaaatacaagcctgtaccaagcaagcagcctggccccacacaggtattagcaaatatgtggtaaccaaggttttaggccttggcctttaggtttcctgttttttttttgtttttgtttttgtttttgtttttctgcaacaggttattcttatctcactggctttcactgatcatgtttagaccttctggtagaagaaataatatccagacaggggatgatttggcttcagcaggctgcaggtgttcaaaggttgccatgtggctggcagtggttcaagcccacatttgacactgctgctctagaggaaagataatgatggtaacacagtaataataataataataacaaaaatatgataaagtgaaagagtaagacttcttcagtgtgcttgctcatggcatgaatgctatgtggacagcccaagccatacccagaatcaccttaattccaactttttgaggttcagcaattggaggtggcaattggctttgcattttaaagtatttcgggtaaaggtgaagtgaaggattttcgtctttataatttctgtttggccatggcaaataccatagttgagtatttgcttcaggagagttctttttacagttttacttttcaatgctgaggcatatttctttgagcactgtgcttttatgtgtctttctacaaaggggttattggtcagtggaagaacaaagtacacttgataaaaacattttcaacatacattgagcctaaacagcagttaagttgtctctaaatgaactagcaaaaaaaaaaaatgtagtttttgtttgtaaggaaggggaggtatttcctgagaatgaatttttttttttttggattactgtttttctctccatataccttgacttggattttgacaggagggagcctgggaaaataattttttcctccaagattctcagatccaggttaggaaaggattcagcactacagcatacccctctacaacatacagccctgtcacattgagatcataatccctcctgtcccactcctctctaccaaccccaccctactagctaggtcttcagtgttttacattgaatattggtacattttaattattttttctcataaatgggttatttatagaaattttgttaactcttgagccatatgcatgtgtagatactggcagggctatgtttgtttatgatgctctgcaaacatttcatattggccaataaacagaaatatatcc

SEQ ID NO: 77987 - DNA, 970 bp, Artificial Sequence
  derived and/or modified sequence
gttgttgctacacgtggatgtgaaatgagtcaagcggaactttgattacaaggaatttcatatactccttcccaccatggattgccaagaaaatgagtactgggaccaatggggacggtgtgtcacctgccaacggtgtggtcctggacaggagctatccaaggattgtggttatggagagggtggagatgcctactgcacagcctgccctcctcgcaggtacaaaagcagctggggccaccacagatgtcagagttgcatcacctgtgctgtcatcaatcgtgttcagaaggtcaactgcacagctacctctaatgctgtctgtggggactgtttgcccaggttctaccgaaagacacgcattggaggcctgcaggaccaagagtgcatcccgtgcacgaagcagacccccacctctgaggttcaatgtgccttccagttgagcttagtggaggcagatacacccacagtgccccctcaggaggccacacttgttgcactggtgagcagcctgctagtggtgtttaccctggccttcctggggctcttcttcctctactgcaagcagttcttcaacagacattgccagcgtggaggtttgctgcagtttgaggctgataaaacagcaaaggaggaatctctcttccccgtgccacccagcaaggagaccagtgctgagtcccaagtgagtgagaacatctttcagacccagccacttaaccctatcctcgaggacgactgcagctcgactagtggcttccccacacaggagtcctttaccatggcctcctgcacctcagagagccactcccactgggtccacagccccatcgaatgcacagagctggacctgcaaaagttttccagctctgcctcctatactggagctgagaccttggggggaaacacagtcgaaagcactggagacaggctggagctcaatgtgccctttgaagttcccagcccttaa

SEQ ID NO: 77988 - protein, 1232 aa, Artificial Sequence
  derived and/or modified sequence
MDFLLRPQPEPESLGPGTPGFPEQEEDELHRTLGVERFEEILQEAGSRGGEEPGRSYGEEDFEYHRQSSHHIHHPLSTHLPPDARRRKTPQGPGRKPRRRPGASPTGETPTIEEGEEDEDEASEAEGARALTQPSPVSTPSSVQFFLQEDDSADRKAERTSPSSPAPLPHQEATPRASKGAQAGTQVEEAEAEAVAVASGTAGGDDGGASGRPLPKAQPGHRSYNLQERRRIGSMTGAEQALLPRVPTDEIEAQTLATADLDLMKSHRFEDVPGVRRHLVRKNAKGSTQSGREGREPGPTPRARPRAPHKPHEVFVELNELLLDKNQEPQWRETARWIKFEEDVEEETERWGKPHVASLSFRSLLELRRTLAHGAVLLDLDQQTLPGVAHQVVEQMVISDQIKAEDRANVLRALLLKHSHPSDEKDFSFPRNISAGSLGSLLGHHHGQGAESDPHVTEPLMGGVPETRLEVERERELPPPAPPAGITRSKSKHELKLLEKIPENAEATVVLVGCVEFLSRPTMAFVRLREAVELDAVLEVPVPVRFLFLLLGPSSANMDYHEIGRSISTLMSDKQFHEAAYLADEREDLLTAINAFLDCSVVLPPSEVQGEELLRSVAHFQRQMLKKREEQGRLLPTGAGLEPKSAQDKALLQMVEAAGAAEDDPLRRTGRPFGGLIRDVRRRYPHYLSDFRDALDPQCLAAVIFIYFAALSPAITFGGLLGEKTQDLIGVSELIMSTALQGVVFCLLGAQPLLVIGFSGPLLVFEEAFFSFCSSNHLEYLVGRVWIGFWLVFLALLMVALEGSFLVRFVSRFTQEIFAFLISLIFIYETFYKLVKIFQEHPLHGCSASNSSEVDGGENMTWAGARPTLGPGNRSLAGQSGQGKPRGQPNTALLSLVLMAGTFFIAFFLRKFKNSRFFPGRIRRVIGDFGVPIAILIMVLVDYSIEDTYTQKLSVPSGFSVTAPEKRGWVINPLGEKSPFPVWMMVASLLPAILVFILIFMETQITTLIISKKERMLQKGSGFHLDLLLIVAMGGICALFGLPWLAAATVRSVTHANALTVMSKAVAPGDKPKIQEVKEQRVTGLLVALLVGLSIVIGDLLRQIPLAVLFGIFLYMGVTSLNGIQFYERLHLLLMPPKHHPDVTYVKKVRTLRMHLFTALQLLCLALLWAVMSTAASLAFPFILILTVPLRMVVLTRIFTDREMKCLDANEAEPVFDEREGVDEYNEMPMPV

SEQ ID NO: 77989 - DNA, 3699 bp, Artificial Sequence
  derived and/or modified sequence
atggactttctattgagaccacaacctgagcctgagtccctcgggccaggcacccctggattccctgagcaggaagaggacgaattacatcggaccttgggcgttgagagattcgaagagatactgcaggaagccggatccagaggaggcgaggagcccgggcgctcctacggcgaggaggacttcgaatatcacagacagagcagtcatcatatccatcatcccctgtccactcatctgcccccagatgcccggaggaggaaaacaccccagggacctggaagaaagcctcggcgcagaccgggggccagtcccaccggggagacccctaccatcgaggagggcgaggaggacgaggatgaagcctcagaggccgagggtgccagggcactgacccagccctctcctgtatcaactccaagctccgtgcagttttttcttcaggaagatgacagcgctgaccgaaaggccgagcgtacatctccctcgtcccctgcccctcttccacaccaagaggctacaccgcgggcatccaaaggggctcaagccggcactcaggtggaggaagctgaagccgaggccgtggccgtcgcctcaggcacagcaggtggcgatgacggaggcgctagtggaaggcctctgcccaaagcgcaacccggccaccgctcatataaccttcaggagcggcgacggatcggatctatgacaggcgcggaacaagccttgcttccgagggtgcccactgacgaaatcgaggcccagacactggccacggcagacttggacctcatgaaaagtcaccgtttcgaggacgtgccgggagtgcgcaggcaccttgttcgcaaaaacgccaaggggagcacccaaagtggaagagagggtcgcgaaccagggcctaccccacgcgcccgtcctcgagcaccccacaaaccgcacgaggtgtttgtagaactcaacgagctgctgctggacaaaaaccaggagccacaatggcgtgagaccgctcgatggatcaaattcgaagaggatgtggaagaggagaccgagcggtggggaaagcctcatgttgctagcttgagcttcaggtccctgttggaactgcggagaacacttgcacatggtgctgtgctgttggacctggatcagcaaacactcccgggggttgcccatcaagtggttgagcagatggtcatctccgaccaaatcaaagctgaggacagagccaacgtcttgagggccctccttctgaaacattctcacccttctgacgagaaagatttctcatttccgaggaatatcagtgcagggtccctgggctccctgctagggcatcaccatggacaaggggcagaatccgatcctcacgtgactgaacccctcatgggtggggtccccgaaaccaggctggaggttgagcgggaacgcgagctccccccccccgcaccaccagctgggattactcgaagcaagtctaagcacgagttgaagttgttggaaaagatacccgaaaatgctgaggcaacagtggtgcttgtggggtgtgttgagtttctgtccagaccaactatggcttttgtaagactgagagaggctgtcgaattggacgctgtgcttgaggtaccagtgcccgtccgcttcctgttcctgcttttaggtccatcctccgccaacatggactatcacgagataggccgcagcatttcaacattaatgtctgataaacagttccatgaggcagcttacctggccgacgagagagaagacctgctgaccgcaataaacgccttcctggactgctcagtagtgctcccgccttctgaagttcagggcgaagaactcctacggtcagtcgctcatttccagagacagatgctcaagaaacgggaggaacagggcaggctcctaccaactggcgccggattggagcccaaaagcgcccaggacaaggccctcctccagatggtagaggccgctggcgccgccgaggacgacccactccggcgcactgggaggccatttgggggtttaatcagagacgtacgtcgtaggtacccccactacctcagtgactttcgcgacgccctcgatccccagtgtctagcagcggtgattttcatttattttgctgcactgagtcccgcaatcacctttggcgggctccttggtgagaaaacacaagacctcattggtgtttctgagctgatcatgagcactgccctgcagggagtggtgttctgtctactaggcgcacagcccttactggtgatcggattcagtggccccctgttggtgttcgaggaagcctttttctccttctgctccagcaatcacctggagtatctagtcggcagggtgtggattggattttggctggtgttcctggccttgctgatggttgctctggagggtagcttcctggtacgcttcgttagcaggttcacgcaggagatctttgcttttctaataagtctgatctttatttatgaaactttttataaacttgtgaagattttccaggaacatcccttacacgggtgctccgccagcaactcatccgaagtagatggtggtgagaatatgacatgggctggcgccagacccacattaggtcctggaaaccggtcactagcaggacagtcaggccaggggaagccccgcggacagccaaataccgctttgctgtccctggtactgatggcagggactttttttatcgccttcttcctgagaaaattcaaaaacagtcgcttctttccaggcaggatccggcgcgtaatcggcgatttcggagtccctatcgcaatcttgataatggttctggtggactatagtatcgaggacacttacacccagaaactctcggttccttctggtttcagtgtgaccgccccagaaaaacgtggttgggtgataaaccccctcggggagaagagtccgtttcccgtgtggatgatggtggccagtctgctacctgccattctggttttcatactgatctttatggagacccaaattacaactttgatcatctctaaaaaggagaggatgctacaaaagggatccggatttcatttggatctgctgctcattgtcgctatgggagggatctgcgctctattcggactgccctggcttgcagccgccactgtaagaagcgttacacatgccaatgcactgactgtgatgtccaaggcggtggctccaggcgataaacccaaaatccaagaggttaaggagcagagggtgaccggtctcctggtggccttgctcgtggggctttccatagtgataggtgacctcctgcggcaaatcccgctggccgtattattcggcatcttcttgtacatgggggtgacgagccttaatggcattcagttctacgaacgcctacacctgttgctgatgcccccaaagcatcatcctgacgttacttacgtgaagaaagtcaggacattgaggatgcaccttttcaccgccctgcagctgctgtgcctggccctgctgtgggctgttatgtcaacagcggcttccctcgcattccctttcattttaatcctgacagtgcctctgagaatggtagtgctgacccgcattttcactgacagggagatgaagtgcctcgacgccaacgaggccgaacctgtctttgacgagcgggagggtgtggatgagtacaacgaaatgcccatgccagtgtag

SEQ ID NO: 77990 - DNA, 3699 bp, Artificial Sequence
  derived and/or modified sequence
atggacttcctgctgcggccccagcctgagcctgagagcctgggccctggcaccccaggcttccctgagcaggaggaggatgagctgcacaggaccctgggcgtggagagatttgaggagatcctgcaggaggccggcagcagaggaggagaggagcccggccgctcctatggagaggaggactttgagtaccaccggcagagcagccaccacatccaccaccccctgagcacccacctgcccccagatgcccggcggaggaagaccccccagggccctggcaggaagcccaggagaagacctggggccagccccaccggggagacccccaccatcgaggagggggaggaggatgaagatgaggccagcgaggccgagggcgcccgggccctgacccagcccagccctgtgtccacccccagctctgtgcagttcttcctgcaggaggatgacagcgctgacaggaaggccgagaggaccagccccagcagccctgcccccctgccccaccaggaggccaccccccgggccagcaaaggagcccaggccggcacccaggtggaggaggccgaggccgaggccgtggccgtggccagcggcacagctggaggagatgatggaggagccagcggccggcccctgcccaaggcccagcccggccacaggagctacaacctgcaggagcggcggcgcatcggctccatgaccggggctgagcaggccctgctgccccgggtgcccacagatgaaattgaggcccagaccctggccacagctgacctggacctgatgaagagccacagatttgaagatgtgcctggggtgcggcggcacctggtgaggaagaatgccaagggcagcacccagagcggccgggagggccgggagcccggccccaccccccgggcccggccccgggccccccacaagccccatgaggtgtttgtggagctgaatgagctgctgctggacaagaaccaggagccccagtggagggagacagcccgctggatcaagtttgaggaggatgtggaggaggagacagagcgctggggcaagccccacgtggccagcctgtccttccgcagcctgctggagctgcggaggaccctggcccatggagctgtgctgctggacctggaccagcagaccctgcccggggtggcccaccaggtggtggagcagatggtgatcagtgaccagatcaaggcagaagatcgggccaacgtgctgcgggccctgctgctgaagcacagccaccccagtgatgagaaggacttctccttccccaggaacatctctgctggcagcctgggcagcctgctgggccaccaccacggccagggcgctgagagtgacccccacgtgacagagcccctgatgggcggcgtgcctgagacccggctggaggtggagcgggagcgggagctgcccccaccagcccccccagctggcatcaccaggagcaagagcaagcatgagctgaagctgctggagaagatcccagaaaatgctgaggccaccgtggtgctggtgggctgtgtggagttcctgagccggcccaccatggcctttgtgcggctgcgggaggccgtggagctggatgctgtgctggaggtgcctgtgcctgtgcgcttcctgttcctgctgctgggccccagcagcgccaacatggactaccatgaaattggccgcagcatcagcaccctgatgtctgacaagcagttccatgaagctgcctacctggctgatgaaagagaggacctgctgacagccatcaatgccttcctggactgcagcgtggtgctgccccccagcgaggtgcagggcgaggagctgctgcggtctgtggcccacttccagaggcagatgctgaagaagcgggaggagcagggccgcctgctgcccactggagctggcctggagcccaagagcgcccaggacaaggccctgctgcagatggtggaggccgccggggctgctgaagatgaccccctgcggaggacaggccggccctttggaggcctcatcagagatgtgagaagacgctacccccactacctgagtgacttcagagatgccctggacccccagtgcctggccgccgtcatcttcatctactttgctgccctgagccctgccatcacctttggaggcctgctgggggagaagacccaggacctgattggagtgtctgagctgatcatgagcacagccctgcagggcgtggtgttctgcctgctgggcgcccagcccctgctggtgattggcttcagcggccccctgctggtgtttgaggaggccttcttctccttctgcagcagcaaccacctggagtacctggtgggccgggtgtggattggcttctggctggtgttcctggccctgctgatggtggccctggagggcagcttcctggtgcgctttgtgagccgcttcacccaggagatctttgccttcctgatcagcctcatcttcatctatgagaccttctacaagctggtgaagatcttccaggagcaccccctgcacggctgcagcgccagcaacagcagcgaggtggatggaggagagaacatgacctgggccggggcccggcccaccctgggccctggcaacagaagcctggccggccagagcggccagggcaagccccggggccagcccaacacagccctgctgagcctggtgctgatggccggcaccttcttcatcgccttcttcctgaggaagttcaagaacagccgcttcttccctggccgcatcagaagagtcatcggggactttggagtgcccatcgccatcctgatcatggtgctggtggactacagcattgaggacacctacacccagaagctgtctgtgcccagcggcttctctgtgacagcccctgagaagaggggctgggtgatcaaccccctgggggagaagagccccttccctgtgtggatgatggtggccagcctgctgcctgccatcctggtgttcatcctgatcttcatggagacccagatcaccaccctcatcatcagcaagaaggagaggatgctgcagaagggcagcggcttccacctggacctgctgctgattgtggccatgggcggcatctgtgccctgtttggcctgccctggctggccgccgccaccgtgcgctctgtgacccacgccaatgccctgactgtgatgagcaaggctgtggcccctggggacaagcccaagatccaggaggtgaaggagcagagggtgacaggcctgctggtggccctgctggtgggcctgagcatcgtgattggagacctgctgcggcagatccccctggccgtgctgtttggcatcttcctgtacatgggcgtgaccagcctgaatggcatccagttctatgagcggctgcacctgctgctgatgccacccaagcaccacccagatgtgacctacgtgaagaaggtgaggaccctgaggatgcacctgttcaccgccctgcagctgctgtgcctggccctgctgtgggccgtgatgagcacagctgccagcctggccttccccttcatcctgatcctgactgtgcccctgaggatggtggtgctgacccgcatcttcacagaccgggagatgaagtgcctggatgccaatgaggccgagcctgtgtttgatgagcgggagggcgtggatgagtacaatgagatgcccatgcctgtgtag

SEQ ID NO: 77991 - DNA, 3699 bp, Artificial Sequence
  derived and/or modified sequence
atggacttcctgctgcggccccagcccgagcccgagagcctgggcccaggaacacccggctttccagagcaagaggaagatgaactgcatcgaaccctgggcgtcgaaagatttgaggaaatcttgcaagaggcgggcagtaggggtggcgaggagcccggacgttcctacggggaggaggacttcgaataccacagacagtcgtcccaccacatccaccacccactctccacccaccttcccccggatgcgagaagaagaaagacccctcagggcccagggcgcaagccccggagaaggccgggagcctctccaaccggagagaccccgaccatcgaggagggcgaggaggacgaagacgaagcctccgaggctgagggggctcgggccctgacccagccatcaccagtaagcacgccgtcctccgtgcagttcttcctgcaagaagatgattcggcagatcgaaaagccgagaggacatcgccatctagtcctgcgcccctgcctcaccaggaggctacacctcgggcgtctaaaggcgcccaggcaggaacacaagttgaggaggccgaagctgaagccgtggcggtcgctagcgggacagcaggaggtgatgatggcggcgcaagcggccggcctttaccaaaagcgcagccagggcaccggtcttataacctgcaggagagaagacggatcggcagcatgacaggagccgaacaggccttgcttcccagagtgccaaccgatgagattgaggcccaaacactggctaccgctgatctggaccttatgaagagccataggtttgaggatgtgccaggtgtgaggagacatctggtgcggaagaatgcaaaagggtctacacaaagtggtagagaagggagggagcctggtccgaccccccgggccaggcctcgggctccccataaaccgcatgaggtgtttgtggaattgaacgaactgctgctcgacaaaaaccaggagccacaatggagggagacagcaaggtggatcaaattcgaagaagacgttgaggaagagactgaaagatggggcaagccccacgtggcatccctttctttcaggtctctgctggagctgaggcgcaccctcgcccatggagccgtccttctggaccttgatcagcagactctgccgggagtggcgcatcaggtagtggagcagatggtcatctcggaccagatcaaagccgaggatagagccaatgttctgcgggcgctactgttgaagcatagccatcctagcgacgagaaagatttctccttccccaggaacatatcagccggttcgcttgggagcttattggggcatcatcacgggcaaggggccgagagtgatccacatgtgactgaaccactgatgggaggtgtacctgagacgcgactcgaagtggagcgcgagagggagctgcccccacccgcaccccctgccggcatcactcggtctaagtctaaacacgaactgaaactgttagaaaagattcctgaaaacgccgaagcaacagtggtgcttgtgggttgcgtggaattcctatccagacctacaatggccttcgtgcgcctgagagaggcagtggagctggatgctgttttagaggtgcccgtgcccgttagatttttatttcttctgctcggtccgtcctccgccaacatggactatcacgagatcggccggtccataagcactcttatgtccgacaaacagtttcacgaagctgcatatctggccgacgaaagagaagacctgctgacagctatcaatgcgttcctggattgctcagtggtgctgccgccctctgaagtccagggtgaagaactgctaaggtccgtcgcgcacttccagcgccaaatgttgaagaaacgcgaagagcagggacggctcctgccgaccggagccggtcttgaacctaagtctgcgcaggacaaagcattgctacagatggtggaggccgcgggagccgccgaagatgatcctctgcggcgaacaggacggccattcggggggcttattcgggacgttaggcgaagatatccacactacttgagcgactttagggacgccttagacccgcaatgcctggctgctgtgatttttatttacttcgctgctttatctcctgccattacttttggaggcctgctgggcgaaaagacccaggatttgatcggtgtgagcgagctcatcatgtcaaccgctctgcagggcgtagtcttttgcttgttgggagcccagcccctgctcgtgatcgggttctcaggcccactgctagtgtttgaggaagccttcttttctttttgttcatctaatcatctagaatacttggtgggtcgcgtgtggattgggttctggttagtgttccttgcactgttaatggtggctctggaaggctcatttctggtcaggttcgtatcccgttttacgcaagaaatcttcgccttccttatctcactgatttttatctacgaaacattctacaaactggttaaaattttccaggagcatcctctgcacggctgcagcgcctctaatagttctgaagtagacgggggcgagaacatgacttgggctggcgctagaccaacccttggaccgggcaataggtcattagccggccagagtggccaagggaaaccaagggggcagccaaataccgcgttgctctcgctagttctgatggccggcacattttttattgccttttttctcagaaaattcaaaaattccagatttttccctggcaggatccggagagttattggcgatttcggcgttccaatcgccatcctgataatggtgctggtagattattctatcgaggacacttatactcagaagctgagtgttccaagcggattctccgtaaccgcacccgaaaagaggggatgggtcattaacccactgggggagaaatccccattccctgtgtggatgatggtggcttctctactgcccgccatccttgtgttcatccttattttcatggagacccagattaccactctcatcattagcaagaaagaaaggatgctccaaaaaggctcaggcttccatcttgacctgctgctcattgtggcaatgggcgggatctgtgcccttttcggcttgccctggttagcagcagcaactgttcggtccgtaacccatgccaatgccctcaccgtcatgagtaaggctgtggccccaggagacaaaccaaaaatccaggaggtcaaggaacaacgtgtgacaggacttttggtggcccttctggtaggattgtctattgttattggcgacttgctgcgtcagattccactcgctgtgctcttcgggatatttttatatatgggggttacaagtctaaatggaattcagttctacgaacggctacacctgcttttgatgccaccaaaacaccatccagacgtgacttatgttaaaaaggtaaggaccttacgtatgcatctcttcaccgcactgcagcttctgtgcttggccctcctctgggcagtaatgtccacggcggcttccctcgccttccccttcatcttgatcctaactgtgccactgcgcatggtggtcctgacccggatctttacagatagagagatgaagtgcctggacgccaacgaggccgagcccgtctttgacgaacgggagggggtcgacgaatataacgaaatgcccatgcccgtgtag

SEQ ID NO: 77992 - DNA, 3699 bp, Artificial Sequence
  derived and/or modified sequence
atggatttcttgctgcgacctcagcccgagcctgaatcactgggccctggtacccccggtttccctgagcaagaggaggacgaacttcatagaactctgggcgttgagcgttttgaagagatcttgcaggaagcgggtagccgcggaggggaagagcctggcaggagctacggagaagaagactttgagtaccatcgacagtcgtcacatcatattcaccatccactttccacacacctgccaccagacgccagacggaggaagaccccacaagggcctggaaggaagccacgaaggcggccaggagcatctcctaccggcgaaacaccaacaattgaagaaggtgaagaagacgaagatgaggcttcagaagctgagggggctagagctctgacgcagccaagcccagtatccactcccagctccgtgcagttttttctgcaggaggatgactcagccgatcggaaggcggaaaggactagtccctcctctcccgcaccactcccgcaccaggaagctactccacgggcttcaaagggtgcccaggccggtactcaggtcgaggaggccgaagcagaggccgtagccgtcgcctccggcacagccggtggggacgacggcggtgcatctggaaggcccttaccaaaggcccagcctggccaccgttcatacaaccttcaggaacgcaggcggattggcagcatgaccggcgcagagcaggctctcttgccgagggtccccacagatgagattgaagcacaaactcttgccactgccgatttggacctcatgaaaagccaccgatttgaggatgttcctggcgtcaggcggcatttagttcgcaagaatgccaaaggcagcacccagagtggacgggaaggcagagagcctgggcctacccctcgagctcggccacgagccccacacaaacctcacgaggtgttcgtagagcttaacgagctcctgcttgataagaaccaggagccgcagtggcgcgagactgccagatggattaaatttgaagaagatgttgaggaagaaaccgagaggtggggcaaaccccacgtcgcttcactgagcttccgctctttgcttgagttacggagaacactcgcccacggcgcagttctgttggatctggaccaacagacgctgccgggagtcgcgcaccaggtagtggaacagatggtgatttccgatcagatcaaagctgaagacagagctaatgttctcagggccttgctgctcaagcacagccacccatccgatgagaaggatttctcatttcctcgcaacatttctgctggatctctcgggtccctgctgggacaccaccacggccagggcgctgagtccgacccacatgtgacagaacctcttatgggcggagtcccagaaacccggctagaggtggagcgggaacgagagctccctcctccagccccacccgctggaataacgcgcagcaagtctaaacacgaattaaagctgctggagaaaattcccgagaacgcagaggctactgttgtgttagttggttgcgtggaatttctgagccgacctactatggctttcgttcgactgcgcgaagcggtggaacttgacgctgtcctggaagttcccgtgccagtgaggttccttttcctgctcctaggaccgtcatctgcaaacatggactatcacgaaattggacgatcaataagtactctcatgagcgataagcaattccacgaggccgcttatttggcggacgagcgcgaggatctgctaacggccattaatgcttttcttgactgtagtgtagtgctgccgccaagtgaggtgcaaggagaggagttgctgcgatctgtagcccactttcagcggcagatgctgaagaaacgggaagagcagggcaggttgctgcccaccggcgctggcctggagcctaaaagcgcccaagacaaggcgcttttacaaatggtggaagccgcaggggctgctgaggacgatcctctgagaagaacaggaagaccgtttggtggcctgatacgggatgtcagacgacgctacccccattatctgtctgactttcgggatgctcttgaccctcagtgtcttgcggctgtaatatttatttacttcgctgcgctgtctcccgcaattacttttggtggcctgctgggagaaaagactcaggacctaattggagtgtccgagctcattatgagcactgctcttcagggcgtcgttttctgcttgctgggggctcagcctctgctggtgatcggcttcagcggtccactgttggtattcgaggaagccttcttctccttttgtagctcaaatcatctagaatatttagtggggagagtgtggataggattttggctcgtcttcttagcgctgcttatggtggccctagaaggctctttcctggtgaggtttgtcagcaggtttacgcaggagatcttcgcatttctaatcagtctgatcttcatttacgaaacattctacaagctcgtcaagatattccaagaacaccccctacatggatgctccgcatccaacagttccgaagttgacgggggtgagaatatgacctgggccggagcaaggcctactctgggcccaggaaacaggtctctggcgggacagtccggccagggtaagcctagggggcagcccaacacagccctgctttccctggtacttatggccggaacattcttcattgcttttttcctgcggaagttcaaaaactctcggttttttcccggacgcattcggcgtgtcataggtgacttcggcgttcccattgcgattctcataatggttctggtggactatagtatcgaggatacatatacgcaaaaattgagtgtgccctcaggcttcagcgtgaccgcgccagagaagcggggttgggttatcaacccactgggtgaaaagtccccttttcccgtctggatgatggtagcttccctgctgccagctatcttagtctttattctcatctttatggaaacacaaataacaaccctcataatcagtaagaaagaacgaatgttgcaaaaagggtccgggttccatctggacctgttattaattgtggccatgggagggatttgcgccctcttcggcctgccctggcttgctgccgcaaccgttcggtcagtaacgcacgctaacgcactgacagtgatgtccaaagccgtagctcccggtgacaaacctaagattcaggaggtgaaagagcagcgcgtgactggcctcctggtggctcttctggtaggactttctatcgttattggggaccttctcagacaaattcccctggcagtgctgtttggcatcttcctgtatatgggtgtgacctctttgaatgggatccagttctacgagcgactgcacctgctgctaatgccaccaaagcatcatcccgatgtgacgtatgtgaagaaagtccgaaccctaaggatgcacctgttcaccgctctgcagctgctctgccttgctctcctatgggcggtcatgagcaccgccgcaagcctggccttcccgtttatcctcatcctgactgttcctctgaggatggttgtccttacaaggatctttactgatcgagagatgaaatgtcttgatgctaacgaagcagagcccgtgtttgacgaaagagaaggtgtggacgagtacaatgagatgcctatgccagtatag

SEQ ID NO: 77993 - DNA, 3947 bp, Artificial Sequence
  derived and/or modified sequence
gctattggtcacactggcccagaggggcacgtgactgggaaggggcacaggctggtcccctccccctccttctcaggttcacccctgccggccatggacttcctcctgcggcctcagccagagccagagagcttgggccctgggacgcctgggttccccgagcaggaggaagacgaacttcaccgcaccctgggcgtggagcggtttgaggagatcctacaggaggccgggtctcgtggaggggaggagccaggccgcagctatggggaggaagactttgagtaccaccgccagtcctcccaccacatccatcacccactgtccacccacctgcctccggatgcacgccgccgcaagacaccccagggcccaggacggaagcctcgaaggcgcccgggagcctccccgactggagaaaccccgaccattgaggagggggaggaagatgaggatgaggccagcgaggctgagggggcccgggctctcactcagccgtcccctgtctccacaccctcctcggtgcagttctttctccaagaggatgacagtgctgaccggaaggcagagaggaccagtccatcttcccctgcaccactgccccaccaggaggcgactcctcgggcctccaaaggggcccaggctggaacccaggtggaggaggcggaggcggaggcggtggcggtggccagtggcactgcagggggtgacgacgggggtgcctcggggcgccccctgcccaaagcccagcctgggcaccgcagctacaaccttcaggagaggaggcgcatcgggagcatgactggggctgagcaggcactgctgccccgggtccccacggatgagattgaggcccagacgctggccacggccgacctagacctcatgaagagtcaccggtttgaggacgttcctggggtgcggcggcacttggtgcggaagaatgccaaaggttccacacagagtggccgagaagggcgggagcctggccccacacctcgggcccgaccccgggccccccacaagccccatgaggtgtttgtggagctgaatgagttgctcctggacaaaaaccaggagccccagtggcgggagacagctcgctggatcaaatttgaagaggacgtggaggaggagactgagcgctgggggaagccccacgtggcctccctctccttccgcagtctcctggagctccgcaggaccctggcccatggggctgtgctcttggatctggaccagcagaccctgcccggagtggcccaccaggtggtggagcagatggtcatctctgaccagatcaaggccgaggacagggccaacgtgctgcgggctctgctgttgaaacacagccacccaagtgatgagaaggacttctccttcccccgcaacatctcagctggctccctgggctccctgctggggcatcaccatggtcagggggctgagagtgacccccacgtcaccgagcctctcatgggaggtgttcctgagacccggctggaggtggagcgagagcgtgagctgccgcctccagcaccaccagctggcatcacccgctccaagtccaagcacgagctgaaactgctggagaagattcctgagaatgccgaggccacggtggtccttgtgggctgcgtggagttcctctcccgccccaccatggcctttgtgcggctccgggaggctgtggagttggacgcagtgttggaggtgccggtgcctgtgcgtttcctcttcctgctgctgggcccgagtagtgccaacatggactaccacgagatcggccgctccatctccaccctcatgtcagacaagcaattccacgaggcagcctacctggctgacgagcgggaggacctgctgacggccatcaacgccttcctggactgcagcgtggtgctgccgccttcagaagtgcagggcgaggagctgctgcgctctgtggcccacttccagcgccagatgctcaagaagcgagaggagcagggccggctgctacctacaggggctgggctggagcccaaatctgcccaagataaggcgctcctgcagatggtagaggcggcaggggcagctgaagatgatccccttcggcggacggggcggccctttggggggctgatccgagatgtgcggcgccgctatccccactacctgagtgacttccgagatgcacttgaccctcagtgcctggccgcagtcatcttcatctactttgccgccctgtctcctgccatcacctttggggggctgctgggagagaagacgcaggacctgataggggtgtcggagctgattatgtccacagcgctccagggcgtggtcttctgcctgctgggtgcccagcccctgttggtgatcggcttctcagggcccctgctggtctttgaggaggccttcttctcgttctgtagcagcaaccacctggagtacctggtgggccgtgtgtggatcggcttctggctggtgttcctggccctgctcatggtggccctggaggggagcttcctggtccgcttcgtctcccgcttcacccaggagatcttcgccttcttgatctcactcatcttcatctatgagaccttctacaagctggtgaagatcttccaggagcaccccctgcatggctgctcagcctccaacagctcagaggtggacggcggtgagaacatgacatgggccggggcaagacccacgctggggccgggcaacaggagcttggctgggcagtctgggcaggggaagccccggggccagcccaacacggccctgctgtcgctggtgctcatggccggcaccttcttcatcgccttcttcctgcgcaaattcaagaacagccggttctttcctggccggatccggcgggtgattggggactttggggtgcccatcgccatcctcatcatggtgcttgtggattacagtattgaggacacctatacccagaagctgagcgttcccagtggattctcggtgactgccccagaaaagaggggctgggtcatcaaccccctgggagagaagagccccttccctgtgtggatgatggttgccagcctgctgcccgccatcctggtcttcattctcatcttcatggagacacagatcaccacgctcatcatctccaagaaggagcgcatgctgcagaagggctccggcttccacctggacctgctgctcatcgtggccatgggcggcatctgtgccctctttggcctgccctggttggctgctgccactgtccgctctgtcactcacgccaacgcgctcactgtcatgagcaaggctgtggcacctggggacaagcccaagattcaggaagtcaaggagcagcgggtgacggggctgctggttgccctgcttgtgggcctctccatagttatcggggatctgctccggcagatccccctggccgtgctctttggaattttcctgtacatgggagtcacctcccttaacgggatccagttctatgagcggctgcatctgctgctcatgccgcccaaacaccacccagatgtcacttacgtcaagaaggtccggaccctccgtatgcacctgttcacggccctgcagctgctctgcctggccctgctctgggccgtcatgtccacagctgcctccctggccttccccttcatcctcatcctcacagtgccgctccgcatggtggtgctcacccgtatcttcaccgaccgagagatgaaatgtctggatgctaacgaggcagagccggtgtttgatgagcgggagggtgtggacgagtacaatgagatgcccatgcctgtgtagccgccaccgagggacagccgagggaccgatggacgaggggacaggctggtgggatggggttccccctcccatgcccctccctcctttttatttaagtgaataatttaaagtcttctcctcccccactgcccctgcagtaaagtgctttggccccc

SEQ ID NO: 77994 - DNA, 3699 bp, Artificial Sequence
  derived and/or modified sequence
atggacttcctgctgagaccccagcccgagcccgagagcctgggccccggcacccccggcttccccgagcaggaggaggacgagctgcacagaaccctgggcgtggagagattcgaggagatcctgcaggaggccggcagcagaggcggcgaggagcccggcagaagctacggcgaggaggacttcgagtaccacagacagagcagccaccacatccaccaccccctgagcacccacctgccccccgacgccagaagaagaaagaccccccagggccccggcagaaagcccagaagaagacccggcgccagccccaccggcgagacccccaccatcgaggagggcgaggaggacgaggacgaggccagcgaggccgagggcgccagagccctgacccagcccagccccgtgagcacccccagcagcgtgcagttcttcctgcaggaggacgacagcgccgacagaaaggccgagagaaccagccccagcagccccgcccccctgccccaccaggaggccacccccagagccagcaagggcgcccaggccggcacccaggtggaggaggccgaggccgaggccgtggccgtggccagcggcaccgccggcggcgacgacggcggcgccagcggcagacccctgcccaaggcccagcccggccacagaagctacaacctgcaggagagaagaagaatcggcagcatgaccggcgccgagcaggccctgctgcccagagtgcccaccgacgagatcgaggcccagaccctggccaccgccgacctggacctgatgaagagccacagattcgaggacgtgcccggcgtgagaagacacctggtgagaaagaacgccaagggcagcacccagagcggcagagagggcagagagcccggccccacccccagagccagacccagagccccccacaagccccacgaggtgttcgtggagctgaacgagctgctgctggacaagaaccaggagccccagtggagagagaccgccagatggatcaagttcgaggaggacgtggaggaggagaccgagagatggggcaagccccacgtggccagcctgagcttcagaagcctgctggagctgagaagaaccctggcccacggcgccgtgctgctggacctggaccagcagaccctgcccggcgtggcccaccaggtggtggagcagatggtgatcagcgaccagatcaaggccgaggacagagccaacgtgctgagagccctgctgctgaagcacagccaccccagcgacgagaaggacttcagcttccccagaaacatcagcgccggcagcctgggcagcctgctgggccaccaccacggccagggcgccgagagcgacccccacgtgaccgagcccctgatgggcggcgtgcccgagaccagactggaggtggagagagagagagagctgcccccccccgccccccccgccggcatcaccagaagcaagagcaagcacgagctgaagctgctggagaagatccccgagaacgccgaggccaccgtggtgctggtgggctgcgtggagttcctgagcagacccaccatggccttcgtgagactgagagaggccgtggagctggacgccgtgctggaggtgcccgtgcccgtgagattcctgttcctgctgctgggccccagcagcgccaacatggactaccacgagatcggcagaagcatcagcaccctgatgagcgacaagcagttccacgaggccgcctacctggccgacgagagagaggacctgctgaccgccatcaacgccttcctggactgcagcgtggtgctgccccccagcgaggtgcagggcgaggagctgctgagaagcgtggcccacttccagagacagatgctgaagaagagagaggagcagggcagactgctgcccaccggcgccggcctggagcccaagagcgcccaggacaaggccctgctgcagatggtggaggccgccggcgccgccgaggacgaccccctgagaagaaccggcagacccttcggcggcctgatcagagacgtgagaagaagatacccccactacctgagcgacttcagagacgccctggacccccagtgcctggccgccgtgatcttcatctacttcgccgccctgagccccgccatcaccttcggcggcctgctgggcgagaagacccaggacctgatcggcgtgagcgagctgatcatgagcaccgccctgcagggcgtggtgttctgcctgctgggcgcccagcccctgctggtgatcggcttcagcggccccctgctggtgttcgaggaggccttcttcagcttctgcagcagcaaccacctggagtacctggtgggcagagtgtggatcggcttctggctggtgttcctggccctgctgatggtggccctggagggcagcttcctggtgagattcgtgagcagattcacccaggagatcttcgccttcctgatcagcctgatcttcatctacgagaccttctacaagctggtgaagatcttccaggagcaccccctgcacggctgcagcgccagcaacagcagcgaggtggacggcggcgagaacatgacctgggccggcgccagacccaccctgggccccggcaacagaagcctggccggccagagcggccagggcaagcccagaggccagcccaacaccgccctgctgagcctggtgctgatggccggcaccttcttcatcgccttcttcctgagaaagttcaagaacagcagattcttccccggcagaatcagaagagtgatcggcgacttcggcgtgcccatcgccatcctgatcatggtgctggtggactacagcatcgaggacacctacacccagaagctgagcgtgcccagcggcttcagcgtgaccgcccccgagaagagaggctgggtgatcaaccccctgggcgagaagagccccttccccgtgtggatgatggtggccagcctgctgcccgccatcctggtgttcatcctgatcttcatggagacccagatcaccaccctgatcatcagcaagaaggagagaatgctgcagaagggcagcggcttccacctggacctgctgctgatcgtggccatgggcggcatctgcgccctgttcggcctgccctggctggccgccgccaccgtgagaagcgtgacccacgccaacgccctgaccgtgatgagcaaggccgtggcccccggcgacaagcccaagatccaggaggtgaaggagcagagagtgaccggcctgctggtggccctgctggtgggcctgagcatcgtgatcggcgacctgctgagacagatccccctggccgtgctgttcggcatcttcctgtacatgggcgtgaccagcctgaacggcatccagttctacgagagactgcacctgctgctgatgccccccaagcaccaccccgacgtgacctacgtgaagaaggtgagaaccctgagaatgcacctgttcaccgccctgcagctgctgtgcctggccctgctgtgggccgtgatgagcaccgccgccagcctggccttccccttcatcctgatcctgaccgtgcccctgagaatggtggtgctgaccagaatcttcaccgacagagagatgaagtgcctggacgccaacgaggccgagcccgtgttcgacgagagagagggcgtggacgagtacaacgagatgcccatgcccgtgtag

SEQ ID NO: 77995 - protein, 1227 aa, Artificial Sequence
  derived and/or modified sequence
MTQPEPESLGPGTPGFPEQEEDELHRTLGVERFEEILQEAGSRGGEEPGRSYGEEDFEYHRQSSHHIHHPLSTHLPPDARRRKTPQGPGRKPRRRPGASPTGETPTIEEGEEDEDEASEAEGARALTQPSPVSTPSSVQFFLQEDDSADRKAERTSPSSPAPLPHQEATPRASKGAQAGTQVEEAEAEAVAVASGTAGGDDGGASGRPLPKAQPGHRSYNLQERRRIGSMTGAEQALLPRVPTDEIEAQTLATADLDLMKSHRFEDVPGVRRHLVRKNAKGSTQSGREGREPGPTPRARPRAPHKPHEVFVELNELLLDKNQEPQWRETARWIKFEEDVEEETERWGKPHVASLSFRSLLELRRTLAHGAVLLDLDQQTLPGVAHQVVEQMVISDQIKAEDRANVLRALLLKHSHPSDEKDFSFPRNISAGSLGSLLGHHHGQGAESDPHVTEPLMGGVPETRLEVERERELPPPAPPAGITRSKSKHELKLLEKIPENAEATVVLVGCVEFLSRPTMAFVRLREAVELDAVLEVPVPVRFLFLLLGPSSANMDYHEIGRSISTLMSDKQFHEAAYLADEREDLLTAINAFLDCSVVLPPSEVQGEELLRSVAHFQRQMLKKREEQGRLLPTGAGLEPKSAQDKALLQMVEAAGAAEDDPLRRTGRPFGGLIRDVRRRYPHYLSDFRDALDPQCLAAVIFIYFAALSPAITFGGLLGEKTQDLIGVSELIMSTALQGVVFCLLGAQPLLVIGFSGPLLVFEEAFFSFCSSNHLEYLVGRVWIGFWLVFLALLMVALEGSFLVRFVSRFTQEIFAFLISLIFIYETFYKLVKIFQEHPLHGCSASNSSEVDGGENMTWAGARPTLGPGNRSLAGQSGQGKPRGQPNTALLSLVLMAGTFFIAFFLRKFKNSRFFPGRIRRVIGDFGVPIAILIMVLVDYSIEDTYTQKLSVPSGFSVTAPEKRGWVINPLGEKSPFPVWMMVASLLPAILVFILIFMETQITTLIISKKERMLQKGSGFHLDLLLIVAMGGICALFGLPWLAAATVRSVTHANALTVMSKAVAPGDKPKIQEVKEQRVTGLLVALLVGLSIVIGDLLRQIPLAVLFGIFLYMGVTSLNGIQFYERLHLLLMPPKHHPDVTYVKKVRTLRMHLFTALQLLCLALLWAVMSTAASLAFPFILILTVPLRMVVLTRIFTDREMKCLDANEAEPVFDEREGVDEYNEMPMPV

SEQ ID NO: 77996 - protein, 1159 aa, Artificial Sequence
  derived and/or modified sequence
MSSAPRRPAKGADSFCTPGPGRKPRRRPGASPTGETPTIEEGEEDEDEASEAEGARALTQPSPVSTPSSVQFFLQEDDSADRKAERTSPSSPAPLPHQEATPRASKGAQAGTQVEEAEAEAVAVASGTAGGDDGGASGRPLPKAQPGHRSYNLQERRRIGSMTGAEQALLPRVPTDEIEAQTLATADLDLMKSHRFEDVPGVRRHLVRKNAKGSTQSGREGREPGPTPRARPRAPHKPHEVFVELNELLLDKNQEPQWRETARWIKFEEDVEEETERWGKPHVASLSFRSLLELRRTLAHGAVLLDLDQQTLPGVAHQVVEQMVISDQIKAEDRANVLRALLLKHSHPSDEKDFSFPRNISAGSLGSLLGHHHGQGAESDPHVTEPLMGGVPETRLEVERERELPPPAPPAGITRSKSKHELKLLEKIPENAEATVVLVGCVEFLSRPTMAFVRLREAVELDAVLEVPVPVRFLFLLLGPSSANMDYHEIGRSISTLMSDKQFHEAAYLADEREDLLTAINAFLDCSVVLPPSEVQGEELLRSVAHFQRQMLKKREEQGRLLPTGAGLEPKSAQDKALLQMVEAAGAAEDDPLRRTGRPFGGLIRDVRRRYPHYLSDFRDALDPQCLAAVIFIYFAALSPAITFGGLLGEKTQDLIGVSELIMSTALQGVVFCLLGAQPLLVIGFSGPLLVFEEAFFSFCSSNHLEYLVGRVWIGFWLVFLALLMVALEGSFLVRFVSRFTQEIFAFLISLIFIYETFYKLVKIFQEHPLHGCSASNSSEVDGGENMTWAGARPTLGPGNRSLAGQSGQGKPRGQPNTALLSLVLMAGTFFIAFFLRKFKNSRFFPGRIRRVIGDFGVPIAILIMVLVDYSIEDTYTQKLSVPSGFSVTAPEKRGWVINPLGEKSPFPVWMMVASLLPAILVFILIFMETQITTLIISKKERMLQKGSGFHLDLLLIVAMGGICALFGLPWLAAATVRSVTHANALTVMSKAVAPGDKPKIQEVKEQRVTGLLVALLVGLSIVIGDLLRQIPLAVLFGIFLYMGVTSLNGIQFYERLHLLLMPPKHHPDVTYVKKVRTLRMHLFTALQLLCLALLWAVMSTAASLAFPFILILTVPLRMVVLTRIFTDREMKCLDANEAEPVFDEREGVDEYNEMPMPV

SEQ ID NO: 77997 - DNA, 3684 bp, Artificial Sequence
  derived and/or modified sequence
atgacacagccggagcccgagagcttgggccctggaactcctggctttccagagcaagaagaggacgagctgcatcgaactctaggagtggagcgctttgaggagattctgcaggaagccgggtcgcgcggaggagaggagcctggccgttcctatggcgaggaagattttgagtatcatcgtcaatcttcccaccatattcaccatccactgtccacacacctcccccccgatgcccgcaggcgaaagaccccacaaggccctggcaggaaaccccgacggcgcccaggcgcctctccgacaggagagactcctacaatcgaggaaggcgaagaggatgaggatgaagcgtcagaggccgaaggggcaagagctttaacccagcctagccccgtgagtacgccttcaagtgtccagttcttcctacaggaggacgacagcgccgatagaaaggcggagcgcacttctccctccagccctgcccccctcccccatcaagaggccacacctcgtgcatccaagggagctcaggcagggactcaggtcgaagaagccgaggccgaggccgtggcagttgccagtggaactgccggaggcgacgatggcggggcgtccggtaggcctctgcccaaagcgcagcccgggcacaggtcctacaacctgcaggagagaaggcgcataggctctatgaccggagctgaacaggcactgctgccccgggtgcccaccgacgaaatcgaggcccagacgctggcaactgccgacctagatctaatgaagagccaccgcttcgaagatgttccaggcgtcaggcgccacttagttcgaaagaatgcaaaagggtctacccaaagcggcagggagggaagggagcctgggcctactccaagagccagacctcgggcccctcataagcctcacgaagtgtttgtggaacttaatgaactgctcctggataagaaccaggagcctcagtggcgggaaacagcacgttggatcaaattcgaggaggatgtggaagaggagaccgaacgctggggaaaacctcatgtggcgtccctgagttttaggagccttctggaactgcggagaactttagctcacggcgcagtccttcttgatctggatcagcaaaccctcccaggagtcgctcatcaggtggtcgaacaaatggtgatctcagaccagattaaggctgaagacagagccaacgtcctaagagcgctgctgcttaagcatagtcaccccagtgacgaaaaggactttagcttcccgagaaatatctcagccggatccctgggctccctgctggggcaccaccacggacaaggcgcagagagtgaccctcatgtcaccgagcccctgatgggcggagttccagaaaccaggttggaggtggagagggaacgcgaactgcctcccccagcgccccctgctggtattacaagaagcaagagtaagcacgaactgaaattgctggagaagatacccgagaacgctgaggccactgtagttctggtggggtgtgtggaatttctttctagacccactatggcgtttgttcggctaagagaggccgttgagctcgatgcggtgctagaagtgcctgtgcccgtcagattcctgttcttgctcctggggccatccagtgcaaacatggattatcacgaaattggtcgaagcattagcacccttatgtccgataagcaatttcacgaggccgcttacctcgccgatgagcgtgaggacctccttaccgcaattaatgccttcctggactgtagcgtggtgttacccccaagtgaagtgcaaggagaggagctgcttcgctcagtggctcactttcagcggcagatgcttaagaaacgggaagagcagggccgtctgttacctacgggagcaggactggaaccaaaaagtgcacaagacaaggctctcttacaaatggtggaggcagcaggagccgccgaagacgacccactcagacgcacagggagaccattcggcggtctgattcgagacgtgaggcggagataccctcactatctgtcggatttccgcgacgcgttggatccacagtgtctcgcagcggtgatctttatctactttgctgctttgtcacccgccataacattcggtgggcttctaggcgaaaagacccaggatctgatcggggtatccgaactcattatgagcaccgcacttcaaggcgtggtattctgtttactgggagctcagccgctccttgttataggattcagtggaccgctgctggttttcgaagaagccttctttagtttttgctcctccaaccatttggaatacctggtgggacgcgtatggatcggtttttggctggtctttcttgcccttctgatggtcgccctggagggctcattcctcgtgagattcgtctctcgcttcacccaggagatcttcgcttttcttatcagcttgatttttatttacgaaaccttctacaagttagtgaaaatcttccaggagcacccactgcatggatgttccgccagcaattcgtcggaggtggatggtggcgagaatatgacttgggctggcgcccgccccacgctgggacccggaaatcggagtctggcaggccagtccggacaggggaagcccagggggcaacccaatactgctcttctttccctcgtgctgatggcaggtacgttttttatcgctttctttctcaggaaatttaagaatagtcgattcttccccggcaggatccggagagtcattggagattttggggtgcccatcgcaatcttgatcatggttttagtggattattccattgaagacacctatactcagaaattgagtgtgccctccggcttttcagttaccgctcctgaaaaacgcggatgggttatcaatccattgggagagaaatccccatttcctgtctggatgatggtagcttctcttctaccagcaattctcgtgtttatcttgatcttcatggaaactcagattacaacactcattatatccaaaaaggagagaatgctgcagaaaggaagcgggttccacctagatctgctgctcatagtagcgatgggagggatctgcgcccttttcggcctcccctggcttgctgctgccacggtccgaagcgtgacccatgccaatgccttaacagtgatgagcaaggctgtggcaccaggcgataagccaaagattcaggaggtgaaggaacagcgcgtcacggggctgctagtagccctcctagtgggactgtcaatcgtgataggagacctcctgcggcagatcccgttggcagtgcttttcggaatcttcctgtacatgggtgtgacctccttaaatggcatacagttctacgaaagactgcacttgcttctgatgccacctaagcatcaccctgatgtgacatacgtgaagaaggtgagaactctccgcatgcatctattcaccgccctgcagctcctgtgtcttgctctgctgtgggccgtgatgtcaaccgctgcctcactggcctttccttttatcctgattctcaccgtgcctctacgaatggtcgtcttaacccgtatcttcactgacagagaaatgaaatgcctggacgctaacgaggccgagccggtgtttgacgagagagagggcgtcgacgagtacaatgagatgcctatgccagtctag

SEQ ID NO: 77998 - DNA, 3684 bp, Artificial Sequence
  derived and/or modified sequence
atgacccagcctgagcctgagagcctgggccctggcaccccaggcttccctgagcaggaggaggatgagctgcacaggaccctgggcgtggagagatttgaggagatcctgcaggaggccggcagccggggcggggaggagcccggccgctcctatggagaagaagattttgagtaccaccggcagagcagccaccacatccaccaccccctgagcacccacctgcccccagatgcccggcggaggaagaccccccagggccctggcaggaagccccggcggcggcctggggccagccccactggagagacccccaccatcgaggagggggaggaggatgaagatgaggccagcgaggccgagggcgcccgggccctgacccagcccagccctgtgtccacccccagctctgtgcagttcttcctgcaggaggatgattctgctgacaggaaggccgagaggaccagccccagcagccctgcccccctgccccaccaggaggccaccccccgggccagcaagggggcccaggccggcacccaggtggaggaggccgaggccgaggccgtggccgtggccagcggcacagctggaggagatgatggaggagccagcggccggcccctgcccaaggcccagcccggccacaggagctacaacctgcaggagaggagaagaattggctccatgactggagctgagcaggccctgctgccccgggtgcccacagatgaaattgaggcccagaccctggccacagctgacctggacctgatgaagagccacagatttgaagatgtgcctggggtgagaagacacctggtgaggaagaatgccaagggcagcacccagagcggccgggagggccgggagcccggccccaccccccgggcccggccccgggccccccacaagccccatgaggtgtttgtggagctgaatgagctgctgctggacaagaaccaggagccccagtggagggagacagcccgctggatcaagtttgaagaagatgtggaggaggagacagagcgctggggcaagccccacgtggccagcctgtccttccgcagcctgctggagctgcggaggaccctggcccacggggctgtgctgctggacctggaccagcagaccctgcccggggtggcccaccaggtggtggagcagatggtgatcagtgaccagatcaaggccgaggaccgggccaacgtgctgcgggccctgctgctgaagcacagccaccccagtgatgagaaggacttctccttccccaggaacatctctgctggcagcctgggcagcctgctgggccaccaccacggccagggcgctgagagtgacccccacgtgacagagcccctgatgggcggcgtgcctgagacccggctggaggtggagcgggagcgggagctgcccccaccagcccctcctgctggcatcaccaggagcaagagcaagcatgagctgaagctgctggagaagatcccagaaaatgctgaggccaccgtggtgctggtgggctgtgtggagttcctgagccggcccaccatggcctttgtgcggctgcgggaggccgtggagctggatgctgtgctggaggtgcctgtgcctgtgcgcttcctgttcctgctgctgggccccagcagcgccaacatggactaccacgagatcggccgcagcatcagcaccctgatgtctgacaagcagttccacgaggccgcctacctggctgatgagcgggaggacctgctgacagccatcaatgccttcctggactgcagcgtggtgctgcccccatctgaggtgcagggcgaggagctgctgcggtctgtggcccacttccagaggcagatgctgaagaagcgggaggagcagggccgcctgctgcccaccggggccggcctggagcccaagagcgcccaggacaaggccctgctgcagatggtggaggccgccggggctgctgaagatgaccccctgcggaggacaggccggccctttggaggcctcatcagagatgtgagaagacgctacccccactacctgagtgacttcagagatgccctggacccccagtgcctggccgctgtgatcttcatctactttgctgccctgagccctgccatcaccttcggcggcctgctgggggagaagacccaggacctgattggagtgtctgagctgatcatgagcacagccctgcagggcgtggtgttctgcctgctgggcgcccagcccctgctggtgattggcttcagcggccccctgctggtgtttgaggaggccttcttctccttctgcagcagcaaccacctggagtacctggtgggccgggtgtggattggcttctggctggtgttcctggccctgctgatggtggccctggagggcagcttcctggtgcgctttgtgagccgcttcacccaggagatctttgccttcctgatcagcctcatcttcatctatgagaccttctacaagctggtgaagatcttccaggagcaccccctgcacggctgcagcgccagcaacagcagcgaggtggatggaggagagaacatgacctgggccggggcccggcccaccctgggccctggcaacagaagcctggccggccagagcggccagggcaagccccggggccagcccaacacagccctgctgagcctggtgctgatggccggcaccttcttcatcgccttcttcctgaggaagttcaagaacagccgcttcttccctggccgcatccggcgggtgattggagactttggagtgcccatcgccatcctgatcatggtgctggtggactacagcattgaggacacctacacccagaagctgtctgtgcccagcggcttctctgtgacagcccctgagaagaggggctgggtgatcaaccccctgggggagaagagccccttccctgtgtggatgatggtggccagcctgctgcctgccatcctggtgttcatcctgatcttcatggagacccagatcaccaccctcatcatcagcaagaaggagaggatgctgcagaagggcagcggcttccacctggacctgctgctgattgtggccatgggcggcatctgtgccctgtttggcctgccctggctggccgccgccaccgtgcgctctgtgacccacgccaatgccctgactgtgatgagcaaggctgtggcccctggggacaagcccaagatccaggaggtgaaggagcagagggtgacaggcctgctggtggccctgctggtgggcctgagcatcgtcatcggggacctgctgcggcagatccccctggccgtgctgtttggcatcttcctgtacatgggcgtgaccagcctgaatggcatccagttctatgaaaggctgcacctgctgctgatgccacccaagcaccacccagatgtgacctacgtgaagaaggtgaggaccctgaggatgcacctgttcaccgccctgcagctgctgtgcctggccctgctgtgggccgtgatgagcacagctgccagcctggccttccccttcatcctgatcctgactgtgcccctgaggatggtggtgctgacccgcatcttcacagaccgggagatgaagtgcctggatgccaatgaagctgagcctgtgtttgatgagcgggagggcgtggatgagtacaatgagatgcccatgcctgtgtag

SEQ ID NO: 77999 - DNA, 3684 bp, Artificial Sequence
  derived and/or modified sequence
atgacccagcccgagcccgagagcctgggccccggcacccccggcttcccagaacaggaggaggacgagttacatcgcacgcttggagtcgagcggttcgaagaaattttgcaggaagcaggctcccgtggcggcgaagaacccggcagatcttacggcgaggaagacttcgagtatcataggcagtcttcccaccacatccaccatcctctatctacgcacctgccaccagatgcaaggagaagaaaaactccccaggggccaggacgtaaacccaggaggcgccctggagcctctccaactggtgagacacctactatcgaagagggtgaggaggacgaggatgaagccagcgaagcagagggggcccgcgcactcacacagccatcacctgtgtcaaccccttctagtgtacaatttttcctgcaggaagatgactctgcagataggaaggccgaaagaacatccccttctagtcccgcccctctgccacatcaggaagcaacgccacgcgcttccaaaggggcacaagctggtacgcaggtggaagaagctgaggcagaggctgtcgcggtagcatctgggacagcgggcggcgacgatggaggtgcgtctgggaggccattgcccaaagcgcagcctggtcaccgcagctataatttgcaggagagacggcggatagggtctatgaccggggctgagcaagccctgctcccgagggtccccacagacgagatcgaggcccagacgctggcgaccgccgatctggatctgatgaagagccacaggtttgaagatgtgcctggagttcggcgtcacctggttaggaaaaacgccaaggggtcaactcagagcggcagagagggccgggagccaggtcctaccccacgtgcccgcccgcgggctcctcacaagccccacgaggtgttcgttgagctgaatgaactgctactcgacaagaatcaggagccacaatggcgagaaaccgccaggtggataaagtttgaagaagatgtagaggaggagacggagaggtggggcaaaccacatgtcgcgagcctgagcttccgatcattgttagagctgagacgcactttagcacacggtgctgtacttcttgaccttgaccagcagaccctgccaggagttgcacaccaggtggtcgagcaaatggttatctccgatcagataaaggccgaggatagagcaaacgtgttgcgcgccctattgctgaagcactctcatccttctgatgaaaaggacttttccttcccccggaatatctccgcaggatcactcggttctctgctggggcaccaccacggccagggtgcagaatctgatccacacgtcacagagcccctgatgggcggcgtgccggagacacgcctggaggtggagcgggagagagaattgccgcctcccgcgccccctgccggcattaccagaagtaagagtaagcacgaattaaaactcctggagaaaattcctgaaaacgcggaggccaccgtagtgctcgtcggctgcgttgagttccttagccggcctacaatggcatttgtgcgtctgcgtgaagcggttgaactggacgcagtactcgaggtacctgtccccgtcaggttcctttttttgctcctggggccgtctagcgccaacatggattaccacgagatcggacgttccattagtactctgatgagtgacaaacagttccacgaagccgcctacctggccgacgagcgggaggatctccttactgcaatcaacgccttcttggactgtagcgtagtcctgcctccatccgaggttcagggggaggagctgctgcgaagcgttgctcattttcagcgacagatgcttaagaagagggaagagcaggggagacttctgcctacaggagcagggttagaaccgaaaagtgcccaagacaaggctctgcttcagatggtggaagctgccggcgctgccgaagatgacccgcttcggaggaccggccggccatttggcgggctcatccgcgatgtgcgacggcgctatccgcattacctgagcgattttagagatgctctagaccctcagtgtttggccgccgtgatatttatctattttgcagctctgtcgcctgccatcacctttggaggactgctgggagaaaagacacaggacctcataggagtgtctgagctgattatgtccactgcactgcagggagtggtgttttgcctccttggggcccagcccttgctcgtcattggattttccggaccactgttagtgtttgaggaggccttttttagtttttgtagcagtaatcatctcgaatatttagtgggaagggtgtggatcggcttctggttggtgttcctcgccctgttaatggtggcgcttgagggtagtttcttagttcggttcgtgtcacgtttcacacaggagatttttgcatttctgatctcactcatctttatatatgagactttctataagctggtaaaaatatttcaggaacacccgctccatgggtgctccgcatcaaattcatctgaagtggacgggggcgagaatatgacatgggccggagctcgcccgaccctggggcccggcaacaggtccttagccggacagtctggccaaggcaagccaagaggccagcctaataccgctctcctgtccctcgtgctcatggcgggaacatttttcattgcttttttcttaagaaagttcaaaaattcccggtttttcccagggcgtattcggagagtcatcggcgacttcggcgtacccattgccatcctgatcatggtccttgtagattacagcatagaggacacttacacccagaagctgtctgtgccgtccgggtttagcgtcaccgctccggagaagagagggtgggtgattaaccctctcggggagaagtcgccctttccagtgtggatgatggtcgctagcctgctgccagccattctcgtcttcattttgattttcatggaaactcaaatcaccactttaatcatctcaaaaaaggaacgcatgcttcagaaaggaagcgggtttcaccttgatctgctgttgatcgtggcaatgggcggcatatgcgccctattcggattaccttggttagcagcggccaccgtcaggtcagtgacccacgcaaacgcactaacagttatgtccaaagctgtggctcccggagataaaccaaagatacaggaagttaaggaacagcgcgtgactggcctgttggttgccctgctggttgggctgagcattgttataggggacctgctgaggcaaattcccttggccgttctgtttgggatattcctttacatgggtgtgacctccctcaatgggatccagttctatgaacgacttcatttgctgctcatgccgccgaagcatcaccctgacgtgacttacgtgaaaaaagtgcgcactttaaggatgcacctttttaccgcccttcagctgctgtgtctcgccctcctgtgggcggtgatgtcaacagccgcgagcttggcatttcccttcattctcatattaactgtccctctgcggatggtggtgctgaccaggattttcaccgaccgtgaaatgaagtgtctggacgctaacgaagccgagcctgtgttcgacgagagggaaggtgtggatgaatataatgaaatgcccatgcctgtatag

SEQ ID NO: 78000 - DNA, 3684 bp, Artificial Sequence
  derived and/or modified sequence
atgactcagccagagcccgaatccctgggaccaggtacgcccggattccctgaacaagaggaggacgagttgcaccgaacattgggggtggaaagatttgaggagattctgcaagaagcagggtccaggggcggtgaagagcctggcagatcttacggggaagaggatttcgaataccacagacagagctcccatcatatccatcatccactaagcacccacctaccgcctgacgcacggagacggaaaacgccgcaggggccagggcgtaagcctagaaggaggcccggtgcctccccaacaggagaaaccccaactattgaggaaggggaggaggatgaagatgaagccagcgaagcagagggcgctcgcgctcttacacaaccttcgcccgtgtccacaccttccagtgtgcagttttttctgcaggaggatgatagtgcggataggaaggccgagcggacatcccccagcagcccagcaccattgccacaccaagaagctaccccgagggcttctaagggagcgcaggcagggacgcaagtggaggaagcagaagcagaagccgttgccgtggcctcgggcactgccggaggggacgacggcggagcctcaggcaggccgttgccaaaggcacagcccggacacagaagctataacctgcaggaacgtcgcaggatcggttccatgactggtgccgaacaggcccttctgccacgcgtgcccaccgacgagatagaagcccagacactggccacggccgacctggatctgatgaagtcccacaggttcgaagatgtcccaggagtgagacggcatctggtgcgaaagaacgccaagggatctactcaatctggccgagaaggtagggagccaggccctaccccccgagcccgaccacgggcacctcacaaaccgcatgaggtgtttgtggaactcaatgagctcttattggacaaaaaccaagaaccgcagtggcgggaaaccgctcgctggattaagttcgaggaggatgttgaggaggaaaccgagaggtggggaaaaccccacgtcgctagccttagcttcagatctctcctggagctgagacggacgctggcacatggggctgtgctgctggatctggaccagcagactctcccaggtgtcgcgcatcaggtggtggagcaaatggtgatctccgatcaaattaaggccgaagaccgtgcaaacgtgctgagggctctgcttttgaaacattcccacccgtctgacgaaaaggactttagtttccctcgaaacatcagcgcaggttctctggggtccctgcttggccatcaccacgggcaaggcgcagagagcgacccccatgtcaccgaacctctcatggggggtgtacccgaaacccggctggaagtggagcgtgagcgggaactccctcccccagcccctcccgctggcatcaccaggagtaagagtaagcacgagcttaagcttcttgagaaaatccctgagaatgcggaggctaccgtcgtgctcgtcggctgtgtggagttcctgtcccggccaacaatggccttcgtgaggctgcgggaggccgttgagttggatgcggtgctggaagttcctgtgcccgtcaggttcctgttcctgctgctcggaccctccagcgcgaatatggattaccacgaaattgggagatccatctcaacccttatgtctgacaagcagttccacgaggctgcttaccttgctgatgaaagggaggaccttctcactgcgattaacgcatttctcgattgctctgtggtgctccccccttctgaggtgcagggcgaagagttacttcggtcggtagctcacttccaaagacagatgttgaaaaagcgcgaggagcagggccgactgctgcctactggcgctgggttagaaccaaagagtgcacaagacaaggccctactccaaatggttgaggctgcgggtgcggctgaggatgacccacttcgcaggactggcagaccattcggtggcctaatccgcgatgtccgtcggagatatccacactacctgtccgattttcgcgacgctctggatccccaatgtttggctgctgtaatctttatctactttgccgcactgagtccagctattacttttgggggattattaggtgagaagacgcaagacctgattggcgtgtctgagctgattatgagcacagccctccagggcgtggtcttctgccttctgggagcccagcctttactcgtcatcggattcagcggcccattgctggtttttgaagaggccttttttagcttttgctccagcaatcatctggaatatctggttgggagagtgtggatcggcttttggctggtgttcctggcccttctgatggtggcacttgagggatccttcttagtacggttcgtcagccggttcacccaagagatatttgctttcctgatctcccttatcttcatttacgagacgttctacaaattagtaaagatattccaagagcatccactgcacggatgctccgcaagcaactcgtcagaagtggatggaggcgagaacatgacctgggccggtgccagacctactctggggcctggcaatagaagcttggcaggccagtctggccaagggaaaccacggggacagcctaatactgctctgctttctctggtgcttatggccggaactttcttcatagcattttttctaaggaagttcaagaattcaaggttctttccagggagaatccgcagagtcatcggggacttcggcgtgcctatagccatccttataatggtactcgtggattattcaatcgaagatacctatacacaaaagctctccgtacccagtggcttttccgtaaccgcccctgaaaagcgcggatgggtgatcaatcctcttggcgagaaaagtccgttccccgtgtggatgatggtggctagcttacttcccgctattctggtgtttatactgatttttatggagacacaaattaccaccttgattatcagcaaaaaggaacgcatgctgcagaaaggctccggctttcatttggacctgctcctgatcgtcgcaatggggggtatctgtgccctcttcggattaccgtggttggccgcagccaccgtgagatccgtgacccacgcaaatgctctgactgtgatgagcaaggccgtcgctcctggtgacaaaccgaaaatccaagaagtaaaggaacagcgcgtaactggcttgttggtcgctctgctggtaggactgagtatcgtgatcggcgatctgcttaggcaaataccactagccgttctctttggcatctttctctatatgggggtgacatcacttaacggaatccagttctatgagaggttgcatttactacttatgccccctaaacatcatcccgatgtgacctacgtcaaaaaggtccgcacgcttcggatgcatttgttcacggccctccagcttctatgtcttgctctcttgtgggccgtaatgtctaccgcagcttctcttgcatttccctttatcttgatcttaaccgtaccactcagaatggtggtacttactcgcatctttaccgacagggagatgaagtgcctcgacgcaaatgaggccgagccagtgtttgatgagcgggagggggtggatgagtacaacgagatgccgatgccagtctag

SEQ ID NO: 78001 - DNA, 4387 bp, Artificial Sequence
  derived and/or modified sequence
ccggccatggacttcctcctgcggcctcaggtgcgaggggtctgcgaccctctctccccatggcggcaagctccctgcgcctctccccgtcccctcgtcccacggggctgcttctggtgggagtggggctgggcgcttaggggagccaggagatggacaggagccttcctcacagaggggagaagccagccccctggcccgctcaccttctcttatccggtgttctgccagtcccagctgctccagtccccacctcgcccctaagacccgcccttcaccccagccctccccgcgctcttccttgttctggctgctggcaccgctatggagggggctgcatacccccgcccttggagatcccgatgcccttcaggtccagaagctcttgagcaaatatttggcggcgcctggagctgagaccgtgggtgggtggggggctggaccaaggctgcctggccaggcggctgccgcttagctgggctgagctcttacaagcgccgcattccctgccggctgtgccggccggccgctgctccgcgcccgcaggatgactcagccagagccagagagcttgggccctgggacgcctgggttccccgagcaggaggaagacgaacttcaccgcaccctgggcgtggagcggtttgaggagatcctacaggaggccgggtctcgtggaggggaggagccaggccgcagctatggggaggaagactttgagtaccaccgccagtcctcccaccacatccatcacccactgtccacccacctgcctccggatgcacgccgccgcaagacaccccagggcccaggacggaagcctcgaaggcgcccgggagcctccccgactggagaaaccccgaccattgaggagggggaggaagatgaggatgaggccagcgaggctgagggggcccgggctctcactcagccgtcccctgtctccacaccctcctcggtgcagttctttctccaagaggatgacagtgctgaccggaaggcagagaggaccagtccatcttcccctgcaccactgccccaccaggaggcgactcctcgggcctccaaaggggcccaggctggaacccaggtggaggaggcggaggcggaggcggtggcggtggccagtggcactgcagggggtgacgacgggggtgcctcggggcgccccctgcccaaagcccagcctgggcaccgcagctacaaccttcaggagaggaggcgcatcgggagcatgactggggctgagcaggcactgctgccccgggtccccacggatgagattgaggcccagacgctggccacggccgacctagacctcatgaagagtcaccggtttgaggacgttcctggggtgcggcggcacttggtgcggaagaatgccaaaggttccacacagagtggccgagaagggcgggagcctggccccacacctcgggcccgaccccgggccccccacaagccccatgaggtgtttgtggagctgaatgagttgctcctggacaaaaaccaggagccccagtggcgggagacagctcgctggatcaaatttgaagaggacgtggaggaggagactgagcgctgggggaagccccacgtggcctccctctccttccgcagtctcctggagctccgcaggaccctggcccatggggctgtgctcttggatctggaccagcagaccctgcccggagtggcccaccaggtggtggagcagatggtcatctctgaccagatcaaggccgaggacagggccaacgtgctgcgggctctgctgttgaaacacagccacccaagtgatgagaaggacttctccttcccccgcaacatctcagctggctccctgggctccctgctggggcatcaccatggtcagggggctgagagtgacccccacgtcaccgagcctctcatgggaggtgttcctgagacccggctggaggtggagcgagagcgtgagctgccgcctccagcaccaccagctggcatcacccgctccaagtccaagcacgagctgaaactgctggagaagattcctgagaatgccgaggccacggtggtccttgtgggctgcgtggagttcctctcccgccccaccatggcctttgtgcggctccgggaggctgtggagttggacgcagtgttggaggtgccggtgcctgtgcgtttcctcttcctgctgctgggcccgagtagtgccaacatggactaccacgagatcggccgctccatctccaccctcatgtcagacaagcaattccacgaggcagcctacctggctgacgagcgggaggacctgctgacggccatcaacgccttcctggactgcagcgtggtgctgccgccttcagaagtgcagggcgaggagctgctgcgctctgtggcccacttccagcgccagatgctcaagaagcgagaggagcagggccggctgctacctacaggggctgggctggagcccaaatctgcccaagataaggcgctcctgcagatggtagaggcggcaggggcagctgaagatgatccccttcggcggacggggcggccctttggggggctgatccgagatgtgcggcgccgctatccccactacctgagtgacttccgagatgcacttgaccctcagtgcctggccgcagtcatcttcatctactttgccgccctgtctcctgccatcacctttggggggctgctgggagagaagacgcaggacctgataggggtgtcggagctgattatgtccacagcgctccagggcgtggtcttctgcctgctgggtgcccagcccctgttggtgatcggcttctcagggcccctgctggtctttgaggaggccttcttctcgttctgtagcagcaaccacctggagtacctggtgggccgtgtgtggatcggcttctggctggtgttcctggccctgctcatggtggccctggaggggagcttcctggtccgcttcgtctcccgcttcacccaggagatcttcgccttcttgatctcactcatcttcatctatgagaccttctacaagctggtgaagatcttccaggagcaccccctgcatggctgctcagcctccaacagctcagaggtggacggcggtgagaacatgacatgggccggggcaagacccacgctggggccgggcaacaggagcttggctgggcagtctgggcaggggaagccccggggccagcccaacacggccctgctgtcgctggtgctcatggccggcaccttcttcatcgccttcttcctgcgcaaattcaagaacagccggttctttcctggccggatccggcgggtgattggggactttggggtgcccatcgccatcctcatcatggtgcttgtggattacagtattgaggacacctatacccagaagctgagcgttcccagtggattctcggtgactgccccagaaaagaggggctgggtcatcaaccccctgggagagaagagccccttccctgtgtggatgatggttgccagcctgctgcccgccatcctggtcttcattctcatcttcatggagacacagatcaccacgctcatcatctccaagaaggagcgcatgctgcagaagggctccggcttccacctggacctgctgctcatcgtggccatgggcggcatctgtgccctctttggcctgccctggttggctgctgccactgtccgctctgtcactcacgccaacgcgctcactgtcatgagcaaggctgtggcacctggggacaagcccaagattcaggaagtcaaggagcagcgggtgacggggctgctggttgccctgcttgtgggcctctccatagttatcggggatctgctccggcagatccccctggccgtgctctttggaattttcctgtacatgggagtcacctcccttaacgggatccagttctatgagcggctgcatctgctgctcatgccgcccaaacaccacccagatgtcacttacgtcaagaaggtccggaccctccgtatgcacctgttcacggccctgcagctgctctgcctggccctgctctgggccgtcatgtccacagctgcctccctggccttccccttcatcctcatcctcacagtgccgctccgcatggtggtgctcacccgtatcttcaccgaccgagagatgaaatgtctggatgctaacgaggcagagccggtgtttgatgagcgggagggtgtggacgagtacaatgagatgcccatgcctgtgtagccgccaccgagggacagccgagggaccgatggacgaggggacaggctggtgggatggggttccccctcccatgcccctccctcctttttatttaagtgaataatttaaagtcttctcctcccccactgcccctgcagtaaagtgctttggccccca

SEQ ID NO: 78002 - DNA, 3684 bp, Artificial Sequence
  derived and/or modified sequence
atgacccagcccgagcccgagagcctgggccccggcacccccggcttccccgagcaggaggaggacgagctgcacagaaccctgggcgtggagagattcgaggagatcctgcaggaggccggcagcagaggcggcgaggagcccggcagaagctacggcgaggaggacttcgagtaccacagacagagcagccaccacatccaccaccccctgagcacccacctgccccccgacgccagaagaagaaagaccccccagggccccggcagaaagcccagaagaagacccggcgccagccccaccggcgagacccccaccatcgaggagggcgaggaggacgaggacgaggccagcgaggccgagggcgccagagccctgacccagcccagccccgtgagcacccccagcagcgtgcagttcttcctgcaggaggacgacagcgccgacagaaaggccgagagaaccagccccagcagccccgcccccctgccccaccaggaggccacccccagagccagcaagggcgcccaggccggcacccaggtggaggaggccgaggccgaggccgtggccgtggccagcggcaccgccggcggcgacgacggcggcgccagcggcagacccctgcccaaggcccagcccggccacagaagctacaacctgcaggagagaagaagaatcggcagcatgaccggcgccgagcaggccctgctgcccagagtgcccaccgacgagatcgaggcccagaccctggccaccgccgacctggacctgatgaagagccacagattcgaggacgtgcccggcgtgagaagacacctggtgagaaagaacgccaagggcagcacccagagcggcagagagggcagagagcccggccccacccccagagccagacccagagccccccacaagccccacgaggtgttcgtggagctgaacgagctgctgctggacaagaaccaggagccccagtggagagagaccgccagatggatcaagttcgaggaggacgtggaggaggagaccgagagatggggcaagccccacgtggccagcctgagcttcagaagcctgctggagctgagaagaaccctggcccacggcgccgtgctgctggacctggaccagcagaccctgcccggcgtggcccaccaggtggtggagcagatggtgatcagcgaccagatcaaggccgaggacagagccaacgtgctgagagccctgctgctgaagcacagccaccccagcgacgagaaggacttcagcttccccagaaacatcagcgccggcagcctgggcagcctgctgggccaccaccacggccagggcgccgagagcgacccccacgtgaccgagcccctgatgggcggcgtgcccgagaccagactggaggtggagagagagagagagctgcccccccccgccccccccgccggcatcaccagaagcaagagcaagcacgagctgaagctgctggagaagatccccgagaacgccgaggccaccgtggtgctggtgggctgcgtggagttcctgagcagacccaccatggccttcgtgagactgagagaggccgtggagctggacgccgtgctggaggtgcccgtgcccgtgagattcctgttcctgctgctgggccccagcagcgccaacatggactaccacgagatcggcagaagcatcagcaccctgatgagcgacaagcagttccacgaggccgcctacctggccgacgagagagaggacctgctgaccgccatcaacgccttcctggactgcagcgtggtgctgccccccagcgaggtgcagggcgaggagctgctgagaagcgtggcccacttccagagacagatgctgaagaagagagaggagcagggcagactgctgcccaccggcgccggcctggagcccaagagcgcccaggacaaggccctgctgcagatggtggaggccgccggcgccgccgaggacgaccccctgagaagaaccggcagacccttcggcggcctgatcagagacgtgagaagaagatacccccactacctgagcgacttcagagacgccctggacccccagtgcctggccgccgtgatcttcatctacttcgccgccctgagccccgccatcaccttcggcggcctgctgggcgagaagacccaggacctgatcggcgtgagcgagctgatcatgagcaccgccctgcagggcgtggtgttctgcctgctgggcgcccagcccctgctggtgatcggcttcagcggccccctgctggtgttcgaggaggccttcttcagcttctgcagcagcaaccacctggagtacctggtgggcagagtgtggatcggcttctggctggtgttcctggccctgctgatggtggccctggagggcagcttcctggtgagattcgtgagcagattcacccaggagatcttcgccttcctgatcagcctgatcttcatctacgagaccttctacaagctggtgaagatcttccaggagcaccccctgcacggctgcagcgccagcaacagcagcgaggtggacggcggcgagaacatgacctgggccggcgccagacccaccctgggccccggcaacagaagcctggccggccagagcggccagggcaagcccagaggccagcccaacaccgccctgctgagcctggtgctgatggccggcaccttcttcatcgccttcttcctgagaaagttcaagaacagcagattcttccccggcagaatcagaagagtgatcggcgacttcggcgtgcccatcgccatcctgatcatggtgctggtggactacagcatcgaggacacctacacccagaagctgagcgtgcccagcggcttcagcgtgaccgcccccgagaagagaggctgggtgatcaaccccctgggcgagaagagccccttccccgtgtggatgatggtggccagcctgctgcccgccatcctggtgttcatcctgatcttcatggagacccagatcaccaccctgatcatcagcaagaaggagagaatgctgcagaagggcagcggcttccacctggacctgctgctgatcgtggccatgggcggcatctgcgccctgttcggcctgccctggctggccgccgccaccgtgagaagcgtgacccacgccaacgccctgaccgtgatgagcaaggccgtggcccccggcgacaagcccaagatccaggaggtgaaggagcagagagtgaccggcctgctggtggccctgctggtgggcctgagcatcgtgatcggcgacctgctgagacagatccccctggccgtgctgttcggcatcttcctgtacatgggcgtgaccagcctgaacggcatccagttctacgagagactgcacctgctgctgatgccccccaagcaccaccccgacgtgacctacgtgaagaaggtgagaaccctgagaatgcacctgttcaccgccctgcagctgctgtgcctggccctgctgtgggccgtgatgagcaccgccgccagcctggccttccccttcatcctgatcctgaccgtgcccctgagaatggtggtgctgaccagaatcttcaccgacagagagatgaagtgcctggacgccaacgaggccgagcccgtgttcgacgagagagagggcgtggacgagtacaacgagatgcccatgcccgtgtag

SEQ ID NO: 78003 - protein, 515 aa, Artificial Sequence
  derived and/or modified sequence
MEPNDSTSTAVEEPDSLEVLVKTLDSQTRTFIVGAQMNVKEFKEHIAASVSIPSEKQRLIYQGRVLQDDKKLQEYNVGGKVIHLVERAPPQTHLPSGASSGTGSASATHGGGSPPGTRGPGASVHDRNANSYVMVGTFNLPSDGSAVDVHINMEQAPIQSEPRVRLVMAQHMIRDIQTLLSRMECRGGPQPQHSQPPPQPPAVTPEPVALSSQTSEPVESEAPPREPMEAEEVEERAPAQNPELTPGPAPAGPTPAPETNAPNHPSPAEYVEVLQELQRLESRLQPFLQRYYEVLGAAATTDYNNNHEGREEDQRLINLVGESLRLLGNTFVALSDLRCNLACTPPRHLHVVRPMSHYTTPMVLQQAAIPIQINVGTTVTMTGNGTRPPPTPNAEAPPPGPGQASSVAPSSTNVESSAEGAPPPGPAPPPATSHPRVIRISHQSVEPVVMMHMNIQDSGTQPGGVPSAPTGPLGPPGHGQTLGSTLIQLPSLPPEFMHAVAHQITHQAMVAAVAS

SEQ ID NO: 78004 - protein, 903 aa, Artificial Sequence
  derived and/or modified sequence
MEPNDSTSTAVEEPDSLEVLVKTLDSQTRTFIVGAQMNVKEFKEHIAASVSIPSEKQRLIYQGRVLQDDKKLQEYNVGGKVIHLVERAPPQTHLPSGASSGTGSASATHGGGSPPGTRGPGASVHDRNANSYVMVGTFNLPSDGSAVDVHINMEQAPIQSEPRVRLVMAQHMIRDIQTLLSRMECRGGPQPQHSQPPPQPPAVTPEPVALSSQTSEPVESEAPPREPMEAEEVEERAPAQNPELTPGPAPAGPTPAPETNAPNHPSPAEYVEVLQELQRLESRLQPFLQRYYEVLGAAATTDYNNNHEGREEDQRLINLVGESLRLLGNTFVALSDLRCNLACTPPRHLHVVRPMSHYTTPMVLQQAAIPIQINVGTTVTMTGNGTRPPPTPNAEAPPPGPGQASSVAPSSTNVESSAEGAPPPGPAPPPATSHPRVIRISHQSVEPVVMMHMNIQDSGTQPGGVPSAPTGPLGPPGHGQTLGQQVPGFPTAPTRVVIARPTPPQARPSHPGGPPVSGTLGAGLGTNASLAQMVSGLVGQLLMQPVLVAQGTPGSPGGLGLESLSPEFFTSVVQGVLSSLLGSLGARAGSSESIAAFIQRLSGSSNIFEPGADGALGFFGALLSLLCQNFSMVDVVMLLHGHFQPLQRLQPQLRSFFHQHYLGGQEPTPSNIRMATHTLITGLEEYVRESFSLVQVQPGVDIIRTNLEFLQEQFNSIAAHVLHCTDSGFGARLLELCNQGLFECLALNLHCLGGQQMELAAVINGRIRRMSRGVNPSLVSWLTTMMGLRLQVVLEHMPVGPDAILRYVRRVGDPPQPLPEEPMEVQGAERASPEPQEWVPIIQQDIQSQRKVKPQPPLSDAYLSGMPAKRRKLRSDIQKRLQEDPNYSPQRFPNAQRAFADDP

SEQ ID NO: 78005 - DNA, 423 bp, Artificial Sequence
  derived and/or modified sequence
atgcttacgattatgtgtgggttccagatgcagtcccaccttgccgcgggggacatgaaacgtctgggttacgactttgaccacctgcttagtcccgcgttaccaatttcaacctcagtggcccgagagggtccaagtctcattaccctgcgggcaacccgggatgcagaatgcgctctttcgtctggtgccgggcaaggagctgggcggggtgagaaaaccccagcttcccccaccaaccagcacccggggctggaagagcttcagcaggccgcagatagggagtttcatcctcagccagactctcgtaattccgaggtccaggaccgtgccagctgcaggtgggagccgggcatggtaggcgctgcctccagtgcagccggggagagtgtatgcgttcaggggtgccgcgtggcatgctag

SEQ ID NO: 78006 - DNA, 789 bp, Artificial Sequence
  derived and/or modified sequence
atggagccaaatgattccaccagcacagctgttgaagaaccggacagcttagaggttctcgtcaagactctggactcccagacacggactttcattgttggggcacagatgaatgtgaaagaattcaaggaacacatcgcagccagtgtctccattcccagtgaaaaacagaggttgatctaccaaggcagggttttacaagatgataagaaactgcaagagtacaacgtgggaggtaaagttattcacctcgtcgagcgcgcacccccgcagactcacctgccaagcggggcctcatctgggactgggagcgccagtgcgactcatggtggggggtccccccccggcactaggggtcccggtgctagtgttcacgatcgcaacgccaattcctacgttatggtgggcactttcaacctgccatccgacgggtctgctgtggatgtccacataaacatggagcaggcaccaattcagagcgagccccgggtacgtctggttatggcacagcacatgatccgggacatccagacacttctgagccgtatggaatgccggggaggtccacagccacagcacagtcagcctccaccacagccaccagctgttaccccagaacccgtagcattgagcagtcagacttcagagccagttgaatccgaggcaccgcctagggaacccatggaggcagaggaagtcgaagagcgggcccccgctcaaaaccccgagctcacccctgggccagctcctgccggacccacaccggcccccgagacaaacgctccatag

SEQ ID NO: 78007 - DNA, 789 bp, Artificial Sequence
  derived and/or modified sequence
atggaaccaaacgatagtacctccactgcagttgaagagcccgacagcctggaggtgctcgttaaaaccctggactcccagacaaggacatttatagttggcgctcagatgaacgttaaagaatttaaagagcacatagccgctagcgtttcaatcccctccgagaaacagcggctaatctatcaaggccgtgtcctccaggatgacaaaaagctccaggagtataacgtcggcgggaaggtgatccacctcgtagaacgggctccgcctcaaacccaccttcccagcggggcttcttcagggactggatcagcatccgctacacatggcggcggtagcccccccggaacacgcgggcccggcgcaagcgttcacgaccgaaatgccaatagctatgtgatggtgggaacctttaatctgcctagcgacggttcagctgtggatgtccacattaacatggaacaggcccctatccagtcagagcccagggtcaggctggtgatggcacagcacatgatacgagacatccagacgctgttatcgcgtatggagtgccgcggcggcccacaacctcagcactcccaacccccaccccagccaccagctgtgacacccgagccagtggcactcagtagccagacgtccgaaccagtagagagtgaggctcccccacgggagcccatggaggcggaggaggtggaagaaagagcaccggctcagaatccggagctcacgcctggaccagcccctgcgggtcccacacccgcacctgaaacaaacgcgccctag

SEQ ID NO: 78008 - DNA, 411 bp, Artificial Sequence
  derived and/or modified sequence
taaagaatgagtagaggagtaaacccatctctggtctcctggctaacgactatgatgggcttgaggctgcaagtcgtgttggaacacatgccagtggggcccgacgccattctgcgctacgttaggagagtcggagatccacctcagcccctgcccgaggaacctatggaggttcagggtgctgaacgggcatcacctgagcctcaggaatgggtccctatcatccagcaagatatacagtcccagagaaaagtcaaacctcagccgcccctctcggacgcctatttgagcggcatgcccgcgaaacgacggaagctcaggagcgatatacagaaaagactgcaggaggatcccaattactccccgcaaagatttcctaatgcccagcgcgcgttcgcagacgacccatag

SEQ ID NO: 78009 - DNA, 789 bp, Artificial Sequence
  derived and/or modified sequence
atggagccaaatgactcaactagtactgccgttgaagagccagactctttggaagtcctggtgaaaactttggacagtcaaaccaggacatttatcgttggtgctcagatgaacgttaaagaatttaaagagcatatagcagcttccgttagcatacctagtgaaaaacagaggcttatataccaaggacgggtcctgcaggatgataaaaagctccaggagtataacgtaggtggtaaggtgatccaccttgttgaaagggccccgccccagactcacctgccgagcggggcttcctcggggacgggctcagctagcgctacacacggcggcgggtcccctccagggactcgcgggccaggggcgagcgtgcacgatcgcaacgccaactcttatgtaatggtgggtacattcaatttgcctagcgatggatccgcggtggacgtgcatataaacatggagcaggcacccatccagtctgaaccaagggttaggttagtgatggctcaacatatgatacgagacatacagactttactctcccgaatggaatgtcggggggggccgcagccacagcacagtcagcctcccccccagcccccagccgtgaccccagagcccgtggcattgtcctcacagacttctgagcctgtggaatctgaggcacctccaagggagccaatggaagccgaagaggtggaagagcgggcccctgcacagaacccggagctcaccccagggcctgccccagccggtcccacacccgctccggaaactaacgccccctag

SEQ ID NO: 78010 - DNA, 594 bp, Artificial Sequence
  derived and/or modified sequence
atggagccaaatgacagcacctccacagcagtggaagagcccgactcattagaggtcctggtcaagacactggattcacagaccaggactttcatcgttggggcccaaatgaacgttaaggagttcaaggagcacattgcagcatctgtgtctatcccttctgagaagcagcgtcttatctaccagggccgagtcctccaagatgacaagaagttgcaggaatacaatgtgggtggaaaagtgatccacttggtggaacgggctcccccccagacacacttgcctagcggagcgtcaagcgggacaggttccgcctctgccactcatggaggggggtccccacctggcaccagaggtcccggagccagcgtgcacgatcgtaatgccaattcctatgtgatggtggggacgttcaacctaccatccgatggttcggctgtcgacgtgcatataaatatggagcaggcgcccatccagtccgagccccgcgtgaggttagtgatggcccagcatatgattagagacattcagactctgctctccaggatggaatgtaggggaggcccccagccacaacacagccagcctccatag

SEQ ID NO: 78011 - DNA, 477 bp, Artificial Sequence
  derived and/or modified sequence
atggagcctaatgacagcactagtaccgctgtggaagaaccagactccttggaggtattggttaaaacactggatagccagacgcggacctttatcgttggagcacaaatgaacgttaaagaattcaaagagcacattgcagcctccgtctcaattccaagtgagaaacagcgcctcatttaccaggggcgtgttctgcaggacgataagaagctgcaagagtacaacgtggggggcaaggtgatccaccttgtggagcgggcaccccctcagacccacctcccatccggggcctctagcggcaccggatccgcgtccgccacccacgggggagggtcccccccaggaacgcgaggaccgggtgcctcagtgcatgacagaaatgccaatagctatgttatggtgggtacattcaacctgccttccgatgggtcagctgtggacgtgcacatcaacatggaacaggcacccatctag

SEQ ID NO: 78012 - DNA, 789 bp, Artificial Sequence
  derived and/or modified sequence
atggagcctaacgacagtaccagcaccgcggtcgaggagcccgatagcctggaagtgcttgtgaaaactctcgattcccaaacacgcacttttattgtgggggcccagatgaatgtgaaggagtttaaagagcacatagccgcgtctgtgtctatcccctctgagaagcagagactgatctaccaggggcgggtccttcaggatgacaagaagctccaggagtacaatgtggggggaaaagttattcacttggttgaacgagcccccccacagactcacttaccctcaggtgcatcatctggcaccggctccgctagcgctactcatgggggcggttccccccccgggactaggggacccggagccagtgtgcatgaccggaatgcaaactcatacgtcatggtggggactttcaatctcccaagtgatggctccgctgtggatgttcatatcaatatggagcaagcaccaattcagagtgagccaagagtacgccttgtgatggctcagcatatgatcagggatattcagactttactatctaggatggagtgccgaggtggcccccagccacagcatagccagccccctccccagcctccagccgtaacgcccgagccggtagcactaagcagccaaacatctgagcccgtggaaagtgaggctccccctcgcgagccaatggaagcagaagaggtggaggagcgagcccccgcccaaaaccctgaactcacacctggccccgcacctgccgggccaactccggcccccgagactaacgccccctag

SEQ ID NO: 78013 - DNA, 477 bp, Artificial Sequence
  derived and/or modified sequence
atggaaccaaatgactccacaagcactgctgtggaagaaccagacagcctggaagtgttagtaaaaacactggactcccaaacacggacattcatcgtgggtgcccaaatgaatgtgaaagaattcaaggaacacatcgccgcctctgtctccatcccatccgaaaaacaacgtcttatctaccaaggaagggtattgcaggatgataaaaagctgcaagaatacaacgtaggtgggaaagtgattcaccttgtagagcgggccccgccccaaacccacctgccgtcaggcgcctcgagtggcactggatctgccagcgccacacatggaggcggatcaccacctgggacacgcggcccgggcgcgtccgtccacgacagaaacgcaaatagctatgtcatggttggtacatttaatctgccttcagatgggtctgcggtggacgtgcacatcaatatggaacaggctcctatttag

SEQ ID NO: 78014 - DNA, 777 bp, Artificial Sequence
  derived and/or modified sequence
atggagccaaatgatagcacgtccactgcagtcgaggagccggatagcctggaggtccttgtcaagaccttagactcccagacccgcacctttattgttggggcccagatgaacgtcaaggagttcaaagaacatattgcggccagcgtctcgatacccagcgagaagcagcgcctgatctatcagggaagagtcttgcaagacgataaaaagcttcaggaatacaatgtgggagggaaagtgattcacctagtcgaacgcgcgccgcctcaaacccacctgcccagtggcgcctcatctggcactggatcagctagcgccacacacgggggcggtagtcctccgggcactcggggtcctggtgcttctgtgcacgaccgtaacgcaaacagctacgtgatggtgggcaccttcaacttgccctcagatgggagtgctgttgatgtgcatatcaatatggaacaagcgccaatacagagtgaaccaagggtgaggcttgtcatggctcagcacatgatcagagacatccagacgcttctctcaagaatggagtgcagaggcggaccccagcctcagcactctcaaccacctccccagccccctgctgtgacaccagaacctgttgcactatcatcacagacaagcgaacctgtggagtcagaagctcctccaagggagccgatggaggcagaggaggtagaggaaagagctccagcccagaatccagaattgacccccggcccagcccctgccggtccaactccagctcccgagtag

SEQ ID NO: 78015 - DNA, 789 bp, Artificial Sequence
  derived and/or modified sequence
atggagcctaacgactccacaagcacagctgtggaggagccggattcactggaggtgctggtcaagaccttggattcacagactcgtacattcattgtgggagcacagatgaacgtcaaagagtttaaagagcacatcgctgccagtgtgtctattccaagtgagaagcagcggcttatctaccagggcagagtgctacaggatgataaaaagcttcaagagtacaatgttggcggcaaagttatccatcttgtggagcgagctccccctcaaacacacctgccgtccggcgctagcagcgggactgggagcgcgagtgccacgcacgggggaggaagccctccaggaacaagaggtcctggcgccagtgtacacgataggaacgctaactcctacgtcatggtgggaactttcaacctgccaagcgatggatccgctgtcgatgtacatataaacatggagcaggcgccgatacagtctgaaccgcgcgtgaggcttgtgatggcccagcacatgattagggatattcagaccctgctgtcacgcatggagtgccggggtgggccacagccgcagcactctcagcctcctccccaacccccagctgtgacacccgagcccgttgcgctgagcagccagacaagcgaaccagtggagagtgaggccccacctcgagagccaatggaagccgaggaggtggaagagcgggcgccagcacaaaatcccgagctaacacctggtcccgccccagccggtcctacccctgctcccgagaccaacgccccttag

SEQ ID NO: 78016 - DNA, 411 bp, Artificial Sequence
  derived and/or modified sequence
tgacggatgtcgaggggcgtaaaccctagtcttgtatcttggctgaccacaatgatgggtctcaggctccaggttgtgctcgagcatatgcccgtggggcccgatgccatccttagatacgtgcgaagagtcggggatccaccccagccactgccagaggagccaatggaggtccaaggggccgagagagcttctcctgagccccaggagtgggtgcctattatacagcaagatatccagtctcaacggaaagttaagccccaacctcccctaagcgacgcttacttgtccggaatgccagccaagcgcagaaaactgcggagcgacattcagaagagactgcaggaggaccctaactatagtcctcagaggttccctaacgctcaaagggcatttgccgatgatccctag

SEQ ID NO: 78017 - DNA, 594 bp, Artificial Sequence
  derived and/or modified sequence
atggaacctaacgacagcacatccactgccgtggaagagcctgactcactggaggtgctcgtaaagactttagactcccaaactagaacttttattgtgggcgcacaaatgaacgttaaagagttcaaagagcatatagcggcctcagtttctattccatcagagaaacagcgcctgatttatcagggacgtgtgctgcaggacgacaagaaactacaggaatacaatgtgggtggtaaagtcattcatctggtggaaagggccccaccccaaactcatctaccctctggagccagcagtggaaccggtagtgcttctgcaactcatgggggtggcagtcctccgggcacgcggggacccggcgcgtccgtgcatgataggaacgcaaactcatacgtaatggtcggcacctttaacctccccagcgatggctctgcagttgatgtacatatcaatatggagcaagcccccatacaatccgagccacgtgtgaggctggtgatggcccagcatatgatccgtgatattcagaccctattatcgcgcatggaatgcaggggcgggccccagccacagcatagtcaaccaccttag

SEQ ID NO: 78018 - DNA, 777 bp, Artificial Sequence
  derived and/or modified sequence
atggaacccaacgactccacatcaactgccgtggaagagcctgattcactcgaagtgttggtaaagacactggactcccaaacccgtactttcatcgttggtgcccagatgaatgttaaggagttcaaagaacacatagccgctagcgtgtctatcccttctgagaaacaaagacttatttaccaggggagggtccttcaggatgataagaagcttcaggagtacaatgtgggcggcaaggtcattcacctggtcgagcgggcacctcctcagacccatctgccctcgggagccagtagtgggacaggtagcgctagcgcaactcatgggggaggatctcccccggggacaagaggaccgggagcatcggtgcatgatcggaatgccaacagttatgtgatggttggtacctttaatctaccctctgacggcagcgccgtggacgtgcacattaacatggagcaggctcctattcagtcagaacctcgggtgagattagtgatggctcaacacatgatccgagacatccagacgctgttgtctaggatggaatgccgagggggcccacagcctcagcacagccagcccccaccgcagccaccagcagtcacccccgagccggtggcgctttcttcacaaaccagcgagcccgttgaatcagaagccccgccaagagagcctatggaggccgaggaagttgaggagagggcgcccgctcaaaatcctgagctcacccctggccctgcccccgctggcccaacccccgcacccgaatag

SEQ ID NO: 78019 - DNA, 411 bp, Artificial Sequence
  derived and/or modified sequence
tgacggatgtccaggggagtcaatcctagcttggtgagttggttaacgacaatgatgggccttcgactgcaggtggtgttagagcacatgcctgtcggaccagacgccatcttgcgctatgtccgcagagtcggagatcctccacagcctttacccgaagaacctatggaagtgcagggcgccgagcgtgcatcgcctgagcctcaggagtgggtgccaattatccagcaggatattcagtctcaaaggaaggtgaaaccgcagccgcccctttcagatgcttatctgtcaggaatgccggctaagagacggaagctgcggagcgacatccagaagcggctccaagaagatcctaactactcccctcagcgcttccccaatgcacagcgcgcctttgccgatgatccatag

SEQ ID NO: 78020 - DNA, 780 bp, Artificial Sequence
  derived and/or modified sequence
atggagcccaacgattctaccagcacagcagtggaggaaccagattccctggaagtcctggtcaaaacactggattcccaaaccagaacttttattgtcggagctcagatgaacgtcaaagagtttaaggagcacatcgccgcatctgtttctattccatctgagaagcaaagacttatataccagggcagagtgctccaggacgataagaaacttcaggaatataatgtgggtgggaaggtgatccatctagtcgagagagctcctccacagacacacctgccctcgggggcatcatccggaaccgggtccgcctctgcaacgcacggcggaggctcaccacctggcactcgcgggcctggggctagcgtgcacgaccgaaatgctaattcgtacgtgatggtgggaacttttaatcttccctcagacggcagcgccgtggacgtccacatcaacatggaacaggcaccaattcagagtgaacccagagtccggctggtgatggcacagcacatgataagggacattcagacccttctgtcccggatggaatgcagggggggaccccagccccagcacagccagccacccccccaaccgcctgctgtcaccccagaaccagtcgctcttagtagccagacctccgagcctgttgagtcagaggccccgccccgtgaaccaatggaggcggaggaagtcgaggagagggcccccgcacaaaacccagagttgacgcctggacctgcgccagcggggcctactccggcacctgagacatag

SEQ ID NO: 78021 - DNA, 594 bp, Artificial Sequence
  derived and/or modified sequence
atggaaccgaatgactcgaccagcacggctgtggaagaaccagattcccttgaggtgctcgtaaagacacttgatagccagactaggacattcatcgtaggagcccagatgaacgtaaaagaattcaaggagcatatcgcggcttcagtctccatcccttccgagaaacagaggctgatttaccagggacgtgtgctgcaagacgacaaaaaactgcaagaatacaacgtcggcggcaaggtcattcaccttgtggagagggctccgccccagacccacctcccatctggtgcctcatcgggcacaggcagcgcctccgccacccacggcggaggctcacccccaggaacacgagggcccggcgcctccgtgcacgaccgcaatgcaaattcctatgtgatggtaggtacctttaatctcccctccgatggctcagcggtggatgtgcacattaacatggaacaagctcctatacaatccgagcctagggttaggctagtgatggcccagcatatgatccgggatatacagacactgctatcccgcatggagtgccgcggcggcccacaaccacagcatagccaacccccatag

SEQ ID NO: 78022 - DNA, 594 bp, Artificial Sequence
  derived and/or modified sequence
atggaacccaacgactctacatccacagccgtagaggagccggatagtctggaggtgttggttaagacgttagactcccagaccagaacctttatagtcggagcccagatgaacgtcaaagagttcaaggagcacatagctgcctccgtgagcatacccagcgagaagcagcgtttgatctatcaggggagagtcctccaagatgataagaaactacaggaatataacgtgggcggtaaggtgatacatctggtggagagagcgccaccacagacccatctcccctcgggcgcgtcttctggtacaggaagtgcgagtgccacccatggcggaggttcgcccccagggactcgcgggccaggcgctagcgtgcatgaccgaaatgcgaatagttatgtcatggtgggtacgttcaacctaccgagtgacggcagcgccgtcgacgtgcatatcaatatggagcaggcacccattcagagcgaaccacgcgtccgactggtgatggcacaacacatgatcagggatattcagaccctcctttcacgaatggagtgccgtggtggacctcagccacagcacagccagcctccatag

SEQ ID NO: 78023 - DNA, 789 bp, Artificial Sequence
  derived and/or modified sequence
atggaacccaacgactccaccagtacagcggtcgaggagccagacagcttggaagttctggtcaaaaccttagatagccaaacccgaactttcattgtaggggcccagatgaacgtgaaagaattcaaggagcacatagccgcttcagtaagcattccctccgaaaaacagcgactgatctaccagggtagagtgctccaggacgacaaaaagctgcaggaatataacgttgggggcaaagtaattcatctggttgagagagccccaccacagacgcacctacctagcggagcctccagcggcacgggatctgcgtcagcaacccacggcggagggagtcccccaggcacccgtgggcctggtgcctctgttcacgatagaaacgcgaacagctacgtgatggtggggactttcaaccttccctcagacgggtctgctgtggatgtccacataaatatggagcaagccccaattcagtccgagccgcgcgtcaggctcgtgatggcgcagcacatgattagagatattcagacccttctaagcaggatggagtgcagagggggcccccaaccccaacactctcagcctccaccccagccacctgctgtcacgccggaacccgtagcgctgtcaagtcagacaagcgagcccgtcgagagtgaggcgccacctcgcgagcctatggaggctgaggaggtcgaggagagagcccctgcccaaaatccagagctgacgccaggccctgcccctgccgggccaacacccgcccccgaaacgaatgccccttag

SEQ ID NO: 78024 - DNA, 789 bp, Artificial Sequence
  derived and/or modified sequence
atggaacccaacgattcgaccagcaccgctgttgaagagccggacagcttagaagttttagtgaaaactctggactctcagacccgtactttcatcgtcggagcccaaatgaacgtaaaggagttcaaggaacatatagctgcttcggtgagcatcccctccgagaagcagagactgatctaccagggaagagtactgcaagatgataaaaaactgcaggaatacaacgtcggcggaaaggtaatccatcttgtggagagagcccccccccagactcacctgcccagtggcgctagctctggcaccggatctgctagcgctactcacggcgggggtagtccacccggcacaaggggacccggcgcttccgttcacgacaggaacgcaaattcatacgtgatggtggggacgttcaatcttcccagcgacggttctgccgtcgacgtgcatatcaatatggagcaggcaccgatacagtcagagccccgggtgaggcttgtgatggcccagcacatgattcgcgacatccagacccttctgtccaggatggaatgtagagggggacctcagccacagcacagccagccccccccccagccccctgctgttaccccagagcctgttgctttgtctagtcagacatccgagcccgtggagagtgaggccccgcctcgtgagcccatggaggcggaagaggtggaagagagggcccccgctcagaaccccgagctgacccccggtcctgcccctgccgggcctacgccagcaccagagacaaatgctccttag

SEQ ID NO: 78025 - DNA, 780 bp, Artificial Sequence
  derived and/or modified sequence
atggaacctaatgactctacctctacagccgttgaggaaccagatagcctcgaggtgctggtgaagaccctcgactctcagacccgtacattcatagttggcgctcagatgaacgtgaaagagttcaaggagcacatcgcggcaagcgtttccattccatcagaaaaacaacgcctgatctatcaaggccgagtgctgcaagacgacaaaaagcttcaggagtataatgttggcgggaaggtcatccatctagtggagcgagcgccacctcagacgcaccttcctagcggggcttcctcagggacaggcagtgcttccgccacacatggcggcgggtccccgcccggaactcgaggccctggcgctagcgtgcacgatcggaacgccaactcatacgtgatggtgggaaccttcaatcttcctagcgatggctcagctgtcgatgtgcacattaatatggagcaagcacctatacagagcgaaccaagggtaaggttggtgatggcacaacatatgattcgggacattcagaccctgctttcaaggatggagtgcagggggggacctcagccacagcattcacaacccccccctcagccccccgccgttacccctgagccggtggccttatcaagccagacatccgagcctgtggagagcgaggcccctccacgagaaccgatggaagccgaggaagtggaggagcgggcacctgcccaaaatcctgaactgacccctggccctgcgcctgccggacctactccagcccccgagacttag

SEQ ID NO: 78026 - DNA, 477 bp, Artificial Sequence
  derived and/or modified sequence
atggaaccaaacgactctacttccaccgcggtggaagagcctgattccttggaggtgcttgtgaagaccctggacagccagaccagaacgttcatcgtcggtgcccagatgaacgtgaaagaatttaaggagcatatagccgctagcgtaagcatcccctctgagaaacagcgtctgatttaccaagggagagtactgcaggacgacaagaagctccaagagtacaatgttggggggaaggtcatccatctcgtcgagcgggccccacctcagactcatctgccctctggagcctctagtggaacaggatccgcctcagcaacccatggagggggctcgccgccgggaacccgcggccccggagcgtccgtccatgaccgaaatgctaactcttacgtaatggtcgggaccttcaacctgcccagtgatgggtcagctgtcgacgttcacatcaatatggagcaagccccgatctag

SEQ ID NO: 78027 - DNA, 780 bp, Artificial Sequence
  derived and/or modified sequence
atggaacccaacgactctaccagtacggccgtggaggaaccagacagccttgaggtcctcgtgaagactctggacagccagacccgcaccttcattgtaggtgcccagatgaatgtcaaagaatttaaagaacatatcgcagcaagtgtcagtattccatcagaaaagcagagattgatttaccagggaagagtgctccaagatgataagaaactccaggaatacaacgtgggcggcaaagttatacacctggtggaaagggccccaccacagactcacctcccctcgggcgcttcatcaggcactggctctgctagtgccactcacggcggcggcagccctccgggcacacgtgggcccggggcgagcgtgcacgaccgcaacgcgaattcatatgttatggtaggcactttcaatctgccttccgacgggtccgccgtggatgtgcacattaatatggagcaggcacctatccagtcagagcctcgagtgcgcttggtgatggcgcagcacatgatccgggacattcagaccctgctgtccaggatggaatgtaggggagggcctcagccacagcacagccagccaccaccccagcctcccgctgtgacaccagaaccagtggcactctcctctcaaacaagtgagccagtagaatcagaagcacctccccgagagcctatggaggccgaggaagttgaggaaagggcccctgcccagaatccagagctcacacctggcccagcacctgcaggccctactcctgcccctgagacctag

SEQ ID NO: 78028 - DNA, 411 bp, Artificial Sequence
  derived and/or modified sequence
tagcggatgtcgaggggagttaatccgagtctggtgagctggttaaccaccatgatgggcctgcggctgcaggtggtcctcgagcatatgccggtggggcccgatgctatcctgagatacgttcggcgggtaggagacccaccacagcccctcccagaggagccaatggaagtacagggtgccgaacgcgcctctcccgagccgcaggaatgggtgccgattattcagcaggacatccagtctcagaggaaggtgaaacctcagcctcctctcagcgatgcctatctttctggtatgcccgccaaaagacgcaagctacggtcagacatacagaagcgtctgcaggaggaccccaattacagtccgcagcgatttcccaatgcccagcgagcttttgccgatgatccatag

SEQ ID NO: 78029 - DNA, 411 bp, Artificial Sequence
  derived and/or modified sequence
tgaaggatgtcccgaggggtgaaccccagtcttgtgagctggctaacaactatgatgggtttgcgcttgcaggtggtcttagagcacatgccagtgggcccggacgcgattctgcgatacgtgagacgtgtgggtgatcccccacagccattgccagaggagcccatggaagttcagggagcagagcgggcttctcccgagccccaggagtgggtcccaatcattcaacaggatatacaaagtcagcggaaggtgaagccccagcccccgctcagtgatgcatatttgtccggcatgcctgcaaaaaggcggaaactgagaagcgacatccagaaacggttacaggaagaccccaactactcccctcaacggtttccgaatgcacagcgcgcctttgctgatgacccgtag

SEQ ID NO: 78030 - DNA, 594 bp, Artificial Sequence
  derived and/or modified sequence
atggagcccaacgattccacgtcaacagcagtcgaggaacccgacagtttagaggtactggttaaaacccttgatagtcagactcggacctttatagtaggcgctcagatgaatgtgaaggaatttaaagaacacatagccgccagtgtcagtattccgagtgagaagcagcgactgatttaccaggggagagtcttgcaggatgacaaaaaactgcaggaatacaacgtcggcggaaaagtgattcacttagtagaacgggcaccacctcagacccacctgccgagcggggcaagttccggcaccggctcagcaagtgcaactcatggtggcggctccccacctggaacccgagggcctggcgcaagcgtccacgatagaaatgctaatagctacgtcatggttggtacttttaacctcccctccgacgggtcagctgtggatgtccatattaacatggagcaagcccctattcaatccgagcctagagttaggctagttatggctcagcacatgattcgagatattcagacacttctgtctcgcatggagtgccgcggcggaccccagccccagcactctcagcctccctag

SEQ ID NO: 78031 - DNA, 777 bp, Artificial Sequence
  derived and/or modified sequence
atggagccaaatgattcaacttcaacagccgtcgaagagcctgatagcctcgaagtgctggtgaagacacttgacagccaaacccgcacctttatcgttggcgcgcagatgaatgttaaagagtttaaggaacacatcgcagccagtgtgtccatcccaagcgagaaacagcgtctgatttaccagggaagggtccttcaggacgacaagaagttgcaggagtacaacgtgggtgggaaggtcatccatcttgtggagcgagctcctccacagacgcacctgcctagcggggccagctcaggaactggatcagcctccgccactcacggtggcggtagcccccctggaactcgtggacctggagcttctgtgcacgatcgcaacgccaactcctacgtcatggtgggcacctttaatctcccttccgatggttcagcggtagacgtacacattaacatggagcaggcccccatccagtccgaaccgcgcgtccggttggtgatggcgcagcatatgatcagagacattcagaccttgctgtcccgcatggagtgtagaggaggcccacagccccagcactctcaacctccccctcaacccccagcagttacgcccgagccagttgcactgagttcccagactagcgagccagtcgagagtgaggcccccccgagagagccaatggaagccgaggaggtcgaggagagagctccggcacagaaccctgagctcacacctgggccagcccctgcagggcctacgcctgcccccgaatag

SEQ ID NO: 78032 - DNA, 789 bp, Artificial Sequence
  derived and/or modified sequence
atggagccgaacgactccacttccaccgctgtagaggagccggactcactcgaagtgctggtcaaaaccttggatagccagacacgcaccttcatagtgggcgcacagatgaatgtgaaagagtttaaagagcatattgccgcttcggtgagcatcccgagtgaaaagcaacggctcatataccagggaagggtgttgcaggacgataagaaactgcaggagtataacgtaggcggcaaagtgattcacctcgtcgagcgagccccccctcagacccaccttccgagcggcgcttctagcggaacagggtctgctagcgctacccatggaggagggtcaccgcctggaacacgtggacccggcgcctctgttcacgaccgtaacgctaacagctatgttatggtgggcacttttaacctgccctctgacggcagcgccgtggacgttcatattaatatggagcaggcacccattcagagcgagccacgggtacggctcgttatggcccagcacatgatcagagatattcagaccctgctgtcccgaatggagtgtagaggggggccgcagccacagcacagtcagccacccccccagccacccgccgttaccccggaacccgtggctctgtcctctcaaaccagcgagcctgtagagtctgaggccccaccgagagaaccaatggaggccgaagaagtggaggaacgcgcccccgcccagaaccccgagctcacccctggacctgcgccagctgggcccacacccgctcctgagacaaacgccccatag

SEQ ID NO: 78033 - DNA, 777 bp, Artificial Sequence
  derived and/or modified sequence
atggagcccaacgacagcacatccactgctgttgaggagccggactcactggaggtactcgtgaagaccctagattcgcaaactcgcaccttcatcgtgggggcgcagatgaacgtaaaggaatttaaggagcacatcgcagcaagcgtcagtatcccgtctgagaaacagaggctgatctaccaggggcgggtattgcaagatgacaaaaaactacaagaatataacgtcggaggcaaggtgattcatctagtggaacgagcccctccccaaacacacctgccttccggagcgtcttcagggacagggtctgcctccgccacccatgggggaggcagtcccccaggcactagggggcctggcgcctccgttcacgaccgcaatgctaacagctatgttatggtcgggacgttcaacctacctagcgacgggagcgccgtggatgtccacatcaacatggagcaggcacccattcagagtgagccccgagtccgtctagtaatggcccagcatatgatcagagatatccaaactttgctcagccgtatggagtgtagggggggccctcagccccaacactcacagccaccacctcagcctcccgccgtaactccggagcccgtggcgctcagcagccagactagtgaaccagtcgagtccgaagcaccacctagagaaccgatggaggctgaggaggtggaagaacgagcccccgctcagaaccctgagttaactccgggccctgccccagcaggcccaacgcccgccccggaatag

SEQ ID NO: 78034 - DNA, 780 bp, Artificial Sequence
  derived and/or modified sequence
atggagccaaatgatagcacatccaccgcagtcgaggaacccgactccctcgaggtactggtcaaaactctggattcacagacaaggacgtttatcgtgggcgctcaaatgaatgtgaaagagttcaaggaacatatcgcggcatccgtgagcatcccctccgagaaacagagactcatttaccagggtcgagttctccaggacgataaaaagctgcaagaatataatgtcggggggaaagttatccacctggtcgagagggcccctccgcaaacccatttgccgagcggtgcttcctccgggacaggctcggcgtcggcaacccacggaggtggaagtcctccaggcacacgaggtcccggtgctagtgttcacgatcgcaatgcaaactcttatgtaatggtcggcacatttaatctaccatccgacggaagtgccgtcgacgtgcacattaatatggagcaggctcctatccagtcggagcccagagttcgactcgtgatggcccagcacatgatacgcgatattcagaccctgctgagcaggatggaatgtcgaggcggcccgcagccccagcactctcagccaccccctcagccccctgccgttacccctgagccggtggccctcagctcgcagacaagtgagcccgtggagtccgaggccccccctcgcgagcccatggaggccgaagaagtggaagagagagccccagcccaaaatccagagctcaccccaggacccgcacccgctggtccgacacctgcgcctgagacctag

SEQ ID NO: 78035 - DNA, 477 bp, Artificial Sequence
  derived and/or modified sequence
atggaacccaatgactccactagcacagcggtggaggaaccggattccctcgaagtactggtaaaaactcttgacagccagacaaggactttcattgtgggggcgcagatgaatgttaaggagttcaaagagcacattgccgcatcagtttcaattcctagcgaaaaacagcgcctgatttaccaaggtcgggtgctgcaggacgacaaaaagctgcaggaatacaacgtgggcggtaaagtaattcacttggtcgaacgagctccccctcagacccatttgccttctggcgccagttccggtaccggcagtgcctcagccactcacggcggcggttcaccgccaggcacgcgaggaccaggagcttccgtgcatgataggaacgcgaactcatatgttatggtcggcacttttaacctacctagcgacggctctgccgtagatgtccacattaacatggagcaggctcctatatag

SEQ ID NO: 78036 - DNA, 594 bp, Artificial Sequence
  derived and/or modified sequence
atggagcctaacgatagcaccagcactgctgtggaagaacccgattctctcgaggtattagttaaaactctggactcccagacccgaaccttcatcgtcggggcgcagatgaacgtgaaggagttcaaagagcacatcgccgcaagtgtgagcatccctagtgaaaaacagcgcttaatttaccaggggcgtgtcctgcaggacgacaagaagctgcaggaatacaacgttggtggcaaagtcatacatttggtagagagggcccctccccagactcacctgccctcaggggcatcgtccggcaccggcagtgcatctgccacgcacggcggtggaagcccccccggcacaaggggccccggcgccagcgtgcacgaccggaatgcaaatagctacgtcatggtgggtacattcaatctcccctcagacggatcagccgtggatgtgcacatcaatatggagcaggctcccatacagtcagagccacgcgtacgcctcgtaatggctcagcacatgattcgtgacattcaaactttattaagcaggatggaatgcaggggcgggccccagccacagcattctcaacctccgtag

SEQ ID NO: 78037 - DNA, 789 bp, Artificial Sequence
  derived and/or modified sequence
atggagccaaatgactcaacttccacggccgtcgaagaaccggacagcttagaggttttagttaaaacactagactcacaaacacgcaccttcattgtgggagcacagatgaacgtaaaggagtttaaagagcatatcgctgccagcgtgagcatcccaagcgaaaagcagaggctgatctatcaggggcgggttctgcaggacgacaagaaactacaggaatataatgtcggagggaaagtgattcacctggtggagagggctccaccccagactcatctacccagtggcgctagttcgggcacagggagcgcaagcgccacccacgggggcggatcacctcctggcacaaggggtcccggcgcttcggtgcatgaccgcaatgccaattcatacgtcatggtgggtactttcaatctgccttcggatggcagcgctgtggatgtgcacattaacatggagcaggcccccatccagagtgagccccgagtccggctggtcatggctcagcatatgatccgggacatccagacacttctgagccgcatggaatgccgcggggggccacaaccgcagcatagccagcccccacctcagccccccgccgtgactcctgagcctgtggccctgtctagccagacctccgaaccggtggagtccgaggctccaccgcgagagccgatggaggctgaggaagtggaagagagggctcctgcccagaatccggaactaacacccgggcctgcgcctgccggccccacccctgcccccgaaactaacgccccctag

SEQ ID NO: 78038 - DNA, 789 bp, Artificial Sequence
  derived and/or modified sequence
atggaacccaatgactccaccagtaccgctgtggaagagcccgactccctcgaggtgcttgtgaaaaccctcgactcgcagacccgcacgtttatcgtgggtgcccagatgaatgtcaaagagttcaaggagcatatagctgcatccgtgtccatcccatccgagaagcaaaggctcatctaccaaggacgggtgctccaagacgataagaagctgcaagaatacaacgtgggcggcaaggtgatccacctcgttgagagagccccaccacagacccatctgccctccggtgcgtcaagtgggaccggctcggcatcggcaactcacgggggaggttcacctcccgggacccgcgggccaggagcctctgtccatgatagaaatgccaacagctacgtaatggttggcaccttcaatctgcccagcgatggttccgccgtggacgttcacattaatatggagcaggcaccaatacagtccgagcctagggtgcgtcttgtgatggcgcagcacatgattagggacatacagactctgttgtcacggatggaatgtcggggcggccctcagccacagcactcccagccccctccgcagccccccgcagtgactccagagcctgtggcgctaagctcccagacttcagaacccgtagagagtgaagctccaccaagagagccaatggaagccgaggaggttgaggagagagccccagctcagaaccccgagctgacaccaggtcctgctcctgccggtcctacgccggcccccgagaccaacgccccttag

SEQ ID NO: 78039 - DNA, 2712 bp, Artificial Sequence
  derived and/or modified sequence
atggaacctaacgatagtacctctacagctgtggaagaaccggactctcttgaggttctggtgaagactctcgatagccagacacggacattcatcgtgggggctcagatgaacgttaaggaatttaaagaacatatagcagctagcgtgagcatcccctccgagaaacagagattgatctatcagggaagggtactgcaggatgacaagaaacttcaagagtataacgtaggcggcaaagtaatacatttggtggaacgagctcctccacaaacgcatctgcctagtggcgccagttctgggaccggatcagcgagcgctacccacggcgggggatctcctcccggaacaagaggtcccggggcaagcgtacatgacaggaacgctaactcctatgtgatggtggggacttttaatctcccgtccgatggttcagccgtcgacgtccatattaatatggaacaagctccaatacagtccgagccaagagtacggcttgtgatggcccagcacatgatacgcgatatccagaccctgctgtctagaatggagtgccgaggtggcccgcaaccgcaacacagtcagccgccaccacagccaccggcagtgacacccgaaccagtagcgttgtctagccagacaagcgagccagttgagagcgaagcaccacccagagaacccatggaggccgaggaagtcgaggagcgcgctcctgcacagaatcctgagctgactccgggccccgctccagcaggccccacgcctgcacctgagactaacgccccaaaccacccttcacctgctgaatacgtggaagtcctgcaggagctgcagaggctggagagtagactgcagcctttcctgcagaggtattacgaggtgctgggggccgcagctaccaccgattataataataaccacgagggcagagaggaagaccagcgacttatcaacctggttggagaatcactgagactcttaggcaacacattcgtcgccctctcagatcttagatgcaacctcgcatgcacgccaccaaggcacctccacgttgtgagacccatgagtcactacaccaccccaatggtacttcagcaggctgctattcctattcaaattaacgtgggtactaccgtgaccatgactggtaatggaacaagacccccgcccacacctaatgcagaggccccaccacctggccccggacaggctagcagtgtcgctcccagctccaccaacgtcgaatcctctgccgagggtgctccaccacctggcccagcaccaccccctgctacctctcatcctcgcgtgataaggatctcccatcagagcgtcgagcctgtagttatgatgcacatgaatattcaggacagtggtacacaacctgggggagtgcctagcgcaccaactggaccactcggaccccctggacacggccaaacgctggggcaacaggtgcccgggtttcctacagcgcctacacgcgtggtcatagcgcggccaacacctccccaggctcgtccatcgcaccccggaggcccacccgtgtctggcacattgggagcaggactcggcacgaatgccagcctggctcagatggtcagtggattggtgggccagctgctgatgcaacccgtacttgtggcacagggcactcccggttctcctggtggtctggggcttgagtctctgtctccggagttttttaccagcgtggtgcaaggtgtactttcaagtctcctcggctctctgggagcacgggcaggaagctcagagtctattgcagccttcatacaaaggctcagtggatcttccaacatatttgaacccggagctgatggcgcgctgggttttttcggggcactccttagcctgctgtgccagaacttttccatggttgatgtggtaatgctgctgcatgggcatttccagccccttcagcggctgcagccccagctgagaagctttttccaccagcattatctgggcggccaggagccgacaccatcaaacataagaatggctacccatacactaatcaccggcttggaagagtatgtgcgcgaatcgtttagtctggtgcaggtgcagccgggcgttgacatcattaggaccaatctagagtttctgcaggagcagttcaatagtatcgcggcgcacgttctgcattgtaccgacagcgggttcggagcgaggctgcttgaactgtgcaaccagggcctgttcgaatgcctggctctgaacctgcactgtctgggaggccagcaaatggagctggcagccgtgataaatggcagaattagacgcatgtcgaggggagtgaatcccagcctggtatcctggctcacaactatgatgggccttaggctacaagtcgtactcgaacacatgcctgtaggcccagatgctatcctgagatatgtaaggagagtgggggatccaccgcagcccctgcccgaagaaccaatggaggtccagggtgctgagcgcgctagtcccgaaccccaggaatgggttcccataatacagcaagacatccagagccagcgcaaagtgaaaccacagccaccactgtcagatgcttatttgagcggaatgccagcgaagagacgaaaactcaggagtgacatccagaagcgcctccaggaggatccgaattacagtccccaacgctttcccaacgctcagcgagcatttgctgacgacccctag

SEQ ID NO: 78040 - DNA, 789 bp, Artificial Sequence
  derived and/or modified sequence
atggagccgaacgatagcacttccactgctgtggaagagccagactcgttagaagttcttgttaagaccctcgatagccaaactaggaccttcattgtgggtgcacagatgaacgtcaaagagttcaaggagcatattgccgcatccgtgtccatccccagtgagaaacaaaggttgatctaccaaggtagggtactccaagacgacaagaagctccaagagtacaatgttggcggtaaggtgatacacttagtagagcgcgcgcctccgcaaacccacttaccttcaggagcttcgtctgggaccggctcagcctcagctacacatggaggtggaagtcccccaggcacgcggggacccggcgctagtgtgcacgatcgcaacgccaacagctacgtgatggtgggtactttcaatctgccgagtgatggcagcgccgtggatgtccatattaatatggagcaggctcccatccaaagtgaacccagggtgagactcgtaatggcccagcacatgattcgcgatattcagacactgctgtctagaatggagtgccgcggcggcccgcagccacagcattctcagccacccccgcagcccccagccgtgacgcccgagcctgtagctctgagctcccagacgtctgagccagtcgagtccgaagccccaccacgagaacccatggaggcggaagaggtggaagagagagcgcctgctcagaacccagagctgactcctggtccagcgccagcagggccaacacctgcaccggaaacgaatgcaccatag

SEQ ID NO: 78041 - DNA, 780 bp, Artificial Sequence
  derived and/or modified sequence
atggagcctaacgatagcacgagcacagctgtcgaagagccagattctctcgaggtgctggttaagaccttagatagccagacaaggacattcatcgtgggtgcccagatgaatgtaaaagagtttaaagagcacatcgcagcttcagtgagtatcccgtctgaaaaacagcgtctcatctaccagggccgagtgcttcaggacgataaaaaattgcaggaatataacgttggtggtaaagtaatccacctggtcgaacgagctccaccacaaacccacctcccatccggcgcaagtagtggtaccggctcggcttctgccactcacggtgggggatcacctcccggcactcgcggccctggagccagcgttcacgacaggaacgcaaattcatatgtgatggttggaactttcaatttaccttccgatggcagcgcagttgacgttcatattaatatggaacaggcacccatccagtccgagcctagggttcgcctggtcatggcccagcacatgatcagagacatacagaccctgctatcccgaatggagtgccggggcggtccgcagcctcaacatagccaaccgccgcctcagccacccgctgtgacaccggaaccagttgccctgtccagccagacctctgaacccgtggagagtgaggccccaccccgagagcccatggaagccgaggaggttgaggagagagcacctgctcagaatccagaactgactcctgggcctgcacccgccggcccaacgccagcaccagagacatag

SEQ ID NO: 78042 - DNA, 777 bp, Artificial Sequence
  derived and/or modified sequence
atggaaccgaatgatagtacttcaaccgccgtcgaagagcctgactccctggaggtgctcgtgaagacactggactcacaaactaggacctttatcgtgggagcccaaatgaatgtcaaggaattcaaagaacatatcgcagcttctgtgagcatccctagcgaaaagcagcgcttgatctaccaggggagagtgctgcaggatgacaagaaactacaggagtacaatgtgggggggaaggttatccatctggtggagagggctccacctcaaacccatctaccctctggagcatcttccggcactgggagtgctagcgcaacacatggaggcggaagcccccctggcacgcggggcccgggtgcctctgtccatgacagaaacgccaattcttatgtcatggtcggcacttttaacctgccaagcgacggcagcgccgtcgatgttcatattaatatggaacaagcgcctatccagtcagagccgagagtccggctggttatggcccagcacatgataagagacatccaaactctcttaagcaggatggaatgtcggggaggcccgcagccccagcactctcaacctcctcctcagccccccgcagtgacacctgaacctgtcgctctgtctagccagacttccgagcctgttgaatccgaggcccccccgagagagccaatggaggcagaggaagtggaagagagggccccagcccagaacccagaactgactcctggaccagcacccgctgggcccactcccgctcccgaatag

SEQ ID NO: 78043 - DNA, 477 bp, Artificial Sequence
  derived and/or modified sequence
atggaacccaacgacagcactagcactgccgttgaagagcccgactctctagaggtacttgttaaaacgctggattctcagactcgcaccttcattgtgggtgcacagatgaacgtcaaagagttcaaggagcacattgccgcctccgtgtctattccatctgagaaacagcgactgatataccaaggccgggtgttgcaggacgataagaagctgcaggagtacaatgtggggggcaaagtgatccacctcgtggaacgcgcccccccgcaaacccacctcccatctggcgccagctcaggcacgggctcagcatccgcaactcacggaggcggttcccctcccggtacacgaggtcctggggccagcgtccatgatcggaatgccaattcttacgtgatggtgggaacttttaacctgccctcagatggctccgctgtggatgtgcacattaacatggaacaggctcctatttag

SEQ ID NO: 78044 - DNA, 411 bp, Artificial Sequence
  derived and/or modified sequence
tgaagaatgtcgaggggcgtaaatccatcactggtgagctggttaaccacaatgatgggactgcgtctgcaagtggtgctcgaacatatgcctgtaggcccagacgccattttgcggtacgtaagaagggtaggcgacccacctcagcccctgcccgaggaaccaatggaggtccaaggagctgaacgagcctctccggaaccgcaagaatgggtgccaatcatccaacaagatatacaaagtcagaggaaagtgaagccacaaccaccactaagtgacgcgtatctgtccgggatgcccgcgaaaaggagaaaacttaggtcagacattcagaagaggctgcaggaagatcctaactatagtccccagcgattcccaaatgcccagcgagccttcgccgacgacccatag

SEQ ID NO: 78045 - DNA, 780 bp, Artificial Sequence
  derived and/or modified sequence
atggaacccaatgatagtactagcaccgccgtggaggagccagattcattggaggtgctggtgaaaactctcgactcacagacgaggactttcatcgttggggctcagatgaacgttaaagaattcaaggagcacattgcagctagcgtgagtattccatcagagaaacaacgactgatctaccagggacgagtgctgcaggatgacaaaaagctccaggaatataacgttggaggaaaggtgattcacctggtcgaacgggcgcccccacagacgcatctgccttcaggggcttcctctggcactggctctgctagcgctactcacggcgggggttccccacctggcactagagggcctggcgcatcagttcacgacaggaatgctaactcctatgtaatggtgggcacatttaatctaccatcggatggctctgctgttgatgtgcatataaacatggaacaggctcctatccagtccgagcctcgcgtgcggctggtgatggcacagcatatgattcgggatattcagactcttctgtcccgaatggagtgccgaggcggcccacagcctcagcactcccagccaccaccccagccccctgcagtgactcctgagcccgtcgccctgtcttcccagacttccgagcccgtcgagtcggaagccccacctcgggaaccgatggaagccgaggaggtggaagagagagcccctgcgcagaatcctgaactcacccctggaccagcccccgcaggtccaactcccgcgcccgaaacctag

SEQ ID NO: 78046 - DNA, 477 bp, Artificial Sequence
  derived and/or modified sequence
atggagccaaacgacagtacctcaacagcagttgaggaaccggattctctagaggtgcttgtcaaaaccttggacagccagacgagaacattcattgtgggagctcagatgaatgtcaaggaattcaaggagcatatcgccgcgtcagtcagcatccctagtgaaaagcagcggctgatctaccaaggccgggtgctgcaggacgataaaaaactgcaagagtacaacgtgggaggaaaggtgatccacctggtcgagcgtgcgcctccacaaacgcacctcccaagcggggcctcaagcggtacgggaagtgcaagcgctacccacggaggcggctcgccacccggcacgagggggcccggggccagtgtccatgaccggaacgcgaactcctacgttatggtgggaacctttaacctgcccagcgacggttctgccgtcgatgtccacattaacatggaacaggctccgatttag

SEQ ID NO: 78047 - DNA, 777 bp, Artificial Sequence
  derived and/or modified sequence
atggaaccaaacgacagtacgagcactgctgtcgaagagcccgatagcctggaggttctcgtgaagacgcttgacagccagacacgcacatttatagtaggcgcacaaatgaatgtgaaggagttcaaggaacatatcgctgcaagtgtaagcatcccaagcgagaaacagcgcctcatctaccaaggtagagtcctacaggacgataaaaaactacaggaatataatgtcggcggaaaagtgatacaccttgtcgaaagggcacccccacagacccacctcccctccggcgcaagttccggaacgggcagcgcctccgcaacccatggcggtggaagtccccccggaacccgcggtcccggtgcttccgtgcacgaccgcaatgcaaacagttatgtaatggtagggactttcaacttgccatcagacgggtcagcagtggatgtgcatatcaatatggagcaagctcccattcagagcgaaccacgggtccgcctggtgatggctcagcacatgatccgggacatccagaccctgctcagccgcatggagtgtcgtgggggtcctcagcctcagcactcccaaccccctccccaaccgcctgccgtgaccccggaacccgtcgcactgtcttcccagacaagcgaacctgtcgaatcagaagctccaccaagagagccaatggaagctgaggaagttgaggaaagggcacccgcccagaaccctgaactgaccccaggaccggcccccgccggaccaacccctgcccctgagtag

SEQ ID NO: 78048 - DNA, 789 bp, Artificial Sequence
  derived and/or modified sequence
atggagcccaatgactccacttctactgctgtagaggagcccgatagcctggaggtgttggtgaagactcttgacagccagacaagaacgttcatagtgggggcacagatgaatgtcaaggagttcaaagagcatatagccgctagtgtgagcatcccaagcgaaaaacagaggctcatttatcaagggcgagtacttcaggacgacaagaaactccaggaatacaacgtcggcggcaaagtaatccacttagtggagcgggcaccaccacagacccaccttcctagcggcgcgagtagcggcacagggtctgcatcagcaacccacggaggcgggagtccccccggcacccggggcccaggcgccagcgtgcacgaccggaacgctaactcctatgtcatggtaggcactttcaatctgccgtctgatggttctgcggttgacgtgcacatcaatatggagcaagctcctatccagtccgagcctcgggttcgcctggtgatggctcagcacatgattagggacatccagacactgttgagtcggatggagtgcagggggggcccccagccccaacatagtcagccgcctccgcagcccccagccgtgacaccagagcctgtcgctctttccagccagacttcagagccggtggagtctgaagctccacccagggaacccatggaagccgaagaggtggaagagcgggcacccgcccagaacccagaactgacccctgggccagccccggcagggcccacgcccgcccccgaaaccaatgctccttag

SEQ ID NO: 78049 - DNA, 789 bp, Artificial Sequence
  derived and/or modified sequence
atggaaccaaatgacagcacaagcacagccgttgaagagcctgattcccttgaagtccttgttaaaaccctggacagtcagacgagaacttttatcgtaggcgctcagatgaacgtgaaggaattcaaagagcacattgccgcatctgtaagtatcccaagcgagaaacaacgtcttatttaccagggtagggtgctccaggatgataaaaaattacaggagtacaatgtcggaggaaaggtcattcacctggtcgagcgcgccccccctcagacccacctgccatcaggcgctagctcaggcaccgggtccgccagcgcgacacacggaggcggctcaccaccaggcacacgtggccctggagcctccgtgcatgatagaaacgccaactcctacgtcatggtgggtacctttaacttgcccagtgatggctccgccgtcgatgtgcatatcaatatggagcaggcacccattcaatccgaacccagagtaagactggtgatggcccaacatatgattagggacatccagactcttctaagcagaatggagtgtcgaggcggcccgcaaccacagcatagccagcctccgccacaaccccccgcagtgacccccgagcccgtagcactgtcaagccagacaagtgaacccgtggaatccgaagccccccctagggaacctatggaggctgaagaggtagaagagcgagcccctgcccaaaacccagaattgacccccggacccgcacccgcgggtcctaccccagctcctgagacaaatgcaccatag

SEQ ID NO: 78050 - DNA, 780 bp, Artificial Sequence
  derived and/or modified sequence
atggagcccaatgattctacttcgaccgcagtggaggagcctgactcactggaagtgctggtaaagacacttgactctcaaaccagaacgtttattgtgggagcgcagatgaatgtgaaagagttcaaggaacatattgccgcctcagtttccattccaagcgaaaagcaaaggctgatttatcaaggtagagtgctccaggacgacaaaaaactacaggagtacaatgtgggtgggaaggttatacacttagtcgaacgcgccccccctcagacccacctcccaagcggagcgagctcaggaacaggtagcgcttccgccactcacggagggggcagccctcctggtacccgtggtcccggtgctagcgtacacgatcgcaacgccaactcatatgtgatggttggcactttcaatctccccagcgatgggtctgccgtcgatgtgcacatcaacatggagcaggccccaatccagtccgagccacgggtgcggctggttatggctcaacatatgattcgggatattcagacactcctttcccggatggagtgtagggggggaccccagccacagcatagccagcctccacctcagcccccagcagtgacacccgaaccagtggctctgagttcgcagaccagtgagcccgtggagtcggaagcgccgccaagggagccaatggaagcagaggaagtagaagagagagccccagctcagaaccccgagctgacaccaggacctgcccccgccggaccaacaccagctcctgagacctag

SEQ ID NO: 78051 - DNA, 477 bp, Artificial Sequence
  derived and/or modified sequence
atggaacctaacgactctacaagcacagccgtggaagagccggattcattagaagtcctggtgaagactctggacagtcagacacgaacctttattgtcggcgcccaaatgaatgtgaaagagttcaaggaacacattgcagcatcggtctccattccttctgagaagcagagacttatctaccagggtcgagtgcttcaggatgacaaaaaattacaggagtacaacgtaggaggtaaggtaatacacctggtcgaaagagctcctccccaaacacacctgccgtctggggcttcgtcaggaaccgggagcgcctccgctacacatggcggcggatctccccccgggacccgcggcccaggcgcatcagtgcacgaccgcaatgcaaattcttacgtgatggtaggaacatttaacctaccctctgatggcagcgctgtcgacgtgcatatcaatatggagcaagcccctatttag

SEQ ID NO: 78052 - DNA, 789 bp, Artificial Sequence
  derived and/or modified sequence
atggagcccaacgattctaccagcactgccgtcgaggaacccgactcattagaagtcctcgttaagaccctggacagccagactcgcacatttatcgttggcgctcagatgaacgtcaaagagttcaaggagcatattgctgcgagtgtgagcataccctcagagaagcaacgtctcatttatcagggccgcgtcctccaggacgacaagaagctgcaggaatacaatgtaggtggtaaagtgatacacctggtggagcgcgcaccgccccagactcacctgccttctggtgccagttctggcacagggtccgccagcgcaacacatgggggcggttcaccaccaggaactagggggcccggagctagcgtacacgatagaaacgctaacagctacgtgatggtaggaacttttaacctgccttcagacggaagtgccgtggatgtccacatcaacatggagcaggcaccaatccagagcgagccccgggtcagactggtgatggcacagcatatgatccgggacatacagaccctactgtcccgcatggagtgcagaggcggcccccagccccagcacagccagccaccacctcagcctccagccgtgacacccgaacctgttgctctctcaagccagacctccgagcctgtggagtctgaggcacctccacgcgaaccgatggaggccgaagaggtcgaggaaagggccccagcccagaatcccgagctgaccccagggcctgcgcccgcgggtccgacgccagcgccagagaccaatgcaccctag

SEQ ID NO: 78053 - DNA, 594 bp, Artificial Sequence
  derived and/or modified sequence
atggagcccaacgatagcacctccaccgcagttgaagaaccggactcgctggaggtcttagttaaaacgctcgactctcaaacacgcaccttcattgtgggagcccagatgaatgtgaaggaatttaaggagcacattgccgcatcggtgtcaatcccatcggagaagcagaggctcatctaccaaggtagggtgctccaagacgataaaaagttacaggagtacaatgtcgggggcaaagtgattcacctggttgagcgtgctcccccccagacccatttaccaagtggcgcgtcatctgggaccggaagcgcctctgctacacacggcgggggctcaccaccggggactcgaggacccggtgcgagcgtgcacgaccgtaacgctaactcatatgtgatggtcgggacgttcaatcttcctagcgacggaagtgctgtagacgtccacatcaatatggaacaggctcctattcagtccgagccccgcgtgcggctcgtgatggctcaacatatgattcgcgacattcagacactgttatcccggatggagtgtcgaggagggcctcagccccaacattcccagccaccatag

SEQ ID NO: 78054 - DNA, 777 bp, Artificial Sequence
  derived and/or modified sequence
atggaacccaacgacagcactagcacagctgtggaggaacccgattccctcgaagtgttagtaaaaacactcgacagccagacaagaacttttatcgtaggggcccagatgaatgttaaagaatttaaggagcacatcgcggcttctgttagtatccctagcgagaagcagcgactgatctaccagggtcgagtactccaagacgacaaaaagctccaggagtacaacgtgggagggaaagtcattcacctggtagaacgcgcccctccccagacgcatctgcctagcggtgcatccagtggaactggctccgcttctgccacccacgggggcggatccccacctggaacccgaggacccggcgcgtctgtacatgatagaaacgccaacagctatgttatggtgggcacctttaacttaccctccgatggatctgccgtggatgtgcacattaacatggaacaggccccaatccagtctgagccacgtgtgcggctggttatggcccaacatatgattcgggacattcaaactttgttgtccaggatggagtgtcgtggaggaccacagccacaacattctcagcctcctccccagccacccgcagttactcctgagccggtggcactgtcttcacagacctccgaacccgtagagagcgaagcacccccccgggagccaatggaggccgaggaggtggaggagcgtgctccagcccagaaccctgagctgactccaggtccagcgcccgctgggcctaccccagctcctgagtag

SEQ ID NO: 78055 - DNA, 411 bp, Artificial Sequence
  derived and/or modified sequence
tagcgaatgtctagaggtgttaacccaagtctagtctcctggctgaccaccatgatggggttgagacttcaagtcgtgctggagcacatgcccgtgggacctgacgcaatcctgcgctatgttagaagggtaggagatcctccccaacctttgcccgaggaaccgatggaagtgcagggtgccgaacgcgcttcccccgagcctcaggagtgggtgcctatcatccagcaggacatccaatcacagcggaaggtcaaaccgcagcctcctctaagtgatgcctacctgagcggaatgcctgccaagaggcgcaagcttcggagcgacatccagaaaaggctgcaggaggatccgaattatagtccccagaggttccctaatgcgcagagagcctttgcagacgatccatag

SEQ ID NO: 78056 - DNA, 2712 bp, Artificial Sequence
  derived and/or modified sequence
atggagcccaatgattctacctctaccgctgtggaagagccagatagcctcgaggtcctggtgaaaacgctggattcacagactagaacgttcattgtgggcgcgcagatgaatgtgaaggaatttaaggagcatatcgcagcctccgtaagcatcccctctgaaaaacagaggctgatctaccaaggcagggttctgcaagacgataagaaactgcaggagtacaatgtcgggggcaaggttatccacctggtcgagcgcgcacccccccagacgcacctcccgagcggggcctcgtccgggacaggcagtgccagcgcgactcatggagggggttcgccaccaggtacacgcgggccaggcgcatcagtacacgatagaaatgcaaatagctacgtgatggtgggaacctttaatttgcctagcgatgggtccgccgtcgacgtgcacatcaatatggagcaggcaccaatacaatccgaaccccgcgtccgcctcgttatggcacagcacatgatcagggatatccagaccctgctatctaggatggagtgtcggggggggccccagccacagcactcccagcctccgccccagccaccagccgtgactccggagcctgtggccctgtccagccagactagtgaacccgtcgaaagtgaggcaccccctcgcgagcctatggaagcagaggaagtggaggaacgagctcccgcacaaaacccggagctgactcctggccccgcccctgctggccctactccagctcctgagaccaacgctcccaaccatccctctccagccgagtatgtagaggtcctacaggagctgcagcggcttgagtcacgactgcaaccctttctccagagatactatgaggttctgggcgctgccgctactacagactataataataatcatgagggacgggaggaggaccagaggctcatcaacttggttggagaatccctgagattgctcgggaatacttttgttgccttgagtgacctgagatgcaatctggcctgtactcccccgcggcacctgcatgttgtcaggcccatgagccactacaccacaccgatggttctccagcaggctgccattcctatccagatcaacgttggcacgacagtgacaatgaccgggaatgggacccgacccccgcctacccctaacgctgaggcgcctccccctggacctggccaagccagtagtgtggcgccaagttctaccaacgtggagagtagcgccgaaggggctccacccccagggccagccccccctccggcaacttcacaccctcgagtgatccgaatatctcatcagtccgttgagccggtagtcatgatgcacatgaatattcaagactccgggacgcaaccgggtggcgtgccatctgcacctacgggtcctctggggccaccagggcatggacagactctaggacagcaagtccccggcttccccaccgcccccacaagagttgtaatcgccaggccaacacctccccaggcgcggcccagccatccaggtggtcctcctgtcagcggcacgttgggagccggccttgggaccaacgcatctttagcacagatggttagcggtctggtaggtcagttgctaatgcaaccggttcttgtggcccaaggtacacccgggtcacccggcggcttgggccttgagtctctctctcccgaatttttcacgagtgtagtgcagggcgtgctgagctctctgctgggatctctcggagccagggccggctcatccgaatcaattgctgcattcatccagcgtctgtctgggagttcaaacattttcgaacccggtgccgatggtgccctgggtttttttggcgctctactgtcgctgttgtgtcagaactttagtatggtagatgttgtgatgctgctgcacgggcattttcaacctcttcaaaggctgcagccacagcttagatcatttttccatcagcattacctggggggtcaggagccaacgccatcaaacatcaggatggcgacccacaccctgatcactggattggaggaatacgtgcgagaaagcttcagtcttgtccaggtgcaacctggtgtcgacataatcagaacgaacctggagttcctccaggaacaatttaattccatcgccgctcacgtcctgcactgcacggattcggggttcggggcccgcctcctagagctctgtaatcagggcctgttcgagtgcttggcactgaatctgcattgccttggcgggcagcagatggagctcgcggccgtgattaacgggcggatcagacgaatgtcgcgcggagtcaatccttctttggttagctggttgacaacaatgatgggactccgcctccaggtggtgttagaacatatgccagtcggccccgacgcaatactgcggtatgtccgcagggtaggggatcctccccaacctctccccgaagaacctatggaagtccagggagccgagcgtgcatctccggaaccccaggaatgggtgccaatcatccagcaggacattcagagccagcgaaaagtgaaaccgcagccacccctgagtgatgcctacctgagcggtatgccagcaaaaagacgaaagttgagatctgacatccagaaacggctacaggaggatccgaactattcgccacagagattccctaatgcccagcgagcgtttgcggatgacccatag

SEQ ID NO: 78057 - DNA, 2712 bp, Artificial Sequence
  derived and/or modified sequence
atggagcccaacgatagtacgtcaaccgctgtggaggagcccgatagcctggaggtcttggtgaaaactcttgatagtcagactagaacttttatcgtgggggctcagatgaatgtgaaggagtttaaggaacacatcgccgcaagcgtgagcattcctagtgagaaacagcggcttatctatcaggggcgagtgctccaggacgacaagaaattgcaggaatataatgtagggggcaaggtgattcaccttgtagaaagggcacctccacaaacacatctgccaagcggcgcatctagcggaactggttctgcatctgctacacatgggggggggagtcccccaggtacccgagggcctggtgcaagtgtgcacgatcgaaacgccaattcctacgtcatggtcgggaccttcaacctccccagcgacggatcagcggtggacgtccacattaatatggagcaagctccaatccagagcgaaccgcgggtacgcctagttatggcccagcatatgatccgagacattcagactctcctgtccagaatggaatgtagaggggggcctcagcctcagcactcacaaccaccccctcagccacccgccgtgactcctgagcccgtcgccttaagctcacagaccagcgagcctgtggaatccgaggcaccacccagagaaccaatggaagccgaagaagtggaagagagggctccagctcagaaccctgagctgacacccggtccagcacccgctgggccgactcctgctcccgagacaaacgctcctaaccatccttctccagccgagtacgtggaagtcctgcaggaactacaaaggctggagtcccgtctgcaaccatttctgcagcgatactacgaagttctcggagctgcggccacaaccgattacaacaacaatcacgagggtcgagaggaggaccaacggctgatcaacctcgtgggagagtccctgaggttgctgggaaacacatttgtggctctcagcgatcttcgatgtaatctggcttgcacgccgcccagacacctccatgtagttagacctatgtcgcactacacaactccaatggtcttacagcaagccgcgataccaatccagatcaacgtcgggacaactgtaaccatgactggaaatggaacaaggcccccacccactcccaacgccgaggccccaccccccgggccagggcaagcaagcagcgttgccccatcgtcaaccaacgttgagtcctctgctgaaggcgcccccccgccgggacctgcgcctccccctgcaaccagtcatccccgggtgatccgaatctcccatcagagcgtcgaaccagtggtgatgatgcatatgaatatccaggacagcggaacccagcccggtggggtaccgtctgcgccaacgggccccctaggtccacccggacatgggcagactctggggcagcaagtgcccggtttcccgacggctccaacccgagtagtaattgcgagacccacaccgcctcaggccaggcccagccatcctggcgggccgcctgtttcaggaactcttggcgcaggcctgggaaccaatgccagtctggcccagatggtgtcgggcctagtggggcaactcttgatgcagccggtgctggttgctcaggggactcccggctcacccggtggactgggcctggaaagcctgtcaccagaattcttcacaagcgtcgttcaaggggtcttgtcatctctgctgggatctctgggagcccgggcaggcagcagcgagagtatcgctgctttcatacagcggctatcagggtcatccaatatcttcgaacccggagccgacggggcgctcggcttcttcggcgccctgctcagcctgttatgtcagaactttagtatggtagacgtagtcatgctccttcacggccattttcagcctttacagcgcctccagccacagctgcgatctttctttcatcaacattatctagggggccaggagcccacgccaagcaatatacgcatggctactcatacactgatcaccggtctggaggagtacgtgagagaatccttcagcctagtccaggtgcagcccggtgtggatatcattaggacaaatctcgaatttctgcaggagcagtttaatagcatcgccgctcacgtgctgcactgcacggattccggattcggcgcccgccttttggagctctgtaatcagggtctgtttgagtgcttagccctgaacctccattgtcttggtggccaacagatggagttggcagcagtgatcaatggcaggattcgcagaatgtccaggggcgtgaatcctagtctggtgagctggttgaccaccatgatgggactcaggttacaggtggtcctggaacatatgcctgtaggtcctgatgcaatcctacgttacgtgcgcagagtcggcgacccgccccaaccactgccagaggaaccaatggaagttcagggagcagaacgtgcttcccctgagcctcaggagtgggtccccattatccaacaggacatccagagccagaggaaggtaaagccccagccccctttgtccgatgcttacctgagcggtatgcccgcaaaacgcagaaagttgcgaagtgacattcagaaaaggctgcaagaagatccgaactactcgccccaacgatttccaaacgctcagcgagcctttgccgatgatccttag

SEQ ID NO: 78058 - DNA, 2712 bp, Artificial Sequence
  derived and/or modified sequence
atggagccaaacgatagcactagtacagcagtggaagagccagatagtctcgaagtgttggtgaaaaccctcgactcgcagacccgaacgttcattgtaggcgctcagatgaacgtgaaggagtttaaggagcacattgctgcgagcgtatctatcccatcggagaagcagaggctgatctatcagggccgggtactgcaagacgataagaagttacaggaatacaacgtgggtggtaaggtcatacatctggtggagagggctcctccacagacccacttgccctcgggtgcatcgagtggaaccggctctgcatcagcaacacacggcggcggcagtcccccagggactcgcggtcctggcgcttcagtgcatgaccgcaacgcgaattcctacgtgatggtgggtacctttaacctgcccagcgacgggtccgccgtggacgtgcacataaatatggaacaagcgcctattcagagtgaaccaagggttagacttgttatggctcagcacatgatcagagatattcagacacttttgtcacgcatggaatgtcgggggggaccccaaccacaacacagtcagccccctccccagcctcctgccgttacaccggaaccagtggctctgagcagtcaaacctctgagccagtagaatctgaagccccgcccagagaaccaatggaagctgaggaggtggaggaaagagcaccagcccagaatccagagcttactcccggacctgcaccggctgggcccacaccagccccagaaactaatgctcccaaccacccctctccagcagaatacgtggaagttctgcaggagttgcagaggctcgagagcagactccagccatttctgcagcgatactatgaggtcctcggtgcagcggccacgactgactacaacaacaaccacgagggcagagaagaggatcagcgcctgattaatcttgtgggtgagagcctccggttgttggggaacacttttgtcgccctaagcgacctgcgttgcaacctggcttgtaccccgccgaggcatttacacgtcgtgcgccctatgtcacactacacgacccccatggttttacaacaggccgcgatcccaatccagattaacgttggtaccacagtgacgatgacggggaatggcacaagaccaccaccaacccccaacgctgaggcacccccgcctgggcccggtcaggcatcctcagtggccccctcgagtacaaacgtcgagtcctcagctgaaggagctcctcccccaggcccggcacctccgcctgccactagccaccctcgagtcatacggatttcccatcaaagcgtggaacccgttgtaatgatgcacatgaacattcaggattccggcacccagcctggcggtgtaccttccgcacccacagggccactcggcccacctggtcacggacagactttagggcagcaggtaccaggcttccctacagcccccacacgcgttgtgatagcgcggcctacgcccccccaggccagaccctcccatccggggggaccacccgtgtctgggacccttggagcgggcctgggcactaacgcttcactcgcccaaatggtctcaggactcgtaggccagcttctgatgcagccggtcttagttgctcagggtactcccggaagccccggtggactcggcttggagagtctttctccagagtttttcactagcgtagtgcaaggcgtgttatcaagcctgttgggtagcctgggagcgagagctgggagctctgagtctatcgccgcatttattcagcgactttcgggatccagtaatatctttgagcccggggcggatggtgccttgggcttcttcggggcgctgcttagcttgctgtgccagaacttcagcatggtcgacgtggtgatgcttttgcacggtcatttccagccactgcagagattgcaaccccagctgaggtctttcttccaccagcattaccttggaggccaagaacctaccccttcgaatatacggatggcaactcacaccctgataactgggttggaagaatatgtgagagaaagcttctcccttgtccaggttcagcccggcgtcgacatcatccgtacaaacttggagttcctccaggagcagttcaacagtatcgctgctcacgtgttacactgtaccgattcggggtttggagctcgcctgcttgaactgtgcaatcagggacttttcgagtgcttggctctcaaccttcactgcctgggcggacagcagatggaacttgctgccgtgataaacggacggatccgaagaatgagcagaggggtgaatccaagcctggtctcatggttaactaccatgatgggcctgcgtctgcaggtcgtcctggagcacatgcccgtgggtccagacgctatcctgagatatgttaggcgggtgggagatccacctcagcccctgcccgaggaacccatggaagtccagggagctgagcgggccagtcccgaacctcaagagtgggtgcctataatacagcaagacatccagtcacagcgcaaagtgaagcctcaacccccccttagtgacgcttatctgtctggaatgcctgctaagcggcgaaagttaagaagtgacattcagaagagactgcaggaagaccccaattattcccctcaacggttccctaacgcccagcgagccttcgccgacgacccatag

SEQ ID NO: 78059 - DNA, 2712 bp, Artificial Sequence
  derived and/or modified sequence
atggagcccaatgattccacgagcactgcggtggaggaaccagactctctggaagttttggtgaagacattggattcccaaacgcgaaccttcattgttggggcccagatgaacgtaaaagaattcaaggagcatattgccgcatctgtgtctataccatccgagaagcagcgattaatttatcagggccgcgtattacaggacgacaagaagctgcaagagtataatgtgggtggaaaggtgatccatctggtggagagagccccccctcagacccacctgccctcaggcgcttcgagcgggaccggcagcgctagcgccacccacggcgggggctctccacccggcacacgcggccccggtgcatcagtacatgaccgcaacgccaactcatatgttatggtgggcacctttaacctaccatcagacggctctgcggtagacgtacacatcaacatggaacaggccccgattcagagcgagcctagggtgaggctggtaatggcgcagcacatgattcgagacatacagaccctcctgagccgaatggagtgcagagggggtccacagccacagcacagccagccacctcctcagccgcccgccgttaccccagaacctgttgcactcagtagtcagacaagcgagcctgtagagagcgaagccccaccgagggaaccaatggaggcagaggaggtggaggaaagggcccccgctcagaatcctgaattgaccccagggcctgcaccagcaggtccgaccccagcccccgagacgaacgcgcctaatcatccatcacccgcggaatacgttgaggttctgcaggagctgcaacgcttggagtccagactgcagccttttctccagcggtactacgaggtgctgggggcagctgccacaaccgactacaacaacaaccacgaaggaagggaggaggaccaaagacttatcaacctcgtgggcgaatccctacgactgctcggcaacactttcgtcgctcttagtgacttgaggtgcaatctggcttgcacacccccacggcacctccacgtggtacggccaatgagccactacacaacacctatggttctgcaacaggcagctatccccatacagataaatgtgggcacaactgtaaccatgactggcaatggcaccagaccaccgcccactcccaatgcagaggcgcctcccccaggaccagggcaagcttctagcgtggctccatcctctacgaacgtggagtcctctgcagagggagcccctccgccaggccctgcacccccccctgcaacctcacacccaagggtgattcgcatctcccaccagagtgttgaacccgtcgtgatgatgcatatgaacatccaggatagtggtacacaaccggggggagtgccttccgctcctacaggcccattgggcccccccggtcacggtcagacattgggacaacaggtgccaggtttcccaaccgctcccacacgcgttgtcatagcgcgtcctaccccaccccaagctcggcctagtcatcccggaggcccacccgtgagcggcactttgggggctggcctgggtacaaacgcttccttggctcaaatggtctcggggctggttggtcagttactgatgcaacccgtgctggttgcccagggcacaccaggttctcctggcgggctaggattagagtctttatcacctgagttctttacctccgtagtccagggagtactgtcctccttattgggttcactaggggcacgcgctggatccagtgaatcaatcgccgctttcattcagaggctgtccggatcaagtaatatcttcgagcccggagctgacggggccctagggttttttggggcgttgctttctctcctttgccagaacttcagtatggttgacgttgtgatgctccttcacgggcactttcaacccctccagcggttgcagccacagctgagaagttttttccatcagcattatctgggaggccaagaaccaaccccatcaaatatacggatggcaactcacactttaataacaggcctagaggagtacgtgcgagagtcttttagcctggtccaagtgcagcccggcgtggacatcattaggaccaacttggaattccttcaggagcagttcaactccatcgccgctcacgtgctgcattgcaccgattctggattcggcgcacgcctcctggagctgtgtaaccaggggttgtttgagtgcctcgcccttaacctacactgcctgggcgggcagcagatggagctcgccgccgttattaacggtcggattcgccgcatgtctcgcggggtgaacccaagcctcgtaagctggttgaccaccatgatgggattgcggctgcaggtcgtgctagaacatatgccggtagggcctgacgcaattctgagatatgtacgccgggtgggcgatccacctcaaccccttcctgaggaacccatggaggtgcagggggcagagcgggcctctcccgaacctcaggaatgggttcctattatccagcaggacattcagagtcagcgaaaggtgaagccccagccaccactgagcgacgcctatctgtctggcatgcctgctaagagaaggaagctcaggagtgatatccaaaagaggttgcaggaggaccccaactatagtccgcagagatttcctaacgctcagagggccttcgcagacgacccgtag

SEQ ID NO: 78060 - DNA, 2712 bp, Artificial Sequence
  derived and/or modified sequence
atggaaccaaacgactccacctccactgccgtggaagagccagatagtctggaggtgctagtcaaaaccttggatagccagactcggacatttattgtgggggcacagatgaacgtcaaggagtttaaagagcatattgcggcatcggtgtcgataccgtctgagaaacagagattaatctaccagggccgagtgctgcaggatgacaaaaaactccaagaatataatgtaggtggtaaagtcattcatttggttgagcgcgccccgccgcagacgcacctgcccagcggagcttcctctggcacgggcagcgcttcagctacccacggcggaggcagcccacctgggaccaggggccccggagcctcagtacacgaccggaacgcaaattcatacgtgatggtcggaacgtttaatctgccctccgacggaagcgcagtggatgtccacatcaacatggagcaggctccaattcagagtgagccacgggtcaggctcgtaatggcccagcatatgatcagggacatacaaactctgcttagcaggatggaatgtcgcggtggccctcagcctcagcatagccagcctccccctcagccccccgctgtgactcctgaaccagtcgccctatcatctcagactagcgagcccgtggagagtgaagctccccctcgcgagcccatggaggctgaggaggtcgaagagcgcgcccccgcccagaatccagagctgaccccaggacctgcgccagcaggcccaacccccgcacccgagactaacgcgcctaaccatccaagccctgcggagtacgtggaagttcttcaagagctgcagagacttgagtctcgccttcagccttttctgcagcggtactatgaagtactgggagcagccgccactacagactacaataataaccacgaggggagagaggaagaccagcgactaattaatctggtgggtgaatccctgcgtttactggggaacacatttgtggcactatcagaccttcgctgtaacctggcatgcacgcccccacgccacctgcatgtggtccggccaatgtcacactatactactcctatggtgctgcagcaggccgccatacccattcagatcaacgtcggaacaacggttactatgacaggcaatggaacgcgcccaccccccacacccaacgcagaggccccaccgccggggccaggccaggcgagctctgtggcaccctcctctaccaacgtcgagtcgtctgctgagggagctccaccccctgggcctgctccacctccagctacaagtcacccacgcgtgattaggatctctcaccagagtgttgaaccggtcgtgatgatgcacatgaacatccaggactctggcacacagccgggaggcgtgcccagtgcgccaaccggcccactggggcctcccggtcacggacaaacactagggcagcaggtacctggatttcctactgcccctaccagggtcgtgatcgctagacctactccaccacaggctcgaccttcccaccctggcggaccgcccgtcagtggcacgctgggagccggactcggaactaatgcatctttggcacagatggtgagtgggctcgtcgggcagctgctgatgcagccggtgctggttgcacagggcacccccggctcacctggcggactagggttggaaagtttgagccccgagtttttcaccagcgtcgtgcagggcgtgttgtctagtctgctgggttccctgggggcacgagcgggctcatctgaatctatcgccgcattcatccagagactttccggcagttctaatatctttgagcccggagccgatggagcactgggcttttttggcgcccttctctccctgctttgccaaaactttagtatggtggatgtcgtgatgctcctacacggccacttccagcctctgcaaagactgcaaccccagcttaggagcttctttcatcagcactacttgggcggccaggaacctacgccctctaatatccggatggccacacacactctcataacaggtctcgaggagtacgtccgggaatcattcagcctcgtccaggttcaacccggcgttgacataatcagaacaaacctcgagtttttacaggaacagtttaacagcattgccgcgcacgtgttgcactgcaccgactccggattcggggcccggctgctggagctgtgtaatcagggactgtttgagtgccttgccctaaatcttcattgccttgggggacaacagatggagctggcggcagtaatcaacgggcggatcaggaggatgagcagaggcgtcaacccatctttggtgtcttggttgaccactatgatgggcctgaggctccaggtggtcctggagcatatgcctgtgggccccgacgccattctcaggtacgtgaggagggtaggtgacccgccccagccacttcctgaggaacctatggaagtgcagggagctgaaagggcatcacccgaacctcaagagtgggttccgataatccagcaggatatccagagtcagaggaaggtcaagcctcaacctcctctgtcagatgcttacctgtccggcatgccggctaagagacgtaagctgcggtctgacatccagaagagactgcaggaggaccctaattacagcccacagcggtttcccaatgctcagagggccttcgccgacgacccgtag

SEQ ID NO: 78061 - DNA, 2712 bp, Artificial Sequence
  derived and/or modified sequence
atggaacccaatgatagcacatcaactgccgttgaagaacctgatagcctcgaggttctcgtgaagacactggacagccaaactcgcacattcattgtgggggcccagatgaacgtgaaggaattcaaggagcacatagcagcatccgtgagcataccgagcgaaaagcagcggcttatctatcaaggccgggtgttgcaggacgacaaaaaactccaggagtacaacgtgggcgggaaggtgatccatttagtggaaagagcccctccgcagacacatttgccgtccggtgcaagttctggaaccgggagcgcctctgccacccatggaggggggtctccaccaggaacccgcggacctggcgcgtccgtacacgaccgaaatgctaattcatacgtgatggtgggcacgttcaacctccccagcgacggttcagccgtagatgtccacataaatatggagcaggcaccaatacagtcagagccacgggttagactcgtaatggcccaacacatgatccgagatatccaaaccctgctgagcagaatggaatgcaggggcggtccacagccccagcacagccaacctcctcctcagcctcctgccgtgaccccagagcccgtcgcgctgagctctcagacttccgagcccgtggaatcagaagccccaccccgggagccaatggaagccgaggaggttgaggaaagggcccccgcccagaatccagagctcactccagggccagcccctgccggccctacaccggctccggagaccaacgctcccaaccacccctcccctgccgaatatgtagaagtgcttcaagaattgcaaagacttgaatcaaggctgcaaccttttctccagaggtactacgaagttctcggcgccgccgcaactactgactacaataacaatcacgaagggagagaagaggatcagcggcttattaatctcgtgggtgaaagtttgcgcttgctaggcaatacattcgtggccctgtccgatctgagatgcaaccttgcctgtacacctcctagacatcttcacgtcgttagacccatgtcacactacactacacctatggtgttacaacaagctgccatccccatccagattaatgtcgggacaacggttacaatgacggggaatggaacaaggcctccacctacacctaacgccgaggcacccccaccgggaccaggtcaagcatccagcgtagccccatcaagcaccaatgttgagtcctctgcagaaggagcaccacctccaggcccagccccccctcccgccacctcacacccaagggttattcgcatttcgcaccagtcagtggaacccgtggtgatgatgcacatgaatattcaggatagcggtactcagcctggaggggtgccttcagcacctaccgggcctctcgggccaccaggccacggacagaccctggggcagcaggtcccaggattccccaccgctcctacgcgcgtcgttatagcaaggccaaccccgcctcaggcccgtccttcccaccccggaggtcctcccgtgtccggcactctgggcgctggacttggcaccaacgcctcgcttgcccagatggtatcaggcctggtggggcaactcctgatgcagcccgtgctggtcgcccagggcacgcctggaagccccggcggtctcggcctggagtctctgtccccagaatttttcaccagtgtcgtccagggcgtactgagcagtcttctggggtcactgggagctcgggctggatcctccgagtccattgccgcttttatccaaagattgagcggctccagcaatatattcgagcccggtgcggatggcgcgctcggcttctttggcgcgctgctttctctgctctgccaaaatttctctatggttgatgtggtcatgttgctccacgggcactttcaaccgctgcagcgtttacagcctcaactgcggagtttcttccatcagcactacctggggggccaagaaccaactccctccaacattcggatggcaacacatacgctgatcaccgggttagaggagtacgtcagagaatcgttttcattggtccaggtccagcccggagtcgatatcatcagaaccaaccttgagtttttgcaagagcagttcaattcgatcgcggcacacgtgctgcactgcactgattctggcttcggggcgcgacttttggagttatgcaaccagggcctgtttgaatgtttggccctgaatctgcactgcctgggtggtcagcagatggaactcgcagctgtgattaacggacgaattcgccgaatgagtaggggagtgaatccctcccttgtctcctggctcactaccatgatgggtttgagattacaggtggtgctggagcatatgccagtaggccctgacgctatcttaaggtacgtccgccgagtgggagaccccccccagccgctgccagaagagcccatggaagttcaaggagcagaacgtgccagccctgagccccaggagtgggtgcctatcattcagcaggacattcagtcacagcgaaaggtaaaacctcaacctcctctctctgatgcctatctcagcggcatgccggcaaaacgccggaaactgcgaagtgacatacagaaaaggctgcaagaggaccccaactatagcccccagaggttccctaatgcccagcgggcctttgccgacgatccatag

SEQ ID NO: 78062 - DNA, 789 bp, Artificial Sequence
  derived and/or modified sequence
atggagcccaatgacagcaccagcacagctgtggaggagccagacagcctggaggtgctggtgaagaccctggacagccagaccaggaccttcatcgtgggcgcccagatgaatgtgaaggagttcaaggagcacatcgccgcctctgtgtccatccccagcgagaagcagaggctcatctaccagggccgggtgctgcaggatgacaagaagctgcaggagtacaacgtgggcggcaaggtgatccacctggtggagcgggccccaccccagacccacctgcccagcggggccagcagcggcaccggcagcgccagcgccacccatggaggcggcagccccccaggcacccggggccctggggcctctgtgcatgacagaaatgccaacagctatgtgatggtgggcaccttcaacctgcccagtgatggcagcgctgtggatgtgcacatcaacatggagcaggcccccatccagagcgagccccgggtgcggctggtgatggcccagcacatgatccgggacatccagaccctgctgagcaggatggagtgccggggcggcccccagccccagcacagccagcccccaccccagcccccagctgtgaccccagagcctgtggccctgagcagccagaccagcgagcctgtggagagcgaggccccaccccgggagcccatggaggccgaggaggtggaggagcgggccccagcccagaaccctgagctgaccccaggccctgccccagctggccccaccccagcccctgagaccaatgccccctag

SEQ ID NO: 78063 - DNA, 411 bp, Artificial Sequence
  derived and/or modified sequence
tgaagaatgagccggggcgtgaaccccagcctggtgtcctggctgaccaccatgatgggcctgcggctgcaggtggtgctggagcacatgcctgtgggcccagatgccatcctgcgctacgtgcggcgggtgggggaccccccccagcccctgcctgaggagcccatggaggtgcagggcgctgagcgggccagccctgagccccaggagtgggtgcccatcatccagcaggacatccagagccagaggaaggtgaagccccagccccccctgagtgatgcctacctgagcggcatgcctgccaagaggaggaagctgcggagtgacatccagaagaggctgcaggaggaccccaactacagcccccagcgcttccccaatgcccagagggcctttgctgatgacccctag

SEQ ID NO: 78064 - DNA, 594 bp, Artificial Sequence
  derived and/or modified sequence
atggagcccaatgacagcaccagcacagctgtggaggagccagacagcctggaggtgctggtgaagaccctggacagccagaccaggaccttcatcgtgggcgcccagatgaatgtgaaggagttcaaggagcacatcgccgcctctgtgtccatccccagcgagaagcagaggctcatctaccagggccgggtgctgcaggatgacaagaagctgcaggagtacaacgtgggcggcaaggtgatccacctggtggagcgggccccaccccagacccacctgcccagcggggccagcagcggcaccggcagcgccagcgccacccatggaggcggcagccccccaggcacccggggccctggggcctctgtgcatgacagaaatgccaacagctatgtgatggtgggcaccttcaacctgcccagtgatggcagcgctgtggatgtgcacatcaacatggagcaggcccccatccagagcgagccccgggtgcggctggtgatggcccagcacatgatccgggacatccagaccctgctgagcaggatggagtgccggggcggcccccagccccagcacagccagcccccatag

SEQ ID NO: 78065 - DNA, 477 bp, Artificial Sequence
  derived and/or modified sequence
atggagcccaatgacagcaccagcacagctgtggaggagccagacagcctggaggtgctggtgaagaccctggacagccagaccaggaccttcatcgtgggcgcccagatgaatgtgaaggagttcaaggagcacatcgccgcctctgtgtccatccccagcgagaagcagaggctcatctaccagggccgggtgctgcaggatgacaagaagctgcaggagtacaacgtgggcggcaaggtgatccacctggtggagcgggccccaccccagacccacctgcccagcggggccagcagcggcaccggcagcgccagcgccacccatggaggcggcagccccccaggcacccggggccctggggcctctgtgcatgacagaaatgccaacagctatgtgatggtgggcaccttcaacctgcccagtgatggcagcgctgtggatgtgcacatcaacatggagcaggcccccatctag

SEQ ID NO: 78066 - DNA, 777 bp, Artificial Sequence
  derived and/or modified sequence
atggagcccaatgacagcaccagcacagctgtggaggagccagacagcctggaggtgctggtgaagaccctggacagccagaccaggaccttcatcgtgggcgcccagatgaatgtgaaggagttcaaggagcacatcgccgcctctgtgtccatccccagcgagaagcagaggctcatctaccagggccgggtgctgcaggatgacaagaagctgcaggagtacaacgtgggcggcaaggtgatccacctggtggagcgggccccaccccagacccacctgcccagcggggccagcagcggcaccggcagcgccagcgccacccatggaggcggcagccccccaggcacccggggccctggggcctctgtgcatgacagaaatgccaacagctatgtgatggtgggcaccttcaacctgcccagtgatggcagcgctgtggatgtgcacatcaacatggagcaggcccccatccagagcgagccccgggtgcggctggtgatggcccagcacatgatccgggacatccagaccctgctgagcaggatggagtgccggggcggcccccagccccagcacagccagcccccaccccagcccccagctgtgaccccagagcctgtggccctgagcagccagaccagcgagcctgtggagagcgaggccccaccccgggagcccatggaggccgaggaggtggaggagcgggccccagcccagaaccctgagctgaccccaggccctgccccagctggccccaccccagcccctgagtag

SEQ ID NO: 78067 - DNA, 780 bp, Artificial Sequence
  derived and/or modified sequence
atggagcccaatgacagcaccagcacagctgtggaggagccagacagcctggaggtgctggtgaagaccctggacagccagaccaggaccttcatcgtgggcgcccagatgaatgtgaaggagttcaaggagcacatcgccgcctctgtgtccatccccagcgagaagcagaggctcatctaccagggccgggtgctgcaggatgacaagaagctgcaggagtacaacgtgggcggcaaggtgatccacctggtggagcgggccccaccccagacccacctgcccagcggggccagcagcggcaccggcagcgccagcgccacccatggaggcggcagccccccaggcacccggggccctggggcctctgtgcatgacagaaatgccaacagctatgtgatggtgggcaccttcaacctgcccagtgatggcagcgctgtggatgtgcacatcaacatggagcaggcccccatccagagcgagccccgggtgcggctggtgatggcccagcacatgatccgggacatccagaccctgctgagcaggatggagtgccggggcggcccccagccccagcacagccagcccccaccccagcccccagctgtgaccccagagcctgtggccctgagcagccagaccagcgagcctgtggagagcgaggccccaccccgggagcccatggaggccgaggaggtggaggagcgggccccagcccagaaccctgagctgaccccaggccctgccccagctggccccaccccagcccctgagacctag

SEQ ID NO: 78068 - DNA, 2712 bp, Artificial Sequence
  derived and/or modified sequence
atggagcccaatgacagcaccagcacagctgtggaggagccagacagcctggaggtgctggtgaagaccctggacagccagaccaggaccttcatcgtgggcgcccagatgaatgtgaaggagttcaaggagcacatcgccgcctctgtgtccatccccagcgagaagcagaggctcatctaccagggccgggtgctgcaggatgacaagaagctgcaggagtacaacgtgggcggcaaggtgatccacctggtggagcgggccccaccccagacccacctgcccagcggggccagcagcggcaccggcagcgccagcgccacccatggaggcggcagccccccaggcacccggggccctggggcctctgtgcatgacagaaatgccaacagctatgtgatggtgggcaccttcaacctgcccagtgatggcagcgctgtggatgtgcacatcaacatggagcaggcccccatccagagcgagccccgggtgcggctggtgatggcccagcacatgatccgggacatccagaccctgctgagcaggatggagtgccggggcggcccccagccccagcacagccagcccccaccccagcccccagctgtgaccccagagcctgtggccctgagcagccagaccagcgagcctgtggagagcgaggccccaccccgggagcccatggaggccgaggaggtggaggagcgggccccagcccagaaccctgagctgaccccaggccctgccccagctggccccaccccagcccctgagaccaatgcccccaaccaccccagccctgcagaatatgtggaggtgctgcaggagctgcagaggctggagagccggctgcagcccttcctgcagcgctactatgaggtgctgggcgccgccgccaccacagactacaacaacaaccacgagggccgggaggaggaccagaggctcatcaacctggtgggggagagcctgcggctgctgggcaacacctttgtggccctgagtgacctgcgctgcaacctggcctgcaccccacccaggcacctgcacgtggtgcggcccatgagccactacaccacccccatggtgctgcagcaggccgccatccccatccagatcaacgtgggcaccaccgtgaccatgactggaaatggcacccggcccccacccaccccaaatgctgaggcccctcctcctggccctggccaggccagctctgtggcccccagcagcaccaacgtggagagcagcgctgagggcgcccctcctcctggccctgcccctcctccagccaccagccaccccagggtcatccgcatcagccaccagagcgtggagcctgtggtgatgatgcacatgaacatccaggacagcggcacccagcccggcggcgtgcccagcgcccccaccggccccctgggccccccaggccacggccagaccctgggccagcaggtgcccggcttccccacagcccccaccagggtggtgattgcccggcccaccccaccccaggcccggcccagccaccctgggggcccccctgtgtctggcaccctgggcgccggcctgggcaccaatgccagcctggcccagatggtgtctggcctggtgggccagctgctgatgcagcctgtgctggtggcccagggcaccccaggcagccctgggggcctgggcctggagagcctgagccctgagttcttcacctctgtggtgcagggcgtgctgagcagcctgctgggcagcctgggcgcccgggccggcagcagcgagagcattgctgccttcatccagaggctgagcggcagcagcaacatctttgagcccggggctgatggagccctgggcttctttggagccctgctgagcctgctgtgccagaacttctccatggtggatgtggtgatgctgctgcacggccacttccagcccctgcagaggctgcagccccagctgcgctccttcttccaccagcactacctgggcggccaggagcccacccccagcaacatccgcatggccacccacaccctcatcaccggcctggaggagtatgtgcgggagagcttcagcctggtgcaggtgcagcccggggtggacatcatccgcaccaacctggagttcctgcaggagcagttcaacagcattgctgcccacgtgctgcactgcacagattctggctttggagcccggctgctggagctgtgcaaccagggcctgtttgaatgtctggccctgaacctgcactgcctgggcggccagcagatggagctggccgctgtgatcaatggccgcatccggaggatgagcagaggagtgaaccccagcctggtgtcctggctgaccaccatgatgggcctgcggctgcaggtggtgctggagcacatgcctgtgggcccagatgccatcctgcgctacgtgagaagagtgggggaccccccccagcccctgcctgaggagcccatggaggtgcagggcgctgagcgggccagccctgagccccaggagtgggtgcccatcatccagcaggacatccagagccagaggaaggtgaagccccagccccccctgagtgatgcctacctgagcggcatgcctgccaagaggaggaagctgcggagtgacatccagaagaggctgcaggaggaccccaactacagcccccagcgcttccccaatgcccagagggcctttgctgatgacccctag

SEQ ID NO: 78069 - DNA, 789 bp, Artificial Sequence
  derived and/or modified sequence
atggagcccaacgacagcaccagcaccgccgtggaggagcccgacagcctggaagtgctagttaagacccttgatagtcagactagaacgttcattgtgggcgctcagatgaatgttaaggaattcaaagaacacatagccgcctcagtgtcgattccgagcgaaaaacagagactgatctaccagggacgcgtactccaagacgacaagaaactgcaggaatacaacgtaggcgggaaggtaatccatttggtagagcgtgccccaccccagacccatttaccatccggcgcatcttcagggacaggcagcgcgtcagctacacatggcggagggtccccccctggaacacgggggcccggcgcctcagtccacgacaggaacgctaatagctatgttatggttggcacttttaatctgccatccgatgggtcagccgtggacgtgcacattaacatggaacaggctccaatccaatctgagccgcgcgtgcgattagttatggcccagcacatgatccgagatatacagacactactgagccggatggagtgccggggaggcccccaaccccagcactcccaacctccaccacagcctcccgcagtcacccctgaaccggtggctctgtcctcgcagacctccgagcctgttgagagcgaagccccgcctcgcgaaccaatggaggcagaggaagttgaggaacgtgcccccgcccaaaatccagagctgacaccaggcccagcgcccgctgggcccacacccgcacccgagactaatgcaccctag

SEQ ID NO: 78070 - DNA, 789 bp, Artificial Sequence
  derived and/or modified sequence
atggagcccaacgacagcaccagcaccgccgtggaggagcccgacagtcttgaggtgctcgtgaaaaccctggattcacaaactcggacatttatagtgggagcacagatgaatgtaaaggagttcaaggaacacattgctgcttccgtttctatacctagcgagaagcagcggttaatataccagggccgagtcttgcaggacgacaaaaagctccaggaatacaacgtgggtggtaaagtcattcatctggtggagcgagcccctcctcagacgcatctgcccagcggcgcgtcgagcgggaccggctcagcaagcgcaacacacggaggaggatcacctccagggacacgtggacctggagccagtgtgcatgacagaaacgccaattcttacgtgatggttgggactttcaatctccctagcgatggcagcgctgtggacgtgcacatcaacatggaacaggcccccatccaaagcgagccacgcgtaagacttgtgatggcccagcacatgatcagagacatccaaactttactcagtagaatggagtgccgcgggggacctcagcctcagcacagccagccccctcctcaaccgccagctgtcacccccgaacccgtcgcactgagctcccagacttccgaacctgtggagtctgaggctcccccccgcgagcccatggaagccgaagaggtcgaggaacgagcacccgcccagaatccggagcttaccccagggccagcgccggctggtccaacgcctgctcccgagacaaacgcaccttag

SEQ ID NO: 78071 - DNA, 411 bp, Artificial Sequence
  derived and/or modified sequence
tgacggatgagccggggcgtgaaccccagcctggtgagctggctgactacgatgatggggttacggttgcaagtcgtcctcgaacatatgccagtgggcccagacgccatcctgcgatatgttcggagggtcggcgatccaccacagcccttgcctgaggaaccaatggaggtgcagggggctgagagagcatcaccagagccacaggagtgggttccaattatccaacaagacattcagagccagaggaaagtcaagccgcagcccccactgtcggacgcctacctttctggaatgcctgcgaaaagacggaagctgagatccgatatccaaaaacgcctgcaggaggatccgaactactcacctcagcggtttcccaacgcacagcgagctttcgcagacgatccttag

SEQ ID NO: 78072 - DNA, 789 bp, Artificial Sequence
  derived and/or modified sequence
atggagcccaacgacagcaccagcaccgccgtggaggagcccgacagcctggaggtgctggtcaaaactttggacagtcagacacgcacctttattgtcggcgcccagatgaatgtgaaagaattcaaagagcacattgccgcctctgtctccattcctagcgaaaaacaacgactgatctaccaaggcagggtgctgcaggatgataaaaaactgcaagaatacaatgtcggcggtaaggtaattcatctagtggagcgagcccccccgcagactcacttgccttctggcgcctcatcgggaacaggcagcgcatcagcgacacacggtgggggaagtccaccaggcactaggggtcctggagcttcagtccacgatcggaatgccaactcatatgttatggtgggaacctttaacctgccctctgatggctccgccgtcgacgttcacattaacatggaacaggcccccattcagtctgagcctcgagtgaggttggtaatggctcagcacatgattcgggatatccagactctattgagtcgaatggaatgtaggggtggtcctcagccacagcattcgcagcctccaccgcaaccacctgccgtgacacccgaacctgtcgcattgagctcccagaccagtgaaccggtggaaagcgaggccccccctcgtgagccgatggaggctgaggaggtggaagagagggccccagcacagaatcccgaattgacacctggccctgcacctgccggtcccaccccggctccagaaacaaacgccccatag

SEQ ID NO: 78073 - DNA, 594 bp, Artificial Sequence
  derived and/or modified sequence
atggagcccaacgacagcaccagcaccgccgtggaggagcccgactcactggaggtacttgtgaaaacattggattcccagacacggacattcatcgtcggtgcccagatgaacgttaaagaattcaaggaacatatcgccgcgagtgtctcaattccttccgaaaaacagcggttgatttatcagggccgggtcttacaagacgacaagaaactccaagagtataacgtaggaggtaaggtaatccatctggtagaacgggcgcccccgcagacgcacctcccttctggcgccagcagcggcactgggagtgccagcgcgacacatggtggaggtagccctccaggcaccagaggacctggggcctctgtgcacgaccggaacgctaattcttacgtgatggtaggtacttttaatttgcctagtgatggcagtgccgtggacgttcatatcaatatggagcaggctcccattcagtctgagcccagggtgcggttagttatggcgcagcacatgatccgtgacatccagacattactctctaggatggagtgcaggggaggcccccagccgcaacacagccagccaccgtag

SEQ ID NO: 78074 - DNA, 477 bp, Artificial Sequence
  derived and/or modified sequence
atggagcccaacgacagcaccagcaccgccgtggaggagcccgacagtctggaagtgttggtgaagaccctcgacagccagaccaggaccttcatcgtcggagcacagatgaacgtgaaggagtttaaagagcacattgccgccagcgtaagcattcccagtgaaaaacaacgcctgatttatcaggggcgggtgttacaggacgataaaaagcttcaggagtacaatgttggcggaaaggtgattcatctagtcgagcgtgctcctcctcaaacacatctcccttccggcgcaagctcaggaacaggtagcgcctcagcaacccacgggggaggcagccctccaggtactcgaggtcctggcgcctctgtgcacgatcgtaatgcgaactcatacgtgatggtgggcactttcaatctgccgtctgatggctccgccgtcgatgtccacatcaatatggagcaagcacccatttag

SEQ ID NO: 78075 - DNA, 789 bp, Artificial Sequence
  derived and/or modified sequence
atggagcccaacgacagcaccagcaccgccgtggaggagcccgactctctcgaggtgctggtgaagactctggatagccagactcggaccttcatcgtaggtgcccagatgaatgttaaagaattcaaagagcatatcgcagcatccgtatctattccaagcgaaaagcagaggctgatctatcaagggcgtgtcctccaagacgataagaaattgcaggagtataatgtcggtgggaaggtgattcacttggtggaaagggcccctccccagacccacctgccgtcaggggctagctcaggcacgggcagcgctagcgcgacccacggtggaggctccccccctgggacaagaggcccgggggcgagcgtccatgatcgcaacgcaaactcttacgtcatggtaggcacgttcaatctcccttcagacgggtcagccgtcgatgtgcatattaatatggagcaggcacctatccagtctgaaccccgcgtgcgcttagttatggctcagcacatgataagagatattcagacgcttcttagtaggatggaatgccggggcggacctcagccacagcactctcagcccccgccccaaccccccgctgtgacacctgagccagttgccttatcctcccagacctcagaacccgttgagtctgaggccccccctcgggaaccaatggaagccgaagaggtggaagagagggcccccgcacagaacccggaactgaccccaggcccagcaccggcaggaccaactcctgcccccgaaaccaatgcaccatag

SEQ ID NO: 78076 - DNA, 477 bp, Artificial Sequence
  derived and/or modified sequence
atggagcccaacgacagcaccagcaccgccgtggaggagcccgactcactagaggtcttggtcaaaaccctggattctcagacgcggacattcatcgttggggcgcagatgaacgttaaagagttcaaggagcatatcgctgcgagtgtgagcatccccagtgaaaaacagagactaatataccaagggagggtgttgcaggacgacaagaagcttcaggagtacaacgtgggtggtaaggtgattcacctcgttgaacgtgcgcctccacagactcaccttccaagcggggccagttccggcaccggctcagcctctgccactcacgggggcggctctccacctggcacgcgcgggcctggagccagcgttcatgatcgcaatgccaattcatacgtgatggtcggcaccttcaacttgcctagtgacgggtctgcagtcgatgtgcacatcaatatggagcaggccccgatttag

SEQ ID NO: 78077 - DNA, 777 bp, Artificial Sequence
  derived and/or modified sequence
atggagcccaacgacagcaccagcaccgccgtggaggagcccgacagcttagaagtgttagtcaaaaccttggattcccagacgcgcacatttatagtgggggctcaaatgaatgtaaaagagtttaaggagcacatcgcggctagcgtatctatcccctctgagaaacagcggctgatatatcaggggcgcgtgctccaggatgacaaaaagcttcaggaatacaatgtgggtggcaaggttatccacctggtggagcgggcaccacctcagacccatctgccatccggagcatcctcaggcacaggaagtgctagcgctacccatggaggcgggagcccgcctggcacccgcggtcctggcgccagcgtgcatgacagaaatgctaacagttatgttatggttggaacattcaatctgccttctgatggaagcgccgtcgacgtgcacatcaatatggagcaggcacccatccagtcagaacctagagtccggttggtcatggcgcagcatatgatccgagatatccaaacccttttaagcaggatggagtgtcgaggcggccctcaacctcagcactcacagcctcctcctcagccgcctgcggttacgcccgagccggtagccctatcctcacagacgtccgaacccgtcgagtccgaggcacctccacgggagcccatggaggccgaagaggttgaagagcgtgctccggcccaaaacccggaactgacccccgggcctgctccagctggtccaactcctgccccggagtag

SEQ ID NO: 78078 - DNA, 789 bp, Artificial Sequence
  derived and/or modified sequence
atggagcccaacgacagcaccagcaccgccgtggaggagcccgactccctggaagtactggtgaagacactcgacagccaaacccgcacgttcatcgtcggggctcaaatgaatgtcaaggaattcaaggagcacatcgcagccagtgtttcgatcccctcagaaaaacagcggctaatctatcaaggacgcgtgctgcaggacgacaaaaagcttcaggagtacaatgtaggcggcaaggtaatccatctggtcgagcgggccccaccccagactcacctcccctccggagcaagctccggcactggcagcgcctctgctactcacgggggaggcagtccgcccgggaccagaggtcctggggctagcgtccacgaccgaaatgcgaactcttacgtgatggttggcacattcaacctgccttcagacgggtccgctgtcgatgtacacataaacatggaacaagctccaattcagtccgagcccagggttagattggtcatggcccaacacatgatacgggatatccagacactgctgtctcgtatggagtgcagaggaggaccgcagccacaacattcccagccgcctccccagccccctgcggtcacaccagagcccgttgccctgagcagtcagaccagcgagccagtcgagtccgaggcccctcctagggagccaatggaggcagaggaagtcgaggagcgggcccccgcccagaaccctgagctgacgccaggccccgctccagcgggccccaccccggcccctgaaacgaacgccccctag

SEQ ID NO: 78079 - DNA, 411 bp, Artificial Sequence
  derived and/or modified sequence
tgacggatgagccggggcgtgaaccccagcctggtgagctggctgacaacaatgatgggcctacgcctccaagtagtcttggagcacatgccagtcgggcctgacgccatactccgatatgtgcggcgggtaggggaccccccacagccgctgcccgaggagccaatggaggtgcagggggctgagagggcaagcccagagcctcaggaatgggttccaataatccaacaggacattcaatcacagaggaaagttaagcctcagccacccctgtccgacgcttacctctctggaatgccagctaagcggagaaagctgcgatctgatattcagaaaagactgcaggaagacccaaactacagtccccagcgtttcccaaacgcccaacgagcgttcgcagacgatccttag

SEQ ID NO: 78080 - DNA, 594 bp, Artificial Sequence
  derived and/or modified sequence
atggagcccaacgacagcaccagcaccgccgtggaggagcccgactcacttgaagtgcttgtcaaaaccctggatagccagaccagaacattcatcgtgggagcacagatgaatgtcaaagagtttaaggagcacattgcagcttctgtgtcgataccttcagagaaacagcgcctcatttaccaagggagggttctgcaggatgataaaaaacttcaagaatataatgtcggagggaaagtcatccaccttgttgaacgagcccccccccaaacacatctaccctctggagcttccagcggcactggaagcgccagcgctacccacggtggcggttctcctcccggaaccagggggcctggggcctccgtacacgatagaaatgctaattcctacgtgatggttggaacctttaatcttccatccgacgggtcagccgtggatgtacacatcaacatggagcaggctccaatccagagcgaaccgcgcgtccgtttggtgatggcccagcacatgattagagatatacagacgctcttaagtcgcatggaatgccgcggaggcccccagccgcaacattctcagcctccatag

SEQ ID NO: 78081 - DNA, 777 bp, Artificial Sequence
  derived and/or modified sequence
atggagcccaacgacagcaccagcaccgccgtggaggagcccgactctctggaggttttagtgaagactctggattcccagacccgcacctttattgttggagcccagatgaacgtgaaggagttcaaagaacacattgcagcttctgtttctatcccaagcgagaagcagaggctcatttaccaaggtagggtgttgcaggatgacaaaaaactacaagagtacaatgtgggcgggaaggtcatccacttggtggagcgagctcctccccagactcacctgcccagtggcgcttcttctgggaccggctccgcaagcgctacccatgggggtgggtccccacccggcacaagaggacctggagctagcgtgcatgataggaatgcaaatagctatgtgatggtgggaacttttaacctcccaagtgacggatcagctgtcgatgtgcacataaatatggagcaagctccaattcagtccgaaccacgggtgcggcttgtcatggctcagcatatgatcagggacatacagacgttgctgtctaggatggagtgccgcggcggcccacaacctcagcacagtcagcccccccctcagcctccggccgttacacctgagcctgtggccctctcttcgcagacgtccgagccagtggaatccgaggccccccccagggagccaatggaggccgaggaggtggaggagcgagcccctgctcagaatccagaactgactcccgggcctgcacccgccggtcctacgcccgctcccgagtag

SEQ ID NO: 78082 - DNA, 411 bp, Artificial Sequence
  derived and/or modified sequence
tgacggatgagccggggcgtgaaccccagcctggtgagctggctgaccacaatgatgggccttcgcctgcaggttgtactcgagcacatgcccgtcggaccagacgccatcctgcgttatgtgagaagagtgggcgacccgcctcagccactgccagaagagcctatggaggtgcaaggcgcagaacgagccagcccagaacctcaggagtgggtgcccattattcagcaggatattcagtctcagcgaaaagtgaagccacaacctccactttcagatgcctatctatccggtatgcctgccaagcgcagaaagttgcggtctgatatacagaaaagactccaggaagatcctaattactcccctcagcggttcccaaatgcgcagagggctttcgcagacgatccatag

SEQ ID NO: 78083 - DNA, 780 bp, Artificial Sequence
  derived and/or modified sequence
atggagcccaacgacagcaccagcaccgccgtggaggagcccgacagtctggaggtgctggtgaagacgttggattcccagactcgcacatttatagttggtgctcagatgaacgtaaaagagtttaaggaacacatcgctgcgagcgtctctatcccctctgagaaacaacggttgatctaccagggccgcgtacttcaagatgacaagaaacttcaggagtacaacgttggtggcaaggttatccatctggttgagagggcccccccccagactcatctgccgtccggtgcctcaagcggaacaggatccgcttccgcgacccacggggggggtagtcctcctggaacccggggccctggagccagtgtgcatgaccggaatgcaaactcttatgtgatggtcggtacattcaacctcccttccgacgggagtgcagttgacgtccacatcaacatggaacaggctcccatccagtctgagccacgggtcaggcttgttatggcacagcacatgattcgggatattcagactcttctcagccgtatggaatgtcgcgggggccctcagccccaacacagtcaaccccccccccagccgccggccgtcacccctgaaccagtcgctctgagctctcagacttcggaaccagttgaatcagaggccccacctagagaacctatggaggcggaagaggtggaggaaagagctccagctcagaatcctgagttgactccaggcccggctcccgccggaccaacccccgctcctgaaacttag

SEQ ID NO: 78084 - DNA, 594 bp, Artificial Sequence
  derived and/or modified sequence
atggagcccaacgacagcaccagcaccgccgtggaggagcccgactccttagaagttttagtcaaaactctggactcacaaaccagaacctttattgtgggcgcgcagatgaatgtgaaagagttcaaagagcacattgctgcctctgtcagcatcccctctgagaagcagcggctgatttaccagggtagggtcctccaagatgacaagaaactccaagaatacaatgtaggcgggaaggttatccatttggtggaacgtgccccgcctcagacacatctgccatccggcgcatcgagcggtactggaagcgcatcggccacacacgggggtggaagcccccccggcacacggggacctggggcttctgtccacgaccgaaatgctaactcgtacgtaatggttggcacattcaaccttcccagcgatggaagtgctgtcgatgtacatataaacatggagcaggcacccatacaatcagaacccagagtgagactggttatggcgcaacatatgatcagggacatccagacactcctgtccaggatggagtgccgtggcggaccacagccccaacattcccagcccccatag

SEQ ID NO: 78085 - DNA, 594 bp, Artificial Sequence
  derived and/or modified sequence
atggagcccaacgacagcaccagcaccgccgtggaggagcccgacagccttgaagtgctggttaaaaccctggactcacagactaggaccttcatcgtgggagctcagatgaacgtgaaggagtttaaggagcacattgccgccagcgtgagtataccatccgaaaaacagaggctgatttatcaaggccgcgtgctgcaggatgataagaagctgcaggagtacaatgtaggcggtaaggtcatccatcttgtcgagcgagcccccccccagacccacttaccgagcggagcctcatccggtaccggctccgcttccgccacgcatggcggcgggtctccacctgggactcgtggccctggggcgtcagtgcacgatagaaacgcaaattcctacgttatggtgggcacattcaacttacctagtgacggctctgctgttgacgtgcacatcaatatggagcaggcccctatccagtctgagccacgtgttcggctcgtgatggcacagcacatgattagggacatccaaacattgttgtcacgaatggaatgccgtggcggacctcagccgcagcattctcagccgccttag

SEQ ID NO: 78086 - DNA, 789 bp, Artificial Sequence
  derived and/or modified sequence
atggagcccaacgacagcaccagcaccgccgtggaggagcccgactccttagaggtgcttgtgaagacactggattcccagacccgcaccttcattgtgggtgcgcagatgaacgttaaggaattcaaggagcatattgctgcttcggtatctataccttccgagaagcagagattaatataccagggtagggtgcttcaggatgataaaaagctgcaagagtacaatgtcggagggaaagttattcaccttgttgaacgtgcccccccacagacacacttgccctccggggcctcctcaggaacaggatccgccagcgccacccatggcggtggctcccctcccgggaccagggggcctggtgcgtccgtccacgataggaacgccaacagctatgtgatggtaggtactttcaatttaccgtctgacgggtctgccgtggatgtgcatatcaatatggagcaagctccaatccagagtgaacctagggtgagattggtaatggctcagcacatgatcagggatatccagactctgctttcccgcatggaatgccggggcgggcctcagccccaacattctcaaccacctccccagccacctgccgttacaccggaacctgtggctctttcttctcagacgtctgagcccgtggagtcggaggctccgccacgagaacccatggaagcagaggaggtggaagagagggctcccgcccagaatccagaactgacccccggcccggccccagccggacccacgccggccccagagactaacgctccttag

SEQ ID NO: 78087 - DNA, 789 bp, Artificial Sequence
  derived and/or modified sequence
atggagcccaacgacagcaccagcaccgccgtggaggagcccgactcactggaagtgctggtcaaaacgctcgattcacagacccgcacattcatcgtgggcgcccaaatgaacgtgaaagaattcaaggaacacattgccgcttccgtgagtataccctccgagaagcaaaggctcatctaccaaggtcgggtcctgcaggatgataagaagctgcaggagtataatgtgggcggcaaggtgatacatctcgtggagagggctccaccccagacacatttgccttcaggcgcttctagtgggaccggttcagcatcagccacccacggaggtggatccccgccagggaccagaggacccggggctagtgtccatgaccggaatgcaaattcttacgttatggtggggacttttaatctgccatcagatgggtcagctgtggatgtgcacattaacatggagcaggcccctattcagtcggaacccagggtacggctggtcatggctcaacatatgatacgcgatattcagaccctgctgtcacggatggaatgtcgggggggaccgcagcctcaacactcccagcctccaccacagcccccagctgtcactccagagcctgtcgctctctctagtcagacatctgaacccgtggagtctgaggctccaccacgcgaacctatggaagccgaggaggtggaagaacgagcacccgctcaaaacccggaactgactcctggacccgcacctgctggacccacacccgcaccagagacaaatgcaccctag

SEQ ID NO: 78088 - DNA, 780 bp, Artificial Sequence
  derived and/or modified sequence
atggagcccaacgacagcaccagcaccgccgtggaggagcccgactcactggaagtcttggtaaagaccctcgacagccagacaaggacttttatcgtgggagcccagatgaatgttaaggagttcaaagaacacattgctgcctcggtctcaatcccctccgaaaagcagaggcttatttaccaaggccgggtcctccaggatgataaaaagcttcaggagtacaacgttggcgggaaggtcatccaccttgtagaacgagcgccaccccagacccacctgcctagcggggcgtccagcggaaccggaagcgcctccgccacacatggaggtgggagtccccctgggacccgcggaccaggggctagtgtgcatgatcgaaacgctaactcttacgtgatggtgggaacctttaacctgccaagcgacggcagtgcggtcgatgtgcacattaatatggaacaagccccaatccagtctgagccccgcgtgagactcgtgatggctcaacatatgatccgggatattcagacgcttctgtccaggatggagtgcagaggcggaccacagccccaacacagccagccacctcctcagcctccggccgtgacacctgagccggtcgccctgtcaagtcaaactagcgaacccgtggagtccgaggccccaccccgcgagcccatggaagcagaagaggtggaggagcgagcccccgcccaaaatcccgagctcacccccggcccggcacccgctggtcccacacctgcccccgaaacttag

SEQ ID NO: 78089 - DNA, 477 bp, Artificial Sequence
  derived and/or modified sequence
atggagcccaacgacagcaccagcaccgccgtggaggagcccgacagcttggaagttctagtgaaaaccctggactctcaaacaaggacattcatcgtgggagctcaaatgaatgtcaaggaattcaaagaacacatcgcagcttctgtctcaattccctcagagaaacagagactgatctatcagggacgggttttgcaggatgataagaagctgcaggaatacaatgttggaggcaaagtgatccacctggtggagagagcaccaccacaaacccacctccccagtggcgcttcgtccggaactggctcagccagcgcaacacacggcggaggatcaccgcctggaactagggggccgggcgctagtgttcacgatagaaacgctaactcatacgtaatggtgggcacatttaatcttccgagcgacggatccgccgtggacgttcacatcaacatggagcaggcacctatatag

SEQ ID NO: 78090 - DNA, 780 bp, Artificial Sequence
  derived and/or modified sequence
atggagcccaacgacagcaccagcaccgccgtggaggagcccgactccctggaggtacttgtgaagacacttgatagtcagaccagaacattcatcgtgggggcccagatgaatgttaaggaatttaaagagcacatagccgcctcggtctctatcccttcagaaaagcagaggctgatttatcagggacgagtgttgcaagacgataagaagctgcaggagtataacgtaggtgggaaggtgatacacctggtggaacgggcacccccacagacccatctgccctctggcgccagcagcggcacaggatccgcaagcgccacacacggcggcgggagcccacctggtacacgtggcccgggagcaagtgtacacgaccgcaacgctaattcgtatgtgatggtaggaacatttaacctgccaagcgacgggtctgccgtagacgtgcatataaatatggagcaggcccccatacaatctgagccccgggttcgcttggtgatggcacagcacatgatacgggatatacagacattattgtccaggatggagtgtcgtggtggcccccaaccgcagcactctcagccacccccacagccgcctgcagtgactcctgagccagtggctttgtcctcacagacgagcgaacctgtggaaagtgaggccccaccacgcgaacctatggaggccgaagaggtcgaggagagggctcccgcacagaacccggagctcacgcccgggccagcgccagctggacctaccccagctccagagacctag

SEQ ID NO: 78091 - DNA, 411 bp, Artificial Sequence
  derived and/or modified sequence
tgacggatgagccggggcgtgaaccccagcctggtgagctggctgaccaccatgatgggcctcagattacaggtcgttttggagcacatgcccgtgggtcctgatgcaattctgaggtatgttcgacgggtgggcgaccccccgcagccactccccgaggagcctatggaagtgcagggtgctgagcgcgcaagccccgaacctcaggagtgggtgccaatcatacagcaggacatccagagtcagcgtaaggtgaagcctcagccacccctcagcgacgcgtatctgtccgggatgccggccaagcggagaaagctgcgctcggacatccagaagcgcctgcaagaagatcctaactactccccccagcgcttcccgaatgctcagagggcatttgccgatgacccatag

SEQ ID NO: 78092 - DNA, 411 bp, Artificial Sequence
  derived and/or modified sequence
tgacggatgagccggggcgtgaaccccagcctggtgagctggctgacaaccatgatgggcctgaggttgcaagtggtcttagagcacatgcccgttggtcctgatgcgattctgaggtacgtgagaagagtgggagacccgccccagccacttcccgaagaacctatggaggtgcagggcgcagagagagcatctccggaaccccaggaatgggtcccaattatccagcaggatatccagtcacagagaaaggtgaaaccccagcctcctctgagtgacgcgtatctcagcgggatgccagccaagcgtcggaaattgcgcagcgacattcagaaacgcctgcaggaagatccgaattatagtcctcaacgattcccaaacgcacaacgggcattcgccgacgatccctag

SEQ ID NO: 78093 - DNA, 594 bp, Artificial Sequence
  derived and/or modified sequence
atggagcccaacgacagcaccagcaccgccgtggaggagcccgactcacttgaggtgttggttaaaactctggattcacagacgagaactttcattgtgggtgcccagatgaacgtgaaggagtttaaggaacacatagccgcctcagtatctatcccgagtgaaaagcaacggctcatttaccagggcagagtgctgcaggatgataagaaacttcaggaatataacgtagggggaaaggtgatccatctcgttgagagggcgcccccacagacccacttgccctctggtgcatcttccggaaccgggagtgcaagtgccacacatggtggcgggtctcctcccgggactcggggtcctggcgcatcagtgcacgaccgaaacgcaaacagttacgtgatggtagggacctttaacctcccttccgacggcagtgccgttgatgtccacatcaacatggagcaggcccccatccagagtgagcctcgtgtgaggcttgtgatggctcagcacatgattcgagacatacaaacactactgtctcgcatggagtgcagagggggtccacagccccagcatagtcagcctccctag

SEQ ID NO: 78094 - DNA, 777 bp, Artificial Sequence
  derived and/or modified sequence
atggagcccaacgacagcaccagcaccgccgtggaggagcccgacagtctcgaggtgttggtcaaaacattagattcccagacccgaacatttattgtgggagcccaaatgaacgtgaaagaattcaaggaacacatcgctgcaagtgtctcaatacccagtgagaagcagcgccttatctaccagggtcgggtccttcaggatgataagaagctgcaggagtacaacgtgggaggaaaagtcatccatctggtggagcgtgcaccgcctcagacacatctgccttccggcgctagctcagggaccggcagtgcttctgctacacatggtggcggctcgcctcctggaacaaggggacccggcgccagcgtccatgacagaaacgctaattcttatgttatggtcgggacattcaatctcccaagcgacggtagcgccgtggacgttcacattaatatggagcaggctcccatccagtctgagccaagggtgcggctagtgatggcccagcacatgataagagatatccagacgctgctttctcgcatggagtgtagaggagggccacaacctcaacattcacaacctcctccccaaccccccgcagtcactcctgagcccgtagcgctcagtagccagacctcagagccggtggaatcagaagcccctccaagggaaccgatggaggcagaggaggtggaagagcgcgcacccgcccagaacccagaactgacgcccggccccgccccggccggccctacacccgctcccgaatag

SEQ ID NO: 78095 - DNA, 789 bp, Artificial Sequence
  derived and/or modified sequence
atggagcccaacgacagcaccagcaccgccgtggaggagcccgacagcctggaggtgttggtgaagacattagattcacagacaagaactttcatcgtgggggcccagatgaatgtgaaggaattcaaggagcacattgccgcttctgtgtccattccatcggagaaacagagattgatttaccaaggccgcgtgttgcaggacgataaaaaattacaggagtacaacgtgggcgggaaagttatccacctcgtggagagagcccctcctcaaactcaccttccaagtggggccagcagcggcaccggctccgctagcgccacacatgggggcgggagccctcctgggactcgcggcccaggcgcaagcgtccatgacaggaatgcaaattcttacgtaatggtggggacattcaatctgcctagcgatggttcagccgtcgatgtgcatatcaacatggagcaggcgccaattcagagcgaaccccgtgtcaggctggtaatggcccagcatatgattagggacatacagaccctgttgagcaggatggaatgtaggggcgggccccagccacagcattcccagccccctcctcagcccccagcggttactcctgaacctgtggccctgtctagccagacctctgagcctgtagagtccgaggcaccgcctcgcgaacctatggaagccgaggaagtggaggagcgggcgcctgcgcagaacccagaactcacgcctgggcctgcccctgcagggcctactccggccccagaaacaaacgctccttag

SEQ ID NO: 78096 - DNA, 777 bp, Artificial Sequence
  derived and/or modified sequence
atggagcccaacgacagcaccagcaccgccgtggaggagcccgacagcctggaggtgctggtgaagaccctcgactctcagacaagaacttttatcgtgggcgcacagatgaatgtcaaggagtttaaggaacatatcgcggccagcgtgtctatcccctctgagaaacagagactgatttaccaaggcagggtgttgcaagatgataagaaactgcaggaatacaacgtgggaggtaaagttatacacttggtggagagggcaccaccccagacccacctgccctccggagcaagttctgggaccgggtcggcaagcgcgactcacggtggtggctccccacctggaactaggggacccggcgcctctgttcacgacagaaatgccaactcatacgtaatggtgggcacctttaatctgcccagcgatggttctgccgttgatgtccacattaatatggagcaagccccaatccagagcgagccaagggtgcggctggttatggcacagcacatgatcagggacatccagacactcctttcccgcatggagtgtcgcggaggtccccaaccgcagcacagtcagcctcccccacagccgccagctgtgacaccggagccggtagccctgagctcccagacgagtgagccagttgagtctgaggcgcccccccgcgaacctatggaggccgaagaggtggaggaacgcgctccggcacagaaccctgagttgacccctgggccagcccctgctggcccaacacccgcccctgagtag

SEQ ID NO: 78097 - DNA, 780 bp, Artificial Sequence
  derived and/or modified sequence
atggagcccaacgacagcaccagcaccgccgtggaggagcccgactctctggaggttctcgtgaaaaccctggacagccagactaggactttcattgtcggggctcaaatgaacgttaaagaatttaaagaacacattgcggcttccgtgagcattccatctgagaagcagaggttaatttatcagggacgggtgctacaggatgataagaagctgcaagagtacaacgtgggcgggaaggtgattcatctcgtggaacgcgctcccccccagacacatttaccctccggtgcctctagcggcactggatcagcctcagccacccatggagggggttcacctcccggaacgcgaggtcccggcgcaagcgtgcatgaccgtaacgcaaactcctacgttatggtcgggactttcaatctgccatccgacgggtccgccgtcgatgtgcacatcaacatggaacaggccccaatccagtccgagccacgggttcgcttggtcatggctcagcacatgataagggatattcagaccctgttgagccgaatggagtgcaggggggggccacagccccagcactcccagccaccacctcagccgcctgcggtgaccccagagcctgtggctctctcaagtcaaacctctgaaccggtcgagtcagaagcgcctcctcgcgagcccatggaagctgaggaggtcgaagagagagccccagcccagaatccggaattaaccccagggcctgcacccgcgggacccacccccgctcccgagacgtag

SEQ ID NO: 78098 - DNA, 477 bp, Artificial Sequence
  derived and/or modified sequence
atggagcccaacgacagcaccagcaccgccgtggaggagcccgactccctggaggtgttggtcaagactctcgattctcaaactcggacatttatcgttggcgcccagatgaatgtaaaagaattcaaagaacacatcgcagcctccgttagcataccttccgaaaaacagaggttgatataccagggaagggtcttgcaggatgataagaagttacaggagtataatgtgggcggtaaagtgatccacctggtggagcgcgcacccccccagacacatctgcccagcggcgcaagcagcggaactggttcagctagcgcgacccatgggggtggttcccctccgggaactcggggtcctggggccagcgtccacgatcgcaacgcaaatagctacgtgatggtcggaacctttaacctgccgagtgacgggtctgcggttgatgtgcacataaacatggaacaggccccaatctag

SEQ ID NO: 78099 - DNA, 594 bp, Artificial Sequence
  derived and/or modified sequence
atggagcccaacgacagcaccagcaccgccgtggaggagcccgactcccttgaggtgttggtgaagacactcgacagccaaacacgcactttcattgtgggagctcagatgaacgtcaaggagtttaaagaacatatcgcagcttctgtgtccatcccgtcagaaaaacaaagactgatttatcagggtagggttttgcaggacgacaagaaactgcaagaatacaacgtcgggggaaaggtgattcacttggtggagagggcacccccccaaactcacctccccagtggagcaagctcaggaacgggctccgctagtgctacacacggcggcggctctccaccaggcactagggggcctggcgcctcggtgcatgaccgaaatgcaaattcctatgttatggttggcacattcaatctcccctccgatggttcagccgtggatgttcacattaacatggagcaggcccctatccagtctgaacccagagtccgtttagtgatggctcagcatatgattcgggatattcagaccctgctttccagaatggagtgcaggggcggcccccaacctcagcattctcaaccaccctag

SEQ ID NO: 78100 - DNA, 789 bp, Artificial Sequence
  derived and/or modified sequence
atggagcccaacgacagcaccagcaccgccgtggaggagcccgacagtctggaagttttggtcaaaacgctggacagccagacccgcacctttatagtcggcgcccagatgaatgtgaaagaattcaaggagcacatcgcagcatcagtgtccataccatcagaaaaacagaggttgatttaccagggccgggttctgcaagatgataagaaactgcaggaatataatgtgggagggaaagttatccatctggtcgagcgagccccgcctcagacccatctgccttctggtgcatcttcaggtaccggcagtgcttccgctacccacggcggtggatctcccccaggcaccagagggcctggtgctagcgtacacgacagaaacgcaaattcatatgtgatggtgggaacttttaatctcccttctgacggcagcgctgtggacgtgcatatcaacatggaacaggcaccaatccaatctgagccaagggtgcgcctggtgatggcccaacatatgatcagagatatccagactctgttgtcacgcatggaatgtaggggcggaccccagcctcaacactcccagccccccccacagcctcccgcagtgacgcctgaaccagtcgcactgtcctcccagacatccgagcctgttgaatctgaggctccgcccagagaaccaatggaagccgaagaagtggaggagagggcccccgcgcagaatccggagcttactcccggccctgccccggctggccctacgcctgcccccgaaacaaatgcgccatag

SEQ ID NO: 78101 - DNA, 789 bp, Artificial Sequence
  derived and/or modified sequence
atggagcccaacgacagcaccagcaccgccgtggaggagcccgactctctcgaagtgttggtcaaaaccctggatagtcagacccgcacgttcattgtcggtgctcagatgaacgtcaaggaattcaaggagcatatagcagcatcggtgtccatccctagtgagaaacagcgtttgatctaccagggaagggtgctgcaggacgacaaaaaacttcaggagtataacgtcgggggcaaggtgattcacctggtggagcgggcaccaccccagacccatctgccctccggtgcctcctctgggacggggtcagcttcagccactcatggagggggatcacccccaggcaccaggggccccggagccagcgtgcatgataggaatgcgaactcatatgtgatggttggcacatttaacctaccgtctgatggaagcgccgtggacgttcatataaacatggagcaggcgccaattcagtcagagcctcgagttaggctcgtgatggctcagcatatgattcgcgatatccagactctgcttagcaggatggaatgccgcggggggccgcaacctcagcatagccagccccccccgcagccacctgctgtaactcccgaacctgtagccctgagttcccagacgagcgagcctgtggagagcgaggcacccccaagagagcctatggaggcggaggaggtcgaggaaagggccccagctcagaatcccgagctgactccaggtccagctcccgccggtcctacgccagcaccggagaccaacgcgccctag

SEQ ID NO: 78102 - DNA, 2712 bp, Artificial Sequence
  derived and/or modified sequence
atggagcccaacgacagcaccagcaccgccgtggaggagcccgacagtcttgaggtgttagttaagacccttgactctcagacacgaacttttattgtcggagcacagatgaacgtgaaggagttcaaagaacacattgcagcttctgtgtccatcccttcagagaagcaacggcttatctaccagggcagggtcttgcaggacgataagaaactccaggaatacaacgttggcggaaaagtcatccacctagtggagagagcacctcctcagacccatttgccgtctggagcctctagcggcacaggttccgctagcgctacgcatggtggggggtcaccgcctggtacaaggggccctggagcgtcggtgcacgatcgaaacgctaattcctacgttatggtgggcaccttcaacctgccgtcagatggctccgctgtggacgtgcacatcaatatggagcaggctcctattcagtccgagcctagagtgagattagtgatggcccagcacatgatacgagacattcagacgttgcttagtcggatggaatgtcgcggcggcccacaacctcagcatagccagcctccgccccaaccccccgcagtgacacccgagccagtagcactgtcatcccaaacgagcgaacctgttgaatctgaggcgccacctcgagagccaatggaggcagaggaggtggaagaacgagcccctgcgcagaatccagagctgaccccagggcccgccccagctggcccaacacctgctcccgagactaacgctcctaatcacccttcaccagccgaatacgtggaggtattacaggaattacagcgattggaatcaaggttgcagccgtttctccagcgatactacgaggtcttgggcgctgccgcaaccaccgattacaacaacaatcatgaggggcgtgaagaagaccaacgcctgatcaatctcgttggggaaagcctgaggctcctgggcaatactttcgtcgctctcagcgatttgaggtgcaatctggcctgtaccccccccaggcatctgcacgttgtgagacctatgagccactatacaacgcctatggttctgcaacaggctgccattcccattcagatcaatgtgggaaccacagttacaatgactggaaatgggactcggccaccacccacccccaatgccgaggcgcccccccccggcccgggtcaggccagttctgtcgcgccaagctccactaacgtggagtccagtgcagaaggcgctcctccacccgggcctgctcctcctccagctacatcccacccaagggttataaggatctcccaccagtctgtggagcctgtagttatgatgcatatgaacattcaggactctggcacacagcccgggggcgtgccctctgctcctaccggaccgctgggacctcctggtcacggccagacacttgggcagcaggtacctggattccccactgccccaaccagggttgttatcgcaagaccaactccaccccaggcacggccaagccaccccggaggtccccccgtttccgggacactcggggccggccttggcaccaacgcttctttggctcaaatggtgtctggcctggttggtcagctcttgatgcaacccgtgttggtcgcccaggggacacccggctcccccggcggattagggctggagtcactgtctcctgagttcttcacttccgtggtgcagggcgtgctatcctcccttttggggtcactaggtgctcgtgccggctccagcgagtccatcgcggcttttattcagaggttatcaggcagtagtaatatctttgaaccgggagctgatggagccctgggcttttttggagccctcctctccttactgtgccaaaatttttctatggtggacgtggttatgctgttgcatggccacttccagcctctgcaacggctccaaccacagttgcgaagtttcttccaccaacattaccttggagggcaggagccaacaccctctaacatccgcatggccacacacaccctgattactggtctagaggaatacgtcagggagagcttttccttagtgcaagtgcagcctggcgtggatattatacggacgaacctggagtttctgcaggagcaattcaatagcattgccgcacacgtgctccactgtaccgattccggattcggcgctaggcttcttgagctctgcaatcagggtctcttcgagtgcctagccctgaacctgcattgcctggggggtcagcagatggagctggctgccgttatcaatggaaggattcgccggatgtcacgcggagtgaatccttccttggtgagttggctgacaactatgatgggcctgaggcttcaagtagtactcgagcacatgcccgttgggcccgatgccatcctacgctacgtgagaagggtgggcgatccacctcagccgcttcccgaggaaccgatggaggtgcagggggctgaacgggcgtctcccgaacctcaggagtgggtgccgattattcagcaagacatacagagtcagcggaaggttaaaccacagccccccctgtctgatgcatacctgtctggcatgccggccaaaaggaggaagctcagatcggacatccagaaacgcttgcaagaggatcccaattattcacctcaacggtttccaaacgcacagcgcgccttcgccgacgatccatag

SEQ ID NO: 78103 - DNA, 789 bp, Artificial Sequence
  derived and/or modified sequence
atggagcccaacgacagcaccagcaccgccgtggaggagcccgacagcctcgaagtgctggtgaaaactctggactctcagacacgcactttcatcgttggcgctcaaatgaacgtgaaggagttcaaagagcacatcgccgcctcggttagcattccttcagagaagcagcgcttaatttaccaggggcgcgtcctgcaagacgataagaaactgcaggaatacaatgtggggggcaaagtgattcatctggttgagcgagctcccccccaaacccacctgccatctggagcaagctccggaacaggaagcgcctccgctactcatggagggggatccccgccaggcactagaggccccggggcatccgtgcatgatagaaatgcaaacagctatgtaatggtggggacatttaacctgccctccgatggatcggcagtggacgttcatattaacatggagcaggcacctatccagtcggagccacgcgtgcgcttagttatggctcagcacatgatccgcgatattcagaccctgctaagtaggatggagtgtcggggcgggccccaaccacagcatagccagcctccacctcagccccccgctgttacacccgagcctgtagcacttagctctcagacaagcgaacccgtcgaatccgaggctcctcctagagagccaatggaggcagaggaggtagaagaacgggctccagcccagaatcctgaattaacccctggacctgccccagctggaccaactcctgcccccgagaccaatgccccctag

SEQ ID NO: 78104 - DNA, 780 bp, Artificial Sequence
  derived and/or modified sequence
atggagcccaacgacagcaccagcaccgccgtggaggagcccgacagcctggaagtcctggtcaagaccctagactcccagactcgtacttttattgtgggggcacaaatgaatgtgaaagaatttaaagagcacattgccgccagtgtttcaatcccttccgagaagcagcgcctcatctaccagggcagggtgcttcaggacgataagaagctgcaagaatataatgttggaggcaaggttatacatttagtagagcgggccccacctcagacccatctgccatccggcgcgagtagcggtaccgggtccgcctcagccacccatggcggggggtccccacccggtacgcgcgggccaggggccagtgttcacgataggaacgctaacagctatgtaatggtcggaacattcaatctgccatccgatgggtcggccgtggacgtgcacatcaatatggaacaagccccaattcagtccgaaccacgagttagactggtcatggcgcaacacatgattcgtgacatacagactcttttatctcgtatggagtgtagaggagggcctcagccacagcatagtcagccgccccctcagccaccggcggttaccccagagcctgtagctctgtctagtcagacctccgaaccggtggagagcgaggcccctccaagggagcccatggaagccgaagaggttgaagagagggcccctgctcaaaacccggagctgaccccaggccctgccccagctggcccgacgcccgcaccagagacctag

SEQ ID NO: 78105 - DNA, 777 bp, Artificial Sequence
  derived and/or modified sequence
atggagcccaacgacagcaccagcaccgccgtggaggagcccgacagtctagaagttctagtgaagactctagacagtcagacacgtacctttatcgtgggcgcccaaatgaacgtcaaggagtttaaagaacacatcgcggcttccgtctccataccatccgaaaaacagagattaatctatcagggtagggttctacaggacgacaagaagttgcaggaatataatgtcggcgggaaggtgatccacctggtggaacgtgccccaccacaaacccacttgcctagcggggccagctccggaaccggttctgcgtctgctacacatggaggaggctcccccccaggaacaagaggccctggcgccagtgttcatgaccggaatgccaactcctatgtcatggtcggcacctttaatctgccaagtgatgggtccgctgtggatgtgcatattaatatggagcaggcgcctatccagtccgagcccagagttcggcttgtgatggctcagcacatgatacgtgatattcaaacattactcagtcgaatggaatgtcggggggggcctcagccacagcacagtcaacctccacctcagcccccagctgttacgcccgagcccgtcgctctctcgagtcagacctcggagccagtggagagtgaggcgccaccacgggagcccatggaggcagaagaggtggaggaacgtgcccctgcccaaaatccagagctaacaccgggtcctgctccggccggaccaacgccggcgccagagtag

SEQ ID NO: 78106 - DNA, 477 bp, Artificial Sequence
  derived and/or modified sequence
atggagcccaacgacagcaccagcaccgccgtggaggagcccgacagcctggaggtgctcgttaagactcttgattcccagactagaacttttatcgtgggggcccagatgaatgttaaagagttcaaagagcacatcgctgcctctgtgagcatacctagtgaaaaacagaggctcatctaccaaggtagggtgctccaggatgataaaaagctgcaagaatacaacgtcgggggtaaggtgatccatctcgtggagcgtgctcctccccagactcatctgccctccggtgcgagctccggaacagggagtgcctctgcaacgcatggtggcgggtcaccgccaggtacccgggggccgggggccagcgtgcacgatcggaacgctaattcctacgtgatggtcggcacctttaacctccctagcgatgggtctgcagtggacgttcacatcaacatggaacaggcgccaatatag

SEQ ID NO: 78107 - DNA, 411 bp, Artificial Sequence
  derived and/or modified sequence
tgacggatgagccggggcgtgaaccccagcctggtgagctggctgaccaccatgatgggtctcagacttcaggtcgtgctggagcatatgcctgtaggacccgatgctatcctgcggtatgtacgacgcgtgggtgacccaccgcagcccctgcccgaggagcctatggaggtacagggcgccgagcgggcttcgcctgagcctcaagagtgggtgcccatcatccaacaggacatacagagtcagagaaaagtgaaacctcagccccccctgtcggacgcttatctgtctgggatgcccgcgaagaggcggaaactccgtagcgatattcagaaaagactgcaggaagaccctaactacagccctcagaggttcccaaatgctcagcgcgcttttgcagacgacccctag

SEQ ID NO: 78108 - DNA, 780 bp, Artificial Sequence
  derived and/or modified sequence
atggagcccaacgacagcaccagcaccgccgtggaggagcccgactcactggaagtgttagttaaaactctggacagccagacgcgaacatttatcgtcggagctcagatgaacgtcaaagaattcaaagaacacattgcagcttccgtctccataccctctgaaaaacaacgcctcatctatcagggaagggtcttacaggatgataagaaactgcaggaatacaatgtagggggaaaggtgatccacctggtcgagcgggctcctccacaaacccaccttccctcgggcgcttcatccggtacaggaagtgctagcgccacacatggaggtggatcccccccaggaactcgcggccccggagccagcgtccatgaccgcaacgctaacagctacgtcatggtgggaacctttaaccttcctagtgacggttctgcagtggacgtgcacattaacatggagcaagcacccatccagtcggaacctagggtgcgactggtcatggcccaacatatgatccgagacattcaaaccttactgagtaggatggaatgccggggggggcctcagccccagcacagccagccccccccccaacctcccgctgttacaccagaaccagtcgccttatcttcccagaccagcgagcccgtcgagtcggaagccccccctcgcgaaccaatggaagcggaggaagtggaggaaagggcacccgctcagaaccccgaactgacacctggccccgccccggccggcccaacaccagctccggagacgtag

SEQ ID NO: 78109 - DNA, 477 bp, Artificial Sequence
  derived and/or modified sequence
atggagcccaacgacagcaccagcaccgccgtggaggagcccgacagtttggaagtgctagtcaagacgctcgatagtcagacacgtacatttatcgtcggcgcccagatgaatgtcaaagaattcaaagaacatatcgccgcatctgtttctattcctagtgaaaaacagcgccttatttaccaaggaagggtgcttcaggacgacaaaaagctccaagagtataacgtcggtgggaaggtgattcacctggttgagcgagccccaccccaaacccacctgccaagtggagcctccagtggtaccggctcagcttctgccacccatggcggcggcagtcctccgggcacacgcggaccaggagcttccgttcacgatcgaaacgctaactcttatgtgatggtagggaccttcaacctgccctctgatggtagtgccgtggatgtgcatatcaacatggagcaagcgcctatttag

SEQ ID NO: 78110 - DNA, 777 bp, Artificial Sequence
  derived and/or modified sequence
atggagcccaacgacagcaccagcaccgccgtggaggagcccgactctttagaggttttagtgaagactctcgattcacagacacgtaccttcattgtgggtgcgcagatgaacgttaaagagttcaaagagcacattgcggccagcgtgtccatcccaagcgagaagcaacgcctgatctatcaggggagggtgctgcaggacgataagaagctgcaggagtataatgtcggtggcaaggtgatccacctagttgagcgagctccccctcagactcatctgccctccggcgcgagcagtggcactggctctgctagcgcgacccacggggggggttcacctccaggaactcgtgggccaggcgcatccgtccacgaccgaaatgccaactcttatgtcatggtgggtacatttaacctcccttctgacggatcagccgtcgacgtgcatattaacatggagcaggctcccattcagagcgagcccagagtccggctggttatggctcaacacatgatcagggatattcagactctactgtccaggatggaatgtagaggcggccctcagccacagcattcacaacctcccccacaacctccagcagtgacccctgaaccggtggcccttagttcacagacctctgagcccgtggagagcgaggcaccaccaagagagccgatggaggctgaagaagtcgaagaaagggctccggcccagaatccagagctaaccccaggtcccgcacctgctgggcctacacctgctccagaatag

SEQ ID NO: 78111 - DNA, 789 bp, Artificial Sequence
  derived and/or modified sequence
atggagcccaacgacagcaccagcaccgccgtggaggagcccgactccctggaggtgctcgtaaagacactcgatagccagacacgtaccttcatcgtcggggcacagatgaacgtgaaagagttcaaggagcacatcgccgccagtgtgagcattcccagcgagaagcagcgcctcatctaccaaggtcgggtccttcaggacgataaaaaacttcaggaatataacgtagggggtaaagtcatccatttagtggagagagctcccccccaaacacatctcccttcgggcgctagcagtggcaccggcagcgcttccgctacgcacggcggaggttccccccctggcaccaggggccccggcgctagcgtgcatgataggaacgccaactcctatgtgatggtgggcactttcaatctgccatcggacgggagtgcagttgatgtccacattaacatggagcaggcacccatccagagtgagcctcgagttcggctggtgatggcacagcacatgatccgcgacatacagacactgctctcacgaatggagtgcagaggcggtccacagcctcaacacagccagccacctcctcagccccctgcagtgacccctgagccggtcgctcttagcagccagacaagcgaaccggtggagtcggaggccccccctcgagagcccatggaggcggaggaagttgaagagcgggcacccgcgcaaaatcctgagttaaccccaggccccgccccagcaggtcccacgccagctcctgaaaccaatgccccctag

SEQ ID NO: 78112 - DNA, 789 bp, Artificial Sequence
  derived and/or modified sequence
atggagcccaacgacagcaccagcaccgccgtggaggagcccgactcattggaggtgctggtgaaaactctggattctcagacccgcacatttatcgtgggcgctcagatgaatgttaaagaatttaaggagcacatagccgcttccgtttccataccctctgaaaagcagagattaatctatcagggccgggtcctccaagatgataagaagctgcaggagtacaatgtgggcgggaaggtgattcacttggtagaacgggctcctccccagactcacttacccagcggagccagttccggcactggctctgcgtctgcaacccacggaggcggaagtccaccaggaaccaggggtcccggggctagcgtacacgatcgcaacgctaacagttacgttatggttggcacctttaatctcccaagtgatggaagcgcagttgatgtccacattaatatggaacaggcccctattcagtccgagccgagagtccgtctggtgatggcccaacacatgatacgcgacatacaaaccttactgagtaggatggagtgcaggggcggcccacagccacaacatagtcagccacctcctcaacctcccgctgttacccccgaaccagttgcactctcctcccagaccagtgaacccgtcgagtcagaggcacctcctagggaacccatggaggctgaggaggtagaagaaagagcccctgctcaaaaccctgagctcacacctgggcctgcccctgctggaccaactcccgccccagagactaacgccccctag

SEQ ID NO: 78113 - DNA, 780 bp, Artificial Sequence
  derived and/or modified sequence
atggagcccaacgacagcaccagcaccgccgtggaggagcccgacagtctggaggtactcgtcaaaactctggacagccagactagaaccttcatagtgggcgcgcagatgaacgtgaaggagtttaaagagcacattgccgcgagcgtttccattccatctgaaaagcagcgattgatatatcaagggcgcgtgctccaggacgacaaaaaactgcaggaatacaacgtaggaggaaaggtcattcacctcgtggagcgagctcccccacagacccatttgccttccggggcttctagcggaaccggatctgctagcgctacccatggaggcggatcgccgccaggcacaaggggtccaggggccagtgtccacgaccgcaacgccaacagctacgtcatggtgggtacttttaatctgccatcagacgggagtgccgtcgacgtgcacatcaacatggaacaggccccaattcagagtgaaccaagggtgaggctggtgatggctcagcatatgatccgtgacattcagactctcctgtcacgaatggaatgtcggggcggtccgcagccccagcatagccagccaccaccacagccccctgccgtcacccccgagccagtggccttaagcagccagacctctgagcctgtggagtccgaggcccccccaagggagccaatggaggctgaagaggttgaagagcgcgcccctgctcagaaccccgaattgaccccgggcccagctcccgctggacccactccagcccctgaaacatag

SEQ ID NO: 78114 - DNA, 477 bp, Artificial Sequence
  derived and/or modified sequence
atggagcccaacgacagcaccagcaccgccgtggaggagcccgactcgttggaggtgttggttaaaaccctcgatagtcagacaagaacatttattgtgggcgcgcagatgaatgtgaaggaatttaaggagcatatagcagcttccgtgagtatcccctccgaaaaacagaggctgatctaccagggccgcgtgctgcaggatgataagaagctgcaggagtataacgtcggggggaaggtgatacatctagtggaacgcgcgcccccccagacccacctaccatccggcgcgtcgtccgggactgggtccgccagtgcaacccacgggggggggagtcccccaggcacaaggggcccaggggcctccgttcatgatcgtaacgctaattcatatgtgatggtgggaaccttcaaccttcccagcgatggttcagctgtggatgttcacattaacatggagcaggcccctatttag

SEQ ID NO: 78115 - DNA, 789 bp, Artificial Sequence
  derived and/or modified sequence
atggagcccaacgacagcaccagcaccgccgtggaggagcccgacagcctggaagtccttgttaaaaccctagactctcagacccggactttcattgtgggagctcagatgaacgttaaggaatttaaggaacacattgccgcttccgtgtccataccatctgagaaacaaagactcatctatcaagggagagtgctgcaggacgacaagaaactgcaggaatataacgtggggggcaaggtgattcacctggtggaacgggcccctcctcagactcacctcccatctggggcttctagtggcactggctctgccagcgctacacacggcggcgggtccccacctgggacccgaggccccggtgcttctgtccacgaccggaacgctaacagttacgtcatggtcgggacctttaacctgcccagcgatggatcggcggtagacgtgcacattaatatggagcaggcccctatacagtctgaaccgagagtgcggctggtcatggctcagcacatgatccgcgatatacagactcttcttagcagaatggagtgccgcggtggtccccaaccccaacatagtcagcctccgccccagccccctgcagtcacgcctgaacccgtcgcattgagctcccagacgagcgagcccgtggaatctgaagcaccccctagggagcccatggaggccgaggaagtggaggaaagggcaccggcccaaaacccggagctgacacccggacctgcccccgccggtccaacgcccgccccagaaactaatgccccatag

SEQ ID NO: 78116 - DNA, 594 bp, Artificial Sequence
  derived and/or modified sequence
atggagcccaacgacagcaccagcaccgccgtggaggagcccgactcactggaagttctcgtgaagactctggacagccaaactaggacttttatagtgggcgctcagatgaatgtgaaggaattcaaggaacacatcgctgccagtgtctctattccgagcgagaagcagcgactgatctaccaggggagagtactgcaggacgataaaaagttgcaggaatataatgtggggggcaaagttattcacctcgtcgaacgggccccccctcagacacaccttccctccggggcctcgtcagggacaggaagcgcctccgcaacgcacggtggaggctctcctccaggtacaaggggccctggagcttccgtccacgacagaaatgcgaacagctatgtcatggtgggcacttttaatttgccatctgacgggtcggctgtggacgtgcatataaatatggaacaagccccaatccagtcagaaccgcgagtccgactcgtgatggcccaacacatgatcagagacattcagacactcttatcgcggatggaatgtcgaggggggccccaaccgcagcattcccagcctccctag

SEQ ID NO: 78117 - DNA, 777 bp, Artificial Sequence
  derived and/or modified sequence
atggagcccaacgacagcaccagcaccgccgtggaggagcccgactcactggaggtcctggtgaagactctggattcccagactcggacgttcatagtgggagcccaaatgaacgtgaaagaattcaaggaacatattgctgccagtgtgtctataccctctgagaaacagaggttaatttaccagggtcgggtcctccaagacgacaagaaactccaggagtataatgtagggggaaaagtgatccatctggtagaaagggccccacctcagacacatctgcctagtggcgctagtagtggcacaggttctgcctccgccacacacggaggtggatctcctccgggaacccgcgggcccggtgcttccgtacatgaccgcaatgctaactcctacgttatggtggggaccttcaacctgcccagcgacggctccgccgtagacgttcacatcaatatggagcaggctccaatccagagcgaaccgcgggtgcgactcgtgatggcccaacacatgatcagagatatacagactctgctgtcccggatggagtgccggggagggcctcagcctcaacactcccaaccacccccccagccacccgctgtgacaccggagcccgtggctctgagtagccaaacttcagagccagtcgaaagtgaagcgccacctcgcgagccaatggaggcggaggaagttgaggagcgcgccccagcccagaacccagaactcactcccggccctgcacctgcagggccgactccagcgccagagtag

SEQ ID NO: 78118 - DNA, 411 bp, Artificial Sequence
  derived and/or modified sequence
tgacggatgagccggggcgtgaaccccagcctggtgagctggctgactaccatgatgggcctacgcctgcaagtagttctggaacacatgccggtcggccctgacgccattctgaggtacgtgagacgcgtgggggatccaccccagccgctcccggaagaaccaatggaggtgcagggtgctgagcgcgccagtcccgagccccaggagtgggtgccaattatccagcaggatatccaatcgcagagaaaggtcaaaccgcagccccctctcagtgatgcctatctgagcggcatgccggccaaacgcagaaagttacgttcagatatccagaagaggctacaggaagacccaaattattcacctcaacgattcccaaatgcgcaacgcgcgtttgccgatgacccgtag

SEQ ID NO: 78119 - DNA, 2712 bp, Artificial Sequence
  derived and/or modified sequence
atggagcccaacgacagcaccagcaccgccgtggaggagcccgactccctagaagtgctggtgaagaccctagactcccagactcgaacattcatcgtgggcgcacagatgaacgtcaaggagttcaaagagcacattgctgcctcggtcagcatcccctctgagaagcagcgactcatctatcagggccgtgtgctccaggacgataaaaaactgcaagaatacaacgtcggtggcaaggtgatacatctagttgagcgagcaccgccacagactcacctgccgtctggagcctcctctggcactgggtctgccagcgctacacacgggggagggtcaccaccgggcactaggggacccggagcatcagtgcatgaccgcaacgccaatagctatgtgatggtaggtactttcaacctccccagcgatgggtcagccgtcgacgttcatatcaacatggagcaggcccccattcaatctgagcctcgcgtgagattagttatggcacaacacatgatccgagacattcagaccctcctgtcgagaatggaatgcaggggcgggccacagccacaacattcccagccacctccacagccccccgctgttactcctgaacccgtggcactctcttctcagactagtgaaccggtggagagtgaagcccctccccgagagccaatggaagcggaggaggttgaagagagggctcctgctcagaatccagaactgacccccgggccagcgccagccggacctacacccgcccccgagactaacgcccctaatcacccttcaccagcggagtacgtggaggtgctgcaggagctccagcgtctagaatctcggcttcaaccattcctacagaggtactatgaggtgctcggagctgccgccaccacggactataataacaatcatgaaggccgtgaggaggatcagcggctgatcaatttggtcggggagagtcttagactcttgggcaacacttttgtcgccctatccgatctacgctgtaacctggcctgtacccccccacggcatcttcacgttgttcgtcccatgtctcactatacaacgcccatggttttacagcaggcagccatccctatccaaattaacgtggggacaacggtcactatgactggaaatggcacgagaccgccccccacacccaatgctgaggcccctccaccaggtcctggccaggctagctctgtagctccgagttccaccaatgtggagtcgagcgccgaaggcgccccaccgcccggccctgctccacctcctgccacttcccacccccgggtgatcaggatctcccaccagtcagtggagccagtggttatgatgcacatgaacatccaggactccgggacccagcctggcggcgttccaagcgcccctaccgggcccctgggcccacctggacacggccagacacttgggcagcaggtcccaggttttcctaccgcccctactagggtcgtgatagcaaggcccacacctccccaggcacgtccatcccatcccgggggccctccagtatctgggacacttggcgccggtcttgggacaaacgcgagcctggctcagatggtttccggcctcgtgggtcagctcctgatgcagcccgtgctggtcgcgcagggcaccccaggtagcccagggggattggggctggaaagtctgtcaccggagtttttcaccagcgtggttcagggagtcctgtccagtctgctgggttctctcggagctagagcaggcagctcagagtcaattgctgcttttatccagaggctgtctggaagctcaaacatctttgagcccggggccgacggagcacttggtttcttcggggccctcctgtcattactgtgtcagaacttcagcatggtagacgtggttatgctgctgcacggccacttccaaccacttcagcgcctacagccgcagctgaggagcttctttcaccagcactatcttgggggtcaagaacccacaccctcaaacatcaggatggcaactcacaccctcattacaggactggaagagtacgttagggaaagctttagtctggtccaagtccagcccggcgtggacataatcagaacaaacttggagtttctccaggagcagttcaactctatcgctgctcacgtactgcactgtacagatagcggttttggcgcacgcttacttgaactctgcaatcagggactgttcgagtgcctggccttgaatttgcattgcctgggagggcagcagatggaactcgccgcagtgatcaatgggcgtatcaggcgcatgtcgagaggtgtcaacccctcgctcgtctcctggctaacgacaatgatgggacttagactccaagtagtgctggaacacatgccggtcggccctgatgccattttgcggtacgtgcggcgcgtaggcgacccaccacaaccattacccgaagagccaatggaagtgcagggggccgaacgtgcatcaccagaaccccaggaatgggtgcccattattcaacaagacatccagtcgcagcgcaaggtgaaacctcagccccctctgtcggacgcctacctttcaggcatgcctgccaaaaggcgaaaattacggtccgacatacagaagcgcttgcaggaagatcctaactactctccccagcgcttccccaacgcacaaagggcgttcgccgacgatccttag

SEQ ID NO: 78120 - DNA, 2712 bp, Artificial Sequence
  derived and/or modified sequence
atggagcccaacgacagcaccagcaccgccgtggaggagcccgacagcctcgaggtcctcgtaaaaaccctcgactcacagacaaggactttcattgtcggagcccagatgaacgtcaaagaatttaaggaacatatcgcggcttctgtctctattccatctgaaaaacagcgcttaatctatcagggccgggtgctgcaggatgataaaaagctgcaggagtataatgttggtggaaaagtgatccatttggtggagagagctccaccacagacccacctaccgtctggcgccagctctgggacaggatcagcttccgccacgcacggcgggggctccccaccagggacccgcggccctggagcctccgtgcatgatcgcaatgctaatagctacgtgatggtgggaaccttcaacttgccttcagatgggagtgccgtcgacgtccatattaatatggaacaagcccctattcagtcagagccaagggttcgcctggttatggcccaacacatgatccgagacatacaaacattattatcgcgtatggagtgtagggggggtccacagccccagcactcccagcccccacctcagccaccagccgtgacacctgagcccgtggccctgagttctcagacgtccgagccagtagagagcgaggcccctccccgggagccgatggaggccgaagaggttgaagagcgcgccccagcccagaaccctgagctcaccccaggccccgcacctgccggtcccacaccagcccccgagaccaacgcccccaatcaccccagcccagcggaatacgtggaggtcttacaagagctgcaaagattggaatcgagactgcagccctttcttcagagatactatgaggtgctcggcgctgccgccactacagattataataacaatcacgaaggacgagaggaggaccagaggctcattaatcttgttggcgaatcattacggttgcttgggaatacctttgtggctctgagcgacctaaggtgtaaccttgcttgtacacctcctcggcacctgcacgtggttaggcccatgagccattacaccactcctatggtgctgcagcaggccgcgattccaatccagattaacgtgggcacaacagttacaatgacagggaacggtaccaggcctccaccaacacctaacgcagaggcaccacccccaggcccgggtcaggcttcttctgtcgcccctagcagcaccaacgtggagagctctgcagaaggcgctcccccaccagggccagccccaccgcctgctacctcccatcctcgcgtcatccgtattagccatcagtcagtggagcccgtggtaatgatgcatatgaatattcaggattccggtacccagcctggaggagtgcccagtgctcctacgggaccacttgggccaccaggtcacggtcagacactagggcagcaggtgcccggcttcccaactgccccgactcgcgtggtcatcgcaaggccgacaccaccccaggcccggccaagtcaccctggcggccctccggtgtccggaacactaggggctgggttaggtaccaatgcgtctctcgcccagatggtttcaggcctcgtcggacaactgctcatgcaacccgttctcgtggcacaggggacccctggctcccccggcggactagggctcgagtccctttcccccgagttcttcacatctgtggtccaaggcgtgcttagttcactcctgggctctctcggtgccagagcagggtccagtgagtccatcgctgcatttatccagcggctgtccgggtcttccaatatttttgaaccgggtgcagatggtgctctgggattttttggggccctgttgtctttgctctgccagaattttagcatggtggacgtagtaatgctgctccatggccatttccagccacttcagcgtctgcagcctcagctgaggtccttctttcaccagcactacctgggagggcaggaaccaacgccaagcaatatccgcatggccacccataccctgattactggcttggaagaatacgtccgagaaagcttttctcttgtccaggtgcagcccggggttgatattatacgtacaaacctggagtttctgcaggaacagttcaattccattgcagcacatgtcctgcattgtacagattccggatttggtgctaggctcctggagctctgcaaccaaggactcttcgaatgtcttgctttgaatcttcactgcctcggcgggcagcagatggaactggcggcagtgattaatggacggatacggaggatgtcaaggggggtgaatcccagtctcgtgtcctggctcaccaccatgatgggtcttaggctgcaagtggtcctggagcatatgcctgttggtccagacgcaatcctgcgatatgtgcgccgggtgggagatccacctcaaccattgccggaggagccgatggaggttcagggagccgagagggcctctccagagccacaggaatgggtgcctatcatccagcaggacatccaatctcagcgaaaagtcaagccccagcctcctttgtccgatgcatatctgtccggcatgccagctaagaggaggaaactccggtcggatattcagaagcggctccaggaagacccgaactatagccctcagcgattccccaatgctcagagggccttcgcagatgatccctag

SEQ ID NO: 78121 - DNA, 2712 bp, Artificial Sequence
  derived and/or modified sequence
atggagcccaacgacagcaccagcaccgccgtggaggagcccgactcactggaagtgctggtgaagaccctggactcacagaccagaacctttattgttggggcccaaatgaacgtgaaagaattcaaagagcacatcgcggcatccgtatcgatcccatccgaaaagcagaggttaatctaccaaggccgggtgctgcaggatgataaaaagctgcaggagtataatgtaggaggcaaagtcattcacctcgtcgagcgggcacccccacagactcacttgccaagcggcgcttcctcaggtaccgggtctgcatccgctactcacggtggtggttctccccctggaacccgcggccctggcgctagtgttcatgatcggaacgccaattcctacgtgatggtgggcacatttaacttaccatctgatggtagcgcagtcgatgttcacattaacatggagcaggctcccattcagtctgaacccagagtccggcttgttatggcacagcatatgattagagatatccaaaccctactgtcacggatggagtgtcggggcgggccacagccccagcatagccagcctccaccacaacctccagcagtaacacctgaaccggtggctttatcatcacagacatccgagcccgtggaaagcgaagcccctccccgcgagcccatggaggccgaggaggtggaggagcgagctcccgcccagaaccccgaactgaccccaggccccgctcctgcaggtcctacacctgcacccgaaacaaacgcacccaaccaccccagccccgccgagtacgtggaagtacttcaggagcttcagcggctcgaaagcagactgcagccgttcttgcagaggtactacgaagttttgggcgctgccgctaccacagactacaataataaccatgaggggcgtgaggaagatcaacgcctgataaatttggtcggagaatctcttcgactcctgggcaatacatttgtggccctgtcagatctgcgctgtaatctggcctgtacccctccaaggcacttgcacgtcgtgcggccgatgtcacattatactacacccatggtgctccaacaagcggcaatccctatccagattaacgtggggacgacagtaactatgactgggaacggaacaagacccccccctacgcctaacgcagaggcacccccacctggcccaggtcaggcaagtagcgtggcacctagtagtacaaacgttgaatctagtgcggaaggagctcctccgccagggccagctcctcctcctgctacctcacatcctcgtgtcatacggatctctcaccagtctgtagaacctgtggttatgatgcacatgaacatacaggacagcggcacccagcctgggggcgtgccatctgcaccgaccggccccctgggaccgcccggccacggccagaccttaggacagcaggtgcccgggttccccactgcgcccacccgagtggtaatcgcacggcccactcctccacaggcccggccttctcaccccggcgggccgccagtttccggcacccttggcgctggattggggacgaacgccagcctcgcccaaatggtttctggcctcgttggccagctgcttatgcagcccgtattggtggcacaggggactcctggctctccaggtgggctgggcctggaaagtttgtctcctgagttctttacaagcgtcgtgcagggtgtgttatcatccttactgggatcattaggcgcccgtgcggggtcgagtgagtccatcgccgcattcatccagcgcctgagtggcagttctaatatctttgagcctggcgctgatggtgctttggggtttttcggggcactcttgagcctgctgtgccagaacttctcaatggtagatgtcgtcatgctcctgcacggacacttccaacccctgcagcggcttcaaccgcagctgcggtccttctttcaccagcactatctcgggggacaagagcctacaccttctaacatacggatggctactcatactttgatcaccgggctagaggagtatgtcagagagtccttttcgctggtgcaggtacagccaggcgttgatattatccggaccaacctcgagttcctccaggagcagtttaacagcattgctgcacacgttctgcactgtaccgattcagggttcggtgctcggctgctcgagctatgcaaccaaggcctgttcgaatgcttggcccttaaccttcactgtcttggcggacaacagatggagttggccgctgtgataaatggaagaattcggcggatgagccggggcgtgaacccttccctggtgtcgtggctcaccactatgatggggctaaggctgcaggtagttctcgagcacatgccggtaggcccagacgccatcctgcgttacgtgcgcagggtcggggatccgcctcagccactcccagaggagcctatggaggtccagggtgccgaaagagctagccctgagcctcaggagtgggtaccgatcattcagcaggatattcagtcgcagcggaaagtcaagccccagcctcccctgtccgatgcctacctgtccggcatgccagcaaaaaggaggaagctgcggtctgacatacagaagcggctgcaggaagaccccaattatagcccacagagattccccaatgcacagcgagcgttcgcggacgatccttag

SEQ ID NO: 78122 - DNA, 2712 bp, Artificial Sequence
  derived and/or modified sequence
atggagcccaacgacagcaccagcaccgccgtggaggagcccgacagtctggaggtgctggtgaaaactctggactcccagactcgaacatttattgtgggggcacagatgaacgtgaaggagttcaaggagcatatcgccgcgtctgtgtctataccaagtgagaaacagcgactaatctaccagggcagagtgttacaggatgataagaagctacaggaatataacgtcggcggaaaggtgatccatctggtcgaaagagctcccccacagacccatttgccatcaggagcttcctccggaacagggagtgcaagcgctacgcatggaggcgggtcccctcctggtacgcgcgggcccggtgccagtgtgcatgatcgcaatgctaacagctatgtcatggttggtactttcaacctcccctcagacggatcagcagtcgatgttcacatcaatatggaacaggccccaatccagtccgaacctagggtgcgtttggttatggctcaacatatgattagggatatccaaactctactcagtcgcatggagtgcaggggtggccctcagccccaacacagtcagccaccgcctcagccaccggcagtcacacccgagccagtggctttgtccagccaaacttctgagcccgtcgaatctgaagccccgccgcgggaaccaatggaagctgaggaggtggaggagcgggctcccgctcaaaacccggagttaacacccggacctgcacccgctggcccgacacctgctccggagactaacgcgcctaaccacccatcccccgctgagtatgtggaggtgctgcaggaacttcagcgtctggagtccaggctgcaacccttcttgcaacggtattacgaagttttaggagcagcagctactactgattacaacaacaaccacgagggcagggaggaagatcagcggctaatcaatctggtgggggagtctctgagacttctggggaacacctttgttgcgctcagtgaccttcggtgcaatttggcttgtacacctccacggcatcttcatgtggtccgcccaatgtcacactataccacccccatggtgctgcagcaggcggctatccccatccagataaatgtcgggactacagtgaccatgacgggcaacggtacacgaccacctcctacccctaatgccgaggcacccccacctggccccggacaggcatcctctgtagctccttctagtactaatgttgagtcttcggccgagggagctccaccaccaggacctgcaccaccccccgccacttcacacccacgcgttattcgaatttcccaccagagcgtggagcccgtagtgatgatgcatatgaatattcaggattcaggcactcagcctggaggggtaccttccgctcctaccgggccactgggcccacctggccacggacagaccttgggacagcaggtgcctggtttccctactgcccctactagggtagtaattgctcgtcccacgcccccccaggccagaccttcccatcctgggggtccaccagtcagtgggacccttggggccgggctcggcacaaatgccagtttagcccagatggtatccggtctagtcggacagctccttatgcagcccgtcttggtcgctcagggtacacccgggtctcccggcggtctgggcctcgagagtctttcccccgaattttttacttcagtggttcagggggtcctctcttctctgctcgggtcccttggtgctcgcgcgggaagctctgaatccattgccgcctttatccagcgcctgagcggatccagcaatatcttcgagcctggcgcagacggagctctgggctttttcggggcactcctcagtctcctgtgccagaatttcagcatggttgatgttgtgatgttgctgcacggccattttcagcccctgcagcggctccaaccgcagttacggagcttttttcaccagcactacctcgggggacaggagcccaccccgtcaaatatccgtatggccacacataccctgatcacaggcctggaggaatacgtgcgggaaagctttagcctggttcaagtacagcccggtgtggacattattaggacaaatctggagtttctacaggaacagttcaattcaatcgctgcacacgtgctacattgtactgactcagggttcggagcccgacttctggaactatgcaatcagggattgttcgaatgcttagcacttaacctgcactgcctgggaggtcagcaaatggaattagccgccgtgatcaacggcagaataaggcgaatgtcccggggcgtaaatccttctcttgtatcatggctcaccacaatgatgggcctgcgactccaggtggtgttggagcacatgcctgtggggcctgatgccatcctgaggtatgtgcgtcgggtaggagacccacctcaacccttgcctgaggaaccaatggaggtgcagggagcagagagagccagtccagagcctcaggagtgggtgcctattatacagcaggatatccagagccagaggaaggtcaagcctcagccccctctgagcgatgcctatttatccggtatgcctgcaaaacgacgaaagttgaggtcagacatccaaaaaaggcttcaggaagaccccaattattccccacagaggttcccaaatgcccaaagagctttcgccgacgatccttag

SEQ ID NO: 78123 - DNA, 2712 bp, Artificial Sequence
  derived and/or modified sequence
atggagcccaacgacagcaccagcaccgccgtggaggagcccgacagcctcgaagtattggtcaagacactggacagccagacacgcaccttcatagtcggcgcacaaatgaacgtaaaagagtttaaggagcacattgccgcctcagtctctattccgagcgagaagcagagactgatttaccagggacgggtgctgcaggatgacaagaagctacaggagtacaacgtaggcggtaaggtgatccacctggtggaaagggcccctccccagacccacctgccatcgggggccagcagcggcacgggcagcgcctcggccacacacggcgggggctccccgccgggcaccaggggaccaggggccagtgtgcatgaccgcaacgcgaactcctacgtgatggtgggcaccttcaatctgccctccgatggttcagccgtggacgtccacattaatatggaacaggcccctattcagagcgagcctcgggtgaggctcgtcatggcccagcatatgattagggatattcaaaccttattatctcgcatggaatgccgcggcgggccacagcctcagcatagccagcccccccctcagcctcccgccgtgactcccgagcccgtggccctgagtagccagacatctgagcctgtggagagcgaggcaccccctcgggaacccatggaagccgaggaggtggaagagagggcccctgctcaaaacccagaactgactcccgggccggccccggcaggtcccactccggcaccagagactaatgccccgaaccacccgtctcccgccgaatatgttgaagtgctgcaggagctgcaacggctcgagagcaggttgcagcctttccttcagcgctactatgaagttctgggtgccgccgcaaccactgattacaacaataatcacgagggccgggaggaggaccagcgactcatcaaccttgttggcgaatccctgcgacttttaggcaatactttcgtagcgctgagcgacctgcgctgtaacctcgcctgtacacctccccgccacctacacgttgtgcgtccaatgtcccactacacaacaccaatggtcctgcagcaagcagctatcccgatccagatcaatgtcggcactactgtgacaatgactgggaacggcacccggccgccacccacaccaaatgccgaggccccaccgcccgggcccggacaggcctcctctgtcgctccctcttccacgaacgtggagtcctcagccgaaggggcccctccccctggtcccgctcctccccctgctacgtcccatcctagagtaataaggattagccatcaatctgtggaacctgtagtgatgatgcacatgaacatccaggatagcggcacacaacccggaggagtcccttccgccccgaccggccccttaggcccccctggtcacggccagaccttgggtcagcaggtgcctggcttccccactgcacctacaagggtggtgatcgccagacccaccccaccacaggctagaccctcacatcctggaggccctcccgtttcagggacacttggagccgggctgggtactaacgcttctctggcacagatggtctcagggttggttggccaactcttgatgcagcctgtgctggtggcccagggcacacctggatcccctggggggttgggtcttgaatccctctctccggagttctttaccagtgtggtacaaggcgtactgtcttctctcctcggcagcctaggagcacgggcaggctccagcgagtccatcgccgcttttatacagcgcttgtctggatcttcaaacatctttgaaccaggggcagacggcgcccttggcttcttcggtgcgttactgtccttgctctgccaaaacttctctatggtcgacgtggtgatgctgttacacggacacttccagccactgcagagactgcagcctcagcttcggtcgttcttccatcagcactatcttgggggccaggagcctactccgtccaatatcaggatggccactcacacgttaatcaccggacttgaggaatacgtgcgcgaaagcttctctcttgtacaggtgcagcctggtgtggatattatccggaccaacctcgagtttctgcaagaacagttcaattcaatcgccgcccacgtgctgcactgcactgactcaggatttggagcccgcctcctggagctttgtaaccagggtctatttgagtgcctcgctttgaatctacactgtctgggaggacagcaaatggaattggcagccgtgataaatggccgcattcgccggatgtcaaggggggtcaacccatccttagtgtcctggctgactactatgatgggcctgcgtctgcaggtagtcctggagcatatgcctgtgggccccgacgccatactgaggtatgtacgacgcgttggtgacccacctcagccccttcccgaggagccaatggaagtccagggcgcggagagggcatctcctgagcctcaggaatgggttccgattatccagcaggacatccaatctcagagaaaggtgaaacctcaacctccgctcagcgatgcctacctatccggaatgcccgccaagaggcgtaagttacggtccgacatccaaaagcggctgcaagaggatcccaattatagtcctcagaggttccctaacgctcaacgggcttttgctgatgatccctag

SEQ ID NO: 78124 - DNA, 2712 bp, Artificial Sequence
  derived and/or modified sequence
atggagcccaacgacagcaccagcaccgccgtggaggagcccgactcgctagaggtgctcgtgaagacacttgattcccaaactcgtacattcatagttggggcccagatgaacgtgaaggaatttaaagaacacattgccgcctccgtgtctatacccagcgaaaaacagagactgatataccagggccgggtactgcaagacgacaaaaagctgcaggagtataacgttggaggcaaggttattcaccttgtggagagagccccaccccagactcacctaccttctggcgcctctagtggcacaggtagcgcaagcgccacacacgggggaggctctcccccaggaacacggggccccggagcatctgtccacgaccgcaatgccaactcatacgtgatggtcgggacatttaacctacccagcgacggcagtgccgtggacgtgcatatcaatatggagcaggctcctatccagagtgagcccagggtccggttggtgatggcccaacacatgatccgagacattcaaaccctgctatcccgcatggagtgtcgtggcggcccacagccccagcatagtcagccacctcctcaacccccggccgtgacgcccgagcccgtcgctttaagttctcagacgagcgaaccagtggaatccgaggctcctccccgggagcctatggaggcagaggaagtggaagagcgggcacctgctcagaacccagaactgacgcccggtccagcccctgccggaccaacccccgcaccagaaaccaacgctcccaatcacccttcacctgctgaatacgtggaggttctccaggagcttcaaaggctggagtcgcgccttcagcccttcctacaacggtactacgaagttctcggggccgccgctacgacagattacaataacaaccacgaaggaagagaggaggaccaacgcctaatcaatctggtgggcgaatctctacgcctgttggggaacaccttcgtcgcactctccgacctgcggtgcaacttggcttgtacacctccgcggcatctacacgtggtgcggccgatgtcccactatacaactcctatggtgttgcaacaagcagccattcccattcagattaacgtgggaacaaccgtgactatgactggcaacgggactaggcctccacctacacctaatgcggaggcacccccgcccgggcccggacaggcttcgtctgtcgccccctcctcaacaaatgtggaaagctcagccgagggcgcacctccaccagggcctgctcctcctcctgcaaccagccacccaagagtgatcagaatttcgcaccaatcagtggagccggtcgtgatgatgcacatgaacattcaagactccggcacccagcctgggggagtgccttccgcaccaactgggccgctcggcccacccggccacggccaaacgctcggccagcaggtgccaggatttccaactgcccccactcgggtggtgatcgcgagacctacaccacctcaggctcggccctcccatcctgggggccctcctgtgtcaggaacactgggcgcaggcttaggcactaacgcatctctggctcagatggtcagtgggctggtagggcagttgttgatgcagccagtcctggtggctcagggcaccccagggtccccaggaggtctgggtctggagtccctcagcccagagttctttacaagtgtcgtacagggcgtgctgtcaagcctcctgggcagcctcggagcccgggccggatcctctgaatccatcgccgcattcatacagcggctgagtggcagcagtaatatattcgagccgggcgccgatggagcactggggttttttggcgcactgttgtctctactgtgtcagaatttctccatggtggacgtggttatgctattgcacggacactttcaacctctgcaacggctgcagcctcagctgcgcagcttcttccaccagcactacctgggcggacaagagcctactcccagtaatatcaggatggcaacacacactttgattaccggcctggaagagtacgtcagagaatcattttccctcgtgcaggtgcaaccaggggtagacattatcagaaccaaccttgaattcctgcaggaacagttcaatagtatcgccgcacacgtcctccactgcactgactctgggtttggagccaggcttctcgagctgtgtaaccagggtctcttcgagtgcctggccctgaacttgcactgcctgggaggccaacagatggagttggccgccgtcattaacggtagaatccgcagaatgtctagaggagtaaacccttctcttgtctcatggcttacaacgatgatgggacttagacttcaagtggtcctcgaacacatgccggtaggtccagacgctatcctgcgttatgtgcgccgcgttggagacccgcctcagccattgcccgaggaacccatggaggtccagggtgctgagcgcgcctcacctgagccccaggaatgggtaccaattatacagcaggacattcagagccagcggaaagtaaagccacagcctccgctgtccgacgcatacttaagcggcatgcctgctaaaaggagaaaactgcgcagcgatatacagaaacggctgcaggaagaccccaattattcacctcagcggtttcccaacgctcagcgggcttttgccgacgacccctag

SEQ ID NO: 78125 - DNA, 789 bp, Artificial Sequence
  derived and/or modified sequence
atggagccaaacgattccacatccactgcagtggaggagcctgattctttggaagtcctggtgaagacgctcgattcacaaacccgtaccttcatcgtcggggctcagatgaacgtgaaggagtttaaagaacacattgccgcatccgtctctataccttcagaaaagcagcgccttatttatcaaggcagagtgctccaagatgacaaaaagctccaggagtacaatgtgggcggaaaagttatccatctggtggaacgggcaccaccacagacccacctcccctcgggggcaagtagcggcacaggcagtgcttccgcaacacatggaggcggatcgccccctggaactagaggcccaggggcttccgtgcacgatcgcaacgctaattcttacgtgatggtcggaacatttaacctgcccagtgacggttcagcagtagacgtgcatattaacatggagcaggcccctatccagagcgaacccagggtgaggttagtaatggcacagcacatgatcagggatattcagacccttctctcaagaatggaatgcagagggggtccccagccacagcattcccagcctccacctcagcctcccgcagtaaccccggaacccgtcgccttgagctcacagacatcagaacccgtggaatctgaagctccgcctagggagcctatggaggcagaagaggtggaggagagagctccagcacaaaatcccgaactgacccccggacccgcacccgcagggcctactcctgccccagaaactaacgcgccatag

SEQ ID NO: 78126 - DNA, 789 bp, Artificial Sequence
  derived and/or modified sequence
atggaaccaaatgacagtacctccactgctgtcgaagaacctgattccctggaggtgttggtgaagacattagacagtcaaaccagaacgttcatcgttggagcacagatgaacgtaaaggaattcaaggaacacattgccgcatccgtttccattccatccgaaaaacagcggcttatctaccagggcagggtcctgcaagacgacaagaagctgcaggagtacaatgtcggcggtaaggttatccaccttgtggagcgagctcccccacagactcacctccccagtggtgccagttccggcaccggctccgcgagcgcaactcatggagggggaagtccgccagggacacgtgggcctggtgcaagcgtgcatgaccgaaatgccaatagttacgttatggtcggcactttcaacctcccatccgatggctccgccgtggatgttcatatcaacatggaacaggccccaattcagagcgaaccgagggtgcgactggttatggcacagcacatgatcagagacattcagacgctcttaagccggatggagtgtcgcggaggcccacagccacagcattcccaaccccctccccagccgcctgcagtgacccctgagcccgtggccttgtcaagtcagacctctgagcccgtcgaatccgaggctcctccgagagagcccatggaagctgaagaggtcgaggaaagagcacccgctcagaatccagaactgaccccaggtccggctcccgcaggtcctacacccgcacctgaaacgaacgctccttag

SEQ ID NO: 78127 - DNA, 411 bp, Artificial Sequence
  derived and/or modified sequence
tgacggatgtccagaggggtcaatcccagtctcgtaagctggcttactactatgatgggcctacggttacaggtagtgctcgaacacatgcctgtgggccctgacgctattttgagatatgtccgcagggtgggagatcccccacagcctttgcccgaggagcccatggaagtgcaaggcgctgaacgtgcctctcccgagccccaggagtgggtgccaatcatccagcaggatattcagagtcagcggaaagtcaagccacaaccaccactgtctgatgcctatctaagcggtatgcccgcaaagcgcaggaagcttaggagtgatattcagaaaaggctgcaggaggaccctaactactcaccccaaagattcccaaatgctcagagagctttcgctgatgacccctag

SEQ ID NO: 78128 - DNA, 789 bp, Artificial Sequence
  derived and/or modified sequence
atggagcccaatgattctacgagtacagccgtggaagaacctgactcgctggaagtccttgttaaaaccctcgatagccagacgagaactttcatcgtgggggcacagatgaacgtgaaggaattcaaagagcacatcgccgcatctgtgagcatacccagcgagaagcagaggctgatctatcagggcagagttcttcaagacgataagaagttacaggaatataacgtgggcggtaaggtgatacatcttgtggaacgagcacccccacagacccatttgccctcgggcgcttccagcggtaccggcagtgcttccgctacccacggcggaggaagcccacctggtacacggggtccgggagcttctgtgcacgatcggaatgctaactcttatgtgatggtaggcacattcaacctgccctccgacggatctgctgttgacgttcacatcaacatggagcaggctcctatacagagtgagcctcgggtacgcctcgtcatggctcagcatatgattagagatatacagaccttactttctagaatggagtgcagaggagggcctcaacctcaacatagtcagccccctccccaacctcccgctgtgactcctgagcccgtagccctgtctagccagacatcagaacctgtggagtctgaggcgccacccagagaaccaatggaggcagaggaagtggaggaacgggcaccagcgcaaaatcctgagttaacacccggaccagcccctgctgggcctacccctgcgcctgagaccaacgccccatag

SEQ ID NO: 78129 - DNA, 594 bp, Artificial Sequence
  derived and/or modified sequence
atggaacctaatgattctacgtctacagccgtggaggagcctgatagtttagaggtgttagtgaaaaccctggactctcagacccggacgtttattgtgggcgcacagatgaatgtgaaggaattcaaggaacatatagcagctagcgtcagtattccgtctgaaaaacagcggctgatttaccaggggcgagtcctgcaagacgacaagaaactgcaggaatataatgtgggaggcaaagttatccatctggtggagcgagccccaccacaaactcacttgcctagcggagctagcagtgggacgggaagtgccagtgccacccatggagggggatcaccacccggaacacgcggaccaggcgcatccgtccacgaccgcaacgctaactcatacgtcatggttggcacatttaacctgccttccgacggctccgccgttgacgttcacattaatatggaacaggccccaatacagagcgaaccaagggtgcgccttgtgatggctcagcatatgatccgggatattcagacactactgagtcggatggaatgtcgcggtggccctcagccccaacattcacagcctccctag

SEQ ID NO: 78130 - DNA, 477 bp, Artificial Sequence
  derived and/or modified sequence
atggaacctaacgactcgacatcaactgcggtagaggagcccgattcgctggaagtgctggttaaaacactagatagccagacacggaccttcatcgtgggtgcacaaatgaatgtgaaggaatttaaagaacacattgccgcttcggtatccattccctcggagaagcaacgcctaatctaccaaggcagagttctccaagacgacaagaaactgcaggagtataatgtaggagggaaggtaattcatctggtggagagggccccaccccagacacatctcccatctggcgcatctagcggtacaggttctgcttctgctactcatggcggaggctcccctccgggaacacggggaccaggcgcaagcgtgcacgatcgcaatgccaatagttacgtcatggtgggtacatttaacctgccttcagacggttctgccgttgacgtgcacatcaacatggaacaggctcccatttag

SEQ ID NO: 78131 - DNA, 789 bp, Artificial Sequence
  derived and/or modified sequence
atggagcccaatgattccaccagcactgcggtcgaggagcctgattcactcgaggtcctggttaagacactcgattcccagactaggaccttcatcgtcggggcacagatgaatgtcaaggagtttaaggaacacatagccgctagtgtgagcataccttctgagaaacagcgcctgatctatcaaggaagagttctccaggacgataaaaaactgcaggagtacaacgtcggcggaaaggtcatccatctggtggagagagccccaccacagacacaccttccttcgggcgcttccagcggaactggcagtgcatcagctactcatggcggtggcagtcctccaggcactaggggaccaggtgctagcgtgcacgatagaaatgccaacagttacgtgatggttggcacgttcaatcttccttcagacggctccgcagttgatgtccacatcaatatggagcaagcaccgatccaatctgagcccagggtgcgtctagttatggcccagcatatgataagagatattcaaacactcctgagtcgcatggaatgtagaggcggaccccagcctcagcactcccagccccctccacaaccacccgctgtgaccccagagccagtcgcgctgtcttcccagaccagcgagcctgtggaatctgaagcgcctcccagagagccaatggaggccgaagaggtggaggagcgtgcaccagctcagaatcccgaattgactccgggacccgctccagccggaccgacaccggcacctgagaccaacgcaccatag

SEQ ID NO: 78132 - DNA, 477 bp, Artificial Sequence
  derived and/or modified sequence
atggagccgaatgatagtacctcaactgccgtggaagagcccgatagtctcgaggtcttagttaagacactcgatagccagactagaacctttattgtgggcgctcaaatgaatgtaaaggagtttaaagaacacatagccgcttccgtgtcaatcccaagtgagaaacagaggttgatctaccaggggcgtgtgctgcaggacgacaagaaactgcaggaatacaacgtgggtggaaaggtgatccatctcgtggaacgcgctccaccccagacccacctgccctcaggcgctagcagcgggacaggatcagcttccgccactcatgggggaggtagccccccaggcacaagagggcctggtgcgtccgtgcacgaccgtaacgccaacagctacgtgatggttgggacttttaatctgccctccgatgggtcagcggtcgacgtgcatattaacatggagcaggcaccaatttag

SEQ ID NO: 78133 - DNA, 777 bp, Artificial Sequence
  derived and/or modified sequence
atggaacccaatgactccactagcacagcagtggaggaacctgattcgctggaggtgctagtgaagacattggactcccagaccagaacctttattgttggcgctcagatgaatgttaaggaattcaaggagcacatcgccgcatcagtgtccatcccctccgagaaacagaggcttatttatcagggacgggtgttacaggacgacaaaaagcttcaggaatataacgtcgggggaaaagtgattcatctagtggaacgcgctcctccacaaactcacctgcccagtggggcatcttcagggaccggttctgcgtcagcgacgcacggcggtggatccccacccggtacaaggggacccggagcatcagtgcatgacagaaacgcgaacagctatgttatggtcggcaccttcaatctgccatctgacggatccgctgtggatgtgcacattaatatggagcaggctccgattcaaagtgagccccgtgtaagactcgtaatggcccagcacatgattagggatatccagaccctgctcagccgaatggaatgtcgaggcggaccccaaccacagcacagtcaacccccaccccaaccaccagccgtcacaccagagcctgtcgctctgtcctctcagacttcagaacccgttgagagcgaggcgcctcccagggagccaatggaggctgaagaagtggaagagcgcgctccggcacagaatccagaactcacccccggtcccgcaccggcaggtcccacccccgcaccggaatag

SEQ ID NO: 78134 - DNA, 789 bp, Artificial Sequence
  derived and/or modified sequence
atggaaccaaatgattccaccagtacagccgtggaagagcccgactccctggaggtgttggtgaagaccctggattcccaaacacgcaccttcatcgtaggcgctcagatgaacgtgaaagaattcaaggaacacatcgccgcttcagtgtccattccctctgagaaacaacggttaatttaccagggcagggttcttcaggacgacaaaaaactccaggaatacaacgtgggtggaaaagttatccacctcgtggagagggcgcctccacagacgcatttacccagcggcgcatcttctggaactggatcggctagcgcgacccatgggggaggcagcccacctggcactagagggccaggcgcttctgtgcatgaccgcaacgccaacagttacgtgatggtgggtactttcaacttgccctctgacggatccgcggttgacgtacacatcaacatggaacaggcccctattcagagtgagccacgagttcggctggtgatggctcagcatatgatcagggacatccagacattgttgagtcgaatggagtgtcgcggaggccctcagccccaacactcacaacctcctccccagccacctgccgtcactcctgagcccgttgctcttagctcacaaacatctgagcctgtggaaagtgaggcacctccaagagagccaatggaggcagaagaagtagaggagcgtgcccctgcgcagaaccccgaattaactcctggaccagcacccgcagggccaactcctgcccctgagactaacgctccgtag

SEQ ID NO: 78135 - DNA, 411 bp, Artificial Sequence
  derived and/or modified sequence
tgacgcatgtctcgcggtgtgaacccctctttggtcagttggctgacgaccatgatggggttgcggctgcaggttgtgctggagcatatgccagttggccctgacgccatcctgcggtatgttcgcagagttggcgacccccctcagccattgccagaggaaccaatggaggttcagggcgcagaaagggcatcaccagaaccccaggaatgggtacccattattcagcaggatatccagagtcaacgtaaggtaaagcctcagccgccactgagcgacgcttatctgagcggaatgcctgccaaacgcagaaaattacggagtgacattcagaagcggttgcaggaagacccaaattattcccctcagagattccctaacgcccaaagggctttcgctgatgacccatag

SEQ ID NO: 78136 - DNA, 594 bp, Artificial Sequence
  derived and/or modified sequence
atggagcctaacgatagcacaagcactgccgtcgaggaacctgacagcttggaagtgctggttaagaccctggacagccagacgcggaccttcattgtaggtgcacagatgaatgtcaaggaatttaaagagcacatagccgcttctgtcagcatcccttcagaaaagcaacggctgatctaccagggacgggtgttgcaggatgataagaaactgcaggagtataatgtgggaggaaaggtgattcacctggtcgaaagagcccctcctcagactcaccttccatcaggagcatcaagtggaacagggagtgcctccgctactcatgggggaggttccccccctggcacccgaggcccaggcgcttctgtgcatgacagaaacgcaaattcgtacgttatggtgggaacgttcaacctcccaagcgacggctccgccgtcgacgttcacatcaacatggaacaggcccctatccagtcggaacctcgggttagactagtgatggcccaacatatgatccgagacatccaaaccctcttgtcccgaatggaatgcaggggtggcccacagccccagcactcacagcctccatag

SEQ ID NO: 78137 - DNA, 777 bp, Artificial Sequence
  derived and/or modified sequence
atggagcccaatgactctacctcaaccgccgtggaagagccggattccctggaagttctcgtaaagacattggattcacagacacgcacatttattgtaggcgcacaaatgaatgtgaaggagtttaaggagcatatcgctgctagcgttagtatcccatcagagaagcagcgtctaatctaccaaggcagagtcctccaggacgacaagaaactacaggagtacaacgtgggtggcaaagtgattcacctagtggagcgagcaccaccccagacgcacttaccttctggcgctagttccggaaccggcagcgctagtgcaacccatggaggtgggagccctcctggaaccaggggcccaggagcttccgttcacgacagaaacgccaactcctacgtgatggttggaaccttcaatctcccctcagatgggtctgccgtagacgtgcatattaatatggagcaggccccaattcagtcagaaccccgagtgcgactggtgatggcccagcacatgattagagatattcagacactcctgtcgagaatggaatgccgcggaggtccccaaccacagcattcccaaccccctccccagcctccagccgtgacccccgaacccgttgctctgtcctcacagacctccgagcctgtcgagagtgaggcaccaccaagggagccaatggaagcagaagaagtggaagagagagccccagcacagaaccccgagctgacgccaggtccagcccctgccggacccacgcctgcacccgagtag

SEQ ID NO: 78138 - DNA, 411 bp, Artificial Sequence
  derived and/or modified sequence
tgacggatgtccagaggcgtcaaccccagcctcgttagctggctcaccaccatgatgggtctgcgacttcaggttgttctcgagcacatgcctgtggggcctgacgcaatcctgcgctatgtgcggagagtcggagatccacctcagcctctccccgaggagcccatggaagttcagggggcagagcgggcatcaccagaaccacaggagtgggtgccgatcattcaacaagacatccaaagccagaggaaagtaaagccccagccccctctttctgatgcctatctgtcagggatgcctgctaaaagaagaaagctccggtcagatatccaaaagcggctgcaagaggaccccaactattctccacagcgattccccaacgcacagcgcgcttttgctgacgatccctag

SEQ ID NO: 78139 - DNA, 780 bp, Artificial Sequence
  derived and/or modified sequence
atggagcccaacgactcgacatctacagctgtggaagaacccgattccttagaggtgcttgtgaagacgttggactctcagacacgcacctttatcgtcggtgcacagatgaatgttaaagagtttaaagaacacattgccgctagcgtgtcaatcccatctgaaaaacagaggctgatctaccaggggagagtgcttcaggacgataagaagctgcaggagtataatgttggtggaaaggtgatccatctcgtggaaagagcgccacctcagacgcatttgcctagcggggcatcctcgggcaccggtagtgcctctgctactcacggagggggttcccctccaggcacaagagggccaggcgcttctgtgcatgacagaaatgcgaacagctatgtaatggtcggcacctttaatctcccctcagatggaagtgccgtggacgttcacattaacatggagcaggctcctattcaaagcgagccgagggtgagacttgtaatggctcagcacatgatccgggatattcagaccctcctcagtcggatggagtgccggggaggccctcaacctcagcacagtcagcccccaccccaacctcctgcagttactcctgaacccgtggcactctcgtctcagacgtctgaaccggtggaatctgaggcgcctcctagagaacccatggaagcggaagaagtggaggagagggccccagcccagaatcccgagctgacacctggtcctgcaccggctggcccaactccagccccagagacttag

SEQ ID NO: 78140 - DNA, 594 bp, Artificial Sequence
  derived and/or modified sequence
atggagccaaacgattccacatcgacagcggtcgaagaaccggattctcttgaggtgttagttaagacactggacagtcagactagaacttttatagtgggagcccagatgaatgtgaaggagttcaaagagcacattgctgcctctgtatcaattccctccgagaaacagagattaatttatcaggggcgagtcttacaggatgataagaagctgcaggagtataatgtgggcggaaaggtcatccacctggtggagagggctccgcctcagactcaccttccttccggggcaagcagtggcaccgggtcagctagtgctacacacggaggcggttctccaccaggcacgcgcggaccgggtgcgagtgtccatgacaggaatgctaacagctacgtgatggtaggaacttttaatttgccttcagatgggagcgccgtggacgtgcatatcaatatggagcaggcacctatccagtccgagccccgtgtccgcttggtgatggcacagcacatgattagggacatacaaacactcctgtctcggatggaatgtcgaggaggaccccaacctcaacacagccagccgccttag

SEQ ID NO: 78141 - DNA, 594 bp, Artificial Sequence
  derived and/or modified sequence
atggagccgaacgacagcacctccacggctgtcgaagagcctgacagcttggaggtgctagtcaagaccctggattctcaaaccaggacctttattgtgggcgctcagatgaatgttaaggagttcaaagaacacatcgccgcttcagtgtccattcctagcgagaagcagaggttaatctatcagggccgagtcttgcaggatgacaagaagctccaggaatataatgtcggaggaaaggttatacatctggtcgagcgcgctcctcctcagacgcacctgccatcaggtgcctcaagtggcaccggaagtgcgtccgccactcacgggggtgggagcccacccggaacacgaggcccaggggcatctgttcatgacaggaatgcgaattcttacgtgatggtgggaacatttaacttgccatctgacggcagcgccgtggatgttcacataaatatggaacaagcgccaatacaaagtgagccccgagtgcggctggttatggcccaacacatgattagggacatccagactcttctgtcccggatggaatgtcgtgggggacctcaacctcagcactcccagcctccttag

SEQ ID NO: 78142 - DNA, 789 bp, Artificial Sequence
  derived and/or modified sequence
atggaaccaaacgatagtacaagcacggcagtcgaggaaccggacagtctggaagtgctcgtaaaaaccctggatagccaaaccaggacattcatcgtcggggctcagatgaatgttaaggagttcaaggaacacatagccgctagcgtgagcattccctcagagaaacaaagactgatctaccaaggaagggtgttgcaggatgataagaaattgcaagaatacaatgtggggggtaaagttattcatctggttgaaagagctcccccacaaactcatctcccctctggggcttccagtgggactgggtctgccagcgctactcatggagggggaagtccgccaggcacacgcggaccaggagcaagtgtacacgatcgaaacgcgaatagctatgtgatggtaggcactttcaacctgcctagtgatggaagtgctgtggatgtgcacattaatatggaacaagcaccgatacagtccgagccacgcgtgcggctggtgatggcccagcacatgataagggacatccagactctgttatctcgaatggagtgtaggggcggaccgcaaccccagcacagccagcctcctccacaaccacccgcagtgacgccagaacccgtcgctttaagcagtcagaccagcgagcctgtggagtcagaggcccctccaagagaaccgatggaggccgaggaggttgaggaaagagcacctgcccagaatcccgagcttacgcccggaccagcacccgcaggcccaactccggcaccagagactaacgccccatag

SEQ ID NO: 78143 - DNA, 789 bp, Artificial Sequence
  derived and/or modified sequence
atggagcctaacgactctaccagcactgctgtcgaagagccagatagtcttgaggtcttagtgaagacactagacagtcagacaaggacgttcattgtgggtgcccagatgaacgtgaaggagttcaaggagcacatcgcagcgtctgtgtcaatcccctccgagaaacagaggctcatttaccaggggagagtgctccaagacgacaaaaagcttcaagaatacaacgtaggtggaaaggtcatacacctggttgagagggcgccacctcaaacgcacctgcccagtggtgcctcatcagggacgggatcagcttctgctactcatggaggcggatcacccccagggacaagaggaccgggtgcctctgtccacgatcgcaacgccaactcctatgtgatggtcggaacgttcaacctgccaagcgatggcagcgcagtagatgtgcacattaatatggagcaggccccaattcagtcggagccaagggtccgccttgtgatggcacagcacatgattagggacattcagacattattaagccggatggagtgtcggggtggaccacagccacagcactcccagcctccacctcaaccccctgctgtcacgcccgagcctgtggctctgagttcacagactagcgagccagtggaatccgaggcacctccacgtgaaccaatggaggcagaagaagtggaagagcgcgcacctgcccagaaccccgagttgaccccaggccctgccccagccggtcccacaccagcgccagaaactaacgccccatag

SEQ ID NO: 78144 - DNA, 780 bp, Artificial Sequence
  derived and/or modified sequence
atggaaccaaacgactccacttcaacagccgttgaagagcccgactcactcgaagtgcttgtaaagacccttgacagtcagactcgtacctttatagtcggagcccagatgaatgtgaaggagttcaaagaacacattgcagcttccgtgagcatcccgtctgagaaacagcgcctaatctaccagggccgagtgctgcaggatgataagaagctgcaggagtataacgtcggtggcaaggtcatccacctggtggagcgggcacccccacagacccacctgccctccggagccagctcagggactgggagtgcgtccgccacacacggcggtgggtcgccccctggaacccggggacctggggcttcagtgcatgatcgcaacgcaaactcatatgtaatggttggaaccttcaaccttcccagtgacggatctgcagtcgacgtgcacatcaacatggaacaggcgcctatccagtcggagcccagagtccggttagtaatggctcagcacatgattagggacatccaaactctgctctcaagaatggaatgccgtgggggacctcaaccacagcactcccagccccctccacagccccctgcagtcaccccggagcctgtggctctttcatctcagacaagtgaacctgtggaatctgaagctcccccaagagagcccatggaagcagaagaagtggaggagcgcgctcctgcgcaaaacccagagttaactccaggacccgctcctgctggccctacacctgctccagagacttag

SEQ ID NO: 78145 - DNA, 477 bp, Artificial Sequence
  derived and/or modified sequence
atggagcccaatgactctacatccacggcagtggaagaacctgactccctggaagtgctagtcaaaactttggactcccagaccaggacgtttattgttggagcccagatgaacgtcaaggaatttaaggagcacattgccgctagcgtgtcaatcccctctgaaaaacagcgtctgatttaccaaggcagagttctacaggatgataagaagcttcaagagtacaacgtgggtggaaaggtgatccacctggtggagcgtgccccaccccagactcatttgccctctggtgctagtagcggaactggaagcgcatctgccacccacgggggaggttctccccctggaaccagaggacccggtgcatcagtgcacgacagaaatgcaaactcttacgtgatggtcggcactttcaacctgccgtcagatggcagcgccgtggacgtgcacattaacatggagcaagctcccatctag

SEQ ID NO: 78146 - DNA, 780 bp, Artificial Sequence
  derived and/or modified sequence
atggagcctaatgactcaacatccaccgcggtggaggaacccgatagcctggaggtacttgtgaaaaccttggattcacagacacggaccttcattgttggcgcacagatgaacgttaaagaattcaaggagcacatcgccgcaagcgtcagtatcccctccgagaaacagcgattaatttatcagggacgcgtgctgcaggatgataaaaagctacaggagtacaacgtggggggtaaagtaatacatctggtagaacgcgcaccacctcagactcatctgccgagtggggctagctcagggaccggcagcgcgagtgccactcacggtggaggtagcccccctggaaccagaggaccaggtgcgagcgtccacgatagaaatgcaaatagctatgtcatggtgggcacattcaatctgccaagtgatggatccgccgtggacgttcatatcaatatggaacaggcgccaattcagagtgagcctcgagtgcggctcgtgatggcacagcacatgatccgggatattcaaaccctgctgtcccggatggaatgccggggaggtcctcagccccagcattcccagcctcctccacaaccgccagccgtcacccccgaacccgtcgccctcagctcccagacctccgagcctgttgagtctgaggcccctccccgagaaccaatggaagctgaggaagtggaagagcgggctccggctcagaatccagagctgacaccaggcccagcgcctgctggccctaccccagctcctgaaacgtag

SEQ ID NO: 78147 - DNA, 411 bp, Artificial Sequence
  derived and/or modified sequence
tgaaggatgagcagaggcgttaaccccagcctcgtgtcttggttgacaacaatgatgggactcagattgcaggtggtgcttgagcacatgcctgtgggtccagacgccattttgagatatgtgaggagagttggcgatcccccacagcctctgcctgaggaaccaatggaggtgcagggcgctgagcgcgctagcccggaaccccaggagtgggtcccaattatccagcaggacatccaatcccagcggaaggtaaaaccccagcctccactatcagacgcctacctgtccgggatgccggctaagcgcaggaaactgcggtctgacatccagaagaggctgcaggaggaccccaattatagtccgcagcgcttcccaaatgcacaaagagccttcgccgatgatccatag

SEQ ID NO: 78148 - DNA, 411 bp, Artificial Sequence
  derived and/or modified sequence
tagcgtatgtcaaggggtgtcaacccatctctggtgtcatggctcacaaccatgatggggcttcggctgcaggtggtgctcgagcacatgccagtcgggcctgacgcaatactgcgatatgtgcggagagtgggtgatcctcctcaacccctgccagaggagccgatggaggtgcagggagccgagcgagcatcgcctgagcctcaggagtgggtgcccattatccaacaggacatccagagccaacggaaagtgaagccacagcccccattgtctgacgcttatttgtcaggaatgccagctaaacggaggaagctgcggtccgacatccaaaagaggctgcaagaggaccctaactatagtccgcagagattcccaaacgcacagcgcgctttcgccgacgatccgtag

SEQ ID NO: 78149 - DNA, 594 bp, Artificial Sequence
  derived and/or modified sequence
atggaacctaacgattcgacgagtaccgcagtcgaggaacctgattctttggaggttctcgtgaagactctcgatagtcagaccaggacctttatagtcggcgcacagatgaacgtaaaagaattcaaggaacatatagcagcctccgtgtccataccatctgaaaagcagaggctgatctaccaggggcgagtcctgcaggatgataagaagcttcaggagtacaatgtaggaggcaaggtgatccatctggttgagcgggctcctccccagacgcatttacccagcggggcaagttcagggacagggtccgctagcgcgacccacgggggaggctctcccccaggaacccggggacccggtgctagcgtgcacgacaggaacgccaatagctatgtgatggttgggacttttaacctgccctcggacggctctgcagtcgacgtccatattaatatggagcaagcgccaatccagagcgagcccagagtgagacttgtgatggctcagcatatgattagggatattcagactcttctttccaggatggagtgtaggggcggaccccagccccagcattcccagcccccatag

SEQ ID NO: 78150 - DNA, 777 bp, Artificial Sequence
  derived and/or modified sequence
atggagccaaatgactcgacatccacagcggtcgaggagccagattcattggaggtgctagtaaagaccctcgattctcaaaccagaacttttattgtgggcgcacagatgaacgttaaagaatttaaagagcacatcgcagctagtgtgagcatccccagcgagaagcagcgcctgatttatcagggtcgtgtacttcaggatgacaagaagctgcaggagtacaacgtcggtggcaaagtgattcatctggtggagcgtgcacccccacaaacacatctgccttcaggggcatcctcaggtacgggcagcgcctctgccacacacggcggaggctcacccccaggaactagaggaccaggtgcatcagtgcacgaccggaacgccaacagttacgtgatggtcggcacattcaatctgcctagcgacggaagtgcggtggacgtgcacatcaatatggagcaggccccaatacagagtgagcctcgcgtgaggctcgtgatggctcagcacatgataagggatatccagaccctgttgtcccgcatggagtgccgaggtggacctcagcctcaacactcacaaccaccacctcaaccgcctgctgtaactccagagccagtggccctgagcagccaaacatctgagcctgtagagtctgaagcaccaccaagggaaccaatggaggctgaagaagtggaggagcgcgcaccagctcagaatcctgagctgacacccggacccgctcccgctgggcctacccctgctccggaatag

SEQ ID NO: 78151 - DNA, 789 bp, Artificial Sequence
  derived and/or modified sequence
atggagccgaatgacagtacctccactgccgtggaggaaccagatagcctggaggtgcttgtgaaaaccctggactcacagacgaggaccttcattgtgggggctcagatgaacgtaaaggagttcaaagaacacattgccgcaagtgtgagcattccttccgagaagcaacgcctcatctatcagggaagggtgttgcaggatgacaaaaaactccaggagtataatgtaggtggtaaagtgattcatctggtggagcgggctccgccacagactcatttgcctagcggcgcatcatctggcactggatctgccagcgccactcacggtgggggtagcccgcctggcacgagaggccctggggcaagcgtgcacgataggaatgcaaactcctatgttatggtcggaacctttaatctaccatcggatggttcagcagtagacgttcacataaatatggaacaggcacccattcaaagtgagccacgagtccgattagttatggcacaacacatgattagggatatccaaacactgctttcacgcatggagtgccggggagggcctcagcctcaacacagccagccaccccctcagcctcccgctgttacaccggaacccgtagctctaagctcacagacttcagagcctgttgaaagcgaggcaccacccagagagcctatggaagctgaggaggtggaggaaagagcccctgcccagaacccggagctgacaccgggtccagcacctgctggccctacaccagctccagagacgaatgctccttag

SEQ ID NO: 78152 - DNA, 777 bp, Artificial Sequence
  derived and/or modified sequence
atggagccaaacgactctactagcacggctgtggaagagcctgatagcctggaggtgctcgtcaagacccttgactcacagactcggacattcatcgtgggagcgcagatgaatgtgaaagagttcaaggaacacatcgccgcaagcgtgagcataccctctgaaaaacaaagattaatataccaggggagagtgctgcaggacgacaagaagctgcaggaatacaacgtggggggtaaagtcattcacctggtcgagcgtgcgccaccacaaactcacctgccaagtggtgcctcctccgggactggatctgctagcgccactcacggcggtgggtccccacctggaacaagaggtccaggggcttcagtccatgataggaacgccaacagctacgttatggtcggtaccttcaacctgcccagtgatggtagcgccgtcgacgtccacatcaatatggaacaagcaccaattcagagcgaacctagggtgagactggtgatggcgcagcacatgataagggatatccagacactgttgagtagaatggagtgccgcggaggcccacagccgcagcacagccagcccccaccccagccaccggctgttactccagagcccgtcgcgctctcaagccaaacttcagagccagtggagtccgaggctcccccacgggaaccaatggaggccgaagaagtagaggagagggctccggctcaaaatccagagctgacccccggacctgccccagccggacctacccctgctccagagtag

SEQ ID NO: 78153 - DNA, 780 bp, Artificial Sequence
  derived and/or modified sequence
atggaacctaacgattctacgagcaccgccgtagaagaaccagactccctcgaggttctcgtcaaaacccttgactcacagacacgaaccttcattgtcggcgcacaaatgaacgtcaaagagttcaaggaacatattgctgcatcagtgtccataccttcagagaagcagcggttaatctatcagggtagagtgcttcaggacgataagaagttgcaggaatataacgtcgggggaaaggttatccatctagtggagagggctcctccccaaactcacctcccctctggtgcatcctcgggcaccggaagtgcttccgccacacatgggggtgggagcccgccaggaacccgcggacccggtgcgtcagtacacgacagaaatgctaacagttatgtcatggtaggaacatttaacttgccctcggatggctcagccgtggacgttcacatcaacatggagcaggctcccatccagtccgagcccagagttaggctcgtaatggcccagcatatgattcgcgacatccagactcttctttcccgaatggagtgtcgtgggggtccccagcctcagcattctcagcccccacctcagccacccgctgttacaccagaaccagttgcactgagctcacaaacaagcgaacctgttgagagtgaggctccgccaagagagcccatggaggccgaagaggtggaagaaagggctccagctcagaaccccgagttgacacccggaccagctcccgctggtccaaccccagcccctgaaacatag

SEQ ID NO: 78154 - DNA, 477 bp, Artificial Sequence
  derived and/or modified sequence
atggaacctaacgatagcacctcaactgccgtcgaagaacctgattcactggaggtgctcgtgaaaactttagactctcagacgaggacctttatagtgggcgctcagatgaacgttaaagagtttaaggagcatattgccgcttccgtcagcataccctccgagaaacagcgcttaatctatcaaggtagagtgcttcaggacgataaaaagctccaggaatacaacgtgggtggcaaggtaattcacctcgtggagagggctcccccacaaacccatctgccttcaggggcaagctctggaacaggaagcgcaagtgcgactcacggcggtggttcccctccgggaaccagaggcccaggggcatccgtgcacgatagaaacgctaacagctacgttatggtggggacctttaacttgccctccgacggttctgccgtcgatgtccacatcaatatggagcaggcccctatttag

SEQ ID NO: 78155 - DNA, 594 bp, Artificial Sequence
  derived and/or modified sequence
atggagcccaacgacagcacttctaccgctgtggaggagcctgattcgctcgaggtcctcgtcaaaacgcttgactctcagacccgcacctttatcgtcggcgctcagatgaacgtcaaagagtttaaggagcacatcgccgcttccgtgagtatccccagcgaaaaacagcggctgatttatcaagggagagttctacaagatgacaaaaagcttcaagagtacaacgtaggcggaaaggtcatacacctggtggagcgcgctcctccccaaactcacctcccttcaggagcctcatccggcacagggtccgccagcgccacccacgggggtggatcccccccaggtacacgagggccaggtgcgtctgtgcacgatagaaatgccaattcttatgtaatggtaggaaccttcaacctcccgagcgatggcagtgctgtcgacgtgcacatcaatatggagcaggcccctatccagagcgagcccagggtgaggttagtgatggcccagcacatgatcagagatatccagacgttactttctcgtatggagtgcaggggcggaccccagcctcaacactcacaaccaccttag

SEQ ID NO: 78156 - DNA, 789 bp, Artificial Sequence
  derived and/or modified sequence
atggagcccaatgactccacatcaaccgcagtggaagaaccagactcgctggaagtcctggtgaagactctagacagtcagactagaacatttattgttggagctcaaatgaacgtaaaggaattcaaagaacacattgccgcaagcgtgtcgataccatccgaaaagcaacggctcatataccagggacgggttctccaggacgacaagaaacttcaggagtataacgtcggaggaaaagttatacatttggttgaacgggcaccgcctcagacacacctcccctctggagcctcttccggaactggctccgccagcgcgactcatggtggtgggtcccctccaggaaccagagggccaggcgcaagtgtgcatgatcgcaacgccaacagttatgtgatggtcggcacttttaacctcccgagcgatgggtctgccgtggacgtccacataaacatggagcaggccccaatccaatccgaacccagagttcggctggttatggcccagcatatgataagggatattcagaccttgcttagtcgtatggagtgtagagggggacctcagccccagcatagccagcccccaccacagcctccggctgtcactccagaacctgtggcattatctagtcagacttcagagcccgtggagagcgaggccccaccacgtgagcccatggaggccgaggaagtagaggagcgagcgcctgctcagaatcctgaactcactccaggcccagcacctgccggacccacaccggcacccgaaaccaatgcaccatag

SEQ ID NO: 78157 - DNA, 789 bp, Artificial Sequence
  derived and/or modified sequence
atggagcccaatgatagcacttccacagctgtggaggaaccagattctcttgaagttttggtgaaaacacttgactcccagactcggacattcatcgtcggggcacaaatgaatgtcaaggagtttaaggagcatatagcagcatctgtgtccattccgtcagaaaaacagcggttaatttatcagggcagggtgctgcaggacgataaaaagctacaggaatataacgtgggcggtaaagtgattcatctcgtagagcgggcacctccacagacccacctaccctctggggcaagtagcggtacgggctcggctagcgcgacacacggcggaggtagccccccaggcacacggggaccaggagcctccgttcacgaccgcaacgctaattcgtacgtcatggttggcaccttcaatctgccaagtgatggttccgccgttgacgtacacattaatatggaacaggcaccaattcagtcggagcctcgggtgagactcgtgatggcccaacacatgatccgggatattcagacactgctatcccgcatggagtgccggggaggtccccagccacagcacagccagccacccccacagccgccagccgtgactcctgagcccgtggctctcagtagccagacctccgagcctgttgagtcggaagcccctccaagggaaccgatggaggcagaggaagttgaagaacgggcacctgcacaaaaccctgagctcactcctggccctgccccagcaggcccaaccccagctcccgagaccaacgccccatag

SEQ ID NO: 78158 - DNA, 2712 bp, Artificial Sequence
  derived and/or modified sequence
atggaacccaatgactctacttctacggcagtggaggagccggattctctggaagtcctggtgaagacactcgacagccagacacggacattcattgttggagcccagatgaatgtcaaagaattcaaggaacacatcgctgcctccgtgagcattccaagcgagaagcagaggctcatctatcaagggagggtcttgcaggatgacaaaaaactgcaggagtataacgttggaggtaaggtcatccaccttgtcgagcgcgctcccccacagacgcatttaccaagcggtgcgtcctcaggcaccggatcagcctctgctactcacgggggaggaagcccccctgggacccggggtccaggagcaagtgtgcacgaccgaaacgcgaacagctacgtaatggttggcacatttaatttaccaagtgatggatctgctgtcgatgtgcacattaacatggagcaggctccaatccagagtgagccacgtgtgcgcctggtcatggcccagcacatgatccgggatattcaaaccctgttgtcccgcatggaatgtcggggtggtcctcaaccacagcatagtcagcctccaccgcagccacccgcagtgacccctgagcccgtggcactttcgagccagacctctgagcccgtggagagcgaggctccccctagggagcccatggaagcagaggaggtagaagagagggcgccagctcagaacccagagcttactcctggtcccgctcctgcaggccctacaccagccccagagaccaatgcaccgaatcaccctagtcccgctgaatatgtggaggtcttgcaggaactgcagagactagaaagtcgcctgcagccatttctgcagcggtattatgaagtgctcggtgcagccgctaccacagactacaataataaccatgagggcagagaggaagaccaaaggctcatcaacttggttggagaaagtctgcgactgctgggaaacaccttcgttgccctgtcagatctgcggtgtaatcttgcctgcaccccgccaaggcatcttcacgtggttcgcccaatgtcacactataccacacccatggttcttcagcaggccgctattcccatccagatcaacgtgggaaccactgtcacgatgacggggaatggcactcggcctccccctactcccaacgccgaagcccctccccctggcccaggacaggcctctagtgtggctccgtcttcaactaatgttgagagtagtgcggagggagccccaccacctgggccagcccctccgccagccaccagtcaccctcgggtgattagaatttctcaccagtccgtggaacctgtggtaatgatgcacatgaatatccaagacagtggtacccaacccggaggcgtccccagtgcccctacaggacctctgggaccacctggtcacggccagaccttaggccagcaggtgcctgggtttcctacagctccgacaagggtggttatcgctcgccctacgcctcctcaagccagaccttcacacccgggagggcctccggtctcaggaacacttggcgcaggcctgggaaccaatgcatctctggcgcagatggtgtcggggctggtgggccaactcctgatgcagcccgttctggtagctcaagggaccccagggtcaccgggagggctcggtctggagtctttatcaccggagttttttacaagtgtggtgcagggcgtactcagtagcctcctgggatctctgggagcgagggccggtagcagtgagtctatcgcagcctttatacagcgcctctcaggatcgagcaacatttttgagcctggggctgacggcgctctaggatttttcggggcactattgagtctgctctgtcagaacttttccatggtagacgttgtgatgctgctgcatgggcacttccagccccttcaaaggctgcagccccagctacgttccttctttcatcaacattatctgggcggacaggagccgaccccttctaatatccgcatggctactcacacactgataactggattggaagagtatgtgcgggagtctttctctctggtgcaagtccagcctggagtggacatcataaggaccaatctggagttcctccaagagcagttcaacagcatagccgcacacgtccttcactgtactgacagtggatttggagccaggctgctggaactgtgtaaccagggtctttttgagtgtttagcactcaatctgcattgtctgggcggacagcaaatggagctggcggcagtgattaatggtagaattaggaggatgagccggggtgtgaatccctcactcgtttcatggctgactaccatgatgggcttacgcctgcaggtagttctagagcatatgcctgtgggccctgatgccatcctcagatacgtgcgcagggtgggcgatccaccacaaccactgcccgaggagccaatggaggttcagggtgcggagcgcgcttccccagagccccaggagtgggtcccaattatccagcaggacatccagtcccagcgcaaggtgaagcctcagccccctttgagcgacgcgtacctctctgggatgcccgctaaaaggcgcaagttgcgcagcgacatccagaaaagactgcaagaggatcctaattactcacctcagcggttccccaacgcccagcgagcgttcgcagatgacccttag

SEQ ID NO: 78159 - DNA, 789 bp, Artificial Sequence
  derived and/or modified sequence
atggaaccaaatgactccactagtaccgcagtggaggagccagattctcttgaggttttggtgaagacactcgattcccagacgcgcacgttcatagtgggcgcacagatgaacgttaaagagtttaaggaacacattgccgcaagcgtgtccattcccagcgaaaagcagcggctcatttaccagggtcgggtgctgcaggatgacaaaaagcttcaggagtacaacgttggtggtaaggtaatacatttggtggaacgggcaccaccacagacgcacctacctagcggtgcttcgagtggaacaggctccgcaagtgctactcacgggggagggtcaccgcctggcacgcggggacccggagccagtgtacacgatcgaaatgccaatagttatgtgatggtcggcacatttaatttaccctcagacggcagcgcggtagacgtgcacattaatatggagcaggcacccatacagtcagagccaagggtccgactggtgatggcgcagcatatgattagagacatccagaccctgctatctagaatggaatgtcggggaggaccccagcctcagcacagccaaccccctccccagccaccggctgtcactcctgagcccgtagccctttctagtcagacatctgaacctgtcgagtcggaggccccacctcgggaacctatggaagctgaggaagtggaggaaagggcccctgcccagaaccccgagttgactcccggacccgctccagcaggccctacaccagctcctgaaaccaacgcaccctag

SEQ ID NO: 78160 - DNA, 780 bp, Artificial Sequence
  derived and/or modified sequence
atggaaccaaatgatagcacttccactgcagtagaagaaccggactccttggaggtactggttaagacactggattcgcaaacacggacgtttatcgtgggggcacagatgaatgtgaaggagttcaaagaacacatcgcggcatctgtgtccattccttccgaaaagcagcggcttatctaccaggggagagtccttcaagacgacaagaagcttcaggagtataacgtgggcggaaaagttatacacctggtggaacgggctccgccacagacccaccttcccagtggagcaagttcaggaaccggctctgcatcagctacacacggcggtggttcaccccctggcactcggggacccggagcttcagtacacgatagaaacgcaaattcatacgtcatggtggggacatttaatctcccatcggacggcagtgccgtggacgttcatattaatatggaacaggcacctatacagtccgagcctcgagttcggctagtgatggcccagcatatgattagagatattcaaacgctcctctccagaatggaatgtcgcggtggcccacagccgcagcacagtcagcccccaccccagcctcctgctgtgacacctgagcccgtggccttatcctcccagacttcggagccggtggagtccgaggcaccccctagagagccgatggaggcagaagaggtcgaagagcgggcacctgcccagaaccccgagctaactcctggcccagccccagctggccctacccccgcaccagaaacatag

SEQ ID NO: 78161 - DNA, 777 bp, Artificial Sequence
  derived and/or modified sequence
atggagcctaacgattcaacatccacagctgttgaggagcccgactcactagaggttctcgtaaaaactctcgactcccagacaagaaccttcatagtgggtgcccagatgaatgtcaaagagtttaaggaacatattgctgcatcagtctcaattccaagcgagaaacaaaggctgatctaccagggaagggtcctgcaggacgataagaagctgcaggagtacaatgtagggggaaaagtgatacaccttgtcgagagggcaccgccacagacacatctgccgtctggtgcaagctcgggaaccggcagcgcttcagctacccacgggggaggtagccctccagggacaagaggacctggcgcaagcgtacatgacagaaacgcgaactcatacgtgatggtggggaccttcaacttgccgagcgatggttcagcggtcgacgtgcacatcaacatggagcaggccccaattcagtccgaaccacgggtcaggctggtgatggctcaacacatgatccgcgatatccagacacttctctccaggatggaatgtaggggagggccacaacctcagcactctcagccccctccacagccaccggcagtcacgcccgagcccgtcgcactctcttcacagacatctgagcctgtggagtctgaagcccctccacgagaacctatggaagctgaagaagtggaggagcgggctccagcccaaaatcccgagctgacaccagggcctgccccagctggcccaacgcctgcgcctgagtag

SEQ ID NO: 78162 - DNA, 477 bp, Artificial Sequence
  derived and/or modified sequence
atggagccgaatgacagcacatccactgcagtcgaggagccagattccctggaggtgttagtgaagaccctcgatagccagacacgtacatttatagtgggagcgcagatgaacgtgaaggagttcaaagagcacatcgccgcaagtgttagcattccatcagagaagcagagactgatctatcaaggcagggtcctccaggacgataagaagctccaggaatataacgtggggggaaaggttattcatttagtcgagagggctccacctcaaacacacctcccatccggtgcaagtagcggaacagggagtgcaagtgctacccatggaggtggcagcccgcctggaacgcgaggccctggcgcatcagtgcatgatcggaacgcaaacagttacgtgatggtggggaccttcaacctgcccagcgatgggtctgcagtggatgtacacatcaacatggagcaggctccgatctag

SEQ ID NO: 78163 - DNA, 411 bp, Artificial Sequence
  derived and/or modified sequence
tgacggatgtcccggggtgtcaatccttcacttgtctcttggcttacaaccatgatgggccttaggctgcaagtggtgctcgagcatatgcccgtaggccctgacgctattctaagatatgtgcgcagggtaggggatccacctcaacctcttcccgaggagccaatggaggttcaaggggcagagcgggcaagtccagagccccaggagtgggttccaatcattcagcaagacatccagtcccaacgcaaagtgaagcctcagccacctctgtccgatgcgtacttaagtgggatgccagcgaagcgcagaaagctcagaagtgatatccagaaaagattgcaggaggatcctaactattcaccccagaggtttcccaatgcacagagagctttcgcagatgacccgtag

SEQ ID NO: 78164 - DNA, 780 bp, Artificial Sequence
  derived and/or modified sequence
atggaacccaatgactccacaagtaccgcggtggaagaaccagactcattggaggtcctggttaaaaccctggactcgcagacacgaacattcatagtaggggctcagatgaacgtgaaggagtttaaagaacatattgccgctagtgtttccattccaagcgaaaagcagaggttaatttaccagggacgcgtattacaggatgacaagaagctgcaagagtacaacgtcggcggaaaggtaattcacctggttgaacgcgcacctccccagacccacctgccctccggagcaagcagcggcaccggtagcgccagtgctacccacgggggtggttcaccaccaggcactagagggcctggcgcaagtgtgcacgacaggaatgcaaacagctacgtgatggtgggtacatttaacttgccgagcgatggatcagctgtggacgtgcacatcaacatggagcaagccccaattcagtcagaacctcgtgtgcgactggtcatggcccagcacatgatccgggacatccagactctgttgagccgcatggagtgtagagggggtccacagccccagcacagtcagcccccaccacagccaccagccgtgacccccgaaccagtcgccctgtctagccagacaagtgaacctgtggagtcggaggctccaccaagggaaccgatggaagcagaagaagtcgaagagcgggcacccgcacagaaccccgagctcacccccggaccagccccagcagggccaactcccgctcccgagacttag

SEQ ID NO: 78165 - DNA, 477 bp, Artificial Sequence
  derived and/or modified sequence
atggagcctaatgatagcacaagtaccgctgtagaggagcctgattcgctggaagtactcgtaaaaacactcgattcgcaaacgagaactttcatagtgggtgctcagatgaatgtgaaggagttcaaagagcacattgccgcttcggtttccattccctccgaaaagcaaagactgatttaccagggcagagttctgcaggatgacaaaaagcttcaggagtataacgtcggcggtaaagttattcacctggtggaaagagctcccccacagacacacctgccctcgggcgcaagcagcggcacagggtccgcttctgcaacccacggcggaggatcccctcctggcacaaggggacctggcgcaagtgtacacgatcgcaatgctaactcctacgttatggtgggtactttcaacctccctagcgatggatcagcagtggacgtgcatatcaatatggaacaagctcccatttag

SEQ ID NO: 78166 - DNA, 777 bp, Artificial Sequence
  derived and/or modified sequence
atggagcctaatgactccaccagcacagctgtggaggaacccgatagccttgaagtgctcgttaagacgctagatagtcagaccaggacctttattgtaggagcacaaatgaacgtgaaagagttcaaggaacatatcgctgcctccgtttccatccctagcgagaagcaacgcttgatataccagggaagagttctgcaggatgacaaaaaacttcaggaatataacgttggcggaaaagtgatacaccttgtcgagcgggcaccaccgcagacgcatttgccttccggggcttctagcggcaccggctcagcatccgccactcacggcggaggatccccgcctggtacacgcggacccggagctagtgtccatgaccggaacgcaaactcatacgttatggtgggaaccttcaacttaccttctgacggttctgcagtggacgtccatatcaacatggagcaggctccaattcaaagtgagcccagggtgcgtttagtaatggcacagcacatgatccgtgacatccagactctgctttcacggatggagtgccggggagggccacagccacagcactcccagcccccaccgcagccccctgctgtaacaccggagcctgtggccctgtcttcacagacatcagagccggtggaaagcgaagcccctcctcgggaacctatggaggccgaagaagtcgaagagcgggcaccagcgcagaacccagagcttacccctggcccagcccctgccggaccgactcctgcgccagagtag

SEQ ID NO: 78167 - DNA, 789 bp, Artificial Sequence
  derived and/or modified sequence
atggagcctaatgacagcacaagcaccgctgtggaggagccagatagccttgaagttcttgtgaagacattggactcccagacgagaaccttcattgtcggtgcccagatgaacgttaaagagttcaaagaacatatcgcggcttcagtcagcatcccgagcgaaaagcagaggttgatctaccaaggcagagtcttgcaggacgataagaagctgcaagaatataacgtaggcggtaaggttatccacctggtggagagagcccctccccaaacccatctcccatccggagcttcttctggcaccggtagcgccagtgcaactcacggcggaggaagcccaccgggtactagagggccaggagcctcagtccacgaccggaatgccaactcatatgtgatggtggggacctttaatctcccttccgatggaagtgctgttgacgtccatattaacatggaacaggctcccatccagagcgagccacgcgtgcgtctggtcatggcccagcatatgattcgcgacatccagaccctgctctccagaatggagtgtagaggcggaccacagcctcagcactctcagccaccacctcaaccaccagccgtgacacctgagcctgtggctctgtcgtcccagacaagtgagccagtcgaaagcgaggcaccaccacgggagcctatggaggctgaggaggtggaggagcgcgctccagcacagaacccagaacttactcctggtcctgcgccagctggcccaaccccggctcccgaaactaacgcaccctag

SEQ ID NO: 78168 - DNA, 789 bp, Artificial Sequence
  derived and/or modified sequence
atggagcccaatgacagcacctctaccgcagttgaggaaccagatagtctggaggtattagtcaagactctcgactcacagactaggactttcatcgtgggtgcgcaaatgaatgtgaaggagttcaaggagcatatagcagcgtccgtgtccattcctagcgaaaaacagcgcctgatatatcaggggcgagtcctgcaagacgataagaagctacaagaatacaacgttggcggtaaagtcatccacttggtggagagggcgccaccccagactcatctcccaagcggcgcttccagcggaacggggtctgcaagcgccactcatgggggaggaagcccgccaggaaccagagggcctggagcctcagtgcacgaccggaatgccaactcctatgtgatggtgggcaccttcaacctgccttctgatggcagtgctgttgatgttcatatcaacatggagcaggccccaatccaatccgaacccagggttcgcctcgttatggctcagcatatgatacgcgatattcagaccctgctgtccagaatggagtgtaggggcggtccccagcctcaacactctcagccacccccacagcctcccgcagttacacctgagccagtggcactttcatctcagacatcagagcccgtggaatcagaggcccctcccagggagccaatggaagctgaagaggtcgaagaaagggcccctgcccagaaccctgagctgacgcctggccctgcacccgctgggccaactccagctcctgagaccaatgctccttag

SEQ ID NO: 78169 - DNA, 780 bp, Artificial Sequence
  derived and/or modified sequence
atggagcctaatgactcaacatctaccgccgtggaggaacccgacagcctggaggttctcgtgaagactctcgatagccagactagaactttcattgtgggagctcaaatgaatgttaaggagttcaaggagcacatcgctgcttcggtatctattcctagtgaaaagcagcgcctcatctaccagggcagggtgttgcaggacgacaaaaagctccaggagtataacgttgggggtaaagttatccatctggtggagagggcaccaccccaaacacatctacccagcggcgctagtagtggtacggggtctgcatccgccactcatggcggtgggagccctcccggtacccggggaccgggtgcctccgtgcacgatagaaatgctaactcctacgtcatggtcggcaccttcaatctgcccagcgatggttccgccgttgatgtccatataaatatggaacaggcgcctattcaaagtgagccaagagtccgtttggtgatggcccagcacatgatccgggatatccagaccctactttctcgcatggagtgcagaggcggacctcagcctcaacatagccagccgccaccacagccgccagctgtcacacctgaacccgtagctttgtcatcccagacaagcgagccggtggaatccgaggcgcctccccgtgaaccaatggaggccgaagaagtcgaagaacgggctcccgctcaaaaccctgagctgactcccggacctgcccctgctgggccaacacctgcccctgaaacatag

SEQ ID NO: 78170 - DNA, 477 bp, Artificial Sequence
  derived and/or modified sequence
atggagcccaatgacagcacgagcaccgccgtcgaggagcctgacagcctcgaggtgctggtgaagacgctcgattcccaaacccgaacatttatcgtgggagcacagatgaacgtgaaggagtttaaggagcacattgctgccagcgtctctatcccatccgagaagcagaggcttatctaccagggcagagtcctgcaagacgacaaaaaactgcaagaatacaacgtcggagggaaggtgatccatcttgtagaaagggcccctcctcagacccacctgccatccggggcttccagcggtactggcagtgcgagtgctacccatgggggtggaagccccccagggacccggggacccggtgccagtgttcatgataggaatgctaatagttacgtgatggtaggaacattcaacttgccctcagatgggagcgccgtggacgttcacatcaacatggaacaggcacctatctag

SEQ ID NO: 78171 - DNA, 789 bp, Artificial Sequence
  derived and/or modified sequence
atggaaccaaacgactccacctcaacagctgtagaagaaccagatagccttgaggtgcttgtcaaaactctggactctcagaccaggacctttatcgtcggcgctcagatgaatgtgaaggaatttaaggagcacatcgctgccagtgtatccataccctctgaaaagcaacggctgatataccaaggacgggttttacaagacgacaagaagttacaggagtacaatgtcggcggaaaagttatacacctggtcgagcgggctccgcctcagacccacctgccatcaggcgcatccagtggaactgggagcgcctccgcaactcacggtggtggtagtccgcctggtaccaggggtcccggagctagcgtccatgataggaatgctaattcatacgtgatggtggggaccttcaacctgccgtctgatggctctgctgtcgatgtgcacatcaacatggagcaggctcccatccaatctgaacctcgtgttaggctggtaatggcccagcatatgattcgcgacattcagacactcctctcgcggatggagtgtcgaggcggaccgcagccccagcattcccaaccccctcctcaaccccctgccgttaccccggaacccgttgcgttgtcctcacagacatccgagccagtagaaagtgaggccccacctcgcgaaccaatggaagccgaggaagtggaagagcgagctccggcacagaaccctgagctgacaccgggaccggctcctgctggcccaacccctgcaccagagaccaatgccccttag

SEQ ID NO: 78172 - DNA, 594 bp, Artificial Sequence
  derived and/or modified sequence
atggaacctaatgatagcacaagcactgccgtggaagagccagatagccttgaggtgcttgtcaagaccctggattcacaaacgcgaacctttatcgtgggagctcagatgaacgtgaaagaatttaaggaacacatcgctgcgtccgtatctatccctagcgaaaaacagcgccttatttaccaagggagggttttgcaggacgataaaaagctgcaggagtacaacgtaggtgggaaggtgattcatctggtcgaacgggcaccaccacagacccacctcccatccggagcatcgtctgggaccgggtctgcaagcgcgacacacgggggtggaagcccaccaggtactagaggacccggtgcatccgtgcacgaccgaaatgcgaattcgtatgtgatggtgggtacttttaatctgccaagtgatggatctgcagtggacgtgcatatcaacatggagcaggcacctatacagtccgaaccccgagtccggctggtgatggcccagcatatgattcgagatatacaaacgctcctgagcaggatggaatgccgcggaggtccccaaccccaacacagtcagcccccttag

SEQ ID NO: 78173 - DNA, 777 bp, Artificial Sequence
  derived and/or modified sequence
atggaaccgaatgattcaacctctactgctgtcgaagagccagattctctggaggtcctcgtgaagacgttggatagccagactaggacctttatcgtcggagcacagatgaatgtgaaagaattcaaagagcacattgcggcttctgtctctattccttcagagaaacaaaggctcatctatcagggtagggtgctccaggacgacaaaaagctacaggaatataacgtaggaggtaaagtcatccacctggttgagagagctccaccacagacacaccttccaagtggggctagcagcggcacaggttcggcatccgccactcacgggggtggtagcccaccagggaccagagggccaggcgcttcagtacatgatcgcaatgcgaactcgtacgtcatggtcggtacattcaatctcccctctgacggtagcgccgttgacgttcacattaatatggagcaggccccaatacagtctgagcccagggtcaggctggttatggctcagcacatgattagagacatccaaacgctactgtcccgtatggagtgtagaggcggtcctcagccccaacactcccagccgccaccccaaccacccgctgtgaccccagagcctgtcgcgctaagctcccagacctctgagccagtcgagagtgaggcgcctcctagggaacccatggaagcagaagaagtggaggagagggcacctgcccagaatccggagttgacccccggaccggctcccgctggaccaacgccggctcccgagtag

SEQ ID NO: 78174 - DNA, 411 bp, Artificial Sequence
  derived and/or modified sequence
taaagaatgtctagaggagtgaatccgtccctggtctcttggctgacaaccatgatgggcctgcggctgcaggtggtcttggagcacatgcccgtgggccctgacgccatactgcggtatgttagaagggtcggcgaccccccacagcctcttcccgaggagcccatggaggtccaaggagccgaacgggcaagccccgaaccccaagagtgggtgccaattattcagcaggatatccagagtcagcgtaaggtgaagccacagccacctctgtcagatgcttatctttctggaatgcctgccaaaagacgcaagcttagatctgacattcagaaacggctccaggaggaccccaattattcaccgcagaggtttcccaatgcacagagggcattcgcagatgacccttag

SEQ ID NO: 78175 - DNA, 2712 bp, Artificial Sequence
  derived and/or modified sequence
atggagccaaacgattctaccagtactgctgttgaagaaccggatagccttgaagtgctggtcaagacactggatagtcagacgcggacctttatcgtgggagcccagatgaatgtcaaggagttcaaggagcatatcgccgcttcggttagtatacccagcgaaaagcaaagacttatttaccagggaagggtgctgcaggatgataagaaattacaggaatacaacgtaggtgggaaagtgatacatctagtggaacgggctccaccgcaaactcacctccccagcggcgcttcttcgggaaccggttctgcctccgccacccacggaggagggtccccacctggtacccgcggtcccggtgccagcgtgcatgacagaaacgccaattcctatgttatggtcggcaccttcaacctgccaagcgatggttcggccgtggatgttcacattaatatggaacaggcaccgatccagtccgaacctcgtgtgcgactagtcatggctcagcacatgatccgcgacatccagacactgctgtccaggatggagtgcagaggagggccacagcctcagcattcccagcccccaccccagcctcccgctgtgactcctgaacctgttgctctgtcctcacaaactagtgagcctgtcgagagcgaggctccaccccgtgagccaatggaggctgaagaggtagaggagagggcaccagctcaaaaccctgaactgactcctggtcctgcccctgccggacctacacctgcccctgagactaacgcgccaaatcatccgagccctgccgaatatgtggaagtgctccaagagctgcagagattggaaagtagattacaaccatttctgcagcggtattatgaggtcctgggcgctgccgcaacaacggactacaataataatcacgaaggcagagaggaggaccaacgcctgatcaatctggtgggagaatcgttacgtctgttgggaaatacctttgttgcccttagcgacctacggtgtaacctggcatgtacaccaccacggcatctacatgttgttcggccaatgagtcactatacaacgcctatggtcctgcagcaggctgcaataccaatccagatcaacgttggaactaccgtcaccatgactggcaacggcactcgcccacccccaactccaaatgctgaggcgccaccccctggcccaggtcaggcttcttccgtggctccctcgagtactaacgtggaatctagtgccgaaggagcccctcctccgggacctgcgccaccacctgctacttcacaccccagagttattcgcatttcgcaccagtcggtggaaccagtggtgatgatgcatatgaacattcaggactccggcacacagccaggcggagtcccctcagctcctactggacccctgggcccacctggtcatggccaaaccctgggacagcaggtccctggattcccgaccgcacctacccgtgtcgttatcgcgcgtcccaccccaccccaagcaagaccatcccaccccggtggtccaccagtaagtggcacgcttggcgctgggctggggaccaatgcctccctcgcccagatggtaagtggcctggtaggccagcttttgatgcagccagtcctggtcgcacagggaaccccgggatcacccggaggcctgggcctggaatctctgtccccggagttcttcacatcagtggttcaaggagtattgtcttcattgcttggcagtctgggtgccagagctggatcaagtgagagtatcgccgcttttatacaacgactgtctggcagctccaacatctttgaacccggtgcggacggtgctctgggatttttcggggctctgctgtccctgctctgtcagaattttagcatggtggacgtggtaatgctactacacgggcactttcaacccctgcaacggcttcagccacagttgcggtcattttttcatcagcactatctaggtgggcaggagccgactccctccaacattcgaatggcaactcacacgctgatcaccgggctggaagagtatgtcagagaaagctttagcttggtgcaggtgcaaccgggagtagacataattcgaacgaacctggaatttctgcaggagcagtttaacagcattgccgcacatgtgctgcactgtacagatagtggcttcggagccaggttgcttgaactgtgtaatcaggggttatttgaatgtctagcgctcaacctgcattgcctgggcggtcagcagatggaattagcagccgtgattaatggtagaattaggcgcatgtcacgcggagtaaatcctagtttagtgagctggctgactacgatgatgggacttaggctgcaggttgtcctggaacatatgccagtgggacctgacgccatcctgcgttacgttcgccgagtcggagatcctccgcagcccttgcccgaggagcctatggaagtgcagggcgcagagagggcgagcccagaaccccaagaatgggtacccataatacaacaggatatccaatctcaacgtaaagttaagccccagccccctctgtccgacgcctatctctccgggatgcctgccaagcggagaaagcttcgtagcgatatccagaagcgacttcaggaagaccccaactactctccacagcggtttccaaacgcccagagggcatttgccgacgatccttag

SEQ ID NO: 78176 - DNA, 2712 bp, Artificial Sequence
  derived and/or modified sequence
atggagcccaacgattccacctcgactgccgtagaagagcccgactccctggaggtattggtgaaaactttggactcccaaacgcgcacatttattgtaggggctcagatgaatgtcaaggagttcaaggaacatatagcagcatcagtctccatcccatccgaaaagcagaggcttatctaccaggggagggtgctgcaggatgataaaaaactgcaggagtataatgtgggtggcaaggtgattcatctggtggagcgagccccaccgcagacgcatttgcctagcggcgctagctctggcacaggatctgcttctgccactcatggcggaggttctccaccaggcacccgcggacccggagcctcagttcacgaccgcaacgctaattcttatgtgatggtgggaacatttaaccttcccagcgatggttccgcagtagacgttcacattaatatggagcaagccccaattcagtctgaacctagagtcagactggttatggcacagcacatgatccgtgacattcagactctgctgagccgaatggagtgccgcggaggccctcagccacaacattcccaacctccacctcagcctcctgctgtaacacctgaaccagtcgccctgagttcgcaaacatccgagccagtggagtcagaggctcctccaagagagcccatggaggctgaggaggtagaggagcgggcacccgcacagaatcctgaactcacccccggtccagcccctgctggtcctacccccgctccagagactaatgcacccaaccatcccagcccagctgagtacgtcgaggtacttcaggagctgcaacggctcgaatctcgcctgcagccctttcttcaaaggtactatgaggtcttgggcgcagccgctaccacagattataacaataaccacgaagggagagaggaggatcaacggcttatcaacctagtgggggagtcgctgcgcctccttgggaatacttttgtggccctctccgacctcagatgcaacttggcctgtacaccaccgaggcatttacacgtggttcggcctatgagtcattatactacacccatggtgttgcaacaggctgcaatccccatccaaattaacgtggggaccacagtgacaatgactggcaacggaactcgcccaccccctactccgaatgccgaggcccctccccctgggcctggacaagcaagctccgttgcgccatcaagcacaaacgtggagagctctgccgagggcgctccaccacctggcccagcaccaccaccagccaccagccaccccagagttatccggatttcacaccaaagtgttgaacccgtggtcatgatgcacatgaatattcaagatagtggcacccagcccggaggggtcccctctgcacccacaggcccactagggccacccggtcatggtcagactctcggtcagcaggtccccggattccctaccgctcctacaagagttgtgatcgcgagaccaactccaccccaagcacgaccttcccatcctggtgggccaccggtttccggaaccttgggtgctggcctcggcactaacgcttccctcgcacagatggtgagtgggcttgtcgggcaactgttgatgcagcccgttctagtagcccaggggaccccaggatccccaggaggcctgggccttgagtcactttccccagagttttttactagcgttgtgcagggcgtgttgtcaagcctgcttggatctctcggggctagggccggttccagtgaatccatcgccgctttcatccagaggttgtctggctcgagcaatatatttgagccaggggctgacggagccctgggtttttttggagcactgctgtcgctcctgtgccaaaatttttctatggtagatgtcgtgatgctgctgcatggacacttccagccattgcagcgcctgcagcctcagttgcgttctttttttcaccagcattatctaggcggtcaggagccaaccccatccaatattcgcatggcaacccacaccctcattaccgggctcgaagagtatgttagagagtcttttagtctggtccaagtgcagccaggggtggatatcatcagaaccaatctcgagttcctccaagaacagtttaatagtatcgccgctcacgtgctgcattgcacagacagcggttttggagcacggctgttggagctgtgcaaccagggactcttcgagtgcctggcattgaacttgcactgtctaggcggacagcaaatggaattagccgctgttattaacgggagaatcaggcgcatgagcaggggcgtgaatccatccctggtttcgtggctgacaacaatgatggggttgcggctgcaagtcgtccttgagcatatgcctgtagggccagatgccatactccgatacgtgaggcgagtaggtgacccgcctcaacccctgcctgaggagccaatggaagtacagggcgctgagcgcgctagccccgagccccaggagtgggtaccaatcatccaacaagacatacagagtcagcggaaggtaaaaccccagcctcctctctctgacgcctacctctccgggatgcccgctaagcggagaaaactgcgaagcgatatccagaaacgccttcaagaggatccaaactatagtcctcaaagattcccaaacgcccagagggccttcgcggatgacccttag

SEQ ID NO: 78177 - DNA, 2712 bp, Artificial Sequence
  derived and/or modified sequence
atggaacctaatgattctaccagcacagcagtcgaggagcccgactccctggaagtgctcgtgaagacccttgacagccaaacacgaacatttatcgtaggcgctcagatgaacgttaaggagttcaaagaacacattgctgccagcgtctcaatccccagtgagaaacagaggctcatttatcaaggaagagtgttgcaggatgataagaagctgcaggagtacaatgtcggcggaaaagtgatccacctagtggagcgggctcccccacagacccatctcccgagcggagcctcttccggtactgggtcagcaagtgcgactcatggcggaggcagcccgccaggcactaggggccctggggcatccgtccatgaccgcaacgccaattcttatgtgatggttggcaccttcaatcttcccagcgacggctccgcagtggatgtgcacataaacatggagcaggccccaatacagagcgagcccagggtccggctagtgatggcgcagcacatgatccgggacatccagaccctcctgtccagaatggagtgccggggaggccctcaacctcagcattcccagccccctccacagccacccgctgtgacacctgagcccgtggccctgagttcccagacttcagagcccgtagagagcgaggccccacctcgcgagcctatggaagccgaggaagtcgaagaaagagctcccgctcaaaaccctgaattgacaccgggaccagcacccgctgggccaactccggctcccgaaacaaatgccccaaaccacccatctccggcagaatacgtagaagtgcttcaggaactacagcggcttgaaagtaggcttcagcccttcttacagcggtactacgaggtgctaggagccgcagcaacaaccgattataataacaaccacgaaggcagggaggaggaccaacgcctcatcaacctggtgggagagtccctgcgcctactggggaacacatttgtggccctctccgaccttcgatgtaatttagcctgtacaccgccacgacatctgcacgtcgtgcgcccaatgagccactacactacgcctatggtgctgcagcaagccgcaatccctatccaaattaatgtcgggacaaccgtgaccatgaccgggaacgggacccgtcctcctcccacccctaacgctgaagcccctccaccaggtcctggccaggcttcctccgtggcgccaagtagcactaacgtggaatcctccgcagaaggagcccctcctcccggtccggctccccctccagcgacctcacacccccgagttatccgaataagccaccaatccgtggagcccgtggtgatgatgcacatgaatattcaggacagcggtacccaacctgggggagtgcccagcgccccaaccggccctctaggccctccaggccatggccagaccctgggccagcaggttcctggatttcccactgctcctaccagagtcgtgatcgcgcgaccaacaccccctcaggcccgtcctagtcacccgggtggaccccctgtgtcaggaactttgggagccggtcttggcactaatgcgtcactggcccaaatggtgagcggtcttgttggccaattgcttatgcagccagtgcttgtggctcaagggacaccagggtcgcccggaggactgggcctggagtcactgagccctgagttttttacatcagtggtgcaaggagtcctttcttctctgttgggctctctgggcgcacgcgctgggagcagtgagagcattgctgcatttatccagcgactatccggctcttcaaacatcttcgaacccggtgccgacggggcactgggatttttcggcgctttactatcgcttctgtgccagaactttagtatggtagacgtagtcatgctgctacacggtcacttccaacctctgcaacggttgcagccccagctgcggtccttttttcaccagcattacctcggaggacaggagccgaccccctcaaacatcaggatggccactcataccctgattacaggtctcgaagagtacgtcagggagagctttagccttgtccaggtacagccaggcgtggatataatcaggaccaacttagagtttctgcaggagcagttcaatagtattgctgctcacgtcttacactgcaccgacagtggatttggggcacgactgctcgagctctgcaaccagggactgttcgagtgtctggccctgaacctgcactgtttaggaggtcagcaaatggaattggccgcagtaatcaacggaaggattcgacgcatgagcagaggcgtgaatccctctctggtgagctggttaacaacaatgatggggctaaggcttcaggtcgttctagagcatatgccagtaggcccagatgctatcctgaggtatgttcgcagagttggggaccctccacagcccctcccagaggagcctatggaagtccagggagctgagcgcgcttctcctgaaccccaggagtgggtgcctatcattcagcaggacatccagagccagaggaaagtcaagcctcaacctccactttccgacgcttacctgtccggcatgccagccaaacgaagaaagctgcgcagtgacatccaaaaacggttgcaagaggatcccaattacagcccgcaacgcttccctaatgctcagcgcgcatttgccgatgacccatag

SEQ ID NO: 78178 - DNA, 2712 bp, Artificial Sequence
  derived and/or modified sequence
atggaacccaatgactctacctcaaccgcagtagaggagccagactcactcgaagtgctagtcaagaccctcgatagtcagacacgaaccttcatcgtgggcgctcagatgaatgtgaaggagtttaaagaacacatcgctgcaagcgtaagcattccatctgaaaagcagcgtcttatctaccaaggcagggtgctgcaggatgacaaaaagctgcaggagtataacgtaggaggaaaggttatccatctcgtcgaaagagccccaccacagacacacctgccctctggcgcaagcagtggtactgggtcagcctccgccactcatgggggagggtccccaccgggaaccagaggacctggtgccagtgtccacgatcgcaatgcaaatagctacgttatggtggggaccttcaacctgccatcagacggatccgccgtcgatgtccacatcaacatggagcaggccccaattcagagtgagccccgagtgaggctcgtaatggcccagcatatgatccgggacatacagacgctgttgtcacgtatggagtgtcggggtggccctcagcctcagcactcccagccaccaccacagcctccagcagtgacacccgagcccgtggccttgagttctcagacttccgaaccagtcgaatcagaagcacctccgcgtgagcccatggaggcagaagaagtggaggaacgtgcgccagcccagaaccccgaactgacgccgggtccagcaccagccggaccgaccccggcaccagaaacgaacgccccaaaccacccgtctcctgcagaatatgtagaggtgttgcaggaactgcagcgtttggagagtcggctgcagccctttttgcaacgctattacgaggtgctgggagctgctgctacaactgactataataataaccatgaaggcagggaagaagatcagcgcctgataaatctggtcggtgaatccctgaggctgctgggcaataccttcgtggctctttccgacctaagatgtaacctcgcatgtacccctccaaggcatctccacgttgtgcggcctatgagccattacactactccaatggtgctgcagcaagctgcgatccctatccagattaacgtgggcacaactgttaccatgactggaaacgggacgcgccctccccctacgccaaacgccgaagcgccaccgcctggcccaggccaagcctcatcggtcgctccaagtagcaccaacgttgagtcatcggccgagggcgcaccacctcccggaccagctccacctcccgctacatcccatccaagagtcatccgcataagccaccaatcagttgaaccggttgtcatgatgcacatgaatatacaagatagcggtacccagcccggaggcgtgccttcagctccaactggccctcttggacccccaggtcatggacagactctgggacagcaagtgccaggctttccgactgcccctactcgggttgttatcgcaagacctactcccccacaggccagaccctcacacccaggaggcccaccagtttcaggcacccttggagccggattagggacgaacgcgtccctggcccagatggtgtccgggcttgtggggcagctcctgatgcagcctgtgcttgtggctcagggcacaccaggttcccccggtggactggggctggagtccctgagccccgaatttttcacctctgtggtccagggggttcttagcagtctgttgggctctctgggggctagagccggtagttctgaatcaattgcagctttcatccagcgtctgtctggatcaagcaacatctttgagccaggtgcagacggagccctggggttcttcggagcactgctctctcttctatgccagaatttttccatggtcgatgtggtcatgctcctgcacgggcacttccagcctctgcagcggctccaaccacaattacgtagctttttccaccaacattaccttggtggccaggaacctaccccctctaacattagaatggccacacataccctcattacaggcctagaggagtacgtgagggagagcttcagtcttgtacaagtccaaccaggcgttgacattatccggacgaacctcgaattcctgcaggaacagttcaacagcatcgccgcacatgtcctgcattgcaccgactctgggtttggagcgagactgctggagttgtgcaaccaggggctgttcgagtgtttggccctgaacttgcactgcctgggcggacagcagatggaactggccgcagtaattaatggtcggatccggcgtatgtcaaggggcgtaaaccccagtctggtgtcctggctgaccacgatgatgggcttaagactccaggtggtgttagagcacatgccggtggggcctgatgcaattctgcggtacgttcgccgagtgggagatccccctcagcctctgccagaggaaccaatggaagtgcaaggcgcagaacgggcttcacctgagcctcaggagtgggtccctatcatccaacaggatattcagagccagaggaaggttaaaccgcagccccctctgagtgacgcctacctatccggcatgccggcaaagcgccgtaagttgagatctgatatccagaagcggcttcaggaagaccccaattattcgccgcagaggttccctaatgctcagcgagccttcgctgacgatccatag

SEQ ID NO: 78179 - DNA, 2712 bp, Artificial Sequence
  derived and/or modified sequence
atggaacctaacgactccacatctacagcagttgaagagccagactctttggaagtgttagtcaaaacccttgacagtcagactcggacatttattgtgggagcccagatgaacgtgaaggaattcaaggaacacattgccgcatccgtcagcatccctagtgagaagcagagactcatataccaggggagggtgttgcaggacgataagaaactgcaggagtacaatgttggcggaaaggtgatacacttagttgaacgagcccctcctcagacacatttgccgagtggtgcttctagcgggactgggtctgccagcgctacacatggagggggatcacccccagggacacgcggtccgggagcatccgtccatgatcgtaacgccaattcctacgtgatggtcggcaccttcaaccttccctcagacggcagcgcggttgacgttcatatcaatatggaacaggcacctatacagagcgagccacgggttcgcctcgttatggcacagcacatgattcgcgacatccagacactactgtcccgcatggaatgtcgaggcggtccacagccccagcattcccagcctccgccacaaccaccggcagttacccccgaaccagtggcattaagttctcaaacatctgaacccgtggaaagcgaagctccacctcgggagccgatggaagccgaggaggttgaagagcgtgccccagctcaaaaccctgagttaacgcccggacctgcaccagcaggcccaactccagctccagaaacaaacgcacctaaccatccctcaccagcagaatacgtggaggtgctgcaggaactgcaaagattggaatcccgattacaaccattcttacagcgctactacgaagtgctcggcgcagccgcaacgacagactacaataataaccatgaggggagggaggaggatcaaagattgattaaccttgtgggggaatccctgagactgttaggcaacacctttgtagccctttctgatctgcggtgtaatctcgcctgcaccccaccgaggcacctgcacgttgtgaggccaatgtctcactataccacacccatggtgctgcaacaggccgctatccccattcagatcaacgtgggcactaccgtgacgatgaccgggaacggcaccagacccccacccactcccaacgctgaggccccacctccaggcccaggacaagcctcctctgtggcacctagctccacgaatgtcgaatcatctgcagagggagccccaccacctgggccagctcctcccccagccaccagccacccaagggtgatcaggatctctcatcaatctgttgaacctgtggtcatgatgcatatgaacatccaggacagcgggacacagcctggtggagtgccttccgcgcctacagggcctcttggaccgcctggccatggccagacacttgggcagcaggtccctggcttccctactgccccaacgcgggtcgtcatcgctagaccaaccccgccacaggctagacctagtcatcccggaggcccaccggtgtctgggacattgggagcaggcctgggcactaatgccagcctggcccaaatggtttcaggtttggtgggccagctgctcatgcagcctgttctagtcgcccaagggacaccagggagccctggcggtctgggactggagagcctgtcaccagaattctttacatctgtagtgcaaggtgtgctgtctagcctgttaggctctctgggtgcacgcgctgggagctccgagtctattgcagcatttatacagcggctgtcaggttctagcaacatctttgaaccaggggctgacggtgccctggggttttttggagcgttactctcactcctctgccagaacttcagcatggtggatgtcgtgatgctgctccatggccattttcagcccctgcaaaggctgcagccgcagttaagatcttttttccaccagcattatctcggaggtcaagagccaactcctagcaacatcaggatggctacccacaccctgattacaggactagaagaatacgtcagagagtccttttccttggtgcaggtgcagcccggagtggacattattaggacaaatctggagttccttcaggagcaattcaactcaattgctgcccacgtgttacattgtactgacagcggctttggggctcggctgctcgagctctgcaatcaggggttgttcgaatgcctcgccctgaatctccactgcctcggcggtcaacaaatggaacttgcagctgttataaacggcaggatcaggaggatgtcccgcggagtgaatccgagtctagtgagttggctcactactatgatggggcttcggctgcaggtggttctcgaacacatgccagtgggacctgacgccatactgaggtacgtgagaagggttggggacccacctcaacccttgcctgaggaacctatggaagttcagggagccgagagagcatcccccgaaccacaggagtgggtgccaataattcagcaggacatccaatcccagcggaaggtcaagcctcagcctcctttgagcgacgcttacctgtccggcatgccagctaaacgaagaaagctacggagcgacatccagaaaaggctgcaggaggacccgaactacagcccccagaggttccccaatgcacaacgagcttttgcggacgacccctag

SEQ ID NO: 78180 - DNA, 2712 bp, Artificial Sequence
  derived and/or modified sequence
atggaaccaaacgacagtactagtacggctgtcgaggagcctgatagtcttgaagtgctagttaagaccctggactctcagacgcgcacctttatagtaggggctcagatgaacgtgaaagagtttaaagagcacatcgctgctagcgttagtattccgtcagaaaagcagaggctgatttatcagggccgagttctacaggatgacaaaaagctccaggagtacaacgtgggcggaaaggtcatccaccttgtggagagggctccgcctcagactcatttacctagcggggcttcttctggtacagggagcgcctctgccacccacggcggaggcagcccacctggtacccgaggacccggagcatcagtccatgaccggaatgcaaatagttatgttatggtagggacttttaacctccctagcgatggcagcgcggttgacgtgcacatcaacatggaacaggctccaatccagagtgagccaagggtgagactggtgatggcccaacacatgatccgtgacattcagactcttctgagtaggatggaatgtagggggggtccgcagcctcaacattcccaaccacctcctcagccgcctgctgtgacacctgagcccgtggccttaagttctcagacgagcgagccggttgagtcagaggctccacctagggagcctatggaggccgaggaagtcgaagaacgggcacccgctcaaaaccctgagcttactccagggcctgcccctgccggtcctaccccggcaccggaaaccaatgcgcctaaccacccctcccccgctgagtatgttgaggttctgcaggagctgcagcgtttggagagccgcctacagccttttttgcagcggtactacgaagttctgggcgcagccgcaaccactgattataacaataaccatgaaggaagggaggaagatcagcgactcattaatttggtgggggaaagcctccgactacttggaaataccttcgtggccctgtcagacttgcgctgcaatctcgcctgtacacctccaagacacctgcacgtggttaggcctatgtctcactacactacacccatggtcctgcagcaggcagccatccctatccagatcaatgttggcactaccgtgaccatgacagggaacggaactagacctccacccacccccaacgcagaggcccctcctcccggtccaggtcaggccagcagcgtcgcacccagctctacaaatgttgaatccagcgctgagggggcaccaccacccggtcccgcacctccacctgcaacttctcaccccagagtgatcagaatctctcaccagtctgtggagccggtagtcatgatgcatatgaatatccaggatagcggaacacaaccgggaggggtcccctcagcgcctacgggacctctgggacccccaggtcacggacaaacactgggccagcaggtacctggattccctactgctcccacgagggtcgttatcgcccgtcctacaccaccccaggctcggccatcacaccctggaggcccaccggtctcaggtactttaggtgctggactggggaccaatgcgtccttagcgcagatggtttcagggctggtgggccaactacttatgcaaccagtcctggtcgcccagggtactcccggtagccccggaggcctcgggttggagagtctctcccctgagttttttacatcagttgttcagggcgtcttgagctccttgttgggctccctcggagcaagagccggaagctccgaatccattgccgcttttatccagcgcctgagtgggagctcgaacatctttgagccaggagcggacggtgctctcggtttctttggggcactgctctccctgctttgtcagaactttagcatggttgatgtagtaatgctgttgcacggccactttcagccgttacagcggttgcagcctcagctgcgaagtttcttccaccagcattaccttggaggccaggagcccacgcctagcaatatcaggatggccactcataccctcatcacaggacttgaggagtatgtgcgcgagagcttttctctggtgcaagtgcagccgggtgtagacataattagaaccaaccttgaattcctgcaggaacaattcaacagtattgctgcgcatgtgctgcactgcaccgactccggcttcggggcacgattgctggagttatgcaatcagggcctatttgaatgtctggcactcaaccttcattgcctaggtgggcagcagatggagctggctgccgttattaatgggaggattaggcggatgtccagaggcgtgaatccctcgctggtgagttggttaacaactatgatgggactccgtctgcaggtcgttttagaacacatgcccgtcggcccagatgcaatactgagatatgtgcgcagagtcggggacccccctcagcctctgcccgaggagcctatggaagtgcagggcgcagaaagggctagtccagaaccccaggaatgggtgccgatcatacagcaggacattcaaagtcaacggaaggtgaagccccaaccgccattatcagatgcttacctgtcgggcatgcccgcaaagcggagaaagctgagaagtgacatccagaagaggctgcaggaggaccccaattatagccctcaacggttccctaacgcgcagagagcatttgcagacgacccctag

SEQ ID NO: 78181 - DNA, 1051 bp, Artificial Sequence
  derived and/or modified sequence
agtgtggggcgaccaccgctttcgcgttgtcccaggattttccgacctctggggcgcttgtcctgccgtgaccggtgatgacactagtctctggtctcgtgcttccttcctaatctgactggctccctgcttattgtgattggcgtcgtggagcccctcccacctctcgtcctccagctccctaagccgtcgatctcctgccctttgtgtttctctccctgtgccccggaatcagaagggggatggggacagagacctgtcggccatggagcctaatgatagtaccagtaccgctgtggaggagcctgacagcttggaggtgttggtgaagaccttggactctcaaactcgtacctttattgtgggggcccagatgaatgtaaaagagtttaaggagcacattgctgcctctgtcagcatcccatctgaaaaacaacggctcatttaccagggacgagttctgcaagatgataagaagcttcaggaatacaatgttgggggaaaggttatccacctggtggaacgggctcctcctcagactcacctcccttctggggcatcttctgggacggggtctgcctcagccactcatggtgggggatccccccctggtactcgggggcctggggcctctgttcatgaccggaatgccaacagctatgtcatggttggaaccttcaatcttcctagtgacggctctgctgtggatgttcacatcaacatggaacaggccccgattcagagtgagccccgggtacggctggtgatggctcagcacatgatcagggatatacagaccttactatcccggatggagtgtcgaggagggccccaaccgcagcacagtcagccgcccccgcagccaccggctgtgaccccggagccagtagccttgagctctcaaacatcagaaccagttgaaagtgaagcacctccccgggagcccatggaggcagaagaagtggaggagcgtgccccagcccagaacccggagctcactcctggcccagccccagcgggcccaacacctgccccggaaacaaatgcaccc

SEQ ID NO: 78182 - DNA, 880 bp, Artificial Sequence
  derived and/or modified sequence
cgcagagtgtggggcgaccaccgctttcgcgttgtcccaggattttccgacctctggggcgcttgtcctgccgtgaccgagacctgtcggccatggagcctaatgatagtaccagtaccgctgtggaggagcctgacagcttggaggtgttggtgaagaccttggactctcaaactcgtacctttattgtgggggcccagatgaatgtaaaagagtttaaggagcacattgctgcctctgtcagcatcccatctgaaaaacaacggctcatttaccagggacgagttctgcaagatgataagaagcttcaggaatacaatgttgggggaaaggttatccacctggtggaacgggctcctcctcagactcacctcccttctggggcatcttctgggacggggtctgcctcagccactcatggtgggggatccccccctggtactcgggggcctggggcctctgttcatgaccggaatgccaacagctatgtcatggttggaaccttcaatcttcctagtgacggctctgctgtggatgttcacatcaacatggaacaggccccgattcagagtgagccccgggtacggctggtgatggctcagcacatgatcagggatatacagaccttactatcccggatggagtgtcgaggagggccccaaccgcagcacagtcagccgcccccgcagccaccggctgtgaccccggagccagtagccttgagctctcaaacatcagaaccagttgaaagtgaagcacctccccgggagcccatggaggcagaagaagtggaggagcgtgccccagcccagaacccggagctcactcctggcccagccccagcgggcccaacacctgccccggaaacaaatgcacccaa

SEQ ID NO: 78183 - DNA, 410 bp, Artificial Sequence
  derived and/or modified sequence
gtcgtatgtctcgtggggtgaatccctccttggtgagctggctgaccactatgatgggactgaggcttcaggtggtactggagcacatgcctgtaggccctgatgccattctcagatacgttcgcagggttggtgatcccccccagccacttcctgaggagccaatggaagttcagggagcagaaagagcttcccctgagcctcaggaatgggtccctattatccagcaggacattcagagccagcggaaggtgaaaccgcagccccctctgagtgatgcctacctcagtggtatgcctgccaagagacgcaagctccggtctgatatacaaaaacgactgcaggaagaccccaactacagtccccagcgcttccccaatgcccagcgggcctttgctgatgatccttag

SEQ ID NO: 78184 - DNA, 807 bp, Artificial Sequence
  derived and/or modified sequence
cagctccctaagccgtcgatctcctgccctttgtgtttctctccctgtgccccggaatcagaagggggatggggacaggtgtgaatgtgtgtgtgtgcaggagaaactttttaggtattggggcagggattaatgctagggagtctttcgggtacactctggtctgggcaacagcgggccttccttccttcgttcttctttagagacctgtcggccatggagcctaatgatagtaccagtaccgctgtggaggagcctgacagcttggaggtgttggtgaagaccttggactctcaaactcgtacctttattgtgggggcccagatgaatgtaaaagagtttaaggagcacattgctgcctctgtcagcatcccatctgaaaaacaacggctcatttaccagggacgagttctgcaagatgataagaagcttcaggaatacaatgttgggggaaaggttatccacctggtggaacgggctcctcctcagactcacctcccttctggggcatcttctgggacggggtctgcctcagccactcatggtgggggatccccccctggtactcgggggcctggggcctctgttcatgaccggaatgccaacagctatgtcatggttggaaccttcaatcttcctagtgacggctctgctgtggatgttcacatcaacatggaacaggccccgattcagagtgagccccgggtacggctggtgatggctcagcacatgatcagggatatacagaccttactatcccggatggagtgtcgaggagggccccaaccgcagcacagtcagccgccc

SEQ ID NO: 78185 - DNA, 544 bp, Artificial Sequence
  derived and/or modified sequence
tttccgacctctggggcgcttgtcctgccgtgaccggtgatgacactagtctctgagacctgtcggccatggagcctaatgatagtaccagtaccgctgtggaggagcctgacagcttggaggtgttggtgaagaccttggactctcaaactcgtacctttattgtgggggcccagatgaatgtaaaagagtttaaggagcacattgctgcctctgtcagcatcccatctgaaaaacaacggctcatttaccagggacgagttctgcaagatgataagaagcttcaggaatacaatgttgggggaaaggttatccacctggtggaacgggctcctcctcagactcacctcccttctggggcatcttctgggacggggtctgcctcagccactcatggtgggggatccccccctggtactcgggggcctggggcctctgttcatgaccggaatgccaacagctatgtcatggttggaaccttcaatcttcctagtgacggctctgctgtggatgttcacatcaacatggaacaggccccgattca

SEQ ID NO: 78186 - DNA, 1056 bp, Artificial Sequence
  derived and/or modified sequence
tgcgacgcacgcaggcgtagtacggtcccccgggcgacagcggtggcggctcctcggggtgctcggctccctcccacctaggccggccccggcccgactcgccctcagaaactcactgtttggggctgcggactttctcgtcgtgccccacaaaagtaaagcttggggacctggggggagccggaagtatcgcttcgagatccccaaatactatcggggaaacggaagtggccgtcggtggcaggtttgggggagaccggaagtgacgagacctgtcggccatggagcctaatgatagtaccagtaccgctgtggaggagcctgacagcttggaggtgttggtgaagaccttggactctcaaactcgtacctttattgtgggggcccagatgaatgtaaaagagtttaaggagcacattgctgcctctgtcagcatcccatctgaaaaacaacggctcatttaccagggacgagttctgcaagatgataagaagcttcaggaatacaatgttgggggaaaggttatccacctggtggaacgggctcctcctcagactcacctcccttctggggcatcttctgggacggggtctgcctcagccactcatggtgggggatccccccctggtactcgggggcctggggcctctgttcatgaccggaatgccaacagctatgtcatggttggaaccttcaatcttcctagtgacggctctgctgtggatgttcacatcaacatggaacaggccccgattcagagtgagccccgggtacggctggtgatggctcagcacatgatcagggatatacagaccttactatcccggatggagtgtcgaggagggccccaaccgcagcacagtcagccgcccccgcagccaccggctgtgaccccggagccagtagccttgagctctcaaacatcagaaccagttgaaagtgaagcacctccccgggagcccatggaggcagaagaagtggaggagcgtgccccagcccagaacccggagctcactcctggcccagccccagcgggcccaacacctgccccggaaa

SEQ ID NO: 78187 - DNA, 513 bp, Artificial Sequence
  derived and/or modified sequence
gtcgtatgtctcgtggggtgaatccctccttggtgagctggctgaccactatgatgggactgaggcttcaggtggtactggagcacatgcctgtaggccctgatgccattctcagatacgttcgcagggttggtgatcccccccagccacttcctgaggagccaatggaagttcagggagcagaaagagcttcccctgagcctcaggaatgggtccctattatccagcaggacattcagagccagcggaaggtgaaaccgcagccccctctgagtgatgcctacctcagtggtatgcctgccaagagacgcaagctccggtctgatatacaaaaacgactgcaggaagaccccaactacagtccccagcgcttccccaatgcccagcgggcctttgctgatgatccttagctctttgctctatggcccttcctcatcaggggaccgtttcccccctcttccttcacagtatttaagaaataaaagtcggatttttctggctgctttctctcta

SEQ ID NO: 78188 - DNA, 807 bp, Artificial Sequence
  derived and/or modified sequence
cagctccctaagccgtcgatctcctgccctttgtgtttctctccctgtgccccggaatcagaagggggatggggacaggtgtgaatgtgtgtgtgtgcaggagaaactttttaggtattggggcagggattaatgctagggagtctttcgggtacactctggtctgggcaacagcgggccctccttccttcgttcttctttagagacctgtcggccatggagcctaatgatagtaccagtaccgctgtggaggagcctgacagcttggaggtgttggtgaagaccttggactctcaaactcgtacctttattgtgggggcccagatgaatgtaaaagagtttaaggagcacattgctgcctctgtcagcatcccatctgaaaaacaacggctcatttaccagggacgagttctgcaagatgataagaagcttcaggaatacaatgttgggggaaaggttatccacctggtggaacgggctcctcctcagactcacctcccttctggggcatcttctgggacggggtctgcctcagccactcatggtgggggatccccccctggtactcgggggcctggggcctctgttcatgaccggaatgccaacagctatgtcatggttggaaccttcaatcttcctagtgacggctctgctgtggatgttcacatcaacatggaacaggccccgattcagagtgagccccgggtacggctggtgatggctcagcacatgatcagggatatacagaccttactatcccggatggagtgtcgaggagggccccaaccgcagcacagtcagccgccc

SEQ ID NO: 78189 - DNA, 902 bp, Artificial Sequence
  derived and/or modified sequence
tccctaagccgtcgatctcctgccctttgtgtttctctccctgtgccccggaatcagaagggggatggggacaggtgtgaatgtgtgtgtgtgcaggagaaactttttagagacctgtcggccatggagcctaatgatagtaccagtaccgctgtggaggagcctgacagcttggaggtgttggtgaagaccttggactctcaaactcgtacctttattgtgggggcccagatgaatgtaaaagagtttaaggagcacattgctgcctctgtcagcatcccatctgaaaaacaacggctcatttaccagggacgagttctgcaagatgataagaagcttcaggaatacaatgttgggggaaaggttatccacctggtggaacgggctcctcctcagactcacctcccttctggggcatcttctgggacggggtctgcctcagccactcatggtgggggatccccccctggtactcgggggcctggggcctctgttcatgaccggaatgccaacagctatgtcatggttggaaccttcaatcttcctagtgacggctctgctgtggatgttcacatcaacatggaacaggccccgattcagagtgagccccgggtacggctggtgatggctcagcacatgatcagggatatacagaccttactatcccggatggagtgtcgaggagggccccaaccgcagcacagtcagccgcccccgcagccaccggctgtgaccccggagccagtagccttgagctctcaaacatcagaaccagttgaaagtgaagcacctccccgggagcccatggaggcagaagaagtggaggagcgtgccccagcccagaacccggagctcactcctggcccagccccagcgggcccaacacctgccccggaaacaaa

SEQ ID NO: 78190 - DNA, 807 bp, Artificial Sequence
  derived and/or modified sequence
cagctccctaagccgtcgatctcctgccctttgtgtttctctccctgtgccccggaatcagaagggggatggggacaggtgtgaatgtgtgtgtgtgcaggagatactttttaggtattggggcagggattaatgctagggagtctttcgggtacactctggtctgggcaacagcgggccttccttccttcgttcttctttagagacctgtcggccatggagcctaatgatagtaccagtaccgctgtggaggagcctgacagcttggaggtgttggtgaagaccttggactctcaaactcgtacctttattgtgggggcccagatgaatgtaaaagagtttaaggagcacattgctgcctctgtcagcatcccatctgaaaaacaacggctcatttaccagggacgagttctgcaagatgataagaagcttcaggaatacaatgttgggggaaaggttatccacctggtggaacgggctcctcctcagactcacctcccttctggggcatcttctgggacggggtctgcctcagccactcatggtgggggatccccccctggtactcgggggcctggggcctctgttcatgaccggaatgccaacagctatgtcatggttggaaccttcaatcttcctagtgacggctctgctgtggatgttcacatcaacatggaacaggccccgattcagagtgagccccgggtacggctggtgatggctcagcacatgatcagggatatacagaccttactatcccggatggagtgtcgaggagggccccaaccgcagcacagtcagccgccc

SEQ ID NO: 78191 - DNA, 3055 bp, Artificial Sequence
  derived and/or modified sequence
gtagtacggtcccccgggcgacagcggtggcggctcctcggggtgctcggctccctcccacctaggccggccccggcccgactcgccctcagaaactcactgtttggggctgcggactttctcgtcgtgccccacaaaagtaaagcttggggacctggggggagccggaagtatcgcttcgagatccccaaatactatcggggaaacggaagtggccgtcggtggcagagacctgtcggccatggagcctaatgatagtaccagtaccgctgtggaggagcctgacagcttggaggtgttggtgaagaccttggactctcaaactcgtacctttattgtgggggcccagatgaatgtaaaagagtttaaggagcacattgctgcctctgtcagcatcccatctgaaaaacaacggctcatttaccagggacgagttctgcaagatgataagaagcttcaggaatacaatgttgggggaaaggttatccacctggtggaacgggctcctcctcagactcacctcccttctggggcatcttctgggacggggtctgcctcagccactcatggtgggggatccccccctggtactcgggggcctggggcctctgttcatgaccggaatgccaacagctatgtcatggttggaaccttcaatcttcctagtgacggctctgctgtggatgttcacatcaacatggaacaggccccgattcagagtgagccccgggtacggctggtgatggctcagcacatgatcagggatatacagaccttactatcccggatggagtgtcgaggagggccccaaccgcagcacagtcagccgcccccgcagccaccggctgtgaccccggagccagtagccttgagctctcaaacatcagaaccagttgaaagtgaagcacctccccgggagcccatggaggcagaagaagtggaggagcgtgccccagcccagaacccggagctcactcctggcccagccccagcgggcccaacacctgccccggaaacaaatgcacccaaccatccttcccctgcggagtatgtcgaggtgctccaggagctacagcggctggagagtcgcctccagcccttcttgcagcgctactacgaggttctgggtgctgctgccaccacggactacaataacaatcacgagggccgggaggaggatcagcggttgatcaacttggtaggggagagcctgcgactgctgggcaacacctttgttgcactgtctgacctgcgctgcaatctggcctgcacgcccccacgacacctgcatgtggtccggcctatgtctcactacaccacccccatggtgctccagcaggcagccattcccatacagatcaatgtgggaaccactgtgaccatgacaggaaatgggactcggccccccccaactcccaatgcagaggcacctccccctggtcctgggcaggcctcatccgtggctccgtcttctaccaatgtcgagtcctcagctgagggggctcccccgccaggtccagctcccccgccagccaccagccacccgagggtcatccggatttcccaccagagtgtggaacccgtggtcatgatgcacatgaacattcaagattctggcacacagcctggtggtgttccgagtgctcccactggccccctgggaccccctggtcatggccaaaccctgggacagcaggtgccaggcttcccaacagctccaacccgggtggtgattgcccggcccactcctccacaggctcggccttcccatcctggagggcccccagtctctgggacactgggcgccggtctgggtaccaatgcctcgttggcccagatggtgagcggccttgtggggcagcttcttatgcagccagtccttgtggctcaggggaccccagggagtcctggaggcctgggtcttgagagcctgtcaccggagttttttacctcagtggtgcagggtgtgctcagctccctgctgggctccctgggggctcgggctggcagcagtgaaagtattgctgccttcatacaacgcctcagtggatccagcaacatctttgagcctggagctgatggggcccttggattctttggggccttgctttctcttctgtgccagaacttctctatggtggacgtagtgatgcttctccatgggcatttccagccactacaacggctccagccccagctgcgatccttcttccaccagcactacctgggtggtcaggagcccacacccagtaacatccggatggcaacccacacattgatcacggggctagaagagtatgtgcgggagagtttttccttggtgcaggttcagccaggtgtggacatcatccggacaaacctggaatttctccaagagcagtttaatagcattgctgcgcatgtgctgcattgcacagatagtggatttggggcccggttgctggagttgtgtaaccaaggcctgtttgaatgcctggccctaaacctgcactgcttggggggacagcagatggagcttgctgctgttatcaatggccgaattcgtcgtatgtctcgtggggtgaatccctccttggtgagctggctgaccactatgatgggactgaggcttcaggtggtactggagcacatgcctgtaggccctgatgccattctcagatacgttcgcagggttggtgatcccccccagccacttcctgaggagccaatggaagttcagggagcagaaagagcttcccctgagcctcaggaatgggtccctattatccagcaggacattcagagccagcggaaggtgaaaccgcagccccctctgagtgatgcctacctcagtggtatgcctgccaagagacgcaagctccggtctgatatacaaaaacgactgcaggaagaccccaactacagtccccagcgcttccccaatgcccagcgggcctttgctgatgatccttagctctttgctctatggcccttcctcatcaggggaccgtttcccccctcttccttcacagtatttaagaaataaaagtcggatttttctggctgctttctctct

SEQ ID NO: 78192 - DNA, 902 bp, Artificial Sequence
  derived and/or modified sequence
tccctaagccgtcgatctcctgccctttgtgtttctctccctgtgccccggaatcagaagggggatggggacaggtgtgaatgtgtgtgtgtgcaggagatactttttagagacctgtcggccatggagcctaatgatagtaccagtaccgctgtggaggagcctgacagcttggaggtgttggtgaagaccttggactctcaaactcgtacctttattgtgggggcccagatgaatgtaaaagagtttaaggagcacattgctgcctctgtcagcatcccatctgaaaaacaacggctcatttaccagggacgagttctgcaagatgataagaagcttcaggaatacaatgttgggggaaaggttatccacctggtggaacgggctcctcctcagactcacctcccttctggggcatcttctgggacggggtctgcctcagccactcatggtgggggatccccccctggtactcgggggcctggggcctctgttcatgaccggaatgccaacagctatgtcatggttggaaccttcaatcttcctagtgacggctctgctgtggatgttcacatcaacatggaacaggccccgattcagagtgagccccgggtacggctggtgatggctcagcacatgatcagggatatacagaccttactatcccggatggagtgtcgaggagggccccaaccgcagcacagtcagccgcccccgcagccaccggctgtgaccccggagccagtagccttgagctctcaaacatcagaaccagttgaaagtgaagcacctccccgggagcccatggaggcagaagaagtggaggagcgtgccccagcccagaacccggagctcactcctggcccagccccagcgggcccaacacctgccccggaaacaaa

SEQ ID NO: 78193 - DNA, 517 bp, Artificial Sequence
  derived and/or modified sequence
gtcgtatgtctcgtggggtgaatccctccttggtgagctggctgaccactatgatgggactgaggcttcaggtggtactggagcacatgcctgtaggccctgatgccattctcagatacgttcgcagggttggtgatcccccccagccacttcctgaggagccaatggaagttcagggagcagaaagagcttcccctgagcctcaggaatgggtccctattatccagcaggacattcagagccagcggaaggtgaaaccgcagccccctctgagtgatgcctacctcagtggtatgcctgccaagagacgcaagctccggtctgatatacaaaaacgactgcaggaagaccccaactacagtccccagcgcttccccaatgcccagcgggcctttgctgatgatccttagctctttctttgctctatggcccttcctcatcaggggaccgtttcccccctcttccttcacagtatttaagaaataaaagtcggatttttctggctgctttctctcta

SEQ ID NO: 78194 - DNA, 3059 bp, Artificial Sequence
  derived and/or modified sequence
gtagtacggtcccccgggcgacagcggtggcggctcctcggggtgctcggctccctcccacctaggccggccccggcccgactcgccctcagaaactcactgtttggggctgcggactttctcgtcgtgccccacaaaagtaaagcttggggacctggggggagccggaagtatcgcttcgagatccccaaatactatcggggaaacggaagtggccgtcggtggcagagacctgtcggccatggagcctaatgatagtaccagtaccgctgtggaggagcctgacagcttggaggtgttggtgaagaccttggactctcaaactcgtacctttattgtgggggcccagatgaatgtaaaagagtttaaggagcacattgctgcctctgtcagcatcccatctgaaaaacaacggctcatttaccagggacgagttctgcaagatgataagaagcttcaggaatacaatgttgggggaaaggttatccacctggtggaacgggctcctcctcagactcacctcccttctggggcatcttctgggacggggtctgcctcagccactcatggtgggggatccccccctggtactcgggggcctggggcctctgttcatgaccggaatgccaacagctatgtcatggttggaaccttcaatcttcctagtgacggctctgctgtggatgttcacatcaacatggaacaggccccgattcagagtgagccccgggtacggctggtgatggctcagcacatgatcagggatatacagaccttactatcccggatggagtgtcgaggagggccccaaccgcagcacagtcagccgcccccgcagccaccggctgtgaccccggagccagtagccttgagctctcaaacatcagaaccagttgaaagtgaagcacctccccgggagcccatggaggcagaagaagtggaggagcgtgccccagcccagaacccggagctcactcctggcccagccccagcgggcccaacacctgccccggaaacaaatgcacccaaccatccttcccctgcggagtatgtcgaggtgctccaggagctacagcggctggagagtcgcctccagcccttcttgcagcgctactacgaggttctgggtgctgctgccaccacggactacaataacaatcacgagggccgggaggaggatcagcggttgatcaacttggtaggggagagcctgcgactgctgggcaacacctttgttgcactgtctgacctgcgctgcaatctggcctgcacgcccccacgacacctgcatgtggtccggcctatgtctcactacaccacccccatggtgctccagcaggcagccattcccatacagatcaatgtgggaaccactgtgaccatgacaggaaatgggactcggccccccccaactcccaatgcagaggcacctccccctggtcctgggcaggcctcatccgtggctccgtcttctaccaatgtcgagtcctcagctgagggggctcccccgccaggtccagctcccccgccagccaccagccacccgagggtcatccggatttcccaccagagtgtggaacccgtggtcatgatgcacatgaacattcaagattctggcacacagcctggtggtgttccgagtgctcccactggccccctgggaccccctggtcatggccaaaccctgggacagcaggtgccaggcttcccaacagctccaacccgggtggtgattgcccggcccactcctccacaggctcggccttcccatcctggagggcccccagtctctgggacactgggcgccggtctgggtaccaatgcctcgttggcccagatggtgagcggccttgtggggcagcttcttatgcagccagtccttgtggctcaggggaccccagggagtcctggaggcctgggtcttgagagcctgtcaccggagttttttacctcagtggtgcagggtgtgctcagctccctgctgggctccctgggggctcgggctggcagcagtgaaagtattgctgccttcatacaacgcctcagtggatccagcaacatctttgagcctggagctgatggggcccttggattctttggggccttgctttctcttctgtgccagaacttctctatggtggacgtagtgatgcttctccatgggcatttccagccactacaacggctccagccccagctgcgatccttcttccaccagcactacctgggtggtcaggagcccacacccagtaacatccggatggcaacccacacattgatcacggggctagaagagtatgtgcgggagagtttttccttggtgcaggttcagccaggtgtggacatcatccggacaaacctggaatttctccaagagcagtttaatagcattgctgcgcatgtgctgcattgcacagatagtggatttggggcccggttgctggagttgtgtaaccaaggcctgtttgaatgcctggccctaaacctgcactgcttggggggacagcagatggagcttgctgctgttatcaatggccgaattcgtcgtatgtctcgtggggtgaatccctccttggtgagctggctgaccactatgatgggactgaggcttcaggtggtactggagcacatgcctgtaggccctgatgccattctcagatacgttcgcagggttggtgatcccccccagccacttcctgaggagccaatggaagttcagggagcagaaagagcttcccctgagcctcaggaatgggtccctattatccagcaggacattcagagccagcggaaggtgaaaccgcagccccctctgagtgatgcctacctcagtggtatgcctgccaagagacgcaagctccggtctgatatacaaaaacgactgcaggaagaccccaactacagtccccagcgcttccccaatgcccagcgggcctttgctgatgatccttagctctttctttgctctatggcccttcctcatcaggggaccgtttcccccctcttccttcacagtatttaagaaataaaagtcggatttttctggctgctttctctct

SEQ ID NO: 78195 - DNA, 789 bp, Artificial Sequence
  derived and/or modified sequence
atggagcccaacgacagcaccagcaccgccgtggaggagcccgacagcctggaggtgctggtgaagaccctggacagccagaccagaaccttcatcgtgggcgcccagatgaacgtgaaggagttcaaggagcacatcgccgccagcgtgagcatccccagcgagaagcagagactgatctaccagggcagagtgctgcaggacgacaagaagctgcaggagtacaacgtgggcggcaaggtgatccacctggtggagagagcccccccccagacccacctgcccagcggcgccagcagcggcaccggcagcgccagcgccacccacggcggcggcagcccccccggcaccagaggccccggcgccagcgtgcacgacagaaacgccaacagctacgtgatggtgggcaccttcaacctgcccagcgacggcagcgccgtggacgtgcacatcaacatggagcaggcccccatccagagcgagcccagagtgagactggtgatggcccagcacatgatcagagacatccagaccctgctgagcagaatggagtgcagaggcggcccccagccccagcacagccagccccccccccagccccccgccgtgacccccgagcccgtggccctgagcagccagaccagcgagcccgtggagagcgaggccccccccagagagcccatggaggccgaggaggtggaggagagagcccccgcccagaaccccgagctgacccccggccccgcccccgccggccccacccccgcccccgagaccaacgccccctag

SEQ ID NO: 78196 - DNA, 411 bp, Artificial Sequence
  derived and/or modified sequence
tgaagaatgagcagaggcgtgaaccccagcctggtgagctggctgaccaccatgatgggcctgagactgcaggtggtgctggagcacatgcccgtgggccccgacgccatcctgagatacgtgagaagagtgggcgaccccccccagcccctgcccgaggagcccatggaggtgcagggcgccgagagagccagccccgagccccaggagtgggtgcccatcatccagcaggacatccagagccagagaaaggtgaagccccagccccccctgagcgacgcctacctgagcggcatgcccgccaagagaagaaagctgagaagcgacatccagaagagactgcaggaggaccccaactacagcccccagagattccccaacgcccagagagccttcgccgacgacccctag

SEQ ID NO: 78197 - DNA, 594 bp, Artificial Sequence
  derived and/or modified sequence
atggagcccaacgacagcaccagcaccgccgtggaggagcccgacagcctggaggtgctggtgaagaccctggacagccagaccagaaccttcatcgtgggcgcccagatgaacgtgaaggagttcaaggagcacatcgccgccagcgtgagcatccccagcgagaagcagagactgatctaccagggcagagtgctgcaggacgacaagaagctgcaggagtacaacgtgggcggcaaggtgatccacctggtggagagagcccccccccagacccacctgcccagcggcgccagcagcggcaccggcagcgccagcgccacccacggcggcggcagcccccccggcaccagaggccccggcgccagcgtgcacgacagaaacgccaacagctacgtgatggtgggcaccttcaacctgcccagcgacggcagcgccgtggacgtgcacatcaacatggagcaggcccccatccagagcgagcccagagtgagactggtgatggcccagcacatgatcagagacatccagaccctgctgagcagaatggagtgcagaggcggcccccagccccagcacagccagcccccctag

SEQ ID NO: 78198 - DNA, 477 bp, Artificial Sequence
  derived and/or modified sequence
atggagcccaacgacagcaccagcaccgccgtggaggagcccgacagcctggaggtgctggtgaagaccctggacagccagaccagaaccttcatcgtgggcgcccagatgaacgtgaaggagttcaaggagcacatcgccgccagcgtgagcatccccagcgagaagcagagactgatctaccagggcagagtgctgcaggacgacaagaagctgcaggagtacaacgtgggcggcaaggtgatccacctggtggagagagcccccccccagacccacctgcccagcggcgccagcagcggcaccggcagcgccagcgccacccacggcggcggcagcccccccggcaccagaggccccggcgccagcgtgcacgacagaaacgccaacagctacgtgatggtgggcaccttcaacctgcccagcgacggcagcgccgtggacgtgcacatcaacatggagcaggcccccatctag

SEQ ID NO: 78199 - DNA, 777 bp, Artificial Sequence
  derived and/or modified sequence
atggagcccaacgacagcaccagcaccgccgtggaggagcccgacagcctggaggtgctggtgaagaccctggacagccagaccagaaccttcatcgtgggcgcccagatgaacgtgaaggagttcaaggagcacatcgccgccagcgtgagcatccccagcgagaagcagagactgatctaccagggcagagtgctgcaggacgacaagaagctgcaggagtacaacgtgggcggcaaggtgatccacctggtggagagagcccccccccagacccacctgcccagcggcgccagcagcggcaccggcagcgccagcgccacccacggcggcggcagcccccccggcaccagaggccccggcgccagcgtgcacgacagaaacgccaacagctacgtgatggtgggcaccttcaacctgcccagcgacggcagcgccgtggacgtgcacatcaacatggagcaggcccccatccagagcgagcccagagtgagactggtgatggcccagcacatgatcagagacatccagaccctgctgagcagaatggagtgcagaggcggcccccagccccagcacagccagccccccccccagccccccgccgtgacccccgagcccgtggccctgagcagccagaccagcgagcccgtggagagcgaggccccccccagagagcccatggaggccgaggaggtggaggagagagcccccgcccagaaccccgagctgacccccggccccgcccccgccggccccacccccgcccccgagtag

SEQ ID NO: 78200 - DNA, 780 bp, Artificial Sequence
  derived and/or modified sequence
atggagcccaacgacagcaccagcaccgccgtggaggagcccgacagcctggaggtgctggtgaagaccctggacagccagaccagaaccttcatcgtgggcgcccagatgaacgtgaaggagttcaaggagcacatcgccgccagcgtgagcatccccagcgagaagcagagactgatctaccagggcagagtgctgcaggacgacaagaagctgcaggagtacaacgtgggcggcaaggtgatccacctggtggagagagcccccccccagacccacctgcccagcggcgccagcagcggcaccggcagcgccagcgccacccacggcggcggcagcccccccggcaccagaggccccggcgccagcgtgcacgacagaaacgccaacagctacgtgatggtgggcaccttcaacctgcccagcgacggcagcgccgtggacgtgcacatcaacatggagcaggcccccatccagagcgagcccagagtgagactggtgatggcccagcacatgatcagagacatccagaccctgctgagcagaatggagtgcagaggcggcccccagccccagcacagccagccccccccccagccccccgccgtgacccccgagcccgtggccctgagcagccagaccagcgagcccgtggagagcgaggccccccccagagagcccatggaggccgaggaggtggaggagagagcccccgcccagaaccccgagctgacccccggccccgcccccgccggccccacccccgcccccgagacctag

SEQ ID NO: 78201 - DNA, 2712 bp, Artificial Sequence
  derived and/or modified sequence
atggagcccaacgacagcaccagcaccgccgtggaggagcccgacagcctggaggtgctggtgaagaccctggacagccagaccagaaccttcatcgtgggcgcccagatgaacgtgaaggagttcaaggagcacatcgccgccagcgtgagcatccccagcgagaagcagagactgatctaccagggcagagtgctgcaggacgacaagaagctgcaggagtacaacgtgggcggcaaggtgatccacctggtggagagagcccccccccagacccacctgcccagcggcgccagcagcggcaccggcagcgccagcgccacccacggcggcggcagcccccccggcaccagaggccccggcgccagcgtgcacgacagaaacgccaacagctacgtgatggtgggcaccttcaacctgcccagcgacggcagcgccgtggacgtgcacatcaacatggagcaggcccccatccagagcgagcccagagtgagactggtgatggcccagcacatgatcagagacatccagaccctgctgagcagaatggagtgcagaggcggcccccagccccagcacagccagccccccccccagccccccgccgtgacccccgagcccgtggccctgagcagccagaccagcgagcccgtggagagcgaggccccccccagagagcccatggaggccgaggaggtggaggagagagcccccgcccagaaccccgagctgacccccggccccgcccccgccggccccacccccgcccccgagaccaacgcccccaaccaccccagccccgccgagtacgtggaggtgctgcaggagctgcagagactggagagcagactgcagcccttcctgcagagatactacgaggtgctgggcgccgccgccaccaccgactacaacaacaaccacgagggcagagaggaggaccagagactgatcaacctggtgggcgagagcctgagactgctgggcaacaccttcgtggccctgagcgacctgagatgcaacctggcctgcaccccccccagacacctgcacgtggtgagacccatgagccactacaccacccccatggtgctgcagcaggccgccatccccatccagatcaacgtgggcaccaccgtgaccatgaccggcaacggcaccagacccccccccacccccaacgccgaggcccccccccccggccccggccaggccagcagcgtggcccccagcagcaccaacgtggagagcagcgccgagggcgcccccccccccggccccgcccccccccccgccaccagccaccccagagtgatcagaatcagccaccagagcgtggagcccgtggtgatgatgcacatgaacatccaggacagcggcacccagcccggcggcgtgcccagcgcccccaccggccccctgggcccccccggccacggccagaccctgggccagcaggtgcccggcttccccaccgcccccaccagagtggtgatcgccagacccacccccccccaggccagacccagccaccccggcggcccccccgtgagcggcaccctgggcgccggcctgggcaccaacgccagcctggcccagatggtgagcggcctggtgggccagctgctgatgcagcccgtgctggtggcccagggcacccccggcagccccggcggcctgggcctggagagcctgagccccgagttcttcaccagcgtggtgcagggcgtgctgagcagcctgctgggcagcctgggcgccagagccggcagcagcgagagcatcgccgccttcatccagagactgagcggcagcagcaacatcttcgagcccggcgccgacggcgccctgggcttcttcggcgccctgctgagcctgctgtgccagaacttcagcatggtggacgtggtgatgctgctgcacggccacttccagcccctgcagagactgcagccccagctgagaagcttcttccaccagcactacctgggcggccaggagcccacccccagcaacatcagaatggccacccacaccctgatcaccggcctggaggagtacgtgagagagagcttcagcctggtgcaggtgcagcccggcgtggacatcatcagaaccaacctggagttcctgcaggagcagttcaacagcatcgccgcccacgtgctgcactgcaccgacagcggcttcggcgccagactgctggagctgtgcaaccagggcctgttcgagtgcctggccctgaacctgcactgcctgggcggccagcagatggagctggccgccgtgatcaacggcagaatcagaagaatgagcagaggcgtgaaccccagcctggtgagctggctgaccaccatgatgggcctgagactgcaggtggtgctggagcacatgcccgtgggccccgacgccatcctgagatacgtgagaagagtgggcgaccccccccagcccctgcccgaggagcccatggaggtgcagggcgccgagagagccagccccgagccccaggagtgggtgcccatcatccagcaggacatccagagccagagaaaggtgaagccccagccccccctgagcgacgcctacctgagcggcatgcccgccaagagaagaaagctgagaagcgacatccagaagagactgcaggaggaccccaactacagcccccagagattccccaacgcccagagagccttcgccgacgacccctag

SEQ ID NO: 78202 - protein, 1077 aa, Artificial Sequence
  derived and/or modified sequence
MEPNDSTSTAVEEPDSLEVLVKTLDSQTRTFIVGAQMNVKEFKEHIAASVSIPSEKQRLIYQGRVLQDDKKLQEYNVGGKVIHLVERAPPQTHLPSGASSGTGSASATHGGGSPPGTRGPGASVHDRNANSYVMVGTFNLPSDGSAVDVHINMEQAPIQSEPRVRLVMAQHMIRDIQTLLSRMECRGGPQPQHSQPPPQPPAVTPEPVALSSQTSEPVESEAPPREPMEAEEVEERAPAQNPELTPGPAPAGPTPAPETNAPNHPSPAEYVEVLQELQRLESRLQPFLQRYYEVLGAAATTDYNNNHEGREEDQRLINLVGESLRLLGNTFVALSDLRCNLACTPPRHLHVVRPMSHYTTPMVLQQAAIPIQINVGTTVTMTGNGTRPPPTPNAEAPPPGPGQASSVAPSSTNVESSAEGAPPPGPAPPPATSHPRVIRISHQSVEPVVMMHMNIQDSGTQPGGVPSAPTGPLGPPGHGQTLGQQVPGFPTAPTRVVIARPTPPQARPSHPGGPPVSGTLQGAGLGTNASLAQMVSGLVGQLLMQPVLVAQGTPGMAPPPAPATASASAGTTNTATTAGPAPGGPAQPPPTPQPSMADLQFSQLLGNLLGPAGPGAGGSGVASPTITVAMPGVPAFLQGMTDFLQATQTAPPPPPPPPPPPPAPEQQTMPPPGSPSGGAGSPGGLGLESLSPEFFTSVVQGVLSSLLGSLGARAGSSESIAAFIQRLSGSSNIFEPGADGALGFFGALLSLLCQNFSMVDVVMLLHGHFQPLQRLQPQLRSFFHQHYLGGQEPTPSNIRMATHTLITGLEEYVRESFSLVQVQPGVDIIRTNLEFLQEQFNSIAAHVLHCTDSGFGARLLELCNQGLFECLALNLHCLGGQQMELAAVINGRIRRMSRGVNPSLVSWLTTMMGLRLQVVLEHMPVGPDAILRYVRRVGDPPQPLPEEPMEVQGAERASPEPQRENASPAPGTTAEEAMSRGPPPAPEGGSRDEQDGASAETEPWAAAVPPEWVPIIQQDIQSQRKVKPQPPLSDAYLSGMPAKRRKLRSDIQKRLQEDPNYSPQRFPNAQRAFADDP

SEQ ID NO: 78203 - DNA, 3234 bp, Artificial Sequence
  derived and/or modified sequence
atggagccaaacgattccacttccacggccgtggaagaacctgactctctggaggtactcgtaaaaacattggacagccagacccgaacattcatcgtgggtgcccagatgaacgtcaaggagttcaaagaacatatcgcagcatccgtctcaattccttccgaaaaacagagactgatctatcaggggagagtcctgcaggatgataagaagttacaagagtacaatgtgggagggaaggtcattcaccttgttgagcgggcaccaccgcagacacatctgccttccggagccagttctggcaccgggagcgcctcagcaacccacggaggcgggtcacctcctgggacccgaggaccaggcgcctcagtgcatgataggaatgccaacagttacgtgatggtgggtacatttaacttgcccagcgatggatctgcggtagatgtgcatattaatatggagcaggccccaatccagtccgaacctagggtgagactggtgatggcccagcacatgatccgagacatccaaacacttctttcccggatggaatgcagagggggccctcaaccacagcactcccagcctccaccccaacctcctgccgttactccagagcccgtggcactgagctctcaaacatcggagccggtcgagtctgaggccccgccacgcgaaccgatggaagccgaagaagtggaagaaagagctcctgcccaaaacccggagctaacacccggccctgccccagcgggtcctaccccagctcccgagacaaacgcacccaatcacccatcacccgcagagtacgtcgaggtgctgcaagaactccagaggttggagagtcgactccagccattcctgcagagatattacgaggtgctgggcgccgccgccacaaccgactataacaataatcacgagggtcgtgaggaggaccaacggcttattaacctggtcggagagtcccttagactcctggggaataccttcgtggccctgtctgacctgcgctgcaatctagcatgtacaccccctcgacacctgcatgtcgtgagacccatgtcccattacacaacccctatggtgctgcagcaggccgctattccaatccagataaacgtgggtactacagttaccatgacaggcaacggaacacgtcctcccccaacccctaacgctgaagccccaccccctggcccagggcaggctagctcggttgcacccagctctacaaatgtcgaatcatcagcagaaggtgctccacccccgggccccgcacctcccccagcgaccagccatcctcgggtgatcaggataagccaccaatccgtggagcccgtcgtgatgatgcacatgaacatccaggactcgggcactcagcccggtggggttcctagtgccccaacagggcctctaggcccccctggacacggacagactctcggtcagcaggtgcctggattcccaaccgctccaaccagagttgtgatcgcgaggcccaccccaccgcaggcccgcccttcacatccaggggggccaccagtgagtggcactctgcagggcgcgggtttgggaactaatgcaagtctggcccagatggtctcaggcctcgtggggcagctcctgatgcaaccagtcctagtggcccaaggtacaccggggatggcccctccgccagctcccgcaacagctagcgcaagcgcaggtaccactaatactgccaccacggcgggaccagcccctggcggcccggctcagcccccgcctacacctcagccctccatggcagatttgcagttttcccagttgcttggtaacctcctgggcccggccgggcccggcgcaggtgggtcgggtgtagccagcccaaccattacggtggccatgcctggtgtccctgctttcttgcaaggtatgaccgactttctgcaggcaacgcaaaccgcacccccaccacccccccctcctcctccccctcctcccgcaccagagcagcagacaatgccacctccaggtagtccctccggaggcgctggctccccgggcgggctgggcctcgaaagcctctcccccgaattcttcactagcgttgtccagggagtgctgtcatcactcttagggtcactgggcgccagggctgggagtagcgagagcattgccgctttcattcagaggctctctggatcaagcaatatttttgaacccggtgcggacggggccctcggattttttggtgccttgttgtctctcctgtgtcaaaatttctccatggtggatgtagtgatgctgctccatggacattttcagccacttcagcgactgcagccacagctgcgcagctttttccatcagcactacctcggcggtcaggagcccaccccatcaaacattaggatggccacacacactctgatcaccggcctggaagaatacgttagagaaagctttagtttggtgcaggtccagcccggcgtggatattatacgaaccaatctggaattcttacaggaacagttcaatagtatcgctgcccatgtgctccattgcaccgatagcggctttggagcccggcttttggagctgtgcaaccaagggctgtttgaatgcttggccctgaacctgcactgcctgggcggccagcagatggaactggccgccgtaatcaacgggcggattagacggatgtcgcggggggttaatcccagtttagtgtcgtggctaaccactatgatgggactccgcctgcaagttgttctggaacatatgccagttggcccggatgctatcctgcggtatgtgcgacgggtcggcgaccccccccagcctctccctgaagagcccatggaagttcagggcgccgagcgggctagtcccgaaccccagcgcgaaaacgcttctcctgctcccggtacgacggccgaggaggccatgagcagaggccccccccccgcccctgaaggggggtctagggatgaacaggacggagcatccgctgagaccgaaccatgggctgcagcggtgccacccgaatgggtaccaatcatccaacaggacatccagtcacagcgcaaagtgaaaccccagccacccctctccgacgcatacctaagtggcatgccggccaagcgaaggaagctgaggagcgacattcagaagagactccaagaagaccctaattattctccacagcgctttccaaatgcccagcgggcattcgcagacgacccatag

SEQ ID NO: 78204 - DNA, 738 bp, Artificial Sequence
  derived and/or modified sequence
ccacctcgccaccttcatgtggtccggccaatgtcccactacaccacccctatggtactgcagcaggctgctatccctatccaaatcaatgttgggacgacagtaacaatgaccggaccggcccccccaccggctacttcccatccccgagtgatacggatttcccaccagtctgtagagcccgtcgtgatgatgcatatgaacattcaggatagtggcacacagcctggaggcgtgccaagcgctccaacaggacccctgggcccacctgggcatgggcaaaccctgggacagcaagtgcccggctttccaactgcaccaacgcgcgtagtgattgccaggcccactcctccccaggccagacccagtcaccccggaggtcccccagtatccgggacacttcagggggctggactcggcaccaatgcttcactggctcagatggtcagtggactcgtgggacaactgctgatgcagcctgttctagttgctcaggggactcccggaatggcccccccgcccgcccccgctactgcaagtgcgtctgccggtaccaccaacacagccacaactgcaggcccggcaccaggaggccctgcacaacctccccccacaccgcagccttcaatggcagacctgcaatttagccagttactgggtaacctgttgggcccagcgggtccaggagcagggggaagcggcgttgcctcacctactataactgtagccatgccctag

SEQ ID NO: 78205 - DNA, 717 bp, Artificial Sequence
  derived and/or modified sequence
tcttccgctgaaggtgcaccgcctccaggaccagctccgcctccagctacttcccacccgcgagtgatccgaatatcacatcagtccgtcgaaccagtggtgatgatgcatatgaatatacagggaccgttatcattaagcccttgtccagatagtggtactcagcctgggggtgttccatctgcaccaacgggccccctgggacctcctgggcatggacagactctcgggcagcaagtccccgggttccctacagcacctacaagggtggtaattgctcgcccaaccccccctcaggcaagaccctcccaccccggcggaccccccgttagcggaaccctgcaaggcgcaggcctgggaaccaatgctagtctggctcagatggtctccggccttgtcggtcagctcctgatgcagcccgtccttgtagctcagggtacccctgggatggcgccaccacccgctcccgcaacagccagcgcctccgcgggcacaacaaacaccgcaaccacggccggcccagccccggggggacccgcccagcctcctccaactccacagcccagtatggcggacctccagttctctcaactgctcggaaacctattgggccccgccggaccgggcgctggcggccccggagtggcctcacctactattacagtggccatgcccggggtcccagcgtttctgcagggcatgacggatttcctatag

SEQ ID NO: 78206 - DNA, 717 bp, Artificial Sequence
  derived and/or modified sequence
agctccgctgaaggcgcaccaccaccagggcccgccccaccacccgcaacctcccacccaagagtaatccggataagtcatcagagcgtcgagccggtggtcatgatgcacatgaacattcagggccctctctcgttaagcccctgccccgactcagggacacaaccgggaggcgtgccatcagccccaaccggccctctgggcccccctggacatggccagactcttgggcagcaggtgcccgggtttcctacagctcccactcgggtcgtgatcgcccgacctactccacctcaggcacgccctagccaccccggcgggcccccagtgtccggaacattgcagggtgcgggcttaggcaccaacgctagcctcgctcaaatggtgtccggactggtgggacagttgctcatgcagcctgtgttagtcgcacaggggactccagggatggcaccacctcccgccccagcgaccgcaagcgcttccgccggtacgaccaacacggccacaacagctggccccgcacccggtgggcccgcccagcctcctccgacgccccaaccatctatggccgatctacagttttcacagttacttgggaaccttctgggcccagccggtccaggggcaggagggtctggcgtggcatctcccacgatcactgttgccatgcctggcgtgccagcctttctgcagggcatgactgacttcctatag

SEQ ID NO: 78207 - DNA, 717 bp, Artificial Sequence
  derived and/or modified sequence
tccagtgcagaaggagccccccccccaggccctgcccctcctcccgccacctcgcatcccagagtcatcagaatcagccaccaatccgttgaacctgtcgtgatgatgcacatgaacatacagggaccattgtccctctctccatgcccggatagcggaacccagccgggcggagttccctctgctcccacgggaccattgggacccccagggcacggtcaaaccctggggcagcaagtcccagggttccctaccgcgcctactcgggtggtcattgcacgacctacccccccgcaagcacgacccagccaccccggcggcccacctgtaagcggcaccctgcagggtgccggattggggacaaacgcatccctggcccagatggtctccggactggtcggtcaactacttatgcagcctgttctggtggcacaaggcactccaggcatggccccgcctcccgcgcccgcgaccgccagcgcatcagccgggactacaaataccgctacaaccgcaggccctgctccaggcggccctgctcagcccccccccactccacagccatctatggccgacctgcagtttagtcagctgctcggaaacctactcgggcccgccggccctggggcgggcgggcctggggtggcaagtcccacaatcacagtggccatgcccggagtcccagcctttctgcagggcatgaccgatttcctgtag

SEQ ID NO: 78208 - DNA, 717 bp, Artificial Sequence
  derived and/or modified sequence
tcatccgctgaaggcgcgccgcctccaggccccgctccacctccggctacctcacacccacgcgttatcaggattagccaccagtctgtggaacccgttgttatgatgcatatgaatatccaagggcctctgtccctctcaccgtgcccggactccggaacccagcccgggggtgtgcctagcgccccaacagggcccctgggcccccctggtcacggccagacattaggtcagcaggtcccgggattcccgaccgcaccaacccgcgtggtcatcgcccggccaacaccaccacaagccaggcccagccatccaggaggcccccccgtgtcaggaaccttacagggtgccgggctcggtaccaacgcctccttagcacaaatggttagcggtctggtaggccagctgttgatgcaacccgtgctggtggcccagggaacccccgggatggcccccccacccgcaccagcgacggcctccgcatcagccggaaccaccaacaccgccactaccgctggcccagcacccggggggcctgcccagcctcctccaactcctcaaccttccatggccgacctgcaatttagccagctgctcggaaacctgctcggaccagctggacccggggccggcgggtccggcgtcgcctcccctacaattacagtcgctatgccaggagtcccagctttcctgcaggggatgactgactttttatag

SEQ ID NO: 78209 - DNA, 717 bp, Artificial Sequence
  derived and/or modified sequence
tcatccgccgaaggagccccgcctcccggccctgcacctcctccagccacatcccaccctcgcgtgatcaggatatcacatcagagcgtggaacccgtagtgatgatgcacatgaacattcagggacctttgagcctgagtccatgtccagatagcggcacccagccaggcggtgttccgtcagcccccaccgggccgctgggaccccccgggcacggtcagacgcttggccagcaggtacccggcttccccaccgctccgacacgggtagttatagcccggccgaccccaccacaggcccgtcccagtcaccccggaggtcctcctgtgagcggcacgctgcagggcgccggcctgggcacgaacgcatcactggcccagatggttagtggtttggtgggccagctattgatgcagcccgtcctggttgcccagggcacacccgggatggccccaccccccgcccccgctaccgcttccgcgtccgccggaacaacaaacactgcaactaccgccggtcccgcaccagggggacccgcccagccgcctccaaccccccagccatctatggcggacttgcagttctcccagctccttggtaatctgctcgggcctgcaggccctggcgcggggggtcccggagtagccagccccacgataaccgtcgctatgccaggcgtgcctgctttcctccagggtatgactgactttctctag

SEQ ID NO: 78210 - DNA, 738 bp, Artificial Sequence
  derived and/or modified sequence
ccccctcgacatctgcatgttgtgcgtcccatgtctcactacaccacacccatggtgttgcagcaagctgccatccccattcaaattaatgtggggactacagtgacgatgacaggacccgcccctccaccagccaccagtcaccccagagtgataaggatttctcaccaatccgtggagccagtagtcatgatgcacatgaacatccaggattccggaacccaacctgggggagtgccttctgctcccaccggcccccttgggccgcccggccatgggcaaaccctgggtcagcaggtcccggggttcccaaccgcacccacccgggtagtgatagcaagaccgactccgccgcaggctcgcccatctcacccaggggggccacccgtcagtggaacactacaaggcgccggcctggggaccaatgcctcgctggctcagatggtgtcaggattggtggggcaattactgatgcagcccgtactcgtcgctcagggcacccccggcatggcccctccgccagccccagccactgcctcagcctcagcgggaacgactaacaccgctaccacagccggacctgccccagggggtccggcacagcctccccctacccctcagcctagcatggcagatctgcaattttcccaattgctcggaaacctgctgggacccgcaggacccggcgcaggaggccctggcgtggcctcccctactataaccgtggccatgccatag

SEQ ID NO: 78211 - DNA, 738 bp, Artificial Sequence
  derived and/or modified sequence
ccaccacggcacttgcacgtcgtaaggcccatgtcccactatacaaccccaatggtcctgcagcaagccgccatcccgattcagataaatgtgggcactacggtgacaatgacggggcccgcgcctccacctgccacctctcacccacgcgtgatcagaatctctcatcaaagcgtagagcccgtggttatgatgcacatgaacattcaggacagcggcacccagcctgggggggtcccctccgctcccactggccctttgggcccaccaggccatggtcagacattaggccagcaggtccccgggtttcccaccgcccctacaagagtcgtgatagcaaggcccactcctccccaggcgagaccgtcacaccctggtggccctccagttagcgggactctgcaaggcgcagggcttgggacgaatgcttccctcgcacaaatggtgtcaggtcttgtggggcaactgctgatgcagcctgtgctggtggctcagggcacacccggcatggctcccccccccgcaccagccaccgctagtgcctcggctgggaccacaaatactgctacaacagcaggacctgctcccgggggtccagcccagccgccccccaccccccagccaagcatggccgacctgcaattttcacaactacttggcaacctgcttggacctgccggacccggcgccggtggtagcggagtggcctcgccgaccatcactgtcgccatgccttag

SEQ ID NO: 78212 - DNA, 717 bp, Artificial Sequence
  derived and/or modified sequence
tccagtgcggagggcgctccaccccctggtcccgcaccgccaccggcaaccagccatcccagagtgattaggatttctcatcagtctgtagaacccgtagtgatgatgcatatgaatatacagggacccctctccctgtccccgtgccctgattctggtactcaaccggggggggtgcccagtgctcctacaggcccgctgggtccacctggccacgggcaaacgctcggccagcaagtgcccggcttccctactgcacccactagggtggtcatcgccagaccaacacctccccaagctcgcccctcccacccaggcggaccgcctgtgagcgggacgcttcagggggctggacttggtacaaacgcctccttggcgcagatggttagcgggctcgtcgggcagctcttgatgcagcccgtgcttgtggctcagggaactcccgggatggctccacctcctgctcccgctactgcaagtgcatccgcgggtaccacaaatacagctaccacagctgggcccgcccccggcggcccggcacagccaccaccaacacctcagccatccatggctgacctgcagttctcacagctccttggcaaccttcttggtcccgcaggccccggcgccggagggtccggggtcgccagccccaccattacggttgccatgccgggggttccagccttcctgcagggcatgacagatttcttatag

SEQ ID NO: 78213 - DNA, 738 bp, Artificial Sequence
  derived and/or modified sequence
cccccacgacatctgcatgttgtgcgcccaatgtcccactacacaacgcctatggttctccagcaggccgctatacctattcagatcaatgtgggaaccaccgttacaatgaccggccctgcgccaccccccgctacgagccacccacgtgttattaggatctcccatcagagtgtcgaaccagtcgtgatgatgcacatgaatatccaggacagcggaactcagcccggcggggtgccgagtgcccctactgggcctctgggacctcccggccacggtcaaactctgggacaacaggtaccaggcttccccaccgcccccacgcgcgtcgtgatcgctcggccaactccacctcaggcacgccccagccaccctggcggcccaccggtttcaggcaccctgcagggtgccggcttagggacaaatgcttcactagcacagatggtgagtggtctcgttggacaactgctcatgcagcctgtgcttgtggcccaaggaacccccggcatggctcctcctcctgcgcctgccacagcaagcgcttccgctggaacaaccaacactgccacaactgccggtcccgccccaggcggcccggcccagccaccccctacgccacagccaagtatggctgatctgcagttttctcagctgcttggtaatctgctgggaccagcaggccccggcgcagggggacccggggttgcaagcccaacaatcaccgtagccatgccatag

SEQ ID NO: 78214 - DNA, 738 bp, Artificial Sequence
  derived and/or modified sequence
ccgccccgccacctacatgtggttagaccaatgagtcattataccacacctatggtcctccaacaggcagctatacctatccaaatcaacgtcggcactacagtgacgatgactggtcctgccccacctccagctaccagccatccccgcgtgattcgcattagccaccagagtgtagagcctgtggttatgatgcatatgaatattcaggactccggcactcagcccggaggcgtgccttccgcacctaccggaccgttaggaccccccggccatggccagaccctagggcagcaagttcccggcttcccaaccgcccctacccgcgtagtgatcgcccggcctacaccccctcaggcacgccctagccacccaggcggcccaccagtttcgggaaccctccagggcgcaggccttggcactaacgcgtcactcgcccagatggtgagtggcctggtcgggcaactactgatgcagcccgtcttagttgcccaagggacacctggtatggccccgccaccagcaccagcaacagccagtgcgagcgccggtaccaccaacactgccaccaccgctggacccgcaccgggcggtcccgcccagccacctccaactccccagccatctatggcagacctgcagtttagccagctgctgggcaacctgcttggcccggcaggccccggggcaggagggccaggtgttgcctctcccacaatcactgtcgctatgccctag

SEQ ID NO: 78215 - DNA, 738 bp, Artificial Sequence
  derived and/or modified sequence
cctcccaggcacctgcacgtggtacgacctatgtctcattacacaacccccatggttctgcagcaggccgctatacccattcagattaacgtgggcacaactgttaccatgaccggacccgcgcccccccctgcaacctcacaccctagggttataagaataagccatcagtcggtcgaaccagtagttatgatgcatatgaacatacaagattctggcacgcaacctggtggcgtgccaagcgctccaacaggccccttgggcccccccggtcacggacagaccctgggacagcaagtgcccgggtttccaaccgctcctacgcgggtggttatcgccagacccacaccaccacaagcaagaccttctcaccccggagggccacccgtgagcggcacccttcagggcgctggactgggaaccaatgcgtcccttgctcagatggtgtccggtcttgttggtcagctcctcatgcagccagtactggtcgcccagggaactcctggtatggcccccccacccgcacctgctaccgcgtctgcatctgccggaactacaaacactgccacaaccgctgggccggcgcccggaggccccgcccagcctccaccaacgccccaaccttcaatggcggatctccagttctctcagttgctcgggaatctgctcggcccagccgggcctggcgccgggggatccggcgtggcatccccaaccatcactgtggcgatgccttag

SEQ ID NO: 78216 - DNA, 717 bp, Artificial Sequence
  derived and/or modified sequence
agtagcgccgagggggctccaccacccggccctgctccccccccagccacctcacatcctcgcgtgatcaggatttcccaccagagcgtagaacctgtggtcatgatgcacatgaatatccagggccccttgtccttatctccgtgtccggatagcggcacccagcccggaggcgttccctcagcccctacgggacccctcggtcctccagggcacggacaaacacttgggcagcaggtgcccggcttcccaacagctcccactcgcgtggtgatcgccaggccaacgccaccacaggcccggcccagccaccccggcggcccaccagtgagcgggaccctgcagggcgctggccttggaacaaacgccagtctggcgcagatggtgtctggtctggtggggcagctcctgatgcaacccgtgctcgtggcccagggcactcccggcatggctccaccccctgcgcccgccactgctagtgcatcggccgggaccactaacaccgccacaaccgccggcccggcgcccggaggaccagcccagcctcctccaacgccgcagccttctatggcggatctgcagttctcccaattgctggggaacctcctaggtcccgcagggcccggggccggcggctcgggagtggcctccccgacaattaccgtggccatgcccggcgtgccagcttttctgcagggcatgaccgatttcctttag

SEQ ID NO: 78217 - DNA, 738 bp, Artificial Sequence
  derived and/or modified sequence
cccccgcgccacctgcacgtcgtgagacctatgagtcactatactacacccatggtgctgcaacaggccgctataccgattcagattaatgtgggcaccactgtgacaatgacagggcctgcacccccccccgcaacctctcatccccgcgtcatcagaatcagccaccagtccgtggaacctgttgtgatgatgcatatgaacattcaggatagtggcactcagcctggtggagtgccttccgcacctacggggccacttggaccacctggacacggacagacacttggccagcaggtccccggttttccaacagcgccaacaagagtggtaatagcacggcccaccccaccccaggctagaccctcacacccaggaggtccccctgtaagcggcacccttcagggtgctggactgggtaccaatgcaagcctggcgcaaatggtgtccggactggtagggcaacttctcatgcagccggtcctagtcgcccagggcacccccggcatggctcctccccccgccccagccacagcatcagccagcgccggcactactaacactgcaactaccgccggtccagcaccagggggacccgctcagcctcctcccacccctcagcctagcatggccgatttgcaatttagtcaactgctcgggaatttgcttgggcctgctgggccaggggctggaggcagcggagttgcctctcctactattacagtggctatgccctag

SEQ ID NO: 78218 - DNA, 3234 bp, Artificial Sequence
  derived and/or modified sequence
atggaaccgaacgattctacctccactgccgtagaggagccagattcactggaagtgctggtgaagactctggacagccaaactagaacgttcatcgtcggcgctcaaatgaatgttaaagaattcaaggagcacatagctgcctctgttagtatcccttctgaaaaacaacgtctgatataccagggccgggttctgcaagatgacaaaaagctccaggagtacaatgtgggcgggaaagtgatccatctggtcgaaagagcgccacctcagacacacctgccctcaggcgccagcagtggtaccgggagcgcctctgccacccacggaggtggaagtcctccaggcaccagagggcccggagcctctgtgcatgaccgtaatgctaactcctacgttatggtaggaaccttcaatctgccctccgatggatccgcggtcgacgttcatatcaatatggagcaggccccgattcaaagcgaaccacgcgtgagactagtcatggcccagcatatgatcagggatatccagaccttactcagtcgaatggagtgccggggaggcccgcagccccaacattctcaacctcctccccagccacctgctgtcacccccgagcctgtcgctttgagctcacagaccagtgagcccgtggagagcgaagctccacctagggaaccaatggaggcggaggaagtagaggagcgtgcacccgctcagaaccccgaactgacccccggccccgccccagccgggcccacgccagcgcctgagacaaacgctcccaaccacccctcccccgccgaatacgttgaggtactgcaggagctgcagagattggaatccagattacaaccctttcttcagcgttactacgaggtcttgggagcagccgctactacagattataacaataaccacgagggaagagaagaggaccagcgcttaatcaacttagtgggtgaaagtctacgcttgctgggcaacactttcgtcgcactgtccgatttaaggtgcaatctggcttgcacccccccacgtcatcttcatgtcgtccgtcctatgtcccactataccacacccatggtgttgcagcaagctgcaatcccgatacagattaacgtcggaactacagttaccatgaccggcaacggaaccagaccaccgccaaccccgaatgccgaggcccccccccccggccccggacaggccagctcagtggcaccatcgtccaccaatgtggagagctccgccgagggagctcccccgcccgggccagccccaccccccgccactagtcaccctcgagtgataaggatcagtcatcaaagcgtagagccggttgtgatgatgcatatgaatattcaagactctgggacgcagcccggcggtgtgccttccgcaccaaccggtccattgggaccacccggccacggccagaccctcgggcagcaggtgcctggattccccaccgcccccacacgcgtcgtgatcgctagaccaactccccctcaagcccgacccagtcatccgggcgggccgcctgtttccgggactctgcagggcgcaggcttggggacaaacgcttcgctcgcccaaatggtgtccggtctggtgggccagctgctgatgcaaccagtgctcgttgctcaaggaacacccgggatggctccccccccagctccagctaccgcctctgccagcgcagggacaactaacaccgcaactacagcaggccctgccccggggggccccgctcagcccccaccaaccccacagccatcaatggcagatttgcagttcagccagctgctgggcaaccttcttgggcccgcagggcccggggccggggggtcaggtgtggcttccccgacgattactgtggccatgccaggcgtgccagctttcctccagggcatgacagacttcctgcaggctacccagaccgccccccccccaccgcctccaccgccacctcctccaccagctccagagcagcagacgatgcccccacccgggagcccttccggtggggccggtagcccaggaggtctggggctggagagtttgtctcctgagttcttcacttctgttgtccagggggtattatcaagtctgctcgggagtctgggtgcccgtgccggctcctctgaaagcatcgcagcctttatccagaggctttcagggtcctctaacatttttgagcctggggccgatggagctctggggttttttggcgccctcctgtcgctcttgtgccaaaacttcagcatggttgatgtcgtcatgctgctacatggtcacttccagccacttcagagattacagccgcagctgaggtctttcttccaccagcattacctgggaggtcaagagccaacgccatccaacatccgtatggctacacatacccttataaccgggttggaggagtacgtgagggaaagctttagcctcgtccaggtgcaaccgggcgtggacatcattcggaccaatctggaattcttgcaagaacagtttaatagtatagctgcccatgtccttcactgcacagactctggatttggagctcgccttctcgaactctgcaaccaggggttatttgagtgcctggccctaaatctgcactgcctcgggggacaacagatggaactggctgccgttattaacggcaggatccgtagaatgagcaggggggtgaatccctctttggttagttggctgaccactatgatgggcctgaggctgcaggtagtcctggaacatatgcctgtgggtcccgacgctatcctgcgctacgttaggagggtcggggacccgccacagcccctccccgaggaacccatggaagtccaaggagccgagagagcctctcccgaaccccagcgcgagaacgcttcccccgcccctggcacaaccgccgaagaagctatgagcagaggaccaccacccgctcctgagggaggatcccgggatgaacaagatggtgccagcgccgaaacggagccatgggcagccgccgtcccacccgagtgggtgcccataatacagcaggatatccagagccagcgtaaagtgaaacctcagccaccgctcagcgatgcgtacctctcaggaatgcctgccaagcgccgaaagctccggagcgatattcagaagagactccaggaggacccaaactatagtccccagaggtttcctaatgcccagcgcgcctttgccgatgatccttag

SEQ ID NO: 78219 - DNA, 3234 bp, Artificial Sequence
  derived and/or modified sequence
atggagcctaacgactccacgagtaccgcagttgaagagccagacagcctggaagtactagtcaaaacactcgactcacagactcgcaccttcatagtgggagcgcagatgaatgtgaaggagtttaaggagcacattgcggcaagtgtgagtataccctccgaaaaacagcgcctgatctaccagggcagagtcctgcaggatgacaagaagcttcaggaatataacgtcggtggcaaggtgattcacttggtcgagcgggccccacctcagacccatctcccaagtggagcctcttccgggacgggcagtgcatccgccacccatggagggggctcacctcctggcacacggggacctggagcaagcgtacatgataggaatgctaattcctacgtgatggtggggaccttcaacctgccaagtgacggcagcgctgtagacgtccatataaacatggaacaggcgcccatccaatctgagcctcgtgtccgcctggtcatggcccagcacatgatacgagacatccagaccctcctgtcacggatggagtgccggggcggcccccagccacagcactcacagccacccccccagcctccagctgtcacccccgagcccgtggcattgagtagccagacctcagagcccgtggaatctgaagcccctccgcgcgagcccatggaagctgaggaggttgaagagagagctccagcccagaatcccgaactgactccaggcccagcgccagccggccctacaccggcccccgaaacaaacgcgcctaaccaccctagccccgctgaatatgtggaagttctccaagagttgcagaggctggagagtcgattgcagccttttctgcagcgttactatgaggtgctgggggctgctgctaccaccgattataacaataatcacgaaggcagggaggaggatcagaggcttatcaacctcgttggcgaatctctccgactcctgggaaacacctttgtagctttaagcgacttgcgatgcaacttggcctgtacacctcctcgccacctgcacgtggtgcgccctatgagtcactacactacaccgatggtgctgcagcaggcagctattccaatccagattaacgtgggaaccaccgtgaccatgaccgggaacgggactcgtcccccgcccacccccaacgcggaggcacccccacctggtccaggccaggccagctccgtggcaccgagcagcaccaacgtggaaagtagcgctgagggtgcccctcccccaggtcctgctccaccacctgctaccagccatcctcgagttatccgaatctcacaccagtctgtagagccagtggtgatgatgcacatgaatattcaggattccggcactcagcctggcggcgtgccctctgcgcccaccggacccttggggcctccgggacacgggcaaacacttggacagcaggtacctggcttccctaccgccccaacccgggttgtaatcgcccgccccactccaccccaagctcggcccagccatcccggcggaccgcctgtttctggtacacttcagggggcaggcctgggaacaaacgcaagcctggcccagatggtttccgggttggtggggcagctgctgatgcagcccgtcctagtggcacagggtacacccggcatggcgccaccgccagccccggctaccgctagtgcctctgcagggaccaccaacaccgccactactgccgggcccgcccctggcggacccgcacaaccgccacccacccctcaaccatccatggctgatctgcagttctctcagcttcttggtaacctcctgggcccagccggtccgggggctggggggccaggggtggcctccccgacgataaccgtggccatgccaggcgtcccagcctttctccagggaatgaccgatttcctccaggctacacaaactgcccctcctcccccaccgccacctcccccccctccaccagcacccgagcaacagactatgcctccccccggttccccttcgggcggggctggctcacccggtggcctcggacttgagtccttgagcccagagttctttacatctgtcgtccagggtgtgctcagtagcctgctgggcagcctgggcgcccgggctgggagctctgagtctatcgccgctttcattcaacgactgagtggctcatccaatattttcgagcctggcgctgacggggcattggggttcttcggcgccctccttagtctcctttgtcagaacttctcgatggtggacgtggttatgctcttacacggccatttccaaccattgcaacggctccagccacagctccggagtttcttccatcagcattacttaggcggacaggagccaacaccttccaatatccgaatggccactcacacactcattactggacttgaagagtacgttagggaaagtttctcactcgtgcaggttcagccgggcgtggacataatccgtaccaatctggagtttctgcaggagcaattcaattcaatcgccgcccatgtactgcactgcaccgattctggattcggagctcgtttattagagctttgtaaccagggtttgtttgaatgtctagccctcaatctgcactgtttaggggggcagcagatggagctcgctgcagtgattaatggacggatcaggcgtatgtccagaggggtgaacccaagcctggtttcttggctcactaccatgatgggcctgcggctacaagtcgtgctagagcacatgccagtcggacctgacgcgatactgcgttacgttcgtagggtgggagatccccctcagccactgcccgaggaacctatggaagtgcagggcgcagagcgcgcctcaccggaaccccagcgggagaacgctagtccggctccaggaactacagccgaggaggcaatgtctagagggccgccgccagctcctgaggggggcagcagagatgaacaagatggggcatctgcggagacagaaccctgggctgccgctgttccacccgaatgggtcccgataatccagcaggacatacagagccaacgcaaggtaaagcctcagcctccactatctgatgcctatctgagcggaatgcctgccaaaaggagaaagctgcgctctgacatccagaagcgcctgcaggaggatcccaattattccccacagcgctttcccaacgctcaacgagctttcgctgatgacccttag

SEQ ID NO: 78220 - DNA, 3234 bp, Artificial Sequence
  derived and/or modified sequence
atggagcctaatgattcaacctccaccgcagtagaggaacccgacagcctggaagtgttggtgaagactctggattcacagacaagaaccttcattgtcggagcccagatgaatgtgaaagagttcaaggaacacattgcagccagcgtgtccatacccagcgaaaaacaacggctgatctaccaagggagagtgctccaagatgataaaaagctccaggaatataatgtgggagggaaggtaatccacttggtggagcgggccccaccgcagacacacctgccttccggtgcttcttcggggacaggctctgccagcgctactcacggaggcggaagccctcccgggacccgaggccctggagcctccgtgcacgaccgaaacgcaaactcctatgtcatggtgggcaccttcaatctgccttctgacgggagcgccgtcgatgttcatattaacatggagcaggcacccatacagtcggagccccgcgtgcggctggttatggctcagcacatgatccgagacattcagactctgctctcaaggatggagtgtcgaggaggaccccagccccagcacagccagcctccacctcagccccccgctgtcacccctgagcctgtggccctgagcagtcagacatcggagcctgtagagagcgaggcgccccccagggagccaatggaggccgaggaagtggaggagagagctcccgcccagaatcccgagcttacacctgggccagcgcccgccggacctactcccgcacccgagaccaatgcacccaaccatccatctcctgccgagtacgtggaggtcctgcaggaattgcagcggttggagagtaggcttcagcccttcctgcagcgatactacgaagtcctgggagcggcagcgacgaccgactataataataatcatgaaggtagagaggaggatcagcgactcattaacctcgtgggcgagtccctgaggctattgggtaatacattcgtggccttgtcagacctccgatgcaatctcgcttgcacccctccacgccacctccacgtggtgaggccaatgagccactacactacacccatggtgctccagcaggcagcgattcccattcagattaatgtcgggacaacagttactatgaccggcaatggaacaaggccacctcccactcccaatgcggaagcccctccacccggtccaggccaggcaagtagcgtggccccatcgtctacaaatgtggagagttccgcagagggtgccccacctcccgggccggctcctccacccgccacctcacacccacgtgttatccggatttcccatcaatcagtggagcctgtggttatgatgcacatgaacatacaggattctgggacacaacccggaggggtgccatcagcccccactggcccacttggcccccctggtcacggacaaactctcggtcagcaggtgccaggtttccccaccgcgcccacccgcgtcgtgattgcaagacctacaccaccacaagcaagacccagccacccaggcggcccacctgtatcaggcaccctgcagggcgccgggctgggtacgaacgcctcgttggcccagatggtgtcaggcctggtggggcagctgctgatgcagccagtgctggtggcccagggaacaccaggaatggcccctcctcctgcaccagcaactgcatccgctagcgccgggacaaccaatactgccaccacagccggaccggcaccaggcggccccgcacaaccccctcccacaccgcagccgtctatggctgatctgcaattttcgcaactgctgggaaatctgctggggcccgccggtcccggcgccgggggaagcggtgtcgcatcaccaacgatcacagtcgcaatgccgggcgtaccggccttccttcaagggatgaccgatttcctgcaagctactcagactgcccccccccccccacctccccctcctcctcctcccccagccccggaacagcagaccatgcctcccccggggagcccctcaggcggcgcagggagtccgggggggttggggctggagtcactctcacccgagtttttcacgtcggtggttcagggcgtcctgtctagccttctgggttccctgggcgcaagagcgggcagctctgagtcaatcgcagcctttatacagaggttgtcgggctcctcgaacatattcgagccaggcgccgatggcgcacttgggttctttggagctctcctgtcactcctctgtcaaaatttttccatggttgacgtggttatgctgctccacggacatttccaacctctccagagactgcagcctcagctgcgatctttcttccaccagcactaccttggcgggcaggaaccgaccccctccaacatccgcatggctacccacaccctcatcactgggttagaggagtacgttagggaaagtttctcacttgttcaggtgcagcctggggtagacataatccgtaccaatcttgagtttcttcaggaacagtttaacagcattgccgctcatgttttgcattgtaccgacagtggtttcggggcccggctattagagctgtgcaaccaggggctcttcgagtgcctggccctcaacctacattgtttgggagggcaacagatggaactggccgcagttatcaacgggcggatccgccgcatgagccgaggggtgaatccctccttagtaagctggctcactacaatgatgggactcagactgcaggttgtgctcgaacacatgcccgttgggcctgatgcaatcttaagatacgtccgccgggtgggtgaccccccccaaccactgcctgaggagccgatggaagtgcagggcgccgagcgtgcctcacctgagccccagagggagaacgcatctccagcccctggaactactgctgaagaggctatgtctcgcggcccaccacctgcccccgagggcggcagcagggacgaacaggacggtgcgtctgccgagacagaaccatgggccgccgccgtgcctccggaatgggtgccaatcatccagcaagatatccaaagtcagaggaaggtgaagccccagccacccctgagcgacgcctacctgagcggcatgcccgccaaacgccgaaagctccggtcagatatacagaagcggctccaggaggaccccaactacagccctcagaggttcccaaacgctcagcgggcatttgctgatgacccctag

SEQ ID NO: 78221 - DNA, 3234 bp, Artificial Sequence
  derived and/or modified sequence
atggaacccaacgactcaaccagtaccgctgtagaggaacccgacagcctagaagtgctcgtgaaaactctcgacagtcagacacgcacattcattgtgggagcacaaatgaacgtgaaagagtttaaagagcacattgccgcgtccgtgagcattcctagcgaaaaacagaggctcatctaccagggtcgcgtgctccaggacgataagaagctccaagagtacaatgttgggggaaaggtgattcatctggtggaacgggcaccaccgcagacccacctgccctccggcgcgagctcgggcaccggttccgcatctgctacacacggaggtgggtctccaccaggcacccgtgggccaggcgcctccgtgcacgacagaaacgccaattcgtatgtcatggttggtacctttaaccttcccagcgacggctctgccgttgacgttcacataaacatggaacaggccccaatccaatccgaaccacgcgttcgactggtgatggcacagcacatgatcagagatattcagacgctcctctctcgaatggagtgtaggggcgggccccagccccaacacagccagccaccaccccagccccccgctgtcacacctgaacccgttgccctgtcctcacagacttctgagcctgtagaatcagaggccccacctcgcgagcccatggaagccgaggaggtggaggaacgggctccagcccaaaatcccgagctgacgcctggccccgcccccgccggccccaccccggcccccgaaaccaacgctccgaatcacccatcacctgcggaatacgttgaagttttacaggagctccagaggctggagtccaggcttcagccttttctccaaaggtattacgaggtactaggcgccgctgcaactacagattacaacaacaaccacgaaggccgtgaggaagatcagcgactgattaatctggtgggcgagagccttcgccttctgggaaatacatttgtcgccctgtcagatctgaggtgtaacctggcatgcaccccaccccgccacttgcacgtcgtccgccccatgtcgcactacacaacgccaatggtactgcaacaggcggctatccccattcagataaacgttggaacaaccgtgactatgactggaaatggaacgcgaccccccccaactccgaatgcagaagcacccccgcctggacctgggcaagctagctctgtcgcaccttcatccaccaacgtggaaagcagcgccgaaggcgccccacccccaggtcctgccccaccgccggcaacatcccatccccgggttatccgtatttcacatcagtcggtagaaccggtagtcatgatgcacatgaacattcaggactctggcacacagcccgggggcgtgccgtctgctcctactgggccactaggcccccccggacatgggcagaccctcggacagcaggtgcccggcttccctactgcccccacccgcgtggttatcgccagaccaactccaccacaggctcgaccatcccaccctggaggcccccctgtgtccggaaccctccagggggccggccttgggactaacgctagtctcgctcaaatggtgagcgggctggtgggtcagttgctaatgcagcctgtcctggtggcccaggggacccccggcatggcaccgcctccggcccccgccaccgccagcgcttccgccggcactactaacacagctactaccgccggcccagctcccggcggcccagcgcagccaccgcccaccccacagccctcaatggcagatctgcagttcagccaactgctcggtaatctgttgggcccggctggaccgggagccggtggtcctggtgttgcaagtcctacaattactgtggccatgcccggtgttccggccttcttgcagggaatgaccgacttcctacaggccacgcagacagctccaccccccccccccccccctcctcctccgccccccgctcctgagcagcagacaatgccccctccaggctcaccaagcggcggagctggaagtccaggtggactgggccttgaatcactctctcccgagtttttcacatccgtcgtgcagggagtgctttcttctctgctgggtagccttggggctagggcaggctccagcgagtctatcgccgcctttatacagaggctgtcagggtcctctaacatttttgagccaggcgcggacggcgctctgggcttttttggagccttgctgtcactgctgtgccagaatttttccatggtggacgtggtgatgcttctacacggtcacttccaacccctgcagaggctacagcctcagcttcgcagtttttttcaccaacattacctgggaggccaggaacccaccccgtccaatatccgaatggccacacacacgctaattaccggactggaagagtatgtacgggaaagctttagcctggtccaggtgcaacccggggttgatattataagaacaaatctcgagttcctccaagagcagtttaactcaatcgcagctcacgtcctgcactgtacagactccggattcggggctcgcctgttggaactgtgcaaccaaggcttattcgagtgcctggccttaaatctgcactgtttaggaggtcagcagatggagctcgcggcggtgattaatggcaggatcagacgaatgtccaggggcgtgaacccatctctcgtttcctggctgacaaccatgatggggttgagactccaggtggtcttagagcatatgcctgtgggacccgacgctatactgagatacgtccggcgagtgggcgatcctccacagcctttgcccgaggagcccatggaggtacagggagcagagagagctagccctgaacctcaaagggagaatgcgtctccagcacccggcacaactgccgaggaagccatgagtaggggcccaccaccagcccccgagggaggaagcagagacgagcaggatggcgctagtgccgagaccgaaccatgggctgccgcagtgccccctgagtgggttccaatcatccagcaagatatacagtcgcagagaaaagtcaagcctcagcccccgctgtctgacgcatatttgagtggtatgcctgcgaaacgccgaaagctcagaagcgatatccagaagaggctccaggaggaccccaattactccccacaacgctttcccaacgcccagagggcctttgctgatgacccctag

SEQ ID NO: 78222 - DNA, 3234 bp, Artificial Sequence
  derived and/or modified sequence
atggagcccaacgactcaacaagtacagccgtcgaagagcccgattccctggaggtactggtcaagacactagatagtcagacccggacctttatagtgggtgcccagatgaacgtcaaggagttcaaagagcacattgccgcttccgtgtcgatcccatctgagaagcaacggctgatttatcaaggacgggtcctccaggacgacaagaaattgcaggagtacaacgtggggggtaaagtgatccatctggtcgaacgggccccaccccagactcatctccccagcggagcctcctctggcacagggtcggcctcagccacgcatggcggggggtcaccaccaggcaccaggggacctggcgcgagcgtacatgataggaacgccaatagttatgtgatggttggaacctttaacttacccagtgatggcagtgctgtggacgtccacattaatatggagcaagcacccattcaaagtgaacctcgtgtccgccttgtgatggcccagcatatgatccgggacattcagaccctgctctccaggatggagtgccgcggcggaccacagccacagcatagccaaccaccaccacagccccctgccgtcacgcctgaaccggtggcactgagctctcaaacaagtgaaccagtcgaatcagaggcacctccgcgtgaacccatggaggccgaggaggtggaagagcgggcacccgcccagaatcccgagctgactccaggtccggctcccgctggccctacaccggctcctgagaccaatgctccaaatcacccttcccccgccgagtacgttgaagtccttcaggaactccagcggttagaatccagactccagccattcctgcagcgctactatgaagtgttgggcgcagccgcgacaaccgactacaataataatcatgaaggacgagaagaagaccagaggctgatcaacttagtgggcgaaagtctacggctacttggcaatactttcgttgccctcagtgatctgcggtgtaatctagcctgtacaccaccacggcacctccacgtggtgcgtccaatgtcccactacaccacaccaatggtgcttcagcaagctgccattcccattcaaatcaatgttggcaccacagtgaccatgaccggtaatgggacccgcccccctccgactccgaatgccgaagccccacccccaggccccggacaggcaagcagcgtagcgccttcatccactaacgtggagagcagcgctgagggagctcctcctccaggccctgccccaccacccgcaacaagccaccctagagtaattagaatttctcaccaatcagttgagcctgtggttatgatgcacatgaatattcaggattcaggaacacagccgggcggggtgcctagcgcccccaccggccccctgggcccaccgggccatggccagacgctgggccagcaggtgcccggcttcccaactgcacccaccagggtcgtgatcgcgaggccaacccccccccaggcgcgcccctcccatccaggggggccacctgtctctggcacattgcagggcgccggattgggcactaacgcttctctggcacagatggtcagcggactggtcgggcagttactgatgcagccagtgctggtagcacagggcacacctggcatggctcctcctcccgccccagcaaccgcaagcgcgtcagcaggcacaaccaacacagccacaactgcgggacctgcacccggtgggcctgcccaaccgccacctactccgcagccaagcatggctgacctacaatttagtcagctactaggaaatcttcttggacccgccggtccaggggccgggggacctggtgtggctagccctaccatcaccgtggccatgccgggtgtgccagcgttcttacagggtatgactgacttcttacaggcaacccagactgctccacccccccctcctcccccgcccccaccacctcccgcccccgaacagcagaccatgccccctcccggcagtccatccggcggcgctgggtcccctggcgggctgggtctggagtccttgtcaccagagttctttacgtccgttgtccagggtgttctctccagcctcctgggcagcctcggcgcaagagctgggagctccgagagcatagccgctttcatccagcgcctgagtgggagtagcaacattttcgaaccaggtgcggacggcgccctgggtttctttggagccctcctatccctcttgtgtcaaaatttctctatggttgacgtggtgatgcttctgcatgggcatttccagcccctgcagcgcctccaaccccagctacggagcttcttccaccaacactacctgggtggacaggaacccacaccctccaatatccgtatggctacccacactttgatcacaggcctagaggagtacgtcagagagtcctttagtctagtgcaagtgcagccaggcgtggatataatccgcacaaaccttgagtttcttcaagaacaattcaacagcattgcagcccacgtgttgcactgcactgactctggctttggggcaagactgttggaactatgcaaccaggggctgttcgaatgtctggcgctgaacctgcactgtttagggggacagcaaatggaactcgctgccgttatcaatggtagaattcgcagaatgagtcgcggagttaatcccagtttggtgtcatggctaacaacgatgatgggccttcgccttcaagttgtgctggagcacatgccagtaggccccgacgcaatcctgcgatatgtgcgcagagtgggggaccccccacaaccactccctgaagaacccatggaagtccaaggggccgagagagccagcccggaaccacaacgcgagaatgctagccctgctcctggtacgacagccgaggaggccatgagccgcgggcccccgccagcccctgaaggcggaagcagggatgagcaggatggcgccagcgcggaaactgagccttgggctgccgccgttccaccagaatgggtcccaatcatccagcaagacattcaatctcagcgaaaagtgaaacctcagcctcctttatcagacgcctacttgtcaggtatgcctgcaaaaagacggaagcttcgctccgacattcagaagcgtctgcaagaggatccaaattatagcccacagagattcccaaatgcgcagcgagcattcgccgacgacccctag

SEQ ID NO: 78223 - DNA, 3234 bp, Artificial Sequence
  derived and/or modified sequence
atggagcccaatgacagcacatcgactgctgtggaagagccagacagtctcgaggtgcttgtgaaaacactcgactcacaaacaaggaccttcatcgtcggtgctcagatgaatgttaaagaatttaaggaacatatcgccgcctctgtctctatcccatccgagaaacagaggctgatttaccaggggagagtgctacaggatgacaaaaagctgcaggaatataatgtcgggggcaaggtcattcacctcgtcgaacgggcccctccacagacccacctcccatctggcgcatcttcgggtactggatccgcttccgccactcatggcggcggaagtccacccggaacgagagggcccggggctagcgtgcacgatcgaaatgcaaatagttatgtcatggtggggacatttaacctcccctccgatggttctgctgtcgacgtccatatcaatatggaacaggcccccatccagtccgagccaagggtccgcctggtgatggcgcagcacatgatccgagacattcagactctgctgtccagaatggagtgccggggcggtcctcagccacagcattctcaacctccacctcagccacctgccgtcacgcccgagccagttgccctgagtagtcaaacatccgaaccagttgaatccgaagcacctcccagagagcccatggaggcggaggaggtggaggagagggctccagctcagaaccccgaactcacacctggtcccgctccagctgggcctacccctgctccagagaccaacgcgcccaatcatccctcccccgccgagtatgtggaggttctgcaggagcttcaaagactcgagtccagactgcagcccttcctccagcggtactatgaagtattgggtgccgccgcaacgaccgattataacaataaccatgaggggagagaagaagatcaaagactgattaacctggtcggcgagtccctacgcttgctgggaaatacatttgtagcactgagtgacctgcgatgtaacctggcctgcaccccgcccaggcacttacacgtcgttcgccccatgagtcactatactacaccaatggtactccagcaggccgccatacccatacagattaatgtaggcaccaccgtgaccatgacaggcaacggcactagaccccctcctactcctaacgctgaagcccctccccctggcccagggcaggcttcatccgtggcgccatcaagcaccaatgttgagtccagtgctgaaggagcccccccccccggtccggcacctccccctgccacatcacatcctagagtcatcaggatttcacatcaaagtgttgagccagttgttatgatgcatatgaacatccaggacagcggaacccagcctgggggcgttcctagtgctccaactggacccttgggcccccccggtcacgggcagacactcgggcagcaggtgcccggctttcctaccgccccaactagggttgtgatcgcccggccaacacctccacaggctcgcccgagccaccctggtggccctccagtctctgggacgctccagggagctggactgggcaccaacgcaagcctcgcacaaatggtgtctggactggtgggccagctgcttatgcaaccagtgctcgttgcccaaggaaccccgggtatggctccgcctcccgctcctgccaccgcctccgccagtgcaggtacaaccaacactgccactaccgccggcccagcacccggcggtccagcacagcctccccctacacctcagcccagtatggctgacctgcagttctcccagctccttgggaacctgttaggccccgccggaccgggcgctgggggatctggagtggcaagccccacaatcactgtggcaatgccaggcgtgcctgctttcctccagggaatgacagattttcttcaagccacacagactgcccccccaccaccccctcctccgcctccccccccccccgcaccagaacagcagacaatgcctccaccagggagcccgtctggaggcgcaggttctcccggcggactcggtctggagagcctttctccagagttcttcacgagcgtggtgcaaggcgtcctgtccagtctgctgggctcactgggcgctagggctggctcctccgagagcattgccgcttttatccaaaggttgtcgggctcttcaaacatcttcgaaccgggtgctgatggtgctcttggtttttttggggctctacttagtcttctgtgtcagaacttcagcatggtagacgtggtgatgctcctccatggacattttcagcccctacagcgcttgcagccacagctgcgctcattttttcaccagcattacctgggaggtcaggagccaactccgtccaacataaggatggccacacacaccctgatcaccggtcttgaggagtatgtgcgtgagtcattctcacttgtgcaggttcagcccggggtggatataattcgtacgaacctcgaatttctgcaggagcagttcaattctattgctgcccacgtattgcactgcacagattctggattcggtgctaggttacttgaactatgcaatcaggggctgttcgagtgccttgccctcaatttgcattgcctgggcggccagcagatggagctggcggccgtgattaatgggcgaatccggcggatgtcccgaggcgttaatccatctctcgtttcctggttgacaacaatgatgggcctgcgcttgcaggtagtccttgagcacatgccagtgggaccagacgcaatactgaggtatgtcagacgcgtgggagacccaccgcagcctctccccgaagagcctatggaagttcagggcgcagagcgcgccagtcccgagccccaacgagagaatgcaagcccagcgcccggcacaaccgcagaggaggcaatgagccgggggccgccccccgcacccgaggggggcagcagagatgagcaggatggcgctagcgctgaaactgagccctgggcagcagcagtgcctcctgagtgggttcccatcattcagcaggatatccaaagccagaggaaagtaaagccccaaccacctttatcagacgcctatctgtcaggtatgcctgccaagcggaggaagctcaggtcagatatccagaagagactgcaggaggaccccaactactctccccagagattcccaaacgcccaacgagcttttgccgacgacccctag

SEQ ID NO: 78224 - DNA, 3234 bp, Artificial Sequence
  derived and/or modified sequence
atggagcccaatgacagcaccagcacagctgtggaggagccagacagcctggaggtgctggtgaagaccctggacagccagaccaggaccttcatcgtgggcgcccagatgaatgtgaaggagttcaaggagcacatcgccgcctctgtgtccatccccagcgagaagcagaggctcatctaccagggccgggtgctgcaggatgacaagaagctgcaggagtacaacgtgggcggcaaggtgatccacctggtggagcgggccccaccccagacccacctgcccagcggggccagcagcggcaccggcagcgccagcgccacccatggaggcggcagccccccaggcacccggggccctggggcctctgtgcatgacagaaatgccaacagctatgtgatggtgggcaccttcaacctgcccagtgatggcagcgctgtggatgtgcacatcaacatggagcaggcccccatccagagcgagccccgggtgcggctggtgatggcccagcacatgatccgggacatccagaccctgctgagcaggatggagtgccggggcggcccccagccccagcacagccagcccccaccccagcccccagctgtgaccccagagcctgtggccctgagcagccagaccagcgagcctgtggagagcgaggccccaccccgggagcccatggaggccgaggaggtggaggagcgggccccagcccagaaccctgagctgaccccaggccctgccccagctggccccaccccagcccctgagaccaatgcccccaaccaccccagccctgcagaatatgtggaggtgctgcaggagctgcagaggctggagagccggctgcagcccttcctgcagcgctactatgaggtgctgggcgccgccgccaccacagactacaacaacaaccacgagggccgggaggaggaccagaggctcatcaacctggtgggggagagcctgcggctgctgggcaacacctttgtggccctgagtgacctgcgctgcaacctggcctgcaccccacccaggcacctgcacgtggtgcggcccatgagccactacaccacccccatggtgctgcagcaggccgccatccccatccagatcaacgtgggcaccaccgtgaccatgactggaaatggcacccggcccccacccaccccaaatgctgaggcccctcctcctggccctggccaggccagctctgtggcccccagcagcaccaacgtggagagcagcgctgagggcgcccctcctcctggccctgcccctcctccagccaccagccaccccagggtcatccgcatcagccaccagagcgtggagcctgtggtgatgatgcacatgaacatccaggacagcggcacccagcccggcggcgtgcccagcgcccccaccggccccctgggccccccaggccacggccagaccctgggccagcaggtgcccggcttccccacagcccccaccagggtggtgattgcccggcccaccccaccccaggcccggcccagccaccctgggggcccccctgtgtctggcaccctgcagggcgccggcctgggcaccaatgccagcctggcccagatggtgtctggcctggtgggccagctgctgatgcagcctgtgctggtggcccagggcaccccaggcatggcccctcctccagccccagccacagccagcgccagcgctggcaccaccaacacagccaccacagctggccctgcccctgggggccctgcccagcccccacccaccccccagcccagcatggctgacctgcagttcagccagctgctgggcaacctgctgggccctgctggccctggggccggcggcagcggcgtggccagccccaccatcaccgtggccatgcctggggtgcctgccttcctgcagggcatgacagacttcctgcaggccacccagacagcccctcctcctcctcctcctcctcctcctcctcctccagcccctgagcagcagaccatgcctcctcctggcagccccagcggcggggccggcagccctgggggcctgggcctggagagcctgagccctgagttcttcacctctgtggtgcagggcgtgctgagcagcctgctgggcagcctgggcgcccgggccggcagcagcgagagcattgctgccttcatccagaggctgagcggcagcagcaacatctttgagcccggggctgatggagccctgggcttctttggagccctgctgagcctgctgtgccagaacttctccatggtggatgtggtgatgctgctgcacggccacttccagcccctgcagaggctgcagccccagctgcgctccttcttccaccagcactacctgggcggccaggagcccacccccagcaacatccgcatggccacccacaccctcatcaccggcctggaggagtatgtgcgggagagcttcagcctggtgcaggtgcagcccggggtggacatcatccgcaccaacctggagttcctgcaggagcagttcaacagcattgctgcccacgtgctgcactgcacagattctggctttggagcccggctgctggagctgtgcaaccagggcctgtttgaatgtctggccctgaacctgcactgcctgggcggccagcagatggagctggccgctgtgatcaatggccgcatccggaggatgagcagaggagtgaaccccagcctggtgtcctggctgaccaccatgatgggcctgcggctgcaggtggtgctggagcacatgcctgtgggcccagatgccatcctgcgctacgtgagaagagtgggggaccccccccagcccctgcctgaggagcccatggaggtgcagggcgctgagcgggccagccctgagccccagcgggagaatgccagccctgcccctggcaccacagctgaggaggccatgagccggggccccccaccagcccctgagggcggcagcagagatgagcaggatggagccagcgctgagacagagccctgggccgctgctgtgcccccagagtgggtgcccatcatccagcaggacatccagagccagaggaaggtgaagccccagccccccctgagtgatgcctacctgagcggcatgcctgccaagaggaggaagctgcggagtgacatccagaagaggctgcaggaggaccccaactacagcccccagcgcttccccaatgcccagagggcctttgctgatgacccctag

SEQ ID NO: 78225 - DNA, 738 bp, Artificial Sequence
  derived and/or modified sequence
cctcccaggcacctgcacgtggtgcggcccatgagccactacaccacccccatggtgctgcagcaggccgccatccccatccagatcaacgtgggcaccaccgtgaccatgacaggccctgcccctcctccagccaccagccaccccagggtcatccgcatcagccaccagagcgtggagcctgtggtgatgatgcacatgaacatccaggacagcggcacccagcccggcggcgtgcccagcgcccccaccggccccctgggccccccaggccacggccagaccctgggccagcaggtgcccggcttccccacagcccccaccagggtggtgattgcccggcccaccccaccccaggcccggcccagccaccctgggggcccccctgtgtctggcaccctgcagggcgccggcctgggcaccaatgccagcctggcccagatggtgtctggcctggtgggccagctgctgatgcagcctgtgctggtggcccagggcaccccaggcatggcccctcctccagccccagccacagccagcgccagcgctggcaccaccaacacagccaccacagctggccctgcccctgggggccctgcccagcccccacccaccccccagcccagcatggctgacctgcagttcagccagctgctgggcaacctgctgggccctgctggccctggggccggcggcagcggcgtggccagccccaccatcaccgtggccatgccctag

SEQ ID NO: 78226 - DNA, 717 bp, Artificial Sequence
  derived and/or modified sequence
agcagcgctgagggcgcccctcctcctggccctgcccctcctccagccaccagccaccccagggtcatccgcatcagccaccagagcgtggagcctgtggtgatgatgcacatgaacatccagggccccctgagcctgagcccctgcccagacagcggcacccagcccggcggcgtgcccagcgcccccaccggccccctgggccccccaggccacggccagaccctgggccagcaggtgcccggcttccccacagcccccaccagggtggtgattgcccggcccaccccaccccaggcccggcccagccaccctgggggcccccctgtgtctggcaccctgcagggcgccggcctgggcaccaatgccagcctggcccagatggtgtctggcctggtgggccagctgctgatgcagcctgtgctggtggcccagggcaccccaggcatggcccctcctccagccccagccacagccagcgccagcgctggcaccaccaacacagccaccacagctggccctgcccctgggggccctgcccagcccccacccaccccccagcccagcatggctgacctgcagttcagccagctgctgggcaacctgctgggccctgctggccctggggccggcggccctggggtggccagccccaccatcaccgtggccatgcctggggtgcctgccttcctgcagggcatgacagacttcctgtag

SEQ ID NO: 78227 - DNA, 717 bp, Artificial Sequence
  derived and/or modified sequence
agcagcgctgagggcgcccctcctcctggccctgcccctcctccagccaccagccaccccagggtcatccgcatcagccaccagagcgtggagcctgtggtgatgatgcacatgaacatccagggccccctgagcctgagcccctgcccagacagcggcacccagcccggcggcgtgcccagcgcccccaccggccccctgggccccccaggccacggccagaccctgggccagcaggtgcccggcttccccacagcccccaccagggtggtgattgcccggcccaccccaccccaggcccggcccagccaccctgggggcccccctgtgtctggcaccctgcagggcgccggcctgggcaccaatgccagcctggcccagatggtgtctggcctggtgggccagctgctgatgcagcctgtgctggtggcccagggcaccccaggcatggcccctcctccagccccagccacagccagcgccagcgctggcaccaccaacacagccaccacagctggccctgcccctgggggccctgcccagcccccacccaccccccagcccagcatggctgacctgcagttcagccagctgctgggcaacctgctgggccctgctggccctggggccggcggcagcggcgtggccagccccaccatcaccgtggccatgcctggggtgcctgccttcctgcagggcatgacagacttcctgtag

SEQ ID NO: 78228 - DNA, 738 bp, Artificial Sequence
  derived and/or modified sequence
cctcccaggcacctgcacgtggtgcggcccatgagccactacaccacccccatggtgctgcagcaggccgccatccccatccagatcaacgtgggcaccaccgtgaccatgacaggccctgcccctcctccagccaccagccaccccagggtcatccgcatcagccaccagagcgtggagcctgtggtgatgatgcacatgaacatccaggacagcggcacccagcccggcggcgtgcccagcgcccccaccggccccctgggccccccaggccacggccagaccctgggccagcaggtgcccggcttccccacagcccccaccagggtggtgattgcccggcccaccccaccccaggcccggcccagccaccctgggggcccccctgtgtctggcaccctgcagggcgccggcctgggcaccaatgccagcctggcccagatggtgtctggcctggtgggccagctgctgatgcagcctgtgctggtggcccagggcaccccaggcatggcccctcctccagccccagccacagccagcgccagcgctggcaccaccaacacagccaccacagctggccctgcccctgggggccctgcccagcccccacccaccccccagcccagcatggctgacctgcagttcagccagctgctgggcaacctgctgggccctgctggccctggggccggcggccctggggtggccagccccaccatcaccgtggccatgccctag

SEQ ID NO: 78229 - DNA, 3234 bp, Artificial Sequence
  derived and/or modified sequence
atggagcccaatgacagcaccagcacagctgtggaggagccagacagcctggaggtgctggtgaagaccctggacagccagaccaggaccttcatcgtgggcgcccagatgaatgtgaaggagttcaaggagcacatcgccgcctctgtgtccatccccagcgagaagcagaggctcatctaccagggccgggtgctgcaggatgacaagaagctgcaggagtacaacgtgggcggcaaggtgatccacctggtggagcgggccccaccccagacccacctgcccagcggggccagcagcggcaccggcagcgccagcgccacccatggaggcggcagccccccaggcacccggggccctggggcctctgtgcatgacagaaatgccaacagctatgtgatggtgggcaccttcaacctgcccagtgatggcagcgctgtggatgtgcacatcaacatggagcaggcccccatccagagcgagccccgggtgcggctggtgatggcccagcacatgatccgggacatccagaccctgctgagcaggatggagtgccggggcggcccccagccccagcacagccagcccccaccccagcccccagctgtgaccccagagcctgtggccctgagcagccagaccagcgagcctgtggagagcgaggccccaccccgggagcccatggaggccgaggaggtggaggagcgggccccagcccagaaccctgagctgaccccaggccctgccccagctggccccaccccagcccctgagaccaatgcccccaaccaccccagccctgcagaatatgtggaggtgctgcaggagctgcagaggctggagagccggctgcagcccttcctgcagcgctactatgaggtgctgggcgccgccgccaccacagactacaacaacaaccacgagggccgggaggaggaccagaggctcatcaacctggtgggggagagcctgcggctgctgggcaacacctttgtggccctgagtgacctgcgctgcaacctggcctgcaccccacccaggcacctgcacgtggtgcggcccatgagccactacaccacccccatggtgctgcagcaggccgccatccccatccagatcaacgtgggcaccaccgtgaccatgactggaaatggcacccggcccccacccaccccaaatgctgaggcccctcctcctggccctggccaggccagctctgtggcccccagcagcaccaacgtggagagcagcgctgagggcgcccctcctcctggccctgcccctcctccagccaccagccaccccagggtcatccgcatcagccaccagagcgtggagcctgtggtgatgatgcacatgaacatccaggacagcggcacccagcccggcggcgtgcccagcgcccccaccggccccctgggccccccaggccacggccagaccctgggccagcaggtgcccggcttccccacagcccccaccagggtggtgattgcccggcccaccccaccccaggcccggcccagccaccctgggggcccccctgtgtctggcaccctgcagggcgccggcctgggcaccaatgccagcctggcccagatggtgtctggcctggtgggccagctgctgatgcagcctgtgctggtggcccagggcaccccaggcatggcccctcctccagccccagccacagccagcgccagcgctggcaccaccaacacagccaccacagctggccctgcccctgggggccctgcccagcccccacccaccccccagcccagcatggctgacctgcagttcagccagctgctgggcaacctgctgggccctgctggccctggggccggcggccctggggtggccagccccaccatcaccgtggccatgcctggggtgcctgccttcctgcagggcatgacagacttcctgcaggccacccagacagcccctcctcctcctcctcctcctcctcctcctcctccagcccctgagcagcagaccatgcctcctcctggcagccccagcggcggggccggcagccctgggggcctgggcctggagagcctgagccctgagttcttcacctctgtggtgcagggcgtgctgagcagcctgctgggcagcctgggcgcccgggccggcagcagcgagagcattgctgccttcatccagaggctgagcggcagcagcaacatctttgagcccggggctgatggagccctgggcttctttggagccctgctgagcctgctgtgccagaacttctccatggtggatgtggtgatgctgctgcacggccacttccagcccctgcagaggctgcagccccagctgcgctccttcttccaccagcactacctgggcggccaggagcccacccccagcaacatccgcatggccacccacaccctcatcaccggcctggaggagtatgtgcgggagagcttcagcctggtgcaggtgcagcccggggtggacatcatccgcaccaacctggagttcctgcaggagcagttcaacagcattgctgcccacgtgctgcactgcacagattctggctttggagcccggctgctggagctgtgcaaccagggcctgtttgaatgtctggccctgaacctgcactgcctgggcggccagcagatggagctggccgctgtgatcaatggccgcatccggaggatgagcagaggagtgaaccccagcctggtgtcctggctgaccaccatgatgggcctgcggctgcaggtggtgctggagcacatgcctgtgggcccagatgccatcctgcgctacgtgagaagagtgggggaccccccccagcccctgcctgaggagcccatggaggtgcagggcgctgagcgggccagccctgagccccagcgggagaatgccagccctgcccctggcaccacagctgaggaggccatgagccggggccccccaccagcccctgagggcggcagcagagatgagcaggatggagccagcgctgagacagagccctgggccgctgctgtgcccccagagtgggtgcccatcatccagcaggacatccagagccagaggaaggtgaagccccagccccccctgagtgatgcctacctgagcggcatgcctgccaagaggaggaagctgcggagtgacatccagaagaggctgcaggaggaccccaactacagcccccagcgcttccccaatgcccagagggcctttgctgatgacccctag

SEQ ID NO: 78230 - DNA, 3234 bp, Artificial Sequence
  derived and/or modified sequence
atggagcccaacgacagcaccagcaccgccgtggaggagcccgacagcttggaggttctggtgaagaccctggattcacagacacgcactttcattgttggcgcacagatgaatgtaaaggaatttaaggaacatattgccgcctcggtttccatcccttctgaaaaacagcggctcatctaccaaggtcgtgtgctccaggacgacaaaaaattgcaggagtacaatgtgggaggaaaagtcatccatctggtggagcgagctccaccccaaactcacctgccatctggggcttccagcggaaccggttccgcctcagcaacccatggaggaggtagcccccccgggacccgggggccaggagctagcgtgcatgatcggaatgctaactcctacgtgatggtggggactttcaatttgccaagtgatggctcagctgttgatgtccatattaacatggagcaggcacctattcagtcagaacctcgagtgaggctggtgatggcccaacacatgattcgggacatacaaacactgttatccagaatggagtgcagaggaggacctcagccgcagcactcccagccccctcctcagcctcccgctgtgacacccgagcctgtggctcttagcagccagacaagcgagcccgtggagtccgaggcacctcctagggagcctatggaggccgaagaggtcgaggagcgggcaccggcccagaaccccgagcttactcctgggcctgctcccgcggggcctactcccgccccggaaaccaatgccccgaaccacccctccccggctgaatatgtggaagtgctgcaggaactgcaacgtctcgagagtcgcctgcagccttttctccagcgctattatgaagttttgggggctgcagccaccacagactataacaacaatcatgaaggacgtgaggaagatcagagactgattaatctcgtgggcgagtctctccggcttttagggaatacgtttgttgctctctccgacttgaggtgcaacctggcctgcacccctccgcgtcatttgcatgtggtaagacccatgtcccattacacaacccccatggttttgcagcaggccgcgatccccatacagataaacgtcggcacaactgtgaccatgaccgggaatgggaccagaccacctcctactcccaatgcagaggcgcctcctcccggtccgggccaggcctcaagcgtcgcgccaagcagcacaaatgtggaatccagcgcagagggagccccccctccggggcccgctccaccccctgccactagccaccccagagtcatcagaatttctcaccagtccgtcgaaccagtggtgatgatgcacatgaacatccaagatagtggcacacagcctgggggtgttccctcagcgcctacaggacctctgggcccgcccgggcatggtcaaacacttggccagcaggtgcctggtttcccaactgcacccaccagagtcgtgatcgcacgccccaccccaccccaggcaaggccgtcgcatcctggcggcccaccagtctcaggcacgctgcagggcgccggtctgggtacaaacgccagtctggcacagatggtctctggacttgtcggccagctattaatgcagcctgtgttggtggcacagggaactcccggtatggctcctccacctgctcccgctaccgcctcggctagtgcggggacaaccaacactgccacaacagccggacctgctcctggaggacctgctcagccgccaccaactccacaaccttctatggcggaccttcaattcagccagctgctcggtaatctcctgggacccgctgggcccggagccggcgggagtggagttgcctctccaaccattaccgtggctatgcccggcgtgccggctttcttgcaaggcatgactgacttcttgcaagctacacagacggctccgcccccccctccccctccccctccgccaccccctgcccctgagcagcagacgatgccccctcctggctccccaagcggcggagctggctcacctggcggccttggcctggagtctctgtctcccgaattttttacgtctgtggtacaaggggtactgtcctcactcttaggtagcttgggggcacgcgccgggagctccgagtcaattgctgctttcatacagcgcctgtccggctcaagcaacatcttcgagccaggcgctgatggggctctcgggttctttggtgctttgttgtccctgctgtgtcagaacttttctatggtcgacgtggtaatgttgttgcacggtcacttccagcctcttcaaagattgcagccacaactgcgtagtttcttccatcaacactacttaggcggacaagaaccgacgccttcgaacatccgaatggccacgcacaccctgatcaccgggctcgaggaatatgtccgggagagcttttctctggtgcaggtgcagcccggggtggacataatccggaccaacctggagtttcttcaagaacagtttaatagcatagccgctcatgtgctccactgtacagattctggattcggtgcgcgcctgcttgagctgtgcaaccagggactcttcgaatgcctggcactcaacctgcactgcctgggtggtcagcaaatggagctcgccgctgtcattaacggccgaatcagacgaatgtctcgcggcgtaaatccaagcctcgtctcatggctcaccacaatgatgggactgcgtctgcaggtggtactggaacacatgccagtaggcccagacgccatactcaggtacgtgaggagggtaggggaccctccacaacccctaccagaggaaccaatggaggtgcagggggctgagagggcatctccggaaccacagcgggagaacgcaagccctgcacctggcactacagcggaagaggccatgtctcggggccccccaccagcaccggaggggggcagtcgggacgagcaggacggcgccagtgcggagacagagccttgggctgccgcagtgccaccagagtgggtccccattatccaacaagatattcagtcccagcgcaaggtgaagcctcagccaccgttgtccgatgcatatttgtcaggcatgcctgccaaacgcagaaagctaaggtccgacatacagaagagactgcaggaagatccaaattacagccctcagaggttccctaacgcgcagcgcgcattcgctgacgacccatag

SEQ ID NO: 78231 - DNA, 738 bp, Artificial Sequence
  derived and/or modified sequence
cccccccggcacctgcacgtggtgcggcccatgagccactacaccacaccgatggtgctgcagcaggcagcaatcccaattcagatcaacgtgggcaccacagtaacaatgactggcccggctccccccccagctacctcccacccacgggtgatccggatctctcatcagtccgtggaaccagtcgtaatgatgcacatgaacattcaggattccggcacgcagcctggaggcgtaccatccgcccccacgggccctcttggaccacccgggcatgggcagaccctgggacagcaggtgcctggctttccaactgcacccacccgtgtcgtcattgctcggcccaccccaccgcaagctaggccatctcatccggggggccctccagtcagcggtactcttcagggagccggactgggaacaaacgccagtctggcacagatggtcagcgggttggtgggccagctcctcatgcaacccgtgcttgtcgctcaaggcacacctggtatggccccacctcccgccccggccaccgccagcgccagtgcagggacaacaaataccgctaccaccgccggccctgccccgggcggccctgcccaaccaccacccaccccacagccttctatggccgacctgcagttcagccagctgcttgggaatctgcttggccctgctggccccggagccggcggttctggtgtggcctcaccaacaattactgtggcgatgccatag

SEQ ID NO: 78232 - DNA, 717 bp, Artificial Sequence
  derived and/or modified sequence
agcagcgccgagggcgcccccccccccggccccgcccccccccccgctactagccatccacgagtgatccgaatctcccaccagagcgtggagcccgtggtgatgatgcacatgaacatacaaggccccctgagtctgtcaccctgtcccgattctggcacccagccagggggggttccgtccgctcccaccggcccgctcggcccacctggacacggccagactcttggtcagcaggtaccaggattccctacagccccaaccagggtggtgatcgcaagaccaactcccccacaggccagaccaagccacccagggggtccgccagtgagcggcacactgcaaggcgctggactcggcaccaatgcgagtttagctcagatggtgagcggcctggtaggccagctgctgatgcaacccgttctcgtcgcacagggcactcctggcatggcacctccacctgccccagcgacggcctccgccagtgcaggaactaccaacacagctacaactgccggcccagcacccggaggcccggcacaacctcctcctaccccccagccaagcatggccgacctccaattcagtcagcttttggggaacctgcttgggccagccggcccaggagcagggggcccaggagtagcctcaccaactatcacagtcgctatgccgggcgtcccagccttcttgcaggggatgaccgattttttgtag

SEQ ID NO: 78233 - DNA, 717 bp, Artificial Sequence
  derived and/or modified sequence
agcagcgccgagggcgcccccccccccggccccgcccccccccccgccacttctcacccaagagtgattagaatatcccatcagtcagtcgagccagtagtgatgatgcatatgaacattcaaggacctctcagtctgtccccttgcccagattctggcacgcagcctggaggcgtgccgagtgcacctacaggacctctgggccccccagggcacggccagacgctggggcagcaggtaccgggctttcctacagcaccaacaagagttgttatcgctagaccaactcctcctcaagcaagacccagccacccagggggccctccagtctctggaactctccagggggccggtctcggcaccaatgccagtctcgcgcagatggtttccggcctggtgggacaattgttaatgcagcctgttctggtcgcccaaggcactcctggcatggcgccacccccagcccctgccaccgccagcgcctcggctggtaccactaacaccgcgactaccgccggccctgcccccggagggcctgcgcaaccgccccccacccctcagcccagcatggcagacctgcaattcagtcagttgttgggcaatctcctcggcccggcaggacccggcgcaggtgggagtggcgttgcctctccaaccataacagtcgctatgcccggtgtccccgctttcctgcaaggtatgactgactttctgtag

SEQ ID NO: 78234 - DNA, 717 bp, Artificial Sequence
  derived and/or modified sequence
agcagcgccgagggcgcccccccccccggccccgcccccccccccgctacttctcacccacgggtgatccggattagtcaccagtccgtggaacccgtggtcatgatgcacatgaacattcagggaccacttagtctgtccccttgtcctgacagtggaactcaacccgggggagtcccctccgctcctactgggcccctgggacctcctggtcacggccaaactctggggcagcaggtgcctggatttcctaccgcaccaacccgggtcgtcatagccaggccaacccctcctcaggccagaccatcccatcccggcgggcccccggtctcaggtaccctgcagggcgctggccttggcaccaacgcttcactagcccagatggtctctggtctcgtgggtcagttgttgatgcagcccgtactcgtcgcccagggcacaccagggatggcaccccctcctgctccagccactgcgtcagcgtctgcggggactaccaacacagctactacggctggccccgccccaggaggtccagcccagccgccaccgacgccacaaccttcaatggcggatttgcagtttagccaactcctggggaacttgctagggcccgcagggcccggcgccggcgggccaggcgtggcatcacccactatcacagttgctatgccaggagtccccgccttcctgcagggaatgactgattttttgtag

SEQ ID NO: 78235 - DNA, 717 bp, Artificial Sequence
  derived and/or modified sequence
agcagcgccgagggcgcccccccccccggccccgcccccccccccgcaacaagtcacccgcgtgtgattcgtattagccaccagtccgtggagcctgtggtgatgatgcacatgaacattcagggcccactctccctcagtccctgtccggattcaggaacacagccgggaggagtcccctctgcccctaccggtcccttgggcccgcctgggcatggccaaactttggggcagcaggttccaggttttcccaccgctcctactcgtgtagtgatcgcgagacccaccccccctcaggctcggccatcccatccaggcggtccccccgtgtctggaacccttcagggggcgggattggggacaaatgcctctctggcacaaatggtcagcggcctagtggggcagctgctcatgcagcctgtgcttgtggcacagggtacccctggaatggccccaccacctgccccagccaccgctagcgccagtgcgggcactactaatacagctacaacggcaggcccagcccctggcggcccagcccagccaccccctacgccccaacccagcatggccgacttgcaattctcccagctgctgggaaacttgctggggccagctggacctggcgccggggggagcggagttgctagtccgaccatcactgttgcaatgccaggtgttccagcgtttctacaggggatgactgacttcctgtag

SEQ ID NO: 78236 - DNA, 717 bp, Artificial Sequence
  derived and/or modified sequence
agcagcgccgagggcgcccccccccccggccccgcccccccccccgccacttcccatccaagagttattaggatatctcaccaaagtgtcgagccagtggttatgatgcacatgaatatacaagggcccttgtctctcagcccatgtccagattctggaacacaaccaggcggtgtacctagcgcaccaaccgggcccctgggcccccctggacacggacagacgcttggtcagcaggtaccgggtttccccaccgcacccaccagggtggtgatagcacgtcctaccccacctcaggcccgaccaagtcacccgggaggaccgcctgtgtcagggacgctgcagggtgccggcctgggaacgaacgcttcattggcccaaatggtttcgggattggtgggccagttgcttatgcagcccgttctggtggcacagggaacccctggcatggcccccccacccgctccagccacagcaagtgcatcggctggaaccaccaatacagctactactgctggccccgcccctggaggcccagcccagccacctcccacaccgcaaccaagtatggccgatctgcaattttcacaactcctgggcaatctgctgggcccagccgggccgggagctggcggcccgggagtggcctcgccaaccattaccgtggccatgcccggggtaccggcatttctacagggtatgaccgatttcctatag

SEQ ID NO: 78237 - DNA, 738 bp, Artificial Sequence
  derived and/or modified sequence
cccccccggcacctgcacgtggtgcggcccatgagccactacaccactcccatggttttacagcaagcagccattccgatccagatcaacgtaggcacaactgtgactatgaccgggccagcaccaccacccgccacgagtcacccacgggtcatccgaatcagccatcagagtgtcgagccggtggtgatgatgcacatgaatatccaggacagtgggacccaacctggcggggtgccaagcgcccctacgggcccgttgggccctcccgggcacggccaaacgttgggtcagcaggtgcccggctttccgactgcccccactcgagtggttattgcccgaccaacaccgccccaggccaggccctctcatccgggagggcccccagtgagtggaaccctgcagggtgccggactgggtaccaacgcctccttagctcagatggtgagtggtctcgtggggcagttgcttatgcaacccgtgttagtggctcagggaacaccagggatggctcctccacccgcccccgctaccgcctctgcgagcgctggtaccacaaataccgccacaaccgcaggcccagcgccagggggacctgcccagcctccccctaccccccagccttctatggctgacctgcagttttcacagctattaggtaatcttcttggccctgccggcccaggagctggagggccgggcgtcgccagtcccaccatcactgtcgccatgccctag

SEQ ID NO: 78238 - DNA, 738 bp, Artificial Sequence
  derived and/or modified sequence
cccccccggcacctgcacgtggtgcggcccatgagccactacaccacaccaatggtgttgcagcaggccgcaatccccatccagattaacgtagggacgacagtcaccatgaccggccctgctcctccacccgctacctcgcatcccagggtgatcagaatttcacaccaatccgtggaaccggtcgtgatgatgcatatgaacatccaggactccggaacacaacccggcggggttcctagcgcaccgaccggaccattggggccgcctggacatggccagaccctcggccagcaggtccctggcttcccaacagctccaacccgtgtggttattgccagaccaacccctccacaggctcggccaagtcacccaggaggaccccccgtgtccggcaccctccagggggctgggctgggaaccaatgcttcccttgctcagatggtaagcggactggtgggccagttactgatgcagccggtgctggtggcacaaggtacgcctggtatggctccaccccccgctcctgctacagcctccgcctcggcgggcactactaataccgcgacaactgccggaccggctcccggaggcccggcgcagcctcctcccacaccacagccatcaatggccgacctccagttttcccagctgctggggaatctgctggggcctgcaggccctggggcaggaggcagcggggtagcctcaccgaccattaccgtagccatgccatag

SEQ ID NO: 78239 - DNA, 717 bp, Artificial Sequence
  derived and/or modified sequence
agcagcgccgagggcgcccccccccccggccccgcccccccccccgctactagtcacccccgcgtaattaggattagccatcagagtgttgagcctgttgtcatgatgcatatgaacatccaaggaccactgtctctctccccttgtccagactccggcacacaacctggcggtgttccttccgcccccaccggacctctcggcccaccagggcatggccagaccctggggcagcaagttccgggattcccaacggcccccactagggtcgtcatcgctcgtcccacccccccccaggccagaccctcccatccaggtggcccaccagtctccggtacattgcagggcgctggactgggtacaaatgcttccctggcccagatggtgtctgggctggttggccagctgctcatgcagccggttctcgtggcccagggtacaccgggcatggcgccccctccagctccagctacggcctcagcgtcagcaggcacaaccaacacagctaccacggccgggcctgccccggggggacctgcgcaacctccacccacgccccaaccctcaatggctgacctgcagttctcgcagcttctggggaacctgctcggcccggcagggcccggggctggcggtagtggcgttgctagcccaactataactgtggcgatgccaggagtgccggcctttctgcagggcatgacagactttctgtag

SEQ ID NO: 78240 - DNA, 738 bp, Artificial Sequence
  derived and/or modified sequence
cccccccggcacctgcacgtggtgcggcccatgagccactacaccactccaatggttctgcagcaggccgccatcccgatacagattaacgtcgggacaaccgtgacaatgacaggcccagctccccctcctgctacaagtcaccccagagtgatccggatctcccatcagtcggtggaacctgtcgttatgatgcatatgaacatccaggactccggcacccagccggggggagtgccttctgcccctacaggacctctcgggcccccaggccatgggcaaactctcggccagcaggtgcccggcttccccaccgcccccactcgcgtggtcatcgctcggcccacgccgcctcaggccagacccagccatccaggaggaccccccgtcagcggcaccctgcaaggcgctggcctaggtaccaacgcatccctggcccagatggtgtcaggactggtggggcaattgctcatgcagcccgttctcgtagcccagggcacgccaggaatggcgccacctcccgccccagctactgcctctgccagcgccggcactaccaatactgcgaccacagcagggccagcccccggggggcctgcacagcctccccctacgccacagccttcaatggccgatcttcaattcagtcagttactgggaaatctgctgggcccggccggacctggggccggcggtccaggagtggcctctcccaccattaccgttgcaatgccctag

SEQ ID NO: 78241 - DNA, 738 bp, Artificial Sequence
  derived and/or modified sequence
cccccccggcacctgcacgtggtgcggcccatgagccactacaccactcccatggtcctgcaacaagctgctatcccaatccagatcaacgtgggaaccaccgtgacaatgaccggcccggctcctcctcccgctacatcacatcctagagtgataagaatatcccaccagagcgtcgaacctgttgtcatgatgcacatgaacattcaggattccggcacccaaccaggtggggtcccctccgccccaacgggtcctttgggacccccaggccatgggcaaactctgggtcagcaggtgcctggcttccctactgcacctacgagagttgtcattgctcgacctaccccaccacaggcaagaccctctcatcccggaggacctcccgtgtccggcaccttacagggggccggtttgggcaccaacgccagcctggcgcaaatggtaagcggcctggttggacagctgctgatgcagcccgtacttgtggctcagggcactcctggcatggccccacctcccgcgccagctactgcatcagccagcgcaggaacaaccaacacagctaccaccgcaggtcccgcacctggagggcctgctcagccacccccgaccccacagccctccatggctgacttgcagtttagccaactgttaggcaacctgcttggcccagcggggccgggagctggcgggcctggagtggccagccctactatcactgtggcgatgccttag

SEQ ID NO: 78242 - DNA, 738 bp, Artificial Sequence
  derived and/or modified sequence
cccccccggcacctgcacgtggtgcggcccatgagccactacaccactcctatggtcctgcagcaagctgccatacctatccagatcaacgtcggcactactgtcacaatgactgggccagccccaccgcccgctacaagccatcctcgcgtgatccgcatcagtcaccagagcgtggaaccagttgtcatgatgcacatgaatattcaggatagcggaacgcagccaggcggagtaccctccgctcctacaggcccccttgggccgcccggccatgggcagaccttgggccagcaagtgcccggctttcctacagcccccactagggtagtgatcgcacgccccaccccaccgcaggcccgcccatcccacccgggcggacccccagtgtccgggactctccagggcgcaggcttgggtaccaacgccagccttgcacagatggtttcaggattggtgggccagctactaatgcaacctgtgctcgtggcgcagggcacgcctggtatggcgcccccacccgctcccgcaacggcctccgcgtcagccggaaccacaaatacagccactacagctggacccgccccgggcggaccggcccagcctcctccgactccacagccctccatggccgacctccaatttagccaattgctgggcaatcttctgggccctgctggacctggagcaggaggatctggagtggcttccccgactatcactgtcgcaatgccatag

SEQ ID NO: 78243 - DNA, 717 bp, Artificial Sequence
  derived and/or modified sequence
agcagcgccgagggcgcccccccccccggccccgcccccccccccgcgactagtcatcctcgcgtgatcagaattagccaccaatcagtagaaccagtcgttatgatgcatatgaacatccagggccccctgtccctctccccctgcccagatagcggaacacagcccggcggagttcccagcgcgcccaccgggcccctaggacccccaggacacgggcagaccctgggtcagcaggtgccaggatttcctaccgctcctaccagggtggtcattgctcggccaactccccctcaggctcgcccaagtcacccgggcggccccccagtgtccgggaccctccagggtgccggtctgggaactaatgcatcattagcccagatggttagcggcctggtggggcagctgctgatgcagcctgttttagtggcccagggaactccaggcatggccccacctcctgctccagccaccgcctcagccagcgccggtactaccaacaccgccacaacagctggtcctgcacccggcgggcctgcccagccacctccaaccccccagccttccatggctgacctgcagttcagtcagctgcttggcaaccttttaggtccagctggcccaggagccggtggcagtggggtggcctcaccaactattactgtcgccatgccaggagtgcccgcttttctccagggtatgaccgatttcctatag

SEQ ID NO: 78244 - DNA, 738 bp, Artificial Sequence
  derived and/or modified sequence
cccccccggcacctgcacgtggtgcggcccatgagccactacaccacccccatggtcctgcagcaggcagctattccaatccagatcaatgtaggcaccacagtcacgatgaccggacccgcaccgccccccgccaccagtcacccacgcgtcattaggatctcgcatcaatcagtggagcctgtcgtgatgatgcacatgaacatccaggactctggcacacagcccggtggcgtgccctcagctcccacagggcctctgggtccgcccgggcacggccagacgctggggcagcaggtgcccggcttccccaccgctcccacgcgcgtggttatcgccaggccaactcccccccaggcccgcccgtcccacccggggggcccgcctgtgtcaggtacactgcaaggagccggcctcggaacaaacgccagcctagctcagatggtgagcggactcgtgggccagttgctgatgcaacctgtgcttgtggcacagggaacccccgggatggccccgcctccagctcccgctacggctagcgcttcagccggtactaccaatacggctacaacagctgggccagcacccggaggtccggctcagccccctcctacgccgcaaccctcaatggctgatctccagttctctcagctactggggaatctgctgggacccgccgggcctggtgcagggggcagtggagtggcttctccaaccattactgtggcaatgccatag

SEQ ID NO: 78245 - DNA, 3234 bp, Artificial Sequence
  derived and/or modified sequence
atggagcccaacgacagcaccagcaccgccgtggaggagcccgactccctggaagtactggtcaagacattggattcccagacccggacgtttatagtgggcgctcagatgaacgtgaaagaattcaaggagcatattgccgcatcagtgtcaattccttcggaaaagcagagattgatctaccagggacgcgtgctgcaggacgacaaaaagctgcaagagtacaatgtggggggcaaagtgatacacctcgtggaaagggctcctccacagactcacctgccttctggcgcttcctcaggcacgggttcagcttctgccacacatggcggcggctcccccccaggtacccgcggccctggcgcatccgtccacgacaggaatgccaattcttatgtgatggttggaacattcaacttgccctccgacggctcagccgttgacgtgcacattaatatggagcaggctcccattcagtcggagccaagagttcgcctggttatggcccagcatatgataagagatatccagacactgctatcacggatggagtgtcggggggggcctcagcctcagcattcccagcctcctccacaaccccctgctgtgacaccagaaccggtcgctctctctagccagacgagcgagcccgtggaatccgaggctccgcccagggaacctatggaggccgaagaggtagaggagcgggccccggctcagaatccagagcttacacccggtcccgcccctgcaggaccaacgccagcccctgagaccaatgcgccaaaccatccgagtcctgccgagtatgtggaggtgctccaggagctgcagcgactcgagagtcgtctccagccatttttgcagcgctattatgaagttttgggagctgcagccacaactgactataacaataaccatgaaggacgcgaagaagaccagcgactgatcaacctggttggagagagtctgagactactgggcaatacgtttgttgccctttccgatttaaggtgtaatttggcatgtacgcctcctagacacctgcacgtggtgcgacctatgtcccactacacgacaccgatggtactccagcaggctgcaattcccatccagataaatgtgggaactactgttactatgaccggaaacggcaccagaccacctccaacccctaacgccgaggcaccgccccccggaccggggcaggcttccagtgtggcccccagttccacgaatgtggagtcttctgccgagggtgcccccccacccggaccagccccaccccccgccacaagccacccccgcgtaatcagaattagtcaccagtctgttgagcctgtggtgatgatgcatatgaatatacaggattctggcacgcagcccgggggtgtccccagtgcccctacaggtcccctaggcccaccgggccatggccagacactggggcaacaggtgcctggattcccaacagctcccacccgagtggttatagctagacctaccccacctcaggctaggccatctcaccccggagggccacccgtctctgggacacttcagggggctggcctaggaaccaacgcctccctggcacaaatggtgtcagggctcgtgggacaacttctaatgcaaccagtcctcgtcgcccaggggacccctggaatggcaccaccgcccgctccggcaacggcctcagcctctgcaggaaccacgaacaccgcaaccactgctggacctgctcctggggggccagcacaaccccctcctaccccgcagccatctatggccgatctgcaattctcacaactgctgggaaacctgctcggccctgcaggcccaggcgccggaggctccggagttgctagcccgacgatcacagtggcgatgcctggtgtgcccgcctttctgcaagggatgactgacttcctgcaggcaacccagaccgcccccccccctccacccccccccccacccccaccacccgcgcccgaacagcaaaccatgcctccaccaggaagcccatccggcggtgctggctcacctggcggtctcgggctcgagtctctgtcacccgagttttttacatctgtggtgcaaggggttctctcctcacttctgggcagcctcggagccagagcaggcagttctgagtccattgcagcttttattcagagactttcaggttcaagtaatatctttgagccgggggccgatggggccctgggtttcttcggtgctctcctcagcttgttatgtcagaacttctccatggtggacgtagtgatgttactgcacggccattttcagccacttcagagattacagccacagcttagatctttctttcatcagcattatctcggggggcaggaacctactcccagcaatattcgtatggccacccataccctgataacaggactggaagagtatgtgagagagagcttcagtttggtccaagtacagcccggcgtggatatcatccgtactaatctggagttcctccaggagcagtttaactctatcgcggcccacgttcttcattgtactgacagcggctttggtgctcgcttactcgagctgtgcaatcagggcctcttcgagtgtctggccttgaatctgcactgtctgggcggccagcaaatggaactcgccgcggttattaacggccggatccgtaggatgagccgaggcgttaatcctagcctcgtatcctggctgactaccatgatgggcttgcgtctgcaggttgtcctggaacatatgcccgttggaccggacgctatcctacggtatgtgcgacgcgtcggtgaccctccccagcctctccccgaggagccaatggaagttcaaggggccgaacgggcgtctccggagccccagcgggaaaacgcttcccccgctcccggcactacagccgaggaggcaatgagtcgaggaccaccaccagctcctgagggagggtctagagacgaacaggatggtgctagcgcagaaacagagccctgggctgctgccgtgccccccgagtgggtacccattatccaacaagatattcagagccagcgaaaggtgaaacctcagccccctttatctgatgcctatctctctggcatgcctgccaaaaggcgaaaactgcgctctgatatccagaagcggcttcaagaagacccaaactactcccctcagagatttccaaacgcacagcgagctttcgctgacgatccgtag

SEQ ID NO: 78246 - DNA, 3234 bp, Artificial Sequence
  derived and/or modified sequence
atggagcccaacgacagcaccagcaccgccgtggaggagcccgactccttggaagttctggtgaagactctcgactcacaaacaagaactttcatcgtgggagcccagatgaatgtgaaggagtttaaggaacacattgccgcctccgtatcgataccgtcagaaaaacagcggctgatataccagggccgggtcctgcaggacgacaagaaactacaggaatacaatgtcggaggcaaagtcatacacctcgttgagagggcccctccgcagacccatcttccctcgggggcgagctctgggactgggagcgcctctgcaacacatggaggtggttctccaccaggcactaggggacctggggccagcgtccacgatcggaatgcgaattcctacgtcatggtcgggacattcaatttaccttccgatgggtccgccgtcgatgtgcatatcaatatggagcaagccccaatacaatccgagccaagagtgagactggtgatggctcagcatatgattcgggacatccagactctactgtcacgcatggagtgtcgtggaggaccacagccgcagcatagccagcctccgcctcaaccccctgcggtgacacctgagccggtcgcactatcttcccagacgtctgaaccggtggagagcgaggcccctcccagggaacccatggaagcagaggaggttgaagaaagggcgccggcccagaatccagagctaactccagggcctgccccggccggacccacaccagctcctgagacaaatgctcccaaccatccttcacccgccgagtacgtggaagtgttgcaagagctccagcggctggagtccagattacaacccttccttcaacgctactatgaggtcctcggcgccgcggcaacgaccgactataacaataaccacgagggccgtgaagaggaccagcgtctgattaatttggtgggtgaatctcttagactgttgggcaatacattcgtagctctctcggatctcagatgcaatctcgcttgcactccacctagacatctgcatgtggtgagacccatgtcacactacaccacacctatggtgcttcagcaggccgcgatacccatccagataaatgttgggacaacggtgacaatgaccggtaatggaaccagacctcctcccactcccaatgcagaagcgcccccccccggcccaggacaggcatcttcagtggctccttccagcacaaatgtggaatcctcggctgaaggcgcacctccccccggccccgccccaccacctgcgaccagccatccacgggttattcgcatctcccatcagtccgtggaacccgtggttatgatgcacatgaacatacaggacagtggcacccagccgggaggggtgccttccgcccctaccggcccactggggccgcccgggcacggacagacccttggacaacaagtgcccggctttccgacagctcctacgcgtgtagtgatcgcccgtcccacaccacctcaggctagaccaagccaccccggcggcccaccagtatcaggcactcttcagggcgcaggtctcggaaccaacgcctcccttgctcagatggtcagcggtttggtcggccagctgctaatgcagccagtgctggttgcccagggtactcccggaatggcaccaccaccggctccagcaactgcctccgcctccgccggtactacgaataccgctaccacggccggccctgcccctggaggaccagctcagccccctcctacccctcagccatccatggccgacctccagttttctcagcttcttggtaatctcttggggcctgctggccctggcgctggaggtcctggcgtggcctcacctacaattactgtcgccatgcccggcgtcccagcttttctgcagggcatgacagacttcctccaggccacccaaaccgcccctccacctcccccccctccaccgccgcctccaccggcgcccgagcagcagacaatgcctccacccggctcccccagtgggggcgccggatccccgggaggcttgggtttagagagcctgagtcctgagttttttacgagcgtcgttcagggagtgctgtcaagcctgctgggctctttgggggccagggccgggtcctccgaatcaatcgcggcctttatacagagactttcaggctcatccaatatcttcgagccaggggctgatggcgcattggggttcttcggcgctctgctgtcgctgttgtgtcagaattttagtatggtggatgtggttatgctcctccacggccacttccagccactgcaaagactccagcctcagctcaggtctttcttccatcagcattatctcggcgggcaggagccaactccgtctaacatcaggatggcaacccatacactcataacaggtcttgaggagtacgtgcgggagtccttctcactggttcaggttcagcctggcgtggatatcataagaacaaatctggagttcctacaggagcagttcaacagtattgcagcccatgtgcttcactgcactgatagcggatttggcgccagactgctggaactgtgcaatcaggggctgttcgagtgccttgcactgaacctccactgcctgggcggccaacaaatggaactggccgctgtgatcaatggcagaatccgcaggatgagcagaggagtcaacccgagccttgtcagttggttgaccactatgatgggtctcaggctccaggtggtgctggaacacatgccagtgggtcccgatgctatcttgcggtacgttcgacgagtgggcgaccccccacagcccctgcctgaagagccaatggaggtgcagggtgccgagcgagcctcgccagagccccagcgggaaaatgccagcccagcccctggaaccaccgccgaggaggcaatgagccgtgggcctccacctgccccagaaggtggatcacgtgacgagcaggacggcgcaagtgccgagactgaaccttgggctgccgccgttccacctgagtgggtgcccatcattcagcaagatatccagagtcagagaaaggtgaagcctcagcctcctcttagtgacgcttatctgtctgggatgcctgctaaacgcagaaaactccgttcggatatccagaaacgcttgcaagaagatcccaactactctccacagcgctttcctaatgcacagcgggcctttgcagatgacccctag

SEQ ID NO: 78247 - DNA, 3234 bp, Artificial Sequence
  derived and/or modified sequence
atggagcccaacgacagcaccagcaccgccgtggaggagcccgactctttagaagtactcgtgaagacactggacagtcagacaaggacgttcatcgtcggcgctcagatgaatgtcaaggaattcaaggaacatatcgccgcatccgtctctattcccagtgaaaagcagaggctgatctatcagggtagagtcctgcaggacgacaaaaagctccaggagtacaatgtcggcgggaaagtaattcacctggttgagagggctccccctcaaacccaccttccaagcggtgcctcctccggcaccggctcagctagcgcgactcatggcggtgggtccccgcccgggacacgcgggcccggcgcaagcgttcatgaccggaacgccaattcatacgtcatggtaggcacatttaaccttccttcagatggctccgccgtcgatgtccatataaacatggagcaggcgcccatccagtccgagcctagagttagactggtgatggcgcaacacatgatccgggacatccagaccctcctaagccggatggagtgtcgggggggcccacagccgcagcactcccagccccccccacagcctccagctgtgactcctgaaccagtggcgctgagctcacagacatcagaacccgtcgaaagtgaagccccccccagagaacctatggaggctgaggaggtggaggagcgcgccccggcacagaatcctgagctcacacccggcccggctcctgcggggccgaccccagctcctgagaccaacgctcccaaccacccctctccggcggagtatgtggaggtgctgcaagagcttcagagacttgaatcccggctgcaaccatttctgcagcgatattatgaggttttgggcgccgccgcaaccacagactataacaacaaccacgagggtcgcgaggaggaccagagactgataaatttggtgggagagtctctgcgacttctggggaatacttttgtagctctgtccgatctcagatgcaatctagcctgtacacccccccggcacctacatgtagtcaggcccatgtcccattataccacgcctatggtgcttcagcaggccgccattccgatccaaatcaatgtgggcactactgtcacaatgaccggaaacggcacgcgccctcccccgaccccaaatgctgaggcaccccctcctggccccggccaggcttcctccgtggctccctcttcaaccaatgttgagtcaagcgccgaaggagccccaccccctggcccggcgccccctcccgcaacatctcaccctcgtgtcatcagaattagccaccagagcgtggagcctgtggtgatgatgcacatgaacatccaggactccggaacgcaacccggcggggtgccgagtgcaccaactgggccgctcggtccacccggccacggacagactctaggccagcaggtgcctggcttccctaccgcccctacgagggtggtgatagctcgccctaccccaccccaggcacgcccctcccaccccggcggacccccggtgtccgggacactgcaaggtgcgggcttaggaaccaacgcctcactggcacaaatggtcagcggtctggtgggacagttgctgatgcaacctgtgctcgttgcccaggggacccccggcatggctccccctccggcccccgccaccgccagcgcctccgctggaactaccaataccgccaccacagctggccctgcgccaggcggcccagctcagcctccgcctacacctcagccctccatggctgaccttcagttttcacaattgcttggcaatttactgggccccgcgggtcccggggctgggggatcaggggttgccagtcccacgattaccgtcgcgatgcctggagtgcctgcatttctccaagggatgacagatttcttgcaggccacacagacggctccacctccacctcctcctccccctccaccgcccccagcccccgagcagcagaccatgcctccccctggaagcccttctggaggggctgggtctccaggcggactggggttagaaagtctgtcccccgagtttttcacgtctgtggtacagggagttctgagcagcctgttggggtccctgggagccagagccggatcttccgagtccattgcggccttcattcagcgcctgagcgggagctccaacatattcgagcccggggccgacggcgccttggggtttttcggggcccttctgtccctgttgtgccaaaatttctccatggtcgacgtagtgatgctgctgcacggccacttccagccactgcaaagattgcagccacagctgcgaagctttttccatcagcattatttaggcgggcaggagcccacaccaagcaacattcgaatggcgacccacaccctcatcaccgggcttgaggaatacgtccgggagtccttcagtctggtgcaggtgcaacctggcgtggatatcatacgcactaatctggagtttttgcaggagcagttcaatagtattgctgcccatgtgctgcactgcactgacagcggctttggagctagattgctggagctctgcaatcaaggactctttgaatgcctcgccctcaatctccattgcctcgggggccagcagatggagctggctgcagtgattaatggtaggatcaggcgcatgtcacgaggtgtaaaccctagtttagtgagctggctaacaaccatgatggggctgcgcctgcaagtggtgctcgaacatatgccggtaggtccggatgcaattctgagatacgtgagacgcgttggggacccaccccagcctttaccagaagaacctatggaggtccagggtgctgagagagcctctcccgagccacagagggaaaacgcctcaccagctcctgggaccacggccgaggaagccatgtcccggggccccccccccgcaccggagggcggctctagggatgagcaagacggggccagtgccgaaacagagccgtgggccgcagccgtgcctcctgagtgggtcccaattatccagcaggacattcagtcgcagcgtaaagtaaaaccgcagccccctttgagcgacgcgtacctcagcgggatgcccgctaagagaaggaaactgagatcggatatccaaaaaagactacaggaagaccccaattattcgccgcagcgatttcctaatgcacaacgggccttcgctgacgatccttag

SEQ ID NO: 78248 - DNA, 3234 bp, Artificial Sequence
  derived and/or modified sequence
atggagcccaacgacagcaccagcaccgccgtggaggagcccgactccctcgaggtactggtgaagactttagacagccagacccgcaccttcatcgtcggcgcacaaatgaacgttaaggagtttaaagagcatatcgcagcatccgtctcgattcctagtgaaaagcagagactaatttaccaaggccgggtgctgcaggacgacaagaaactccaggagtacaatgtgggcggaaaggtcatccaccttgtggagcgagcaccacctcagactcacctgccttctggcgccagctcaggtaccggaagtgcatctgccactcacggcgggggcagtcctcctgggacacgcggacctggcgcttctgtgcacgatcggaacgccaactcatatgtaatggtgggcacatttaatctccccagtgacggctccgccgtggatgttcacattaatatggagcaagctcccatccagtctgaaccaagggtgagactcgttatggcccagcatatgatacgggatattcagaccctgctgagtaggatggagtgtagaggaggaccacagccacaacactcccagcctccaccacagccacccgcagtgacacctgagccagtcgcactgtccagccagaccagtgagccagtggaaagtgaggcacccccacgagagccaatggaagctgaagaagtcgaggaacgcgcacctgcacagaacccagagttgacgccaggacccgcccccgcgggtcctacacctgctccggagactaatgcgcccaaccaccctagccccgctgaatacgtcgaggtcttacaggagctccaacggctggaatccaggctgcagccgtttctacagcggtactatgaagtcctcggagccgcagccacaaccgattacaacaacaatcatgaaggtcgcgaggaggatcaacgcctgatcaacctagtaggcgagagcctccgcctcctaggtaatacttttgtggctttgtccgaccttcgatgtaatttggcatgcacgccgcctagacacctccatgttgtaaggcctatgtcacattacaccactcccatggtgctccaacaggcagctatcccgattcaaattaacgtggggacaaccgtcaccatgactggtaatggcacaagacctccaccaacacctaatgctgaggcccctcccccgggcccaggtcaggcctcaagtgtggccccaagttcaacgaacgttgaaagcagcgcagagggtgccccccctccaggcccggcccccccacccgccacctctcatcccagggtgatccgcatcagtcatcaatccgtggagcccgttgtgatgatgcacatgaacattcaggattccggaacccagccaggaggggtgccaagcgccccgactggcccactgggcccccccggacacggccaaactctcgggcagcaggtaccaggttttcctaccgcgccgactagagtggtgatagccagacccacccccccccaggctcggccatcacatccagggggccctccggtgtcgggcacccttcaaggcgcagggctgggcacaaacgcaagcctggctcagatggtgtccggactggttggacaattgctaatgcagccagtgctggtggctcaaggcactccgggcatggcccctcctccagcaccagccacagcatcagctagcgcaggaacgacaaatacagcgacaacggccgggccagcgccagggggccccgcccagcctcctccaactccgcaacccagcatggccgacttacagtttagtcagttgcttggaaacctccttgggcctgcgggacccggcgccggtggccccggggtggcatcccctactattacagtggctatgccgggcgtgccagctttcttgcagggaatgactgacttcctgcaggctacccagacagccccacctcctccaccaccacctccaccccctccacccgcccccgagcagcaaaccatgcccccccctgggtcccctagcggtggggccgggtccccaggaggactgggccttgaaagcctctctcctgaattctttacttcagttgttcagggagtactttcttccctgctcggctcactcggggcccgggcaggtagcagcgagtcaattgcggcattcattcagcggctatccggctcctcaaacatcttcgagccaggagctgacggcgctttaggctttttcggagcactactttccctgttgtgccaaaacttcagtatggtagatgtggtgatgctcctccatggccatttccagccactgcagcgtttacaaccgcagctgcgcagcttcttccatcagcactatctgggcggccaagagccaactccgtccaacattaggatggcaacacacactctaatcacgggactggaagagtatgtccgggagtcttttagtcttgtgcaagttcagccaggggttgacatcatacgcaccaatttggagttccttcaagagcagtttaatagcatcgctgcccacgtcctccattgtactgatagcggtttcggcgctcgcctgctggaactctgtaatcagggactgttcgaatgcctggctttgaatttgcactgtcttgggggccagcagatggagctggccgctgtaatcaacgggagaattcggagaatgtcaaggggagtgaatccaagcctggtgagttggttgactactatgatgggactcaggctgcaggtggtgctggaacatatgcccgtcggcccggatgccattctgagatacgtgcgcagggttggtgatccacctcagcctctcccagaagaaccaatggaagtgcagggagccgagcgcgcttcacctgaacctcagcgcgaaaacgcctcacccgctcctggaaccaccgcagaggaagccatgtcaagaggccctccacccgccccggagggcgggagccgcgatgaacaggacggtgcttctgcagagaccgagccttgggcagctgctgtgcccccggagtgggttcccatcattcagcaggatatccagagccagagaaaggtgaaaccacagccccccttgagcgacgcctatctgtcaggcatgccagccaaaaggcggaagttgaggtctgacattcagaagcgtctccaggaggaccctaattattccccgcaacgattcccgaatgcccaaagggcgttcgctgatgacccatag

SEQ ID NO: 78249 - DNA, 3234 bp, Artificial Sequence
  derived and/or modified sequence
atggagcccaacgacagcaccagcaccgccgtggaggagcccgactctctcgaagtactcgtgaagactctggatagccagactagaaccttcattgtgggagcccagatgaatgtgaaggaattcaaggaacatatcgccgcttccgtatcaattccctctgaaaagcaaagattgatttaccaggggcgcgttctgcaggacgacaagaagttacaggagtataatgtgggaggcaaggttatacatctggtggagcgcgctcctccgcagacccatctcccatccggtgctagtagtggcacaggctccgcctccgcaacccacggaggtggaagcccccctggaacaaggggcccgggggccagcgttcacgaccggaacgctaactcctacgtgatggtgggcacctttaatctgccaagtgatgggtccgccgtcgacgtccacataaatatggagcaagcccctattcagagcgagccgcgcgtacggttggtaatggcacagcacatgataagggacatacagaccttactcagccgaatggaatgccggggcggcccacaaccacaacattctcagccccctccccagccccccgctgtcacacctgagccagttgccctgtcaagtcagacatcggaaccggtcgaaagtgaagcccctcccagggaacccatggaggcggaggaggtggaagagcgcgctccagctcaaaaccctgagctgacaccaggccctgctccagctggccctacacctgcgccggaaacgaatgcccctaatcacccttcaccagccgagtacgttgaagtgcttcaggagctgcagagactagagtcaaggctacagccgtttctccagagatattatgaggtgctaggtgcagccgcaacaacagactataataacaaccatgagggacgcgaagaagatcaaaggctaattaaccttgtcggggagagcctgcgcctcctaggaaacacatttgtggccctgtctgatcttaggtgcaatctcgcttgtacccctcctcgtcacctgcatgtggtgagaccgatgagccattataccacaccaatggttctccagcaagccgctattcccatccagatcaacgtagggaccactgtgacgatgactggtaatgggacaaggcccccacctaccccaaacgcggaggcccctccacccggacctggccaggcgtcttccgtggccccttcgagcaccaacgtcgagtcaagtgcagagggggctcccccaccagggcccgctcccccgcctgccacgtcccatcctagggttattcgcatatcacatcaatcggttgagcccgtggtgatgatgcatatgaatatacaggattcaggtactcaacctggaggtgtgccaagtgcccccaccggacccctcggtcctcccggacacggacagacgctgggacagcaggtacccggctttccgacagcacctacgagggtggtgatcgctaggcccacacctccccaagcccggccctcgcacccaggtggcccccccgtctcaggcacactacaaggagctggactgggcacgaacgcttctctcgcccaaatggtatctgggttggttgggcagctgctgatgcagcccgtactcgtggcccagggaactcctggcatggctccgcccccggcgccggccactgccagcgcctctgcaggcacaacaaacactgcaaccacagctggcccagcacctggcgggccagcccagcccccacctacgccccagccatctatggctgatctccagttcagccagctccttggaaatctcctgggacccgccgggcccggcgctggaggtccgggcgtcgcctcgccaaccattacagtggctatgccaggcgtgccggccttcctacaggggatgactgatttcctccaagccacgcagactgcccccccgccgcccccccccccaccaccacccccacctgcccctgaacagcagactatgccaccccctggttcaccgtctgggggggcaggctctcccggagggcttggccttgaatcactttcgcctgagttttttacgtctgtcgtgcagggcgttctgagttctctcctgggatcacttggagctcgcgctggttctagtgagtcaatagccgccttcatccaaagattgtccggctccagtaacatcttcgagcctggggcagacggagcgctggggttcttcggagctcttctgtcactgctgtgccagaatttttcaatggtggatgtggttatgttgctgcacgggcatttccagccccttcagcgcctgcaaccacagctccgatccttcttccatcagcactacctcggcggtcaggaacctacaccttctaacatacgaatggccacccatactctgatcaccgggttagaagaatacgtcagggagagtttttcccttgtgcaggtccaaccaggggtggatattatacgcactaatcttgagtttctgcaggaacagttcaattcaattgcggcacatgtgctgcactgcacagactcaggcttcggagcacggctgttggagttgtgtaatcagggcctgtttgagtgcctggcactcaatttacactgcctaggcggccagcaaatggaattagccgctgtaatcaatggacgcattcgacgcatgagtcggggagtcaaccctagcctcgtatcctggcttactactatgatgggccttcgactgcaggtcgttttggaacacatgcccgtcgggccagacgctattctgaggtatgtgcggcgagttggagacccaccccagcccctgcccgaagagccaatggaggtacagggcgctgaacgcgcaagcccagagcctcagagggaaaacgcctcaccagcacccggaaccaccgccgaggaggccatgagccgtggacctccacccgcccccgaagggggttccagggacgagcaggatggtgcctctgctgaaactgagccctgggccgccgcggtgccaccagagtgggtgccgatcatccagcaagacattcagtcccagaggaaggtcaaacctcaaccacctctctccgatgcatatctatccggaatgccagccaagaggcggaaactcaggtccgacatccagaagcgtctccaggaggaccccaattactctccccagagatttccaaacgctcagcgcgcctttgcagatgatccatag

SEQ ID NO: 78250 - DNA, 3234 bp, Artificial Sequence
  derived and/or modified sequence
atggagcccaacgacagcaccagcaccgccgtggaggagcccgactctctcgaggtgcttgtgaaaacattggattcacaaacacgcacttttattgtcggagcacagatgaacgtcaaagagtttaaggagcatattgccgccagcgtctccatacccagtgaaaaacaaaggctaatttaccagggccgcgtcctccaggacgacaaaaagctccaggagtacaacgtgggcggaaaggtcattcatttggtggaacgggcaccgccccaaacccatctgccctcaggagctagctcgggtaccgggagcgccagcgcaacccacggaggcggatcccctcctggcactaggggtccgggggctagtgtacatgacagaaatgccaattcctacgtcatggtgggcaccttcaatctgcctagcgatggttccgcagtggacgtccatatcaacatggaacaagcacccatacagtcagagccccgggtcaggttagtgatggcccagcacatgatcagagatatccagactcttctttcgcggatggagtgccgcgggggcccccaaccccagcacagccagccccccccccaaccccctgctgtgacacctgagccagtggccctgagttcacagaccagcgagcccgtcgaaagcgaagcccctccaagagaaccaatggaggccgaagaggtggaggaaagggcgccagcacagaatccagagctcacccccggaccagcccctgcaggcccaacaccggctcccgagaccaatgcacccaaccaccccagcccagccgagtacgtcgaggttttacaggagctgcagaggttggagtcacggctccagccatttctgcagcgctactatgaggttctgggtgccgctgcaactactgactacaataacaaccacgagggaagagaagaggatcagaggctgattaatcttgtgggcgagtcactgcggctgctgggaaatacatttgtcgctctgagcgacctgcgttgcaacttggcttgcacgccacctaggcacttacacgtggtgcggcccatgtcccattacacaaccccaatggtcctccagcaggctgcaatccccatccagatcaacgtcggcacaacagttaccatgacaggaaacggtaccagacctccacccacacccaacgccgaagctcctccaccaggacccggacaggctagtagtgtcgccccctcctcaacaaacgtggaaagcagtgctgagggagcaccgccacccggacctgcccccccccctgcaacttctcaccccagagtgattcgaatttcccatcagtcagtcgaaccagttgtgatgatgcacatgaatattcaagactcgggaacacagcctgggggagtacccagtgcccccacaggacccctgggcccgcctgggcacggtcagacactggggcagcaagttcccggttttcctactgcacctacacgcgtggtcatcgctagacccacaccgccgcaggcaagacctagccacccgggcggcccccccgtgagtggaacgcttcagggggccggactgggcactaacgcttccttggctcaaatggtcagtggtctcgtcgggcaactcctcatgcagccagtcctcgtggcacaaggtactccaggtatggctcctcccccggccccagcaaccgccagcgcctccgctggcacaaccaatacagccacaacagctggaccagctcctggaggacccgcacagcccccacctaccccccagccgagtatggccgacttacagttctcgcagctcctcggtaatttactgggccctgccggcccgggcgccggcgggtctggcgtggcatctccgaccattaccgtagccatgcctggcgtgcccgccttcttacagggaatgacagatttcctgcaggccacccagacagcaccccccccaccaccccctcccccacccccacccccggcccccgagcaacagaccatgcctcctccgggtagcccttcgggcggagccggttcacccgggggcctggggcttgagagcctctccccagaattcttcacatcagtggtgcaaggggtcttgtccagtctgttgggaagcttaggggcccgcgccggcagttctgagagcatagccgctttcatccaaagactctcgggctcgtccaacatcttcgagcccggggcggatggggctcttgggttttttggcgcgttgctgtcgcttttatgtcagaatttctcaatggtggacgtggtaatgctgctgcatggtcacttccaacctctccagaggctccagcctcaactgaggtccttctttcaccagcactacttaggcggccaggagcctactcctagcaatatccggatggctacacacaccctgattacaggcctagaggaatacgtgcgcgagagtttctcattagtgcaggtgcagcccggagttgatattataagaacgaaccttgagtttttgcaggagcaattcaacagtattgccgctcatgttttacactgcacagacagcggatttggcgcccggctcctagaactgtgcaaccaaggcctattcgagtgtctggctctgaaccttcactgtttgggcgggcagcagatggagctggccgcagtgattaatggtaggataagacggatgagtaggggtgtgaacccatcgctggtgtcttggttgaccactatgatgggcctgcggctgcaggtggtgttggaacacatgccggttgggccggatgcgatactccggtacgtgagaagggtgggcgaccctccgcagcccctgccagaggaaccgatggaggtgcagggagccgaacgcgccagccctgagccccagagagagaatgccagccccgcccccgggaccaccgccgaagaggccatgtctcggggacctcctccagctcccgagggcgggtcacgggatgaacaagacggtgccagcgcggaaaccgagccatgggccgccgccgtgccgcctgagtgggtgcctattatacagcaggatatccagagtcagaggaaggtgaagccccagcctcctttgtcagacgcttatctgtcaggaatgcccgcaaagcgtcgtaagctccgcagcgacatacaaaaaagactgcaggaagatccaaactactccccgcagcgttttcctaacgcacaaagagcgtttgctgatgatccctag

SEQ ID NO: 78251 - DNA, 3234 bp, Artificial Sequence
  derived and/or modified sequence
atggagccaaacgactccaccagcacagccgtggaggaacccgacagcctcgaggtgctggtgaagaccctggacagccagactcgtaccttcatcgtaggcgcacagatgaacgtgaaggaattcaaagaacacattgcagcctctgtgagcatccccagtgagaagcagagactgatctaccagggccgtgtgctgcaagacgacaagaaactgcaggaatataatgtaggcggaaaagtgatccacctcgtagaacgcgcaccgccacaaacccatttgcccagcggcgcatccagtggaaccggctcagccagcgccactcacgggggtgggtcaccgccaggaacccgcggtcccggagcttccgtacatgacaggaacgctaattcctatgtgatggtcggaaccttcaatctgccaagcgacgggtctgcagtggatgtgcacattaacatggagcaggctcctattcagagcgagccgagagtgaggttggtgatggcacaacacatgatccgcgacatccaaaccctccttagtcggatggagtgccgaggtgggcctcagccacaacatagtcagccaccccctcaaccccctgctgtaacaccggaacccgtagctcttagctcccaaacctcagagcctgtggagagtgaagcccctcccagagagcccatggaggccgaggaggtggaagaacgggctcccgctcagaacccagagttgacgcctgggccagctccagcaggtcctacaccagccccagagacaaatgctcctaatcatccttcccccgctgaatatgtcgaggttcttcaggaactccagcgtttagagtctagactacagccattcctacagcgctactatgaggtgttaggagccgctgcgacaacagactacaataacaatcatgaaggacgggaggaagaccaacgcttaatcaaccttgtgggagaatccctgagattgctgggtaacacattcgtggctctgagcgatctccgatgtaacctcgcctgtactccacctcgccacctgcatgtggtgagacccatgtcccactacactacccccatggtacttcagcaggctgcgatcccaatccagatcaacgttggtacaacagtgaccatgaccggaaatggcactaggccaccaccaacacccaatgcggaggcccctccccctggccctgggcaagcatcttccgtggccccttctagcacaaatgtggaaagctccgcagagggtgcaccaccccctggtcctgcgcctcctccagctacaagccacccaagagtcattcgaatcagccaccagagcgttgagccagtagtgatgatgcacatgaatatccaggactcaggcacacagccaggaggcgtgccttccgccccaactgggcctctgggcccacccggacatgggcaaactctcggccagcaggtgcctggattccctacggcacccactcgggtggtaattgcacggccaacacctcctcaggcccgtccctctcacccaggcggacctccggtgtccggcacgctgcaaggcgctggcctggggaccaatgcctcactagctcaaatggtgtctggcctggttggccagcttctgatgcaacccgtgttggtcgctcaggggaccccaggaatggccccaccgccagcccctgccactgcgtccgcatcagccggaaccacaaacacggcaactacagctggccctgcgcctgggggacctgcccagcccccacccactcctcagccctccatggctgatcttcagttctcccaactgctgggcaacctgctcggcccagcaggacctggcgcaggagggtcaggagttgcctcacccaccatcacagtggctatgcctggcgttccggcattcttacaaggtatgacggatttcctgcaggccacccagacagctcctccgccacctcctcctccaccccctcctccccctgctcctgagcagcagaccatgcccccaccagggtccccttcggggggtgccggatccccaggaggacttggtcttgaatctctgtctcccgagttcttcacatcagttgtgcagggcgtattgagcagtcttctcggatcattgggcgctcgagccggaagctctgaaagtattgccgcttttatccagagactttccggaagctcaaatatttttgagcctggggcagatggggctctcggcttctttggagcattgctgagtcttctatgccagaacttttccatggtagatgtagtcatgctgctgcatggacacttccaaccccttcagcggctgcagccgcagctgcgcagttttttccaccagcactacttgggcggacaagaacccaccccgagcaacatccgcatggcgacacataccctgatcacgggtctcgaggaatacgtgagagagagtttttccctggtacaggttcaacccggtgtggatataatacgcaccaacttagagtttctgcaggaacaatttaactcaatagctgcgcacgttttacactgtacagattccggtttcggggctcgattgttggagctttgtaaccagggactctttgagtgtctggctctcaaccttcattgtctggggggtcagcaaatggagttagctgccgttatcaacggccgtatcagacgcatgtctcgcggagttaatccttccctagtttcctggctcacaaccatgatgggcctacggctccaggtggtgctcgagcatatgcccgtcggccctgacgccattttgcgctatgttaggcgagtaggagaccctccccagcctctccccgaggagccgatggaagtgcaaggcgctgaacgcgctagtccggaaccccaacgtgaaaatgcctccccagctcctggaacaacggctgaggaggcaatgagtagggggcctccaccagcgcctgagggaggcagtcgggacgagcaagatggggcatctgcagagacggagccttgggcagccgcagtgcccccagaatgggtgccgatcatacagcaggatatccagagccagaggaaggtgaagccacagccccctctgagcgacgcttacctgagtggaatgccggctaaaagacggaagctccgcagcgatatccaaaagcggttgcaggaggaccccaactacagtccccagaggttccctaacgctcaaagagcctttgctgatgatccatag

SEQ ID NO: 78252 - DNA, 738 bp, Artificial Sequence
  derived and/or modified sequence
cctccacggcacctacatgttgtgcgtccaatgtcgcactatactacacctatggtattgcaacaggccgcaatccctatccagattaacgttggcactaccgtgacgatgacagggcctgcgcctccaccagccaccagccatccgagagtcatcagaatatcgcatcaaagcgttgaacccgttgtgatgatgcacatgaacattcaggacagtgggacacaaccaggcggagtaccttccgcccctactgggccactggggcctccaggccatggccagactcttggccagcaggttccaggtttccctaccgctccaaccagggtcgtgatcgctcgacccacacctccccaggccagaccctcccacccaggtggccctcctgtctccgggacacttcagggcgcagggctgggaacgaacgcatcgctggctcagatggtgtccggcctagttggccagcttctgatgcaacctgtattagttgctcaggggacaccagggatggccccacctcctgccccagccaccgcttccgccagcgccggaacgacaaacacagctaccactgccggaccagcacctggtggtccagcccagcctccacctactccacagccaagtatggccgaccttcaattcagccaacttctgggcaacctgttgggtcctgccggaccgggtgcgggagggtctggggtggcatctcctaccattacggtggccatgccatag

SEQ ID NO: 78253 - DNA, 717 bp, Artificial Sequence
  derived and/or modified sequence
tcctctgctgagggcgcacccccaccaggccctgcaccgccacccgcaacctcccatcctagagtgatcagaatttcccatcaatccgtcgagcccgtcgtcatgatgcatatgaacatccagggcccactgagtttgtctccgtgcccggactcaggaactcaacctggtggggttccctcagctccaaccgggcctcttgggcctcccggacacggacaaactctgggacagcaggtcccgggattccctactgcaccaacacgagtagtgattgcacgccctacccccccacaagctcgcccttcccacccgggagggcctcctgtctcaggaaccctgcagggagcaggccttggcacaaacgcaagcctcgctcaaatggtgtcaggtctggtggggcagctgttgatgcagccggtgttggtcgcacaagggacacccggtatggccccacccccagccccagcaacggcaagtgcgagcgctggtactactaacactgctacaacagccggacccgcaccgggagggcctgcccagcccccacccacccctcagccaagcatggctgatctgcagttttcccagctgttgggaaatctcctcggccctgcaggcccaggggctggcggacccggagtggctagtccaacgatcacggttgcgatgcctggcgtgcccgcttttctgcaggggatgacggactttctgtag

SEQ ID NO: 78254 - DNA, 717 bp, Artificial Sequence
  derived and/or modified sequence
agcagcgccgaaggggcacctcctccagggccagctccgccacccgcaacatctcatccgagggtcattcggatatcacatcagtcagtggagcccgtggtgatgatgcacatgaatattcagggtccattgtcactttctccttgcccagatagcgggacccagcccggaggagttccatccgctccgactgggccactcggccctcccggacatggccagacattggggcaacaggtcccaggttttccaacagcccctactcgtgtggttatcgctcgccctactccaccacaggccaggccaagtcatccaggtggaccaccagtatccggaactctgcagggcgctgggctggggaccaacgcttccctcgcacaaatggtgtctgggcttgtcggacaactgcttatgcagcccgtgctggtggcacagggcacccccggaatggcccctcctccagctcccgctacagctagtgcctctgccggaacaaccaataccgccaccacagccggacccgcacccggagggccagcgcagccccctccaaccccccaacctagtatggccgacctgcagttttcacagcttcttggcaacctgctaggacccgctgggccaggcgctgggggttcaggagtggcctcaccaacaatcaccgtggctatgccaggtgtgcccgcttttttgcagggaatgacggacttcctttag

SEQ ID NO: 78255 - DNA, 717 bp, Artificial Sequence
  derived and/or modified sequence
tcctccgcggagggcgcaccccctccaggacccgcacccccaccagcaacatctcatcctcgggtaatcaggatctcccaccagtcagttgagcccgttgtgatgatgcatatgaatatacaggggccattaagccttagcccctgccccgactcaggcactcagcccggtggagtgccatctgccccaacgggcccactggggccaccaggtcacggccaaacattgggccaacaggtcccgggttttccaacagctcctaccagagtggtgatcgctcgccctaccccaccacaggccaggcccagccatcctggtggcccacccgtgtcagggactctgcagggagcaggcctggggacaaacgccagccttgcccaaatggtctcagggctcgtgggccagctgctgatgcagcctgtccttgtggctcaaggcacgcctggtatggctccccctcctgctcctgcgacagccagcgcaagcgctgggaccaccaacaccgcaactactgctggcccagcaccaggaggaccggcacagccacccccaaccccgcagccctctatggccgacctgcaattctctcagctcttaggcaacttgctgggccctgccggacccggagcaggcggtccaggagtggcatcccccacaataactgtagccatgcctggtgtgccagcttttttgcagggcatgacagatttcctgtag

SEQ ID NO: 78256 - DNA, 717 bp, Artificial Sequence
  derived and/or modified sequence
tccagcgctgagggcgctcccccaccaggtcccgctccaccacccgctactagtcatccccgagtcatcagaatctcccatcagtctgtagaaccagttgttatgatgcatatgaacattcaggggcctctctcacttagtccttgccctgattctggaacccagcctggaggggtgccttcagccccaacgggccctctgggtccacccggacatggtcagacccttgggcagcaggtacccggttttcctacggctcctactcgggtggtgattgctaggcctactccaccacaggccagaccctcacacccgggtggccctcccgtgagcgggactctccagggggcaggactcgggaccaatgccagtctcgcccaaatggtctctggactggtgggacagctgttaatgcagccagtactggtggcccaggggacaccaggcatggccccaccacccgcaccggctaccgcaagcgccagcgccggaaccactaatacggccaccaccgccggacccgctcctggaggaccggcacagcccccacccacgcctcagccttcaatggccgacctgcaattttcacagcttcttggaaatctgttggggcctgcaggaccgggagctggcggatccggggtcgctagcccaactatcaccgtggctatgcctggggtgccagctttcctgcagggaatgaccgacttcctctag

SEQ ID NO: 78257 - DNA, 717 bp, Artificial Sequence
  derived and/or modified sequence
tcctctgccgagggggctccaccaccgggtcccgcaccccctcctgctacatcgcatcctagggtgatccgcatttcccatcagtctgtggagcctgtagtgatgatgcacatgaatattcaaggcccactgagtctgagcccctgcccagatagtggaacgcagccaggaggagtcccatcagcccctactgggccactgggcccacccggtcatggtcagacattgggccaacaggtacccggatttcccacagccccaactagagtcgtgattgctagacccacacctccacaagcaagacccagtcatccaggcggtccacctgtgtctgggacactgcagggagccggactgggaaccaatgctagcctggcgcagatggtatccggcctggtgggccaactgctgatgcagcctgtgctggtagctcagggtactcccggaatggccccacctcccgcacccgcaaccgcgagtgcatccgctggcacaacaaacacagccacaaccgccggtcctgctcccggaggtcccgctcagccacctcccaccccccagccatcgatggctgatctacagttcagtcagctcctaggcaatctgctgggacctgccggtccaggggctgggggtcccggagtcgcttcgccgacaataactgtggccatgccaggggtacctgccttcctccagggcatgaccgacttcctctag

SEQ ID NO: 78258 - DNA, 738 bp, Artificial Sequence
  derived and/or modified sequence
ccgcctagacatctgcacgttgtgcgcccaatgtcccattacaccacgcctatggtcctgcagcaggcagccataccaattcagatcaacgtggggacaacagtcacaatgactgggccagcacctccacccgcaaccagtcatcctagagtgatccggatctcccaccagagtgtcgagccagtagttatgatgcatatgaacatccaggacagtggcacccaaccgggaggtgtgccatccgccccaactggccctctcgggcctcctggtcacggtcagactctaggtcaacaggtgccaggtttcccaaccgcgcctactcgcgtggtaatagcaagacccacacccccacaggccaggccgtcccatcccggaggacccccagtgtcaggtacgctgcagggcgcaggcttagggacaaacgccagtcttgcccaaatggtgtctggactggtgggccagttgttgatgcagcccgtactggtagcacagggcacgcccggtatggcgccaccacctgccccagctacagctagtgcatcggctggcaccactaatactgctactaccgcaggtcccgctcccggaggccctgcacagccaccgccaacaccacagcccagcatggccgaccttcagttctcgcagctgctaggaaacctactgggacccgctgggccaggcgctggaggtccaggagtggccagccctactataacagtggcaatgccatag

SEQ ID NO: 78259 - DNA, 738 bp, Artificial Sequence
  derived and/or modified sequence
cctcctcggcatctgcacgtggtgagacccatgtctcactatacaacacctatggttctacagcaggcagcaatcccgattcagatcaacgttggcaccactgtgacaatgaccggcccagcccctcctcccgcaacttcccatcccagggtcatcagaattagtcaccagtcagtggagccagtcgtaatgatgcacatgaacattcaggactccgggacacagcccggtggagtgccaagtgccccaacgggaccgctaggaccccctgggcacggccagactctggggcagcaggttccgggattccctacagcccctacccgagtcgttatagcaaggcctactcctccacaggcacggccatctcaccctggaggcccacctgtttctgggactctccagggggctggcctgggtaccaatgcatctctggcccagatggtctctgggttagtcggccaactcctgatgcagcccgttctggtagcccagggaacacccggtatggctccccctcccgcacccgctaccgcatccgcaagcgctggtactaccaacacagctactacggccggacccgctcctggtggacccgcacagcccccaccaactccgcagccatctatggctgacctccagtttagtcagctcctcggcaacctgttaggccctgccggaccgggtgctgggggttcaggagtcgccagtccaactatcaccgtcgctatgccatag

SEQ ID NO: 78260 - DNA, 717 bp, Artificial Sequence
  derived and/or modified sequence
agctctgctgaaggggcacccccacccggtccagcccctcctccagctacttcacatcctagggtcatccggatttcacatcaaagtgtcgagcctgtcgtgatgatgcacatgaacatccaggggccactgtccctatcaccttgtccagacagtgggacccagccaggaggcgttccgagtgctcccacagggccacttggcccaccaggacacggtcagacgctggggcagcaggtgcctggattccccaccgccccaacgcgggtggtcattgcaaggcccacccccccacaagcaaggcctagccaccctgggggtccacctgtaagcggaaccctgcagggcgcaggacttggaactaatgcatccttagcacagatggtgtcaggattggttggacagctgttgatgcaacctgtcctcgtggcgcagggcacgcctggaatggcacctccacccgcacccgcaaccgctagtgcaagcgctggcactaccaatacggccacgacagctgggcctgctcccggaggacccgctcaacctccccctacgcctcaacccagtatggccgacctgcagttttcccagctcttaggtaacctgctgggccctgctgggcctggcgcaggcggatcgggggtagcctcgccaaccattactgtcgctatgcccggtgtgcctgcttttctccaaggcatgacagatttcctctag

SEQ ID NO: 78261 - DNA, 738 bp, Artificial Sequence
  derived and/or modified sequence
cctccacgccatctacatgttgtgcgccctatgtcgcactatactacaccgatggtgctgcagcaggcggctatcccaatacagattaacgtagggaccacagtgacaatgacaggcccagcccctccacccgctacttctcaccctagagttatccgcattagtcaccaaagtgtcgagcctgtggtgatgatgcacatgaacatccaggatagcggaactcagcctggcggagttccgagcgcacctaccggaccactaggcccacctggacacggccagacgctgggccagcaagttccaggctttcccactgctccgactagggtggtcatagctcgccctacacccccacaagccagaccctcccacccagggggacctcctgtgagcggtacactccagggtgccggacttgggaccaatgctagtctcgcccagatggtgagtggcctagtcggtcagctcctcatgcagcccgtattagtcgcccagggaacacccggaatggcaccccctccagccccagcgactgcctctgcgagtgctgggacaacaaacaccgccaccacagcaggccctgccccaggtgggccagcacagcctccaccaaccccacagccttccatggcggatctgcaattctctcagttgctgggcaatttgttaggaccagccggacccggtgccggtggaccaggcgtcgcatcccctaccatcactgtcgctatgccttag

SEQ ID NO: 78262 - DNA, 738 bp, Artificial Sequence
  derived and/or modified sequence
cctcctcgacaccttcacgttgtcagaccaatgtctcactataccacacccatggtactgcagcaagccgcaattccaatccaaataaatgtagggactaccgtgaccatgacggggccagctcccccacccgcaacctctcatcccagggtgatcagaatatctcaccagtccgtcgagcccgttgtcatgatgcatatgaatatccaagactctgggacccaaccgggaggggtgccgtccgccccaaccggcccattagggcctccaggtcatggacagaccctagggcaacaggttcctggttttcccaccgcccctacccgggtcgtcatcgcacggcctacacctccgcaggctaggccatcacatccagggggacctccagtcagcggtactcttcagggcgcaggtctgggaactaacgccagtctggctcagatggtttccggactcgtgggacaactgttgatgcaacctgtgctcgtggctcagggaactccgggaatggccccaccaccagctccggcaacagcctctgcctccgccggtaccaccaatactgctactacagccggaccggctcctgggggaccagcgcagccacctcctaccccacagccaagtatggctgacttacagttctctcaactactgggcaacctcttggggccagcagggcctggggcaggcggacctggagtggcctcgcctacgatcaccgtggctatgccttag

SEQ ID NO: 78263 - DNA, 738 bp, Artificial Sequence
  derived and/or modified sequence
ccacccaggcacctgcacgtcgtcaggcctatgtcgcattataccacccccatggtgctgcaacaggcggctattccaatccagattaatgtgggaactacagtaacgatgacgggacctgctccccctccagcgaccagccatccccgtgtaattcgaatcagccatcagagcgttgagcctgttgtgatgatgcatatgaacatccaggattccggcacgcagcccggtggtgttccatccgccccaaccggccctttaggaccgccaggacatggacaaaccttaggacagcaggtgcccggatttccaacggccccaacccgtgtcgtaatcgccagaccaacgcctcctcaggctcggccaagccaccctggcggtcctcctgtctcagggacgctgcaaggagcaggccttggaactaacgcttcacttgctcagatggtttcaggattggttggccagctactaatgcagccagtgcttgtggcacagggaacacccggaatggctcccccacccgcacctgccactgcctctgcttcagcaggtacaactaatactgccactaccgcaggtcccgcacctgggggtcctgcacagcccccaccaaccccccagccctctatggccgacctgcaattttcgcagcttctcggaaatctgctgggtccagccggacccggtgctggcggatcaggagtggccagtcctaccataactgtggccatgccatag

SEQ ID NO: 78264 - DNA, 717 bp, Artificial Sequence
  derived and/or modified sequence
agtagcgccgagggagcacctccacccggtccagcacctcccccagctacaagccacccaagagtgattcgaatcagccaccagagtgttgaacctgtggtaatgatgcacatgaacatacaaggccctttatcactctctccatgcccggactctggtacccagccagggggtgtgccgtctgcaccaacggggccattggggccacctggacatggacaaacacttggacagcaggtccctggcttccccacagctccaacaagggtcgttatagctcggccaactccacctcaggcccgaccatctcatcccggtggccctcccgtttcagggacactgcagggggctggactgggaactaatgcgtcgctcgctcagatggtgtctgggcttgtcggccagctattaatgcagcctgtgcttgtggcccagggaaccccaggtatggcccctccaccagcaccagcaactgcctcggccagcgcaggaacgaccaacacggccacaactgcaggcccagcccctgggggtcctgctcagccccctccgacaccccaaccttccatggccgatctccagtttagtcagctccttggtaatttgttgggtccagccggaccaggagctggtgggagcggagtggcaagccctaccatcaccgttgcaatgccaggtgtgccagcctttctgcaagggatgacagactttctttag

SEQ ID NO: 78265 - DNA, 738 bp, Artificial Sequence
  derived and/or modified sequence
cccccaagacatttgcacgtggtaagacccatgtcccactacacaacgcccatggtgctgcagcaagctgccatccccatccagattaatgtggggaccaccgtgacaatgaccgggccagcccctcccccagctaccagccaccctcgagtgatccggattagccaccagtccgtggagccagtcgtgatgatgcacatgaacatccaagactctgggacacagcccggtggcgtgcccagtgcgccaacaggcccattaggacctcccggtcacggccagaccctagggcagcaggtgcctggctttcctactgcaccaactcgtgtagtgatcgccaggcccacaccccctcaagccagacctagtcacccaggagggcctccagtgtctggcactttgcaaggagcgggtctggggacgaacgcgagcctcgcacagatggtctctggtttagtggggcagctccttatgcagccagtgttagtagctcagggcacacctggaatggccccaccacccgctcctgcaactgcttccgccagcgccggtaccacaaacacagcgactacagctggaccagcgccaggtggacccgcacagcctccccctacaccccagccaagtatggccgatttgcagtttagtcaattgctgggtaatcttctggggcctgccggacccggagctggaggtagtggagttgcatcgcccacgatcacagtggccatgccctag

SEQ ID NO: 78266 - DNA, 3234 bp, Artificial Sequence
  derived and/or modified sequence
atggagcccaatgattcaaccagtactgccgtcgaagaacctgattctcttgaggtcttggtaaagactctggattcacaaacccgcacgttcatcgtgggtgcccagatgaacgtcaaagaatttaaggagcacatcgcagcctccgtatccatcccatccgaaaaacagcggcttatctatcaaggtcgggtcttacaggacgacaagaagctccaggaatacaacgtgggagggaaagttatccatctggtcgaacgagctcctccccagacccatctgcctagcggcgcatcaagcggcaccgggtccgcctccgcaacccacggagggggatcccctcccggaacccgagggcctggcgctagcgtacacgaccgcaatgctaatagctacgtgatggttggcacctttaacctcccctccgatggcagcgctgtggacgtgcatatcaacatggaacaagcccctatccagtcagaaccacgggtgcgcctcgtgatggcccagcatatgataagggacatccagacactactatcaaggatggagtgccggggtggacctcaacctcaacatagccagccccctccccaacccccagccgtaacgcctgaacctgttgccctgtcttctcagacctccgaaccagttgaatctgaggcaccaccacgagaaccgatggaagctgaagaggtcgaggagagagctccagcccagaacccagagctgactcccggtccagccccagccggtcccacacctgctcctgagaccaacgcaccaaaccatccaagtccagcagagtatgtggaggtcctgcaggagctgcagcggctcgaaagccggcttcagccctttctccagagatactatgaagtgctgggagctgccgctaccaccgattacaataataatcatgagggccgagaagaggatcagcggttaatcaacctggtgggggagagcttacgtctcctgggaaatacctttgtcgctctttctgatctccgctgtaacttggcctgcactcctccccgacacctgcacgtggtcagacctatgagtcactacacaacaccgatggtactgcaacaagcggctattcccatccaaattaatgtcggcactacggtgacaatgacaggcaatggcacccggccacccccaacgccgaacgcagaggccccaccacccggacccggtcaggcttcaagtgtagctccatcttccacaaacgttgagagtagcgccgaaggagcccctcccccaggcccagcaccccctcctgcgacatctcacccccgtgtcattcgaatttcgcaccagtctgtggagccagtggtcatgatgcatatgaatatccaggattcgggaactcaacccggaggtgtgccgtccgcccctactggcccactcggtccccctggacacggtcagaccctggggcagcaagttccaggcttccctacagcccctacgcgggtggtgattgctcgcccaacccctcctcaggccagacctagtcatcccggaggccctcccgtttccgggactctccagggagccggactcggcactaacgcatccctggcccagatggtatcaggtcttgtggggcaactgttaatgcaacctgtcctcgtcgcccaaggaaccccaggaatggcacccccacccgctccagccactgcgtctgccagcgccggaactaccaatacagcgacgacggccggtcccgctccagggggtccggctcaaccacctccgactccccaaccatccatggccgaccttcagtttagccaacttctggggaaccttcttgggccagccggaccaggggctggcggaagcggggtggcaagtcctaccattacagtggcaatgcctggagtgccggcatttctgcagggcatgacagactttctccaggccacgcagaccgcacctcctcctcctccaccgccaccaccccctcctcctgccccagagcaacagacaatgccccctcccggaagtccctccgggggagctgggtcacccggagggctggggctcgaaagcctgtcccccgagtttttcacgtctgtggttcagggggtcttatcatctctcctggggtctctgggcgctagagcaggcagcagcgaatccattgctgcatttattcagcgcctgtcaggcagttcaaacatcttcgagcccggtgctgacggagcattaggattttttggtgcgctgctatctctactgtgtcagaattttagcatggttgatgttgtgatgcttctgcacggccacttccagcccttgcaaagactccagccccaacttaggagttttttccatcaacactacctggggggacaagagcccaccccttctaatattaggatggccactcataccctgatcaccggcttagaggaatacgtacgcgaaagcttctctcttgttcaggttcagcctggggttgatatcattcgaacaaacctggaattccttcaggaacagttcaattcgatagctgcgcatgttctgcactgcaccgatagtggttttggcgctcggctgctcgagctctgcaatcagggcctgtttgagtgcttggcattaaacctccactgtctgggcggtcaacagatggagctggccgctgtgatcaatggcagaattcgccgaatgtctcgaggggtgaatcccagcctggtttcatggctgaccacaatgatgggccttcggcttcaggtggtccttgagcacatgccggtcgggccagatgccattctgcgctatgtgcggcgagtgggcgatcctccccaacccctgccagaggagcccatggaagtgcagggggcagaaagggccagccctgaaccgcagcgggaaaacgcgtccccagcaccgggaaccaccgctgaggaagccatgagcagaggaccccctcccgcacctgagggtggcagccgcgacgagcaagatggggcatcagctgagaccgagccatgggccgctgcagtgccccctgagtgggtcccaataatacagcaggacattcaatctcagaggaaggtgaagccgcagcctccactgagcgacgcctatctgtcaggcatgccagccaagcggagaaagttaagatccgacatacagaagcggctgcaagaggacccaaactatagccctcagcgattcccaaacgcccagagggctttcgccgacgatccttag

SEQ ID NO: 78267 - DNA, 3234 bp, Artificial Sequence
  derived and/or modified sequence
atggagccaaatgacagcacctctactgccgtggaggaacccgactccctggaggtgcttgttaaaacattggattcacagacaagaacatttatagttggagcccagatgaatgttaaggaatttaaggaacatattgctgcttccgtttctattccctcggagaagcagaggctgatatatcagggccgtgtactgcaagatgacaagaagcttcaagaatataatgtggggggaaaggttatacaccttgtagagcgagccccaccccagacccatctgccgagtggcgcttcatctggtacagggtccgcctccgccacccacggtggcggatcgcccccaggtacccgtggtcccggtgcctcagttcatgatcgcaatgccaactcatatgtgatggtgggtacttttaacctcccctctgatggatctgcagttgatgtgcatattaatatggagcaggcacccatccagtcagagccacgagtgaggctcgttatggcccagcacatgatacgcgacatccagactcttttaagccgcatggagtgtaggggcggaccacagcctcagcactctcagccccctcctcagcctcctgccgtcacgcccgagccagtggcgctcagctcccagaccagtgagcccgttgaatccgaggcaccacctcgagagcccatggaagccgaggaagtggaggagcgggcaccagcccaaaatcccgaactaaccccagggcctgcaccggctggtcccactcctgcaccagaaacgaatgcaccaaaccacccgtctcccgctgagtatgttgaagtacttcaggaactgcaaagactggagtctcggctgcagccttttctgcagcgctactacgaggtcctgggagccgcagccacaactgactacaataacaatcacgagggtcgggaggaggatcagcgccttatcaatctagtaggcgaatctctgcgtctcctcggcaacacattcgtcgcattgagcgacttgagatgcaatctggcctgtacgcctccaagacatttgcatgtcgtgagaccgatgagccactacactacacccatggttctgcagcaggccgcaatacccatacaaatcaacgtcgggaccacagttactatgaccgggaatggcacccgtcctccgccaacccccaacgcggaggccccacctccaggccctggtcaggcctcatcagtggctccatcctctaccaacgtggagagttcggctgaaggggcaccacctcctggacctgccccaccccctgccaccagtcacccacgggtcataaggatctcacaccagtcagtagagcccgtggttatgatgcatatgaatattcaggattctgggactcagcccggaggggtgccttcggctcctacgggtcccctgggaccaccaggacacggccagacgctcggccagcaggtacccggattcccaacagcgccaacccgtgtggtaatcgctaggccaactcctccacaggctaggcccagtcaccctggcggacctcctgtgagcggcaccttacaaggggctggactcggtacgaacgcctcgttggcacagatggtgagcggtttggttgggcaacttctaatgcagccagttctggtggcgcagggtactccaggtatggctccaccccctgctcctgctacagcgagtgcttctgctgggaccaccaatactgcaacgacagcgggacccgctcccggagggcctgcccagccacctcccaccccacagccatccatggcagatcttcagttttcacagctcctcggaaacctgctgggtcccgctggtccaggcgcaggcggaccaggggtcgcgtcgcccaccatcacagtagccatgcctggagtgccagctttcctgcaaggcatgaccgactttttgcaggctactcagactgctcctccaccaccaccgccacctccccctcccccacctgctccagagcagcagacaatgccaccccctgggagtccatcagggggagccggatctcctggagggctgggtttggagagcctaagccctgaatttttcacctcggtggtgcagggcgtgctcagctcactgcttggcagcctgggggcacgggcaggcagcagcgaaagtattgctgcgttcatccaaaggttaagtggtagctccaacatctttgaaccgggtgctgatggggcattgggtttctttggggcactcctgagcctgctgtgtcagaacttctctatggtagacgtggtgatgctgctccacggacacttccagcctctgcaacgactccagccccagttgcgtagcttttttcaccaacattacttaggcggtcaggagccgacaccttcaaacatccgcatggctacacatacgctcataacggggcttgaggaatacgtccgcgagagctttagcctcgtgcaggtccaacccggagtagatatcattcggaccaacttggagttcctccaggaacagtttaacagtattgccgctcacgtattgcattgtaccgattcaggttttggcgcacgtctgctcgaactttgcaaccaggggctctttgagtgcctcgccttgaacctgcattgtttgggtggccagcagatggagctcgccgcagtgattaacgggcgtatacgcagaatgagtagaggggtgaatccaagtctggtgtcttggctaacaactatgatgggactgcggttgcaggtggtgcttgaacacatgcccgttggcccagatgccatcctgaggtacgttaggcgagtcggtgacccccctcagcccctgccagaagagcccatggaagtgcagggcgcagagcgtgcctcacccgagcctcagcgggagaatgcttcacccgctcctgggacaacagccgaggaagcgatgagcagaggacctccccctgctccagaggggggatcacgcgacgagcaggacggcgcaagcgctgagacagaaccgtgggctgctgcagtccctccagaatgggtgcctatcatccagcaagacattcagtcacagaggaaagtgaaaccgcagccccctctgtccgatgcatacctctcagggatgccggcaaagcggcgaaagctacgtagcgacattcagaagcgactgcaagaggaccccaattactctccgcagcgcttccccaacgcacagagggccttcgccgacgatccctag

SEQ ID NO: 78268 - DNA, 3234 bp, Artificial Sequence
  derived and/or modified sequence
atggagcccaacgattctacaagcaccgccgttgaagagcctgactcactggaagtcctagtcaaaacactggactcacagacacgcacttttattgtgggagcccaaatgaatgtaaaagaattcaaggaacacattgccgcttccgtgagtataccaagcgagaaacagcggcttatataccaagggagagtgctgcaggatgataagaagctgcaagagtataacgtggggggaaaggtgatacacttggtggaacgggctccaccccagactcacctgccttcgggagcatcttcaggcacagggtctgcctcagcgacacacggtggaggctcccctcccggaacccgtggacctggggcttccgttcacgatagaaatgccaattcctatgtgatggttggtacttttaatctgccctcggatggatctgccgttgatgtgcacatcaatatggagcaggccccaattcagagcgaaccacgcgttaggctggtcatggcacagcacatgattagagacatccaaactttgctttcccgcatggagtgccggggaggcccacaaccccaacattcccagccgccaccccagccaccggcagttacaccagagccagtagcgttaagttcacagacctctgagcccgtggaaagcgaggcgcctccccgtgagccgatggaggccgaggaggtcgaagagagggccccagcacagaatcccgaactgactcccggacctgccccagcgggacctacccccgctcctgaaacaaatgcaccaaatcatcctagccccgctgagtatgtggaggtcctccaggaactgcagagactggagtcgcgcctgcagcccttcctgcagagatattacgaggtattaggcgcagcagctaccactgattataacaataatcacgagggacgagaggaggaccagaggctgattaacctggtcggtgaaagtttgcggctgctaggtaatacctttgttgctctttctgacttaagatgcaatcttgcgtgcactccccctcggcacctccatgtggtgcggccaatgtcccattatacaacccctatggtcctacagcaggcggctattccgattcagatcaacgtggggaccacagttacaatgacggggaatggaacaagacctcctcctacccccaatgcagaagccccaccgccaggtcctgggcaggcctcctctgtggcacctagctccaccaacgtggagagtagcgctgagggcgctcccccaccgggaccggcaccaccgcctgctacctcacaccctcgggttattcggatcagtcatcagtccgtagaacccgttgtcatgatgcatatgaacatccaggattctggcacccagccagggggagtgccatcggcacccacgggacccctcggaccgcctggtcatgggcagacattggggcagcaagtgccaggcttcccgaccgcacccacgagggtggtgatcgcgcgaccaaccccaccacaggctcgcccttctcaccctggtgggcctccagtgagtggcactctccaaggagcgggattagggaccaacgcatccctggcccagatggtctcaggcttggtgggtcaactgctgatgcaacccgtattagttgctcagggtacccccggtatggcccctcctcccgctcctgccactgcctctgcctcagctggaactaccaacaccgccacaactgccggaccggcacctggaggaccagctcaacctcccccaacccctcagccgtcaatggccgatttacagttcagtcaactcctgggcaacctcctggggccagccggtcctggagctggtggcagtggcgtggccagtcctacaattactgtcgccatgccaggagttcctgccttcctccagggcatgacagacttcctccaggcaactcagacagctcccccaccgcctcctcctcctcctccacccccacccgctccagagcagcagaccatgccgcctccaggatctccttcaggcggtgccggatcgccgggaggcctgggcttggagagcctatccccagagttttttacctctgtggtacagggagtgttgagtagcctgctgggtagtctgggagcaagggcaggatcctccgagtccatcgctgcttttatccaacgtctgtctggctcctccaacatttttgagccaggtgcagatggagctcttgggtttttcggcgctttgttgtcccttctatgtcagaattttagcatggtggacgtggtgatgctcctccacgggcattttcaacctttacagcggctgcagccgcagttgcgaagtttcttccaccagcattacctcggcggtcaagagcctaccccaagcaacattcgtatggcgactcacactttgattactggcctggaagaatatgtgcgggagagcttcagccttgtgcaggtgcagccaggcgtcgacattatccgtaccaaccttgagttcctgcaagaacaattcaactccattgctgcccacgtgttgcactgtaccgattctggctttggcgctcgcctcctagaattgtgtaaccagggcctcttcgagtgccttgcgctgaaccttcactgcttaggtggacaacagatggagctcgccgctgttattaacggccgaattagacgcatgtcccggggagtgaacccaagcctggtgtcctggttaaccacaatgatgggactaagattacaggttgtattggagcatatgcccgtgggcccagacgccatcctgcgatacgtgcgtcgtgttggcgacccccctcagcccttgccagaggagcctatggaggtgcagggcgcagagagagcgtcccccgagcctcagagagaaaacgccagccctgcaccaggtaccactgccgaggaggcaatgtccagagggcctcctcccgctccagagggcggatctcgcgatgagcaggatggcgcatctgcagagacggaaccttgggcagcggcagtgccacctgagtgggtgccaatcatccagcaagacattcagagccaacggaaggtgaagccacagcctccactgtctgacgcctacctgtccggcatgcccgctaaacgtcggaagctgaggtcagacatccaaaaacgtctgcaggaggacccaaattactccccacagcgttttcctaatgcccagagggcatttgcagatgacccttag

SEQ ID NO: 78269 - DNA, 3234 bp, Artificial Sequence
  derived and/or modified sequence
atggagccaaatgacagcacatccacagccgtggaggaaccagattctcttgaagttctggtgaagactctcgactcacaaactagaacgttcatcgtgggggctcaaatgaacgttaaagaatttaaggagcacatagccgctagtgtatccatcccttccgagaaacagcgactgatctatcagggacgagtgctgcaggacgacaagaagctccaggagtataacgtgggagggaaagtgatccacctggttgagagggctcccccacaaacccatctcccttcgggagcctcctctggaaccgggtcggcctccgccacccacgggggtgggagtccacctggaacgagagggcctggagcttccgtgcacgatcgcaatgctaatagctacgtcatggtgggaactttcaacctgcctagcgacggatcggctgtagatgtacacatcaacatggaacaggcccctattcagagcgagcccagggtaagactcgtgatggctcaacacatgattcgcgatatacagactctgctctctaggatggagtgtagagggggtcctcagccccagcattcacagcctcccccacaaccacccgcagtgaccccagagcccgtggctctgagctcacagactagtgagccagtggaatccgaggcacctcctcgtgaacccatggaggcagaggaggtggaggaacgtgcacccgcacagaaccccgaacttacaccaggacccgcacctgccggaccgactcccgctcctgagactaacgccccaaaccatcctagcccggctgaatacgtagaagttctccaggagctccagcgactggagagccggctgcagcccttcctgcagcgctactacgaggtgcttggagcggcagcaaccaccgactacaataacaatcatgagggacgggaagaggaccagaggttaatcaacctggtgggagagtcattgcgactcctggggaataccttcgtggctctgagcgatctcagatgcaatttggcctgtactcctccaaggcacttgcacgtagttaggccaatgagccattacactaccccaatggtcctacagcaggctgccatccctatccagatcaacgtggggaccacggtgaccatgacaggcaacggaactcgccctcctcctactcccaatgccgaggccccacccccaggcccaggccaggccagttcggtggccccaagctccaccaacgtggaatcaagtgccgaaggagcccctccgccaggccctgcaccccctccagcaacctcccaccctagggtgatccggatttcacatcagagtgttgagcctgttgtcatgatgcacatgaatatacaagatagtggcactcagcccggaggagtcccgagcgccccaaccggtcctctgggtccaccagggcatggacagacattaggtcaacaagtcccagggtttcccaccgccccaaccagggtggtgattgccagacccacgccccctcaggccaggccttcccatcctggcggtcctcctgtgtccggtactttgcagggggcagggctggggactaacgcaagtctggcacagatggtctcaggactggtcggacagctgctcatgcaacccgtgctggtggcccagggtacaccaggtatggctccgccaccagctcctgccacagcaagcgcatcggctggaacaaccaataccgccaccaccgcgggacccgctcctggtgggcctgcgcagcccccaccgaccccccagccttccatggccgatcttcagtttagccagctgctggggaacctcctgggccctgccggacccggtgctggtggtcccggagtggcttcccctactatcactgtagccatgccaggggtacctgctttcctacagggtatgactgacttcctgcaagcaacacagaccgctcctcccccaccacctccgccaccgcctcctcccccagcgcctgaacagcagacaatgcctccccctggcagccccagcggcggtgccggtagccccggtggccttggtcttgagtccctctcacccgagttttttacgtcagtcgttcagggggttctgtctagcctcctggggtcgttgggggcacgcgctggctcctccgagtccattgctgcctttattcagcgcctgtctggttcatcaaacattttcgagcctggcgcagacggcgcactgggcttcttcggcgcattgctgtcactcctatgccagaacttcagcatggttgacgtagtgatgctactccacgggcactttcagcctctgcagaggctgcagccacagcttcgaagttttttccatcagcactaccttgggggtcaggagccgaccccttccaacattcggatggccacacacactctgatcacaggtcttgaggagtatgtcagggaaagtttttcactggttcaagtccagccaggcgtggatattatcaggacaaatctcgagtttctacaggaacagtttaacagtatagccgcacatgttcttcactgtactgactctgggttcggcgcacgcctgctcgaattatgcaatcagggccttttcgagtgcctggcgttaaacttgcactgcctcggcggacagcagatggaactggcagctgtgattaacggaaggatacgccgaatgagtagaggcgtcaatccctccttggtgagttggttgaccaccatgatgggtctccgcctccaggtggtgctggagcatatgcccgtgggtccggatgctattctgcgatacgtcagacgcgtgggagacccacctcagccactaccagaagaaccgatggaagtgcagggagctgaaagggcctcacccgagccgcagcgcgagaacgcaagcccagccccaggcactacagcagaagaggcaatgtcccggggacctccaccagcccctgaaggaggcagccgggacgaacaggatggcgctagtgccgagactgagccatgggccgctgcggtccccccagagtgggtaccgattatacagcaggacattcagtcccagcgtaaagtcaaaccacagccccctctgtccgacgcttatctgtctggcatgcccgctaaaagacgcaagcttagatctgacattcaaaagaggctccaggaggatccaaattacagcccgcagcggttcccaaatgcccagcgagcatttgcagacgacccatag

SEQ ID NO: 78270 - DNA, 3234 bp, Artificial Sequence
  derived and/or modified sequence
atggagcccaacgatagcacaagcacagcagtagaggaacctgatagcctggaggtccttgtcaagacacttgactcccagacacgaacctttatcgtaggggctcagatgaatgttaaggaattcaaggaacacatagccgcttctgtgtccataccaagcgagaagcagcgcctgatttaccaggggagggtgttgcaggacgataagaagctgcaggagtacaatgtggggggaaaggttatccacctggtcgagagggcaccaccccagacccatctaccttctggagcctccagcgggactggctccgccagcgccacacacgggggagggtctccacctggtaccaggggcccaggtgcttctgttcatgaccgcaacgccaatagttacgtaatggtgggcactttcaaccttccttcagatggtagcgcagtcgacgtgcacatcaatatggagcaggctccaatccaatccgaaccgagggtcagactggtgatggctcagcacatgatcagagatatccagacgctgctgagccgcatggaatgccggggaggccctcagccccaacactcgcagcctccaccgcaaccccctgctgtgacgcccgagcctgtggctctgtctagtcaaacttctgaaccagtggagtctgaagccccacccagagaaccaatggaagcagaggaggtggaggagagagctccagctcagaatccagagcttacccccggacctgccccagcaggtccaacgcccgcaccggagacgaatgcccctaaccacccctctccagcagagtacgtggaggtgctccaggagctccaacgactggagagcaggctgcagccgttcctgcagcgctattacgaagtgttgggagctgccgctacgacagactataacaataatcatgaagggagagaggaagaccagcgattaataaacctcgtcggcgagagtttaaggttgctcggaaacacattcgtcgcactgtctgatttgcggtgtaatctcgcctgtacaccaccccgtcatctgcacgttgttagacctatgagccactacactacacccatggttttgcagcaggcggctatccccattcagatcaacgtggggactaccgtcacgatgactgggaatggcaccaggcctccgccaacacctaacgccgaggcccctccgcctgggccaggccaggcctctagcgtcgcacctagcagcactaatgtggagagttctgccgagggcgctccccctccagggccagccccacctcccgctacaagccacccaagggttatcaggatttctcaccaaagcgtggagccggtggtgatgatgcatatgaacattcaggacagcggaacgcaacccggaggcgtcccttccgctcccacgggtccactgggcccaccaggccatgggcagacgttaggtcagcaggtccccggttttccaaccgcgcctactcgcgtcgtgatcgcacgacctactcctccgcaggcaaggccttcacacccaggagggcctcccgtctcgggcaccctgcaaggcgcaggcctcggaacaaacgcctccttagcccaaatggtgtcagggctcgtcgggcaactcctgatgcagcccgtgctcgtggcgcaggggaccccaggcatggctcctcctccagcgcctgcaacagcttcagcatctgccggaacaactaacacggccaccaccgccggtcctgccccaggaggcccagcacagccaccccctacccctcagccatcgatggcagacctgcagttcagtcagctcctgggaaatctgctaggacctgctgggcctggagccggaggacccggagttgcttcccccaccatcactgtagccatgccaggcgtgccagcctttctgcaggggatgacagactttctgcaagctacgcagaccgcacctccacccccacctccccctcccccaccccctcccgctcccgagcaacaaaccatgccaccaccgggatcgccttcaggtggagcaggatcacccggaggattagggctggagagcctctctcccgagttttttacatctgttgtacaaggagtccttagctcactgttgggatccctaggcgctcgcgcaggctcctctgagagtatcgccgcatttatccagcgactgtcaggtagctccaatattttcgaacccggagcagatggggctctggggttttttggggcactgctgagtctgctgtgtcagaacttttcaatggtggacgtcgtgatgctgctccacggacactttcagccactgcaacgactgcagcctcagctgcgatctttcttccaccagcactacctgggcggacaggagcctacccccagtaatatccgcatggccacccataccctgatcactggcctggaggagtacgtgagggagagtttcagtctggttcaggtacagccaggcgtggacatcatccgcacgaacctggaatttttgcaggagcagttcaactccattgccgctcacgtgctccactgtacagattccggattcggagcccgattgctggagctttgtaaccaaggactcttcgagtgtctcgctctgaacctgcattgcctcggaggccagcagatggaactagcggctgtaattaatgggagaattaggcgtatgtcaagaggcgtgaatccctccctggtgagctggctgacaacgatgatggggttgcgccttcaggtcgtcctggaacacatgccagtgggaccagatgcaattttaaggtatgtcaggagggtcggggatccccctcagcctctgccagaggaaccaatggaggttcaaggagctgagagggccagccccgagccccagagagagaatgcatcccccgcacctggcactactgcagaggaggctatgtcacggggacctccccctgcgcctgagggcggatccagggacgaacaagatggggcttccgctgaaaccgagccctgggccgctgcggtccccccagaatgggtgcccatcatacaacaggacatacagagccagagaaaagtgaaaccccagcctcccctgtccgacgcctacttatccggaatgccagccaaacgcaggaaactgcggtccgacatacagaaaaggctccaggaggatccaaattattccccacaacgctttcccaacgcacagagagcgtttgcagacgatccatag

SEQ ID NO: 78271 - DNA, 3234 bp, Artificial Sequence
  derived and/or modified sequence
atggagcctaatgattctacatcgacagccgtcgaggagcctgactccctggaagtgctggtgaagacactggacagccagacaaggacattcatagtgggcgcacagatgaacgttaaggaattcaaggagcacatagctgcttcagtcagcattcccagtgagaaacagagactgatttatcaggggagagtattgcaggacgacaaaaaacttcaagaatacaacgtgggcggaaaagtgatacacctcgtcgaacgcgcaccccctcagacgcacctgccctcaggcgcaagttctggcacggggtctgcctcggcaacccacggcggaggttccccccctggcacccgaggaccgggtgcttctgtccacgatcggaacgccaacagctacgtgatggtgggaactttcaatctcccctcagatggatcagcggtcgatgtgcatatcaatatggaacaagccccaatccagtcagagccacgtgttagactggttatggcacaacatatgattcgcgatatccagaccctgctctcccgcatggaatgcagggggggaccccagccacagcactcacagcccccaccacagccccctgcagtgacgcccgagcccgtggccctgtctagtcaaacatccgaaccggtggaaagcgaggcccctccgagggagccgatggaggcggaagaagtcgaagagcgggcaccagcgcagaatcccgaattaacacccggaccagcacccgctggtccgactcctgccccagaaactaatgcccctaatcacccttcccctgccgaatacgtagaggtcttgcaagagctacagaggctagagagtagactccagcccttcctccagaggtactacgaagtactgggagccgctgctactaccgactacaacaacaaccacgagggcagagaggaggatcagaggctgatcaatttagttggagagagcctacgtctgctgggcaacacatttgtggcgctgtctgacctacgatgtaatctagcatgcacccctccaaggcacctccatgtggttcgcccaatgtcccattacacaactcccatggtcttgcagcaggccgcaattccaattcagattaacgtggggaccacagttaccatgaccggaaacggtaccaggccaccccctacccccaatgcagaagccccacctcccggaccgggacaggcctcatcagtcgccccatccagcactaacgtagagtcgtccgcggaaggggctccccctcccggacctgccccaccccctgccacaagccatcccagggtaattcgcatctctcaccagagcgttgaaccagtggtcatgatgcacatgaacattcaggattctggaacccaacctggaggggtgccaagcgcacccacgggacccttgggtccccctggacatggacagaccctgggtcagcaggtgccgggtttccccaccgccccaactagagttgtcatcgccaggcctactccaccccaagcccgtccatctcaccctggcggaccacctgtctctggtactttgcaaggtgccggtttgggcaccaacgctagcctggcacagatggtctcagggctggtgggacagctcctgatgcagccggtcctggtggcccaagggacaccgggaatggcaccacctccagcgccagcaactgcttcagcaagtgctggcacaactaatactgccacgaccgcgggtcctgcacctgggggtccagcgcaaccaccgcctaccccccaacccagcatggccgacttacagttttcacagttgctggggaacctgctcggacccgctgggccaggggctgggggatctggagtggcgagtccaaccatcactgttgccatgcccggagtccctgccttcctccaggggatgaccgattttctgcaagcaacccagaccgcgccaccacctcccccaccgccacctcccccaccccctgctccagagcagcagaccatgccccctcctggttccccatcgggcggagcaggcagccctggtggcctgggcttggagtcattgtccccggagttcttcactagtgtcgtccagggcgtcctttcctctctcctgggctcacttggcgctagagcaggaagtagtgaatcgatagccgcatttatccagagactgtccggctcaagcaacatttttgaaccgggagcagatggtgcccttggattcttcggggctttactgagtctgctgtgccaaaatttctctatggtggatgtagtgatgctgctacatgggcactttcaacctttacaacgcctccaacctcagctgagaagcttcttccatcagcactaccttggaggacaggagcccaccccaagtaacatccgcatggccactcatactctgatcaccgggcttgaagagtatgtgcgggaatcattttccctggtgcaggtacaacccggtgtggatataattaggacaaatttagagttcctccaagaacagttcaattccattgccgctcatgttctgcactgtaccgatagcggattcggagctcgactcctggaactctgcaaccagggccttttcgagtgcctcgctcttaacctccactgtctggggggtcaacagatggagcttgcggcagttattaatggcaggatcagacgaatgagccgcggagtgaatccctctttagtaagctggcttacaaccatgatgggcctcaggcttcaggtggtcctggaacacatgcctgtcgggccagatgctatcctaaggtacgtacggagagtgggggatccacctcaaccactgccagaggaacccatggaggttcagggggctgaaagagcatcccccgaacctcagagggaaaacgccagtccagcccctggcaccacagccgaagaagcaatgagtagaggccctcccccagcacctgaggggggttcacgggacgaacaagatggagcatcagcagaaaccgaaccctgggcagccgcagttcctccagaatgggtaccgatcatacaacaggatattcagagtcaacgcaaggtcaagccccagccacctctttcagacgcttacctgtctggtatgcccgcaaaaagacgcaagctcaggtcagacattcagaagcgcctgcaggaggatccaaactacagtcctcagcgtttccccaatgcacagcgggcatttgcagacgatccatag

SEQ ID NO: 78272 - DNA, 3565 bp, Artificial Sequence
  derived and/or modified sequence
gtagtacggtcccccgggcgacagcggtggcggctcctcggggtgctcggctccctcccacctaggccggccccggcccgactcgccctcagaaactcactgtttggggctgcggactttctcgtcgtgccccacaaaagtaaagcttggggacctggggggagccggaagtatcgcttcgagatccccaaatactatcggggaaacggaagtggccgtcggtggcagagacctgtcggccatggagcctaatgatagtaccagtaccgctgtggaggagcctgacagcttggaggtgttggtgaagaccttggactctcaaactcgtacctttattgtgggggcccagatgaatgtaaaagagtttaaggagcacattgctgcctctgtcagcatcccatctgaaaaacaacggctcatttaccagggacgagttctgcaagatgataagaagcttcaggaatacaatgttgggggaaaggttatccacctggtggaacgggctcctcctcagactcacctcccttctggggcatcttctgggacggggtctgcctcagccactcatggtgggggatccccccctggtactcgggggcctggggcctctgttcatgaccggaatgccaacagctatgtcatggttggaaccttcaatcttcctagtgacggctctgctgtggatgttcacatcaacatggaacaggccccgattcagagtgagccccgggtacggctggtgatggctcagcacatgatcagggatatacagaccttactatcccggatggagtgtcgaggagggccccaaccgcagcacagtcagccgcccccgcagccaccggctgtgaccccggagccagtagccttgagctctcaaacatcagaaccagttgaaagtgaagcacctccccgggagcccatggaggcagaagaagtggaggagcgtgccccagcccagaacccggagctcactcctggcccagccccagcgggcccaacacctgccccggaaacaaatgcacccaaccatccttcccctgcggagtatgtcgaggtgctccaggagctacagcggctggagagtcgcctccagcccttcttgcagcgctactacgaggttctgggtgctgctgccaccacggactacaataacaatcacgagggccgggaggaggatcagcggttgatcaacttggtaggggagagcctgcgactgctgggcaacacctttgttgcactgtctgacctgcgctgcaatctggcctgcacgcccccacgacacctgcatgtggtccggcctatgtctcactacaccacccccatggtgctccagcaggcagccattcccatacagatcaatgtgggaaccactgtgaccatgacaggaaatgggactcggccccccccaactcccaatgcagaggcacctccccctggtcctgggcaggcctcatccgtggctccgtcttctaccaatgtcgagtcctcagctgagggggctcccccgccaggtccagctcccccgccagccaccagccacccgagggtcatccggatttcccaccagagtgtggaacccgtggtcatgatgcacatgaacattcaagattctggcacacagcctggtggtgttccgagtgctcccactggccccctgggaccccctggtcatggccaaaccctgggacagcaggtgccaggcttcccaacagctccaacccgggtggtgattgcccggcccactcctccacaggctcggccttcccatcctggagggcccccagtctctgggacactgcagggcgccggtctgggtaccaatgcctcgttggcccagatggtgagcggccttgtggggcagcttcttatgcagccagtccttgtggctcaggggaccccaggtatggctccaccgccagcccctgccactgcttctgccagtgctggcaccaccaacacagctaccacagctggccccgctcctggggggcctgcccagcctccacccacccctcaaccctccatggctgatcttcagttctctcagcttctggggaacctgctagggcctgcagggccaggggctggagggtctggtgtggcttctcccaccatcactgtggcgatgcctggtgtccctgcctttctccaaggcatgactgacttcttgcaggcaacacagacagcccctccaccacccccacctcctccacccccaccacctgccccagagcagcagaccatgcccccaccaggctccccttctggtggcgcagggagtcctggaggcctgggtcttgagagcctgtcaccggagttttttacctcagtggtgcagggtgtgctcagctccctgctgggctccctgggggctcgggctggcagcagtgaaagtattgctgccttcatacaacgcctcagtggatccagcaacatctttgagcctggagctgatggggcccttggattctttggggccttgctttctcttctgtgccagaacttctctatggtggacgtagtgatgcttctccatgggcatttccagccactacaacggctccagccccagctgcgatccttcttccaccagcactacctgggtggtcaggagcccacacccagtaacatccggatggcaacccacacattgatcacggggctagaagagtatgtgcgggagagtttttccttggtgcaggttcagccaggtgtggacatcatccggacaaacctggaatttctccaagagcagtttaatagcattgctgcgcatgtgctgcattgcacagatagtggatttggggcccggttgctggagttgtgtaaccaaggcctgtttgaatgcctggccctaaacctgcactgcttggggggacagcagatggagcttgctgctgttatcaatggccgaattcgtcgtatgtctcgtggggtgaatccctccttggtgagctggctgaccactatgatgggactgaggcttcaggtggtactggagcacatgcctgtaggccctgatgccattctcagatacgttcgcagggttggtgatcccccccagccacttcctgaggagccaatggaagttcagggagcagaaagagcttcccctgagcctcagcgggagaatgcttccccagcccctggaacaacagcagaagaggccatgtcccgaggtccacctcctgctcctgaggggggctcccgggatgaacaggatggagcttcagctgagacagaaccttgggcagctgcagtccccccagaatgggtccctattatccagcaggacattcagagccagcggaaggtgaaaccgcagccccctctgagtgatgcctacctcagtggtatgcctgccaagagacgcaagctccggtctgatatacaaaaacgactgcaggaagaccccaactacagtccccagcgcttccccaatgcccagcgggcctttgctgatgatccttagctctttgctctatggcccttcctcatcaggggaccgtttcccccctcttccttcacagtatttaagaaataaaagtcggatttttctggc

SEQ ID NO: 78273 - DNA, 736 bp, Artificial Sequence
  derived and/or modified sequence
cccccacgacacctgcatgtggtccggcctatgtctcactacaccacccccatggtgctccagcaggcagccattcccatacagatcaatgtgggaaccactgtgaccatgacaggtccagctcccccgccagccaccagccacccgagggtcatccggatttcccaccagagtgtggaacccgtggtcatgatgcacatgaacattcaagattctggcacacagcctggtggtgttccgagtgctcccactggccccctgggaccccctggtcatggccaaaccctgggacagcaggtgccaggcttcccaacagctccaacccgggtggtgattgcccggcccactcctccacaggctcggccttcccatcctggagggcccccagtctctgggacactgcagggcgccggtctgggtaccaatgcctcgttggcccagatggtgagcggccttgtggggcagcttcttatgcagccagtccttgtggctcaggggaccccaggtatggctccaccgccagcccctgccactgcttctgccagtgctggcaccaccaacacagctaccacagctggccccgctcctggggggcctgcccagcctccacccacccctcaaccctccatggctgatcttcagttctctcagcttctggggaacctgctagggcctgcagggccaggggctggagggtctggtgtggcttctcccaccatcactgtggcgatgcctg

SEQ ID NO: 78274 - DNA, 714 bp, Artificial Sequence
  derived and/or modified sequence
tcctcagctgagggggctcccccgccaggtccagctcccccgccagccaccagccacccgagggtcatccggatttcccaccagagtgtggaacccgtggtcatgatgcacatgaacattcaagggccactgtctctgtctccctgcccagattctggcacacagcctggtggtgttccgagtgctcccactggccccctgggaccccctggtcatggccaaaccctgggacagcaggtgccaggcttcccaacagctccaacccgggtggtgattgcccggcccactcctccacaggctcggccttcccatcctggagggcccccagtctctgggacactgcagggcgccggtctgggtaccaatgcctcgttggcccagatggtgagcggccttgtggggcagcttcttatgcagccagtccttgtggctcaggggaccccaggtatggctccaccgccagcccctgccactgcttctgccagtgctggcaccaccaacacagctaccacagctggccccgctcctggggggcctgcccagcctccacccacccctcaaccctccatggctgatcttcagttctctcagcttctggggaacctgctagggcctgcagggccaggggctggagggcctggtgtggcttctcccaccatcactgtggcgatgcctggtgtccctgcctttctccaaggcatgactgacttcttg

SEQ ID NO: 78275 - DNA, 714 bp, Artificial Sequence
  derived and/or modified sequence
tcctcagctgagggggctcccccgccaggtccagctcccccgccagccaccagccacccgagggtcatccggatttcccaccagagtgtggaacccgtggtcatgatgcacatgaacattcaagggccactgtctctgtctccctgcccagattctggcacacagcctggtggtgttccgagtgctcccactggccccctgggaccccctggtcatggccaaaccctgggacagcaggtgccaggcttcccaacagctccaacccgggtggtgattgcccggcccactcctccacaggctcggccttcccatcctggagggcccccagtctctgggacactgcagggcgccggtctgggtaccaatgcctcgttggcccagatggtgagcggccttgtggggcagcttcttatgcagccagtccttgtggctcaggggaccccaggtatggctccaccgccagcccctgccactgcttctgccagtgctggcaccaccaacacagctaccacagctggccccgctcctggggggcctgcccagcctccacccacccctcaaccctccatggctgatcttcagttctctcagcttctggggaacctgctagggcctgcagggccaggggctggagggtctggtgtggcttctcccaccatcactgtggcgatgcctggtgtccctgcctttctccaaggcatgactgacttcttg

SEQ ID NO: 78276 - DNA, 736 bp, Artificial Sequence
  derived and/or modified sequence
cccccacgacacctgcatgtggtccggcctatgtctcactacaccacccccatggtgctccagcaggcagccattcccatacagatcaatgtgggaaccactgtgaccatgacaggtccagctcccccgccagccaccagccacccgagggtcatccggatttcccaccagagtgtggaacccgtggtcatgatgcacatgaacattcaagattctggcacacagcctggtggtgttccgagtgctcccactggccccctgggaccccctggtcatggccaaaccctgggacagcaggtgccaggcttcccaacagctccaacccgggtggtgattgcccggcccactcctccacaggctcggccttcccatcctggagggcccccagtctctgggacactgcagggcgccggtctgggtaccaatgcctcgttggcccagatggtgagcggccttgtggggcagcttcttatgcagccagtccttgtggctcaggggaccccaggtatggctccaccgccagcccctgccactgcttctgccagtgctggcaccaccaacacagctaccacagctggccccgctcctggggggcctgcccagcctccacccacccctcaaccctccatggctgatcttcagttctctcagcttctggggaacctgctagggcctgcagggccaggggctggagggcctggtgtggcttctcccaccatcactgtggcgatgcctg

SEQ ID NO: 78277 - DNA, 3569 bp, Artificial Sequence
  derived and/or modified sequence
gtagtacggtcccccgggcgacagcggtggcggctcctcggggtgctcggctccctcccacctaggccggccccggcccgactcgccctcagaaactcactgtttggggctgcggactttctcgtcgtgccccacaaaagtaaagcttggggacctggggggagccggaagtatcgcttcgagatccccaaatactatcggggaaacggaagtggccgtcggtggcagagacctgtcggccatggagcctaatgatagtaccagtaccgctgtggaggagcctgacagcttggaggtgttggtgaagaccttggactctcaaactcgtacctttattgtgggggcccagatgaatgtaaaagagtttaaggagcacattgctgcctctgtcagcatcccatctgaaaaacaacggctcatttaccagggacgagttctgcaagatgataagaagcttcaggaatacaatgttgggggaaaggttatccacctggtggaacgggctcctcctcagactcacctcccttctggggcatcttctgggacggggtctgcctcagccactcatggtgggggatccccccctggtactcgggggcctggggcctctgttcatgaccggaatgccaacagctatgtcatggttggaaccttcaatcttcctagtgacggctctgctgtggatgttcacatcaacatggaacaggccccgattcagagtgagccccgggtacggctggtgatggctcagcacatgatcagggatatacagaccttactatcccggatggagtgtcgaggagggccccaaccgcagcacagtcagccgcccccgcagccaccggctgtgaccccggagccagtagccttgagctctcaaacatcagaaccagttgaaagtgaagcacctccccgggagcccatggaggcagaagaagtggaggagcgtgccccagcccagaacccggagctcactcctggcccagccccagcgggcccaacacctgccccggaaacaaatgcacccaaccatccttcccctgcggagtatgtcgaggtgctccaggagctacagcggctggagagtcgcctccagcccttcttgcagcgctactacgaggttctgggtgctgctgccaccacggactacaataacaatcacgagggccgggaggaggatcagcggttgatcaacttggtaggggagagcctgcgactgctgggcaacacctttgttgcactgtctgacctgcgctgcaatctggcctgcacgcccccacgacacctgcatgtggtccggcctatgtctcactacaccacccccatggtgctccagcaggcagccattcccatacagatcaatgtgggaaccactgtgaccatgacaggaaatgggactcggccccccccaactcccaatgcagaggcacctccccctggtcctgggcaggcctcatccgtggctccgtcttctaccaatgtcgagtcctcagctgagggggctcccccgccaggtccagctcccccgccagccaccagccacccgagggtcatccggatttcccaccagagtgtggaacccgtggtcatgatgcacatgaacattcaagattctggcacacagcctggtggtgttccgagtgctcccactggccccctgggaccccctggtcatggccaaaccctgggacagcaggtgccaggcttcccaacagctccaacccgggtggtgattgcccggcccactcctccacaggctcggccttcccatcctggagggcccccagtctctgggacactgcagggcgccggtctgggtaccaatgcctcgttggcccagatggtgagcggccttgtggggcagcttcttatgcagccagtccttgtggctcaggggaccccaggtatggctccaccgccagcccctgccactgcttctgccagtgctggcaccaccaacacagctaccacagctggccccgctcctggggggcctgcccagcctccacccacccctcaaccctccatggctgatcttcagttctctcagcttctggggaacctgctagggcctgcagggccaggggctggagggtctggtgtggcttctcccaccatcactgtggcgatgcctggtgtccctgcctttctccaaggcatgactgacttcttgcaggcaacacagacagcccctccaccacccccacctcctccacccccaccacctgccccagagcagcagaccatgcccccaccaggctccccttctggtggcgcagggagtcctggaggcctgggtcttgagagcctgtcaccggagttttttacctcagtggtgcagggtgtgctcagctccctgctgggctccctgggggctcgggctggcagcagtgaaagtattgctgccttcatacaacgcctcagtggatccagcaacatctttgagcctggagctgatggggcccttggattctttggggccttgctttctcttctgtgccagaacttctctatggtggacgtagtgatgcttctccatgggcatttccagccactacaacggctccagccccagctgcgatccttcttccaccagcactacctgggtggtcaggagcccacacccagtaacatccggatggcaacccacacattgatcacggggctagaagagtatgtgcgggagagtttttccttggtgcaggttcagccaggtgtggacatcatccggacaaacctggaatttctccaagagcagtttaatagcattgctgcgcatgtgctgcattgcacagatagtggatttggggcccggttgctggagttgtgtaaccaaggcctgtttgaatgcctggccctaaacctgcactgcttggggggacagcagatggagcttgctgctgttatcaatggccgaattcgtcgtatgtctcgtggggtgaatccctccttggtgagctggctgaccactatgatgggactgaggcttcaggtggtactggagcacatgcctgtaggccctgatgccattctcagatacgttcgcagggttggtgatcccccccagccacttcctgaggagccaatggaagttcagggagcagaaagagcttcccctgagcctcagcgggagaatgcttccccagcccctggaacaacagcagaagaggccatgtcccgaggtccacctcctgctcctgaggggggctcccgggatgaacaggatggagcttcagctgagacagaaccttgggcagctgcagtccccccagaatgggtccctattatccagcaggacattcagagccagcggaaggtgaaaccgcagccccctctgagtgatgcctacctcagtggtatgcctgccaagagacgcaagctccggtctgatatacaaaaacgactgcaggaagaccccaactacagtccccagcgcttccccaatgcccagcgggcctttgctgatgatccttagctctttctttgctctatggcccttcctcatcaggggaccgtttcccccctcttccttcacagtatttaagaaataaaagtcggatttttctggc

SEQ ID NO: 78278 - DNA, 3565 bp, Artificial Sequence
  derived and/or modified sequence
gtagtacggtcccccgggcgacagcggtggcggctcctcggggtgctcggctccctcccacctaggccggccccggcccgactcgccctcagaaactcactgtttggggctgcggactttctcgtcgtgccccacaaaagtaaagcttggggacctggggggagccggaagtatcgcttcgagatccccaaatactatcggggaaacggaagtggccgtcggtggcagagacctgtcggccatggagcctaatgatagtaccagtaccgctgtggaggagcctgacagcttggaggtgttggtgaagaccttggactctcaaactcgtacctttattgtgggggcccagatgaatgtaaaagagtttaaggagcacattgctgcctctgtcagcatcccatctgaaaaacaacggctcatttaccagggacgagttctgcaagatgataagaagcttcaggaatacaatgttgggggaaaggttatccacctggtggaacgggctcctcctcagactcacctcccttctggggcatcttctgggacggggtctgcctcagccactcatggtgggggatccccccctggtactcgggggcctggggcctctgttcatgaccggaatgccaacagctatgtcatggttggaaccttcaatcttcctagtgacggctctgctgtggatgttcacatcaacatggaacaggccccgattcagagtgagccccgggtacggctggtgatggctcagcacatgatcagggatatacagaccttactatcccggatggagtgtcgaggagggccccaaccgcagcacagtcagccgcccccgcagccaccggctgtgaccccggagccagtagccttgagctctcaaacatcagaaccagttgaaagtgaagcacctccccgggagcccatggaggcagaagaagtggaggagcgtgccccagcccagaacccggagctcactcctggcccagccccagcgggcccaacacctgccccggaaacaaatgcacccaaccatccttcccctgcggagtatgtcgaggtgctccaggagctacagcggctggagagtcgcctccagcccttcttgcagcgctactacgaggttctgggtgctgctgccaccacggactacaataacaatcacgagggccgggaggaggatcagcggttgatcaacttggtaggggagagcctgcgactgctgggcaacacctttgttgcactgtctgacctgcgctgcaatctggcctgcacgcccccacgacacctgcatgtggtccggcctatgtctcactacaccacccccatggtgctccagcaggcagccattcccatacagatcaatgtgggaaccactgtgaccatgacaggaaatgggactcggccccccccaactcccaatgcagaggcacctccccctggtcctgggcaggcctcatccgtggctccgtcttctaccaatgtcgagtcctcagctgagggggctcccccgccaggtccagctcccccgccagccaccagccacccgagggtcatccggatttcccaccagagtgtggaacccgtggtcatgatgcacatgaacattcaagattctggcacacagcctggtggtgttccgagtgctcccactggccccctgggaccccctggtcatggccaaaccctgggacagcaggtgccaggcttcccaacagctccaacccgggtggtgattgcccggcccactcctccacaggctcggccttcccatcctggagggcccccagtctctgggacactgcagggcgccggtctgggtaccaatgcctcgttggcccagatggtgagcggccttgtggggcagcttcttatgcagccagtccttgtggctcaggggaccccaggtatggctccaccgccagcccctgccactgcttctgccagtgctggcaccaccaacacagctaccacagctggccccgctcctggggggcctgcccagcctccacccacccctcaaccctccatggctgatcttcagttctctcagcttctggggaacctgctagggcctgcagggccaggggctggagggcctggtgtggcttctcccaccatcactgtggcgatgcctggtgtccctgcctttctccaaggcatgactgacttcttgcaggcaacacagacagcccctccaccacccccacctcctccacccccaccacctgccccagagcagcagaccatgcccccaccaggctccccttctggtggcgcagggagtcctggaggcctgggtcttgagagcctgtcaccggagttttttacctcagtggtgcagggtgtgctcagctccctgctgggctccctgggggctcgggctggcagcagtgaaagtattgctgccttcatacaacgcctcagtggatccagcaacatctttgagcctggagctgatggggcccttggattctttggggccttgctttctcttctgtgccagaacttctctatggtggacgtagtgatgcttctccatgggcatttccagccactacaacggctccagccccagctgcgatccttcttccaccagcactacctgggtggtcaggagcccacacccagtaacatccggatggcaacccacacattgatcacggggctagaagagtatgtgcgggagagtttttccttggtgcaggttcagccaggtgtggacatcatccggacaaacctggaatttctccaagagcagtttaatagcattgctgcgcatgtgctgcattgcacagatagtggatttggggcccggttgctggagttgtgtaaccaaggcctgtttgaatgcctggccctaaacctgcactgcttggggggacagcagatggagcttgctgctgttatcaatggccgaattcgtcgtatgtctcgtggggtgaatccctccttggtgagctggctgaccactatgatgggactgaggcttcaggtggtactggagcacatgcctgtaggccctgatgccattctcagatacgttcgcagggttggtgatcccccccagccacttcctgaggagccaatggaagttcagggagcagaaagagcttcccctgagcctcagcgggagaatgcttccccagcccctggaacaacagcagaagaggccatgtcccgaggtccacctcctgctcctgaggggggctcccgggatgaacaggatggagcttcagctgagacagaaccttgggcagctgcagtccccccagaatgggtccctattatccagcaggacattcagagccagcggaaggtgaaaccgcagccccctctgagtgatgcctacctcagtggtatgcctgccaagagacgcaagctccggtctgatatacaaaaacgactgcaggaagaccccaactacagtccccagcgcttccccaatgcccagcgggcctttgctgatgatccttagctctttgctctatggcccttcctcatcaggggaccgtttcccccctcttccttcacagtatttaagaaataaaagtcggatttttctggc

SEQ ID NO: 78279 - DNA, 3234 bp, Artificial Sequence
  derived and/or modified sequence
atggagcccaacgacagcaccagcaccgccgtggaggagcccgacagcctggaggtgctggtgaagaccctggacagccagaccagaaccttcatcgtgggcgcccagatgaacgtgaaggagttcaaggagcacatcgccgccagcgtgagcatccccagcgagaagcagagactgatctaccagggcagagtgctgcaggacgacaagaagctgcaggagtacaacgtgggcggcaaggtgatccacctggtggagagagcccccccccagacccacctgcccagcggcgccagcagcggcaccggcagcgccagcgccacccacggcggcggcagcccccccggcaccagaggccccggcgccagcgtgcacgacagaaacgccaacagctacgtgatggtgggcaccttcaacctgcccagcgacggcagcgccgtggacgtgcacatcaacatggagcaggcccccatccagagcgagcccagagtgagactggtgatggcccagcacatgatcagagacatccagaccctgctgagcagaatggagtgcagaggcggcccccagccccagcacagccagccccccccccagccccccgccgtgacccccgagcccgtggccctgagcagccagaccagcgagcccgtggagagcgaggccccccccagagagcccatggaggccgaggaggtggaggagagagcccccgcccagaaccccgagctgacccccggccccgcccccgccggccccacccccgcccccgagaccaacgcccccaaccaccccagccccgccgagtacgtggaggtgctgcaggagctgcagagactggagagcagactgcagcccttcctgcagagatactacgaggtgctgggcgccgccgccaccaccgactacaacaacaaccacgagggcagagaggaggaccagagactgatcaacctggtgggcgagagcctgagactgctgggcaacaccttcgtggccctgagcgacctgagatgcaacctggcctgcaccccccccagacacctgcacgtggtgagacccatgagccactacaccacccccatggtgctgcagcaggccgccatccccatccagatcaacgtgggcaccaccgtgaccatgaccggcaacggcaccagacccccccccacccccaacgccgaggcccccccccccggccccggccaggccagcagcgtggcccccagcagcaccaacgtggagagcagcgccgagggcgcccccccccccggccccgcccccccccccgccaccagccaccccagagtgatcagaatcagccaccagagcgtggagcccgtggtgatgatgcacatgaacatccaggacagcggcacccagcccggcggcgtgcccagcgcccccaccggccccctgggcccccccggccacggccagaccctgggccagcaggtgcccggcttccccaccgcccccaccagagtggtgatcgccagacccacccccccccaggccagacccagccaccccggcggcccccccgtgagcggcaccctgcagggcgccggcctgggcaccaacgccagcctggcccagatggtgagcggcctggtgggccagctgctgatgcagcccgtgctggtggcccagggcacccccggcatggcccccccccccgcccccgccaccgccagcgccagcgccggcaccaccaacaccgccaccaccgccggccccgcccccggcggccccgcccagcccccccccaccccccagcccagcatggccgacctgcagttcagccagctgctgggcaacctgctgggccccgccggccccggcgccggcggcagcggcgtggccagccccaccatcaccgtggccatgcccggcgtgcccgccttcctgcagggcatgaccgacttcctgcaggccacccagaccgccccccccccccccccccccccccccccccccccccccgcccccgagcagcagaccatgcccccccccggcagccccagcggcggcgccggcagccccggcggcctgggcctggagagcctgagccccgagttcttcaccagcgtggtgcagggcgtgctgagcagcctgctgggcagcctgggcgccagagccggcagcagcgagagcatcgccgccttcatccagagactgagcggcagcagcaacatcttcgagcccggcgccgacggcgccctgggcttcttcggcgccctgctgagcctgctgtgccagaacttcagcatggtggacgtggtgatgctgctgcacggccacttccagcccctgcagagactgcagccccagctgagaagcttcttccaccagcactacctgggcggccaggagcccacccccagcaacatcagaatggccacccacaccctgatcaccggcctggaggagtacgtgagagagagcttcagcctggtgcaggtgcagcccggcgtggacatcatcagaaccaacctggagttcctgcaggagcagttcaacagcatcgccgcccacgtgctgcactgcaccgacagcggcttcggcgccagactgctggagctgtgcaaccagggcctgttcgagtgcctggccctgaacctgcactgcctgggcggccagcagatggagctggccgccgtgatcaacggcagaatcagaagaatgagcagaggcgtgaaccccagcctggtgagctggctgaccaccatgatgggcctgagactgcaggtggtgctggagcacatgcccgtgggccccgacgccatcctgagatacgtgagaagagtgggcgaccccccccagcccctgcccgaggagcccatggaggtgcagggcgccgagagagccagccccgagccccagagagagaacgccagccccgcccccggcaccaccgccgaggaggccatgagcagaggccccccccccgcccccgagggcggcagcagagacgagcaggacggcgccagcgccgagaccgagccctgggccgccgccgtgccccccgagtgggtgcccatcatccagcaggacatccagagccagagaaaggtgaagccccagccccccctgagcgacgcctacctgagcggcatgcccgccaagagaagaaagctgagaagcgacatccagaagagactgcaggaggaccccaactacagcccccagagattccccaacgcccagagagccttcgccgacgacccctag

SEQ ID NO: 78280 - DNA, 738 bp, Artificial Sequence
  derived and/or modified sequence
ccccccagacacctgcacgtggtgagacccatgagccactacaccacccccatggtgctgcagcaggccgccatccccatccagatcaacgtgggcaccaccgtgaccatgaccggccccgcccccccccccgccaccagccaccccagagtgatcagaatcagccaccagagcgtggagcccgtggtgatgatgcacatgaacatccaggacagcggcacccagcccggcggcgtgcccagcgcccccaccggccccctgggcccccccggccacggccagaccctgggccagcaggtgcccggcttccccaccgcccccaccagagtggtgatcgccagacccacccccccccaggccagacccagccaccccggcggcccccccgtgagcggcaccctgcagggcgccggcctgggcaccaacgccagcctggcccagatggtgagcggcctggtgggccagctgctgatgcagcccgtgctggtggcccagggcacccccggcatggcccccccccccgcccccgccaccgccagcgccagcgccggcaccaccaacaccgccaccaccgccggccccgcccccggcggccccgcccagcccccccccaccccccagcccagcatggccgacctgcagttcagccagctgctgggcaacctgctgggccccgccggccccggcgccggcggcagcggcgtggccagccccaccatcaccgtggccatgccctag

SEQ ID NO: 78281 - DNA, 717 bp, Artificial Sequence
  derived and/or modified sequence
agcagcgccgagggcgcccccccccccggccccgcccccccccccgccaccagccaccccagagtgatcagaatcagccaccagagcgtggagcccgtggtgatgatgcacatgaacatccagggccccctgagcctgagcccctgccccgacagcggcacccagcccggcggcgtgcccagcgcccccaccggccccctgggcccccccggccacggccagaccctgggccagcaggtgcccggcttccccaccgcccccaccagagtggtgatcgccagacccacccccccccaggccagacccagccaccccggcggcccccccgtgagcggcaccctgcagggcgccggcctgggcaccaacgccagcctggcccagatggtgagcggcctggtgggccagctgctgatgcagcccgtgctggtggcccagggcacccccggcatggcccccccccccgcccccgccaccgccagcgccagcgccggcaccaccaacaccgccaccaccgccggccccgcccccggcggccccgcccagcccccccccaccccccagcccagcatggccgacctgcagttcagccagctgctgggcaacctgctgggccccgccggccccggcgccggcggccccggcgtggccagccccaccatcaccgtggccatgcccggcgtgcccgccttcctgcagggcatgaccgacttcctgtag

SEQ ID NO: 78282 - DNA, 717 bp, Artificial Sequence
  derived and/or modified sequence
agcagcgccgagggcgcccccccccccggccccgcccccccccccgccaccagccaccccagagtgatcagaatcagccaccagagcgtggagcccgtggtgatgatgcacatgaacatccagggccccctgagcctgagcccctgccccgacagcggcacccagcccggcggcgtgcccagcgcccccaccggccccctgggcccccccggccacggccagaccctgggccagcaggtgcccggcttccccaccgcccccaccagagtggtgatcgccagacccacccccccccaggccagacccagccaccccggcggcccccccgtgagcggcaccctgcagggcgccggcctgggcaccaacgccagcctggcccagatggtgagcggcctggtgggccagctgctgatgcagcccgtgctggtggcccagggcacccccggcatggcccccccccccgcccccgccaccgccagcgccagcgccggcaccaccaacaccgccaccaccgccggccccgcccccggcggccccgcccagcccccccccaccccccagcccagcatggccgacctgcagttcagccagctgctgggcaacctgctgggccccgccggccccggcgccggcggcagcggcgtggccagccccaccatcaccgtggccatgcccggcgtgcccgccttcctgcagggcatgaccgacttcctgtag

SEQ ID NO: 78283 - DNA, 738 bp, Artificial Sequence
  derived and/or modified sequence
ccccccagacacctgcacgtggtgagacccatgagccactacaccacccccatggtgctgcagcaggccgccatccccatccagatcaacgtgggcaccaccgtgaccatgaccggccccgcccccccccccgccaccagccaccccagagtgatcagaatcagccaccagagcgtggagcccgtggtgatgatgcacatgaacatccaggacagcggcacccagcccggcggcgtgcccagcgcccccaccggccccctgggcccccccggccacggccagaccctgggccagcaggtgcccggcttccccaccgcccccaccagagtggtgatcgccagacccacccccccccaggccagacccagccaccccggcggcccccccgtgagcggcaccctgcagggcgccggcctgggcaccaacgccagcctggcccagatggtgagcggcctggtgggccagctgctgatgcagcccgtgctggtggcccagggcacccccggcatggcccccccccccgcccccgccaccgccagcgccagcgccggcaccaccaacaccgccaccaccgccggccccgcccccggcggccccgcccagcccccccccaccccccagcccagcatggccgacctgcagttcagccagctgctgggcaacctgctgggccccgccggccccggcgccggcggccccggcgtggccagccccaccatcaccgtggccatgccctag

SEQ ID NO: 78284 - DNA, 3234 bp, Artificial Sequence
  derived and/or modified sequence
atggagcccaacgacagcaccagcaccgccgtggaggagcccgacagcctggaggtgctggtgaagaccctggacagccagaccagaaccttcatcgtgggcgcccagatgaacgtgaaggagttcaaggagcacatcgccgccagcgtgagcatccccagcgagaagcagagactgatctaccagggcagagtgctgcaggacgacaagaagctgcaggagtacaacgtgggcggcaaggtgatccacctggtggagagagcccccccccagacccacctgcccagcggcgccagcagcggcaccggcagcgccagcgccacccacggcggcggcagcccccccggcaccagaggccccggcgccagcgtgcacgacagaaacgccaacagctacgtgatggtgggcaccttcaacctgcccagcgacggcagcgccgtggacgtgcacatcaacatggagcaggcccccatccagagcgagcccagagtgagactggtgatggcccagcacatgatcagagacatccagaccctgctgagcagaatggagtgcagaggcggcccccagccccagcacagccagccccccccccagccccccgccgtgacccccgagcccgtggccctgagcagccagaccagcgagcccgtggagagcgaggccccccccagagagcccatggaggccgaggaggtggaggagagagcccccgcccagaaccccgagctgacccccggccccgcccccgccggccccacccccgcccccgagaccaacgcccccaaccaccccagccccgccgagtacgtggaggtgctgcaggagctgcagagactggagagcagactgcagcccttcctgcagagatactacgaggtgctgggcgccgccgccaccaccgactacaacaacaaccacgagggcagagaggaggaccagagactgatcaacctggtgggcgagagcctgagactgctgggcaacaccttcgtggccctgagcgacctgagatgcaacctggcctgcaccccccccagacacctgcacgtggtgagacccatgagccactacaccacccccatggtgctgcagcaggccgccatccccatccagatcaacgtgggcaccaccgtgaccatgaccggcaacggcaccagacccccccccacccccaacgccgaggcccccccccccggccccggccaggccagcagcgtggcccccagcagcaccaacgtggagagcagcgccgagggcgcccccccccccggccccgcccccccccccgccaccagccaccccagagtgatcagaatcagccaccagagcgtggagcccgtggtgatgatgcacatgaacatccaggacagcggcacccagcccggcggcgtgcccagcgcccccaccggccccctgggcccccccggccacggccagaccctgggccagcaggtgcccggcttccccaccgcccccaccagagtggtgatcgccagacccacccccccccaggccagacccagccaccccggcggcccccccgtgagcggcaccctgcagggcgccggcctgggcaccaacgccagcctggcccagatggtgagcggcctggtgggccagctgctgatgcagcccgtgctggtggcccagggcacccccggcatggcccccccccccgcccccgccaccgccagcgccagcgccggcaccaccaacaccgccaccaccgccggccccgcccccggcggccccgcccagcccccccccaccccccagcccagcatggccgacctgcagttcagccagctgctgggcaacctgctgggccccgccggccccggcgccggcggccccggcgtggccagccccaccatcaccgtggccatgcccggcgtgcccgccttcctgcagggcatgaccgacttcctgcaggccacccagaccgccccccccccccccccccccccccccccccccccccccgcccccgagcagcagaccatgcccccccccggcagccccagcggcggcgccggcagccccggcggcctgggcctggagagcctgagccccgagttcttcaccagcgtggtgcagggcgtgctgagcagcctgctgggcagcctgggcgccagagccggcagcagcgagagcatcgccgccttcatccagagactgagcggcagcagcaacatcttcgagcccggcgccgacggcgccctgggcttcttcggcgccctgctgagcctgctgtgccagaacttcagcatggtggacgtggtgatgctgctgcacggccacttccagcccctgcagagactgcagccccagctgagaagcttcttccaccagcactacctgggcggccaggagcccacccccagcaacatcagaatggccacccacaccctgatcaccggcctggaggagtacgtgagagagagcttcagcctggtgcaggtgcagcccggcgtggacatcatcagaaccaacctggagttcctgcaggagcagttcaacagcatcgccgcccacgtgctgcactgcaccgacagcggcttcggcgccagactgctggagctgtgcaaccagggcctgttcgagtgcctggccctgaacctgcactgcctgggcggccagcagatggagctggccgccgtgatcaacggcagaatcagaagaatgagcagaggcgtgaaccccagcctggtgagctggctgaccaccatgatgggcctgagactgcaggtggtgctggagcacatgcccgtgggccccgacgccatcctgagatacgtgagaagagtgggcgaccccccccagcccctgcccgaggagcccatggaggtgcagggcgccgagagagccagccccgagccccagagagagaacgccagccccgcccccggcaccaccgccgaggaggccatgagcagaggccccccccccgcccccgagggcggcagcagagacgagcaggacggcgccagcgccgagaccgagccctgggccgccgccgtgccccccgagtgggtgcccatcatccagcaggacatccagagccagagaaaggtgaagccccagccccccctgagcgacgcctacctgagcggcatgcccgccaagagaagaaagctgagaagcgacatccagaagagactgcaggaggaccccaactacagcccccagagattccccaacgcccagagagccttcgccgacgacccctag

SEQ ID NO: 78285 - protein, 82 aa, Artificial Sequence
  derived and/or modified sequence
MPNFSGNWKIIRSENFEELLKVLGVNVMLRKIAVAAASKPAVEIKQEGDTFYIKTSTTVRTTEINFKVGEEFEEQTVDGRPC

SEQ ID NO: 78286 - protein, 138 aa, Artificial Sequence
  derived and/or modified sequence
MPNFSGNWKIIRSENFEELLKVLGVNVMLRKIAVAAASKPAVEIKQEGDTFYIKTSTTVRTTEINFKVGEEFEEQTVDGRPCKSLVKWESENKMVCEQKLLKGEGPKTSWTRELTNDGELILTMTADDVVCTRVYVRE

SEQ ID NO: 78287 - DNA, 249 bp, Artificial Sequence
  derived and/or modified sequence
atgcctaatttttctgggaattggaagataatcagaagcgagaactttgaggagctgctcaaagttctgggggtgaacgtgatgttaaggaaaattgccgtcgccgcagcttccaagcccgcagtggaaataaagcaagaaggagatactttctatattaaaacttccactaccgttcgcacgacagagattaactttaaggtcggcgaagagttcgaggaacagaccgtagacggtagaccctgctag

SEQ ID NO: 78288 - DNA, 417 bp, Artificial Sequence
  derived and/or modified sequence
atgccaaacttctccggaaactggaaaatcattcgctcagagaacttcgaggaactcttaaaggttctgggcgttaatgtgatgctgcgcaagatcgctgttgccgccgccagtaagcctgccgttgaaattaagcaagagggcgatacattctacatcaaaacctctaccacggtgcgcacaaccgagattaactttaaggtcggtgaagaatttgaagaacaaacggtcgacggaagaccctgtaagtctttggtgaagtgggagagtgagaacaaaatggtgtgcgagcagaaactcctgaagggagagggacctaaaacgagctggacaagagaactgacgaacgacggtgaactgattttaactatgaccgccgatgacgtagtgtgcaccagggtgtatgtgcgagagtag

SEQ ID NO: 78289 - DNA, 417 bp, Artificial Sequence
  derived and/or modified sequence
atgcctaattttagtggcaattggaaaatcatccgtagtgaaaacttcgaagaactcctgaaggttttaggcgtgaacgtgatgctgcgaaagatcgccgtcgcagccgcgtccaagcccgccgtggagataaaacaggaaggggatacattctacataaagacttctacaaccgtgaggacaacagagattaattttaaagtaggcgaggaatttgaagaacagactgttgatggacgcccatgcaagtcacttgtgaaatgggaatccgagaacaagatggtctgcgagcaaaagctcttaaagggagagggtccaaagacctcatggaccagggagttgacaaatgacggtgaactgatcctgacgatgacagcagacgacgtggtgtgcactcgagtgtacgtgagggagtag

SEQ ID NO: 78290 - DNA, 249 bp, Artificial Sequence
  derived and/or modified sequence
atgcccaacttcagcggcaactggaagatcatccgctctgagaactttgaggagctgctgaaggtgctgggcgtgaatgtgatgctgaggaagattgctgtggccgccgccagcaagccagctgtggagatcaagcaggagggggacaccttctacatcaagaccagcaccaccgtgaggaccacagagatcaacttcaaggtgggggaggagtttgaggagcagacagtggatggccggccctgctag

SEQ ID NO: 78291 - DNA, 417 bp, Artificial Sequence
  derived and/or modified sequence
atgcccaacttcagcggcaactggaagatcatccgctctgagaactttgaggagctgctgaaggtgctgggcgtgaatgtgatgctgaggaagattgctgtggccgccgccagcaagccagctgtggagatcaagcaggagggggacaccttctacatcaagaccagcaccaccgtgaggaccacagagatcaacttcaaggtgggggaggagtttgaggagcagacagtggatggccggccctgcaagagcctggtgaagtgggagagcgagaacaagatggtgtgtgagcagaagctgctgaagggggagggccccaagacctcctggacccgggagctgaccaatgatggagagctgatcctgaccatgacagcagatgatgtggtgtgcaccagggtgtatgtgcgggagtag

SEQ ID NO: 78292 - DNA, 249 bp, Artificial Sequence
  derived and/or modified sequence
atgcccaacttcagcggcaactggaagatcatccggagcgagaactttgaagagttgttgaaggttctgggcgtgaacgtaatgctgagaaaaattgcggtcgccgctgccagtaaaccagcagtggagatcaaacaagagggagatactttttacatcaaaacctcaacaaccgtgagaacaaccgaaataaattttaaggtcggtgaagaatttgaggaacagaccgtggacggcaggccctgctag

SEQ ID NO: 78293 - DNA, 417 bp, Artificial Sequence
  derived and/or modified sequence
atgcccaacttcagcggcaactggaagatcatccggagcgagaacttcgaggagctgctcaaagtgctgggtgtgaacgtgatgctcagaaaaatcgctgtggccgcggcctccaaacctgctgtggagattaaacaggagggtgacacattttacattaagacctcgacgacagtgagaactaccgagattaactttaaggtaggggaagagttcgaagaacagaccgtggatggacgaccatgtaaatccttagtgaaatgggaatctgaaaacaagatggtttgcgaacagaaattgttgaagggtgaaggccccaagacctcgtggacacgggagctgactaatgacggagagctgatcctgacaatgacggcagacgatgtggtttgcacccgggtttacgtgagagaatag

SEQ ID NO: 78294 - DNA, 417 bp, Artificial Sequence
  derived and/or modified sequence
atgcccaacttcagcggcaactggaagatcatccggagcgagaacttcgaagaacttctcaaggtcctcggcgttaatgtgatgctgaggaagatagctgtcgccgcagcctctaagccggcagtggaaatcaaacaagagggggacactttctatatcaaaacctcaacaactgtgcggactactgagatcaactttaaggttggcgaggagttcgaagagcagacggtcgatggacgtccctgtaagagtttggtgaaatgggagtcggaaaataaaatggtgtgtgaacagaagttgttgaaaggcgaaggtccgaagactagctggacacgagagctgaccaacgacggcgagctcattctgacaatgacagccgatgacgtggtgtgcaccagggtttacgtgcgcgaatag

SEQ ID NO: 78295 - DNA, 249 bp, Artificial Sequence
  derived and/or modified sequence
atgcctaatttttctggtaattggaagatcatcagaagtgagaatttcgaagaactgctcaaggtgctcggggtgaacgtcatgctacgaaagattgctgtcgcagccgcttctaagccagcagtggagattaagcaggagggtgataccttctacatcaaaactagtactaccgttcggacaaccgagattaactttaaggtgggagaggagttcgaagagcagaccgttgatggcagaccctgttag

SEQ ID NO: 78296 - DNA, 417 bp, Artificial Sequence
  derived and/or modified sequence
atgcccaactttagcggcaactggaagataattagatcggagaatttcgaagagctcctgaaggtactgggagtcaatgtcatgctacggaaaatcgcggtggcagccgcttcgaagccggctgtagagattaagcaggagggcgacaccttctacattaagacttccacaaccgtccggaccacagagatcaactttaaagttggcgaggagtttgaagaacaaacagtcgatggccgtccttgcaagagtctggtaaagtgggagtcggagaacaagatggtgtgcgaacagaagctgctgaagggggagggtcccaagacttcctggactagggaactaaccaatgatggggagctgatccttaccatgaccgccgacgacgtggtctgcacacgcgtatatgtgagggaatag

SEQ ID NO: 78297 - DNA, 417 bp, Artificial Sequence
  derived and/or modified sequence
atgcccaatttctcaggaaactggaagatcatacggtccgaaaacttcgaggaattactcaaggtgctcggagtcaatgtgatgctccgcaagattgctgtagccgcagcctccaagcctgctgtcgagatcaagcaggagggtgacacgttctatattaagacatccacaactgtccgtacgaccgagatcaatttcaaagtgggcgaggagttcgaagaacagacggtagacggaaggccctgtaagagcctcgtgaagtgggagtctgagaataagatggtttgcgagcagaagttactgaaaggggaagggcctaagaccagctggacccgagagctgacgaacgacggggagctgatcctcacaatgactgcagatgacgtggtgtgcacccgagtgtatgttcgggaatag

SEQ ID NO: 78298 - DNA, 456 bp, Artificial Sequence
  derived and/or modified sequence
gattcaagtgctggctttgcgtccgcttccccatccacttactagcgcaggagaaggctatctcggtccccagagaagcctggacccacacgcgggctagatccagagaacctgacgacccggcgacggcgacgtctcttttgactaaaagacagtgtccagtgctccagcctaggagtctacggggaccgcctcccgcgccgccaccatgcccaacttctctggcaactggaaaatcatccgatcggaaaacttcgaggaattgctcaaagtgctgggggtgaatgtgatgctgaggaagattgctgtggctgcagcgtccaagccagcagtggagatcaaacaggagggagacactttctacatcaaaacctccaccaccgtgcgcaccacagagattaacttcaaggttggggaggagtttgaggagcagactgtggatgggaggccctgtaa

SEQ ID NO: 78299 - DNA, 783 bp, Artificial Sequence
  derived and/or modified sequence
ccagagaagcctggacccacacgcgggctagatccagagacagtgtccagtgctccagcctaggagtctacggggaccgcctcccgcgccgccaccatgcccaacttctctggcaactggaaaatcatccgatcggaaaacttcgaggaattgctcaaagtgctgggggtgaatgtgatgctgaggaagattgctgtggctgcagcgtccaagccagcagtggagatcaaacaggagggagacactttctacatcaaaacctccaccaccgtgcgcaccacagagattaacttcaaggttggggaggagtttgaggagcagactgtggatgggaggccctgtaagagcctggtgaaatgggagagtgagaataaaatggtctgtgagcagaagctcctgaagggagagggccccaagacctcgtggaccagagaactgaccaacgatggggaactgatcctgaccatgacggcggatgacgttgtgtgcaccagggtctacgtccgagagtgagtggccacaggtagaaccgcggccgaagcccaccactggccatgctcaccgccctgcttcactgccccctccgtcccaccccctccttctaggatagcgctccccttaccccagtcacttctgggggtcactgggatgcctcttgcagggtcttgctttctttgacctcttctctcctcccctacaccaacaaagaggaatggctgcaagagcccagatcacccattccgggttcactccccgcctccccaagtcagcagtcctagcccc

SEQ ID NO: 78300 - DNA, 992 bp, Artificial Sequence
  derived and/or modified sequence
cgcgcgggagcccaggccagctttggggttgtccctggacttgtcttggttccagaacctgacgacccggcgacggcgacgtctcttttgactaaaagacagtgtccagtgctccagcctaggagtctacggggaccgcctcccgcgccgccaccatgcccaacttctctggcaactggaaaatcatccgatcggaaaacttcgaggaattgctcaaagtgctgggggtgaatgtgatgctgaggaagattgctgtggctgcagcgtccaagccagcagtggagatcaaacaggagggagacactttctacatcaaaacctccaccaccgtgcgcaccacagagattaacttcaaggttggggaggagtttgaggagcagactgtggatgggaggccctgtaagagcctggtgaaatgggagagtgagaataaaatggtctgtgagcagaagctcctgaagggagagggccccaagacctcgtggaccagagaactgaccaacgatggggaactgatcctgaccatgacggcggatgacgttgtgtgcaccagggtctacgtccgagagtgagtggccacaggtagaaccgcggccgaagcccaccactggccatgctcaccgccctgcttcactgccccctccgtcccaccccctccttctaggatagcgctccccttaccccagtcacttctgggggtcactgggatgcctcttgcagggtcttgctttctttgacctcttctctcctcccctacaccaacaaagaggaatggctgcaagagcccagatcacccattccgggttcactccccgcctccccaagtcagcagtcctagccccaaaccagcccagagcagggtctctctaaaggggacttgagggcctgagcaggaaagactggccctctagcttctaccctttgtccctgtagcctatacagtttagaatatttatttgttaattttattaaaatgctttaaaaaaataaaa

SEQ ID NO: 78301 - DNA, 249 bp, Artificial Sequence
  derived and/or modified sequence
atgcccaacttcagcggcaactggaagatcatcagaagcgagaacttcgaggagctgctgaaggtgctgggcgtgaacgtgatgctgagaaagatcgccgtggccgccgccagcaagcccgccgtggagatcaagcaggagggcgacaccttctacatcaagaccagcaccaccgtgagaaccaccgagatcaacttcaaggtgggcgaggagttcgaggagcagaccgtggacggcagaccctgctag

SEQ ID NO: 78302 - DNA, 417 bp, Artificial Sequence
  derived and/or modified sequence
atgcccaacttcagcggcaactggaagatcatcagaagcgagaacttcgaggagctgctgaaggtgctgggcgtgaacgtgatgctgagaaagatcgccgtggccgccgccagcaagcccgccgtggagatcaagcaggagggcgacaccttctacatcaagaccagcaccaccgtgagaaccaccgagatcaacttcaaggtgggcgaggagttcgaggagcagaccgtggacggcagaccctgcaagagcctggtgaagtgggagagcgagaacaagatggtgtgcgagcagaagctgctgaagggcgagggccccaagaccagctggaccagagagctgaccaacgacggcgagctgatcctgaccatgaccgccgacgacgtggtgtgcaccagagtgtacgtgagagagtag

SEQ ID NO: 78303 - DNA, 510 bp, Artificial Sequence
  derived and/or modified sequence
atggccgtgttcggcatgggctgcttctggggcgccgagagaaagttctgggtgctgaagggcgtgtacagcacccaggtgggcttcgccggcggctacaccagcaaccccacctacaaggaggtgtgcagcgagaagaccggccacgccgaggtggtgagagtggtgtaccagcccgagcacatgagcttcgaggagctgctgaaggtgttctgggagaaccacgaccccacccagggcatgagacagggcaacgaccacggcacccagtacagaagcgccatctaccccaccagcgccaagcagatggaggccgccctgagcagcaaggagaactaccagaaggtgctgagcgagcacggcttcggccccatcaccaccgacatcagagagggccagaccttctactacgccgaggactaccaccagcagtacctgagcaagaaccccaacggctactgcggcctgggcggcaccggcgtgagctgccccgtgggcatcaagaagtag

SEQ ID NO: 78304 - DNA, 510 bp, Artificial Sequence
  derived and/or modified sequence
atggccgtgtttggcatgggctgtttttggggcgccgagaggaaattttgggtgctgaaaggtgtctattctacccaagtgggatttgccggggggtacacttccaacccgacgtacaaggaagtgtgcagcgaaaaaacagggcacgctgaggttgttcgcgtcgtctaccaacctgagcacatgtcctttgaggagctgcttaaagtcttctgggaaaaccacgacccaacccagggcatgcgacaaggaaacgaccatggcacacaatacagatctgcaatctatcccacgtcagctaaacagatggaggccgctctttccagtaaagaaaactaccagaaggtcctctccgaacacgggttcggccctattacaaccgatatcagggaaggccagacattctactatgcagaagattaccatcagcagtaccttagcaagaatcctaatgggtactgcggcctggggggaactggggtatcgtgtcccgtgggcattaaaaaatag

SEQ ID NO: 78305 - DNA, 510 bp, Artificial Sequence
  derived and/or modified sequence
atggctgtgtttggcatgggctgcttctggggcgctgagaggaagttctgggtgctgaagggcgtgtacagcacccaggtgggctttgctgggggctacaccagcaaccccacctacaaggaggtgtgcagcgagaagacaggccacgccgaggtggtgcgggtggtgtaccagcctgagcacatgagctttgaggagctgctgaaggtgttctgggagaaccacgaccccacccagggcatgaggcagggcaatgaccacggcacccagtacagaagtgccatctaccccaccagcgccaagcagatggaggccgccctgagcagcaaagaaaactaccagaaggtgctgtctgagcacggcttcggccccatcaccacagacatccgggagggccagaccttctactatgcagaggactaccaccagcagtacctgagcaagaaccccaacggctactgcggcctgggcggcactggagtgtcctgccctgtgggcatcaagaagtag

SEQ ID NO: 78306 - DNA, 510 bp, Artificial Sequence
  derived and/or modified sequence
atggccgtgttcggcatgggctgcttctggggcgccgagcggaagttttgggtgctaaagggagtttatagtactcaggttggcttcgcagggggctatacttctaatccaacatataaggaagtgtgctctgagaagaccggccatgctgaggtagtccgggtcgtgtatcagcccgagcacatgtcctttgaagaattattgaaggtgttttgggaaaatcacgatccaactcagggtatgcggcagggcaacgaccacggcactcagtacagatctgccatataccccacatccgcaaagcagatggaggctgccttatcttcaaaagaaaactatcagaaagtgctatccgagcatggcttcggcccgatcaccactgatattagggagggtcagacattctattatgctgaggattaccaccagcagtacctgtccaaaaacccaaatggctactgtgggctcggaggtacaggcgtgagttgccctgtcggcatcaagaagtag

SEQ ID NO: 78307 - DNA, 510 bp, Artificial Sequence
  derived and/or modified sequence
atggccgttttcggtatgggttgcttctggggcgcagaacgtaagttttgggtgcttaagggcgtttattccactcaagtggggtttgctgggggttacacttccaatcccacctataaagaggtgtgttctgagaagactggccatgctgaggtcgtgcgtgtggtgtaccaaccagaacacatgagttttgaagagctgctcaaagtgttctgggagaatcatgaccccactcaagggatgagacaaggcaacgatcacgggactcaatatcgcagcgccatatatccgacctcggctaagcagatggaggccgcactgtcgtctaaagaaaactatcaaaaagtgcttagcgagcacgggtttggaccaatcacaacagatattcgtgaaggccagacattctactacgctgaggactaccatcagcaatacttaagcaaaaatccaaacggatattgtggtctgggagggacaggtgtcagctgccctgtgggaatcaagaagtag

SEQ ID NO: 78308 - protein, 157 aa, Artificial Sequence
  derived and/or modified sequence
MGLLTILKKMKQKERELRLLMLGLDNAGKTTILKKFNGEDIDTISPTLGFNIKTLEHRGFKLNIWDVGGQKSLRSYWRNYFESTDGLIWVVDSADRQRMQDCQRELQSLLVEEVLELDSIRSHHWCIQGCSAVTGENLLPGIDWLLDDISSRIFTAD

SEQ ID NO: 78309 - DNA, 474 bp, Artificial Sequence
  derived and/or modified sequence
atggggctgctgacaattcttaaaaaaatgaagcaaaaagaacgggagctcaggctgctgatgcttggattagataacgcagggaaaacaaccattttgaagaaatttaatggagaagatatcgatacaattagcccaaccctgggtttcaatattaagaccctggagcaccggggcttcaagctcaatatctgggacgtgggcggacagaaatcactcagaagctactggaggaattacttcgagtctaccgacggcctgatatgggtcgtcgattcagctgaccgacaacgaatgcaggattgccaacgggagttgcaaagcctgctggtggaagaggtgcttgaactcgactcaatccggagccaccattggtgcatccagggatgctctgcagtgactggcgaaaatctgctccctggcatcgactggctcctggatgacatctcttcgagaatcttcacagctgattag

SEQ ID NO: 78310 - DNA, 795 bp, Artificial Sequence
  derived and/or modified sequence
gggggctccggggaccatggggctcctgaccattctgaagaagatgaagcagaaagagcgggagctgcgactgctcatgcttggcctggacaatgctggaaagacaaccatcctgaagaagttcaatggggaggacatcgacaccatctccccaacgctgggcttcaacatcaagaccctggagcaccgaggattcaagctgaacatctgggatgtgggtggccagaagtccctgcggtcctactggcggaactactttgagagcaccgatggcctcatctgggtagtggacagcgcagaccgccagcgcatgcaggactgccagcgggagctccagagcctgctggtggaggaggtcctggagctggactccatccgcagccaccactggtgcatccagggctgcagcgccgtcaccggggagaacctgctgccgggcatcgactggctcctggatgacatttccagccgcattttcacagctgactgaaccactccagatgccccccacctagcagtccaggtccctcaaccttcaccaaacactacccatggggggttgggagtcagccggccaaactaacactccccctcctccaccccagcctgctgctgctactgctgcccgctgctgctctgtggccacccggctcccatggcgggagggctgtgccctggctgtctctctggctcctgacctggcctttggctaccataccaagaagagagggctgggcggggaggagctgctactgctgctaccgaggctgtgggcctcatccttcactcagttgt

SEQ ID NO: 78311 - DNA, 474 bp, Artificial Sequence
  derived and/or modified sequence
atgggcctgctgaccatcctgaagaagatgaagcagaaggagcgggagctgcggctgctgatgctgggcctggacaatgccggcaagaccaccatcctgaagaagttcaatggagaagatattgacaccatcagccccaccctgggcttcaacatcaagaccctggagcaccggggcttcaagctgaacatctgggatgtgggcggccagaagagcctgcggagctactggaggaactactttgagagcacagatggcctcatctgggtggtggacagcgctgaccggcagaggatgcaggactgccagcgggagctgcagagcctgctggtggaggaggtgctggagctggacagcatccgcagccaccactggtgcatccagggctgcagcgctgtgactggagagaacctgctgcccggcatcgactggctgctggatgacatcagcagccgcatcttcaccgctgactag

SEQ ID NO: 78312 - DNA, 474 bp, Artificial Sequence
  derived and/or modified sequence
atgggcctgctgaccatcctgaagaagatgaagcagaaggagcgggagttgcggctgttgatgttagggttggacaatgccggcaaaaccaccattctgaaaaaatttaatggtgaggacatcgatactatttcgccgactcttggttttaatattaagacccttgaacaccgcggctttaagctcaacatttgggacgttggagggcagaagagcctgcgcagttattggcggaattacttcgaatctacagatggactgatctgggtggtggattctgctgaccgacagagaatgcaagactgccaacgggagctgcaaagtctcctggtcgaagaggtactcgagttggactctattagatcccaccactggtgtattcagggttgttcagccgtgacgggggaaaatctcctgccaggtatcgattggctcttagacgacatttcttcccgtattttcaccgcagattag

SEQ ID NO: 78313 - DNA, 474 bp, Artificial Sequence
  derived and/or modified sequence
atgggcctgcttactatcctgaagaaaatgaagcaaaaggaacgagagctccgcctgcttatgctgggcctggataacgcaggcaaaacgaccatcctcaagaaatttaatggcgaggacatagataccatatcccctacactcggttttaacattaagactctcgagcaccggggattcaaactgaatatatgggatgtcggcggtcagaagtcattacggagctattggcgaaactacttcgaaagcaccgacgggttgatctgggtagtggattctgccgatcgccagagaatgcaggattgccagagggagctccagtcactgttggtggaagaggtcctagaattggacagcataaggtcccaccactggtgtattcaggggtgtagcgcagtcaccggagaaaacttactgcctggtatcgactggcttttagatgatatttcatcgcggatttttacagccgactag

SEQ ID NO: 78314 - DNA, 474 bp, Artificial Sequence
  derived and/or modified sequence
atgggcctgctgaccatcctgaagaagatgaagcagaaggagagagagctgagactgctgatgctgggcctggacaacgccggcaagaccaccatcctgaagaagttcaacggcgaggacatcgacaccatcagccccaccctgggcttcaacatcaagaccctggagcacagaggcttcaagctgaacatctgggacgtgggcggccagaagagcctgagaagctactggagaaactacttcgagagcaccgacggcctgatctgggtggtggacagcgccgacagacagagaatgcaggactgccagagagagctgcagagcctgctggtggaggaggtgctggagctggacagcatcagaagccaccactggtgcatccagggctgcagcgccgtgaccggcgagaacctgctgcccggcatcgactggctgctggacgacatcagcagcagaatcttcaccgccgactag

SEQ ID NO: 78315 - protein, 289 aa, Artificial Sequence
  derived and/or modified sequence
MSSYFVNPLYSKYKAAAAAAAAAGEAINPTYYDCHFAPEVGGRHAAAAAALQLYGNSAAGFPHAPPQAHAHPHPSPPPSGTGCGGREGRGQEYFHPGGGSPAAAYQAAPPPPPHPPPPPPPPPCGGIACHGEPAKFYGYDNLQRQPIFTTQQEAELVQYPDCKSSSGNIGEDPDHLNQSSSPSQMFPWMRPQAPGRRRGRQTYSRFQTLELEKEFLFNPYLTRKRRIEVSHALALTERQVKIWFQNRRMKWKKENNKDKFPVSRQEVKDGETKKEAQELEEDRAEGLTN

SEQ ID NO: 78316 - DNA, 870 bp, Artificial Sequence
  derived and/or modified sequence
atgtcttcttacttcgtgaaccctttgtatagcaagtataaggccgccgccgcggcagccgccgccgctggtgaagccatcaatcccacatactacgactgccactttgcccctgaggtcggcggaagacatgctgcagccgccgccgcccttcagctctatggtaattccgccgccgggttcccacacgcacctcctcaggcacacgcgcacccccacccatctcctcccccctcaggcaccggctgcggagggcgagagggacgaggccaagagtatttccaccccgggggtggatctccagccgccgcctatcaggctgctcctccgccgcccccccatcctcccccacctcctccaccgcccccttgtgggggaatcgcttgtcatggtgagccagcaaagttctacgggtacgacaacctgcaacgccaacccatattcacaacgcagcaggaggccgagctcgtgcagtatcccgattgtaaatcctcctctggaaacatcggcgaggatcctgaccacttaaaccagagctcttccccctcacagatgttcccgtggatgaggccccaggcgccgggccggagaaggggccgacagacctactctcggtttcagacattagagctggaaaaggagtttctgtttaatccgtacctaactcggaagcgcagaattgaagtatcccatgcactagccctgaccgagcgccaagttaagatttggttccagaatagaagaatgaaatggaagaaggagaataataaagacaaatttccggttagccgccaagaggtcaaggacggcgaaactaagaaggaagcccaggagctcgaagaggacagagctgagggactgaccaactag

SEQ ID NO: 78317 - DNA, 870 bp, Artificial Sequence
  derived and/or modified sequence
atgagctcctattttgttaaccccctgtacagcaaatacaaggcagctgccgccgctgcagccgcagccggcgaggccattaatcctacctattacgactgtcattttgcccctgaagttggcggcagacacgctgccgctgcagccgccctccagctgtacggtaattctgcggcgggcttcccgcatgcacctccacaggctcacgcccatccccatccaagcccccctccttctggaacagggtgtgggggccgcgaagggcgggggcaggagtactttcatccaggtggcggcagccctgccgccgcataccaggcagctcccccaccccccccccatcctccaccaccacccccccccccgccatgtggtggaatcgcctgccacggggagcctgcgaagttttatggatatgacaacctgcagcgccagcctatctttaccacccaacaggaagccgagctggtgcaatatcccgattgtaagtcttcctccggtaacattggtgaagatcccgaccacctgaaccaatctagcagccctagtcagatgttcccctggatgagaccacaggctcccgggaggcgacgtggtcgccagacctactccagattccagactttagagcttgaaaaagagttcctgttcaacccatacctcacaagaaagcgccgtatcgaagtgagccatgccttggccttaaccgaaaggcaggtcaaaatttggtttcagaacaggcgcatgaaatggaagaaggagaacaataaagataagttccccgtgtcaagacaggaagtaaaggatggtgaaacaaaaaaagaggctcaagagcttgaggaggaccgcgctgagggtttgaccaattag

SEQ ID NO: 78318 - DNA, 1268 bp, Artificial Sequence
  derived and/or modified sequence
tgacgccccaatgagttcgtacttcgtgaacccgctgtactccaagtacaaggcggcggctgcggcggcggcggcggcgggcgaggccatcaatcccacttactacgactgtcacttcgcgcccgaggtcggcggccgtcacgccgccgccgcagcagccctgcagctctatggcaacagcgccgccggcttcccgcacgcgcccccgcaggcgcacgcgcacccgcacccgtccccgccgccctccgggactgggtgcggcggtagggaaggccggggccaggagtacttccaccccggcgggggcagcccggccgctgcctaccaggccgccccccctcctcctccgcatcctccgcctccgccgccacctcccccctgcggcgggattgcctgtcacggggagcccgcgaagttttacggatacgataacttacagagacagccgatttttacgacccagcaagaggccgagctggtacaatatcctgactgtaaatcgtccagtggtaatattggcgaggacccagaccacttaaatcagagctcgtctccttctcaaatgtttccgtggatgagaccacaagctcctggtagacgaagaggaagacaaacctacagtcgcttccaaactctagagttggaaaaggaatttctttttaacccctatctgaccaggaaaagaagaatcgaggtttcccacgccctagccctcaccgagagacaggtaaaaatctggttccagaacaggagaatgaaatggaaaaaggaaaacaacaaggacaaatttcccgtttcccggcaggaggtgaaggacggggaaacgaaaaaggaagcccaagagctggaggaagacagagccgaaggcctgacaaattaacttctacctttaaaatttaccacagactattaaaactaataatcaccatatgctgtggacaccacctattttctttgttggaaaggaccttacctgtgtttcaagctaccttcatgtcactgctcttgaggttttctgtgctttgagagggatttgggtgtttaaaaaagtttctagtatcacatagaagctgtccttgagctgtcctatggaagggtaatttgatactgaccttgtagctatatttttataatggtttttaatgtctgagctagtgatttgcctcaacaacgtaaacttcctaatgattagcacttaataattgcatataaaatgctttattaattaaacaagtgcacttgaacattttaatatttgtggtgagtaa

SEQ ID NO: 78319 - DNA, 1932 bp, Artificial Sequence
  derived and/or modified sequence
gccagagtgtccccgtgggccgagcgcacttttttcttgtccgggtgcgctcagtcactggtgcctgagaggaaacagtggaggcagcggggcaggtcgcctggggcgtcggcgattatattgcggccgagccggggcgcgccgggaaaggccgggagggcggcggcgcgcgggggctgggcgaggccccgcgacccgcgagggaggcggcgcgaagccgaggcggcgggcgcaagagccgggcatgagcgcccagtagctgagcgcccgcggctgcctggcctcagaagcgacgcccgcccggggccgccgccgctgacgccccaatgagttcgtacttcgtgaacccgctgtactccaagtacaaggcggcggctgcggcggcggcggcggcgggcgaggccatcaatcccacttactacgactgtcacttcgcgcccgaggtcggcggccgtcacgccgccgccgcagcagccctgcagctctatggcaacagcgccgccggcttcccgcacgcgcccccgcaggcgcacgcgcacccgcacccgtccccgccgccctccgggactgggtgcggcggtagggaaggccggggccaggagtacttccaccccggcgggggcagcccggccgctgcctaccaggccgccccccctcctcctccgcatcctccgcctccgccgccacctcccccctgcggcgggattgcctgtcacggggagcccgcgaagttttacggatacgataacttacagagacagccgatttttacgacccagcaagaggccgagctggtacaatatcctgactgtaaatcgtccagtggtaatattggcgaggacccagaccacttaaatcagagctcgtctccttctcaaatgtttccgtggatgagaccacaagctcctggtagacgaagaggaagacaaacctacagtcgcttccaaactctagagttggaaaaggaatttctttttaacccctatctgaccaggaaaagaagaatcgaggtttcccacgccctagccctcaccgagagacaggtaaaaatctggttccagaacaggagaatgaaatggaaaaaggaaaacaacaaggacaaatttcccgtttcccggcaggaggtgaaggacggggaaacgaaaaaggaagcccaagagctggaggaagacagagccgaaggcctgacaaattaacttctacctttaaaatttaccacagactattaaaactaataatcaccatatgctgtggacaccacctattttctttgttggaaaggaccttacctgtgtttcaagctaccttcatgtcactgctcttgaggttttctgtgctttgagagggatttgggtgtttaaaaaagtttctagtatcacatagaagctgtccttgagctgtcctatggaagggtaatttgatactgaccttgtagctatatttttataatggtttttaatgtctgagctagtgatttgcctcaacaacgtaaacttcctaatgattagcacttaataattgcatataaaatgctttattaattaaacaagtgcacttgaacattttaatatttgtggtgagtaaattaaaaggagtttattaattaaaaaaaattatgtctgcagaatactttatattatttgattacaatgtattatttatggattttttattctttcctttataatgaatagttcgggtgcgttttgtttactcctaaaaggtttctttgcgtattttctaaatgtaatatctcggggaaaatattagaaaagcacgtattagctgaagaatgtaacttgtagtccagctctgcagcttccttaaacttaagaaaaagattgggccagtgacaagaatttaaagacaatgtccaagttgacaattatttttctatagtccatacaaattaaataatctggcaactctggc

SEQ ID NO: 78320 - DNA, 870 bp, Artificial Sequence
  derived and/or modified sequence
atgagcagctactttgtgaaccccctgtacagcaagtacaaggctgctgctgctgctgctgctgctgctggggaggccatcaaccccacctactatgactgccactttgcccctgaggtgggcggcagacatgctgctgctgctgctgccctgcagctgtatggcaacagcgctgctggcttcccccacgccccaccccaggcccacgcccacccccaccccagccccccaccttctggaacaggctgcggcggccgggagggccggggccaggagtacttccaccctgggggcggcagccctgctgctgcctaccaggccgcccctcctcctccaccccaccccccacctcctcctcctcctccaccctgtggcggcatcgcctgccacggggagcccgccaagttctacggctatgacaacctgcagaggcagcccatcttcaccacccagcaggaggccgagctggtgcagtacccagactgcaagagcagcagcggcaacattggagaagatcctgaccacctgaaccagagcagcagccccagccagatgttcccctggatgaggccccaggcccctggaagaagaagaggccggcagacctacagccgcttccagaccctggagctggagaaggagttcctgttcaacccctacctgaccaggaagagaagaattgaggtgtcccatgccctggccctgacagagcggcaggtgaagatctggttccagaacagaaggatgaagtggaagaaggagaacaacaaggacaagtttcctgtgtcccggcaggaggtgaaggatggagagaccaagaaggaggcccaggagctggaggaggacagagctgagggcctgaccaactag

SEQ ID NO: 78321 - DNA, 870 bp, Artificial Sequence
  derived and/or modified sequence
atgagcagctacttcgtgaaccccctgtacagcaagtacaaggccgccgcagccgcagcggctgctgccggcgaagctatcaaccccacttattatgactgtcacttcgcacctgaagtgggcgggaggcacgccgcggctgcagcggcgcttcagctttatggtaacagtgccgccggtttccctcacgcgcccccccaagcgcacgcgcatccacatccgtccccccccccatctgggacagggtgtggcggacgggagggtaggggacaggaatattttcacccaggtggcggatctcctgcagctgcctaccaggccgcacctcccccacctccccaccccccacccccaccacctccaccaccctgcgggggtatcgcctgccatggcgagcccgccaagttctacggctatgacaatttgcagaggcagccaatttttaccacccaacaggaagcagagctggtgcagtacccagattgtaagtcaagttccggcaacattggtgaagacccagatcatttgaaccagtcaagttctcctagtcagatgtttccatggatgaggccccaggcccctgggcgcaggagaggtaggcaaacatattcacggtttcaaaccctcgaactcgagaaagagttcttatttaatccttacctgaccagaaaacggcgcattgaagtgtcccacgccctcgcattaacagagagacaggttaaaatatggttccagaacaggagaatgaaatggaagaaggagaataacaaggacaagtttcctgtaagcagacaagaggtcaaggatggcgagacaaaaaaggaggcccaagagctggaggaagatagagcagagggcctgacaaactag

SEQ ID NO: 78322 - DNA, 870 bp, Artificial Sequence
  derived and/or modified sequence
atgagcagctacttcgtgaaccccctgtacagcaagtacaaggccgctgccgctgcagccgcggccgcgggcgaggccatcaacccgacttattatgactgtcactttgctccagaggtgggcggtaggcatgccgccgctgctgcagccctacagctgtatggcaattctgcggctggcttccctcatgcccctccgcaagcccacgctcatccccacccaagtcctccaccgtcaggaaccgggtgtggcggcagggaggggagagggcaagagtactttcacccaggaggaggctctccagcggcggcctatcaggctgcaccacctccgcctcctcacccaccccctcctccgccacctcccccatgtggtggcatagcttgtcacggtgaaccggctaagttctatggatatgacaatctgcaacggcagcctatcttcaccacacaacaggaggctgagctggttcaataccctgattgtaaaagcagttctggaaacatcggcgaggatcccgaccacctgaatcagtcgagcagtccttcccaaatgtttccgtggatgagaccacaggcacctggtcgacgtcgcgggcgccagacgtactcccggtttcagaccctcgaactggagaaagagttcctcttcaacccttacctgacaagaaagcggcgtatagaggtaagccacgctctagccttgaccgagcggcaagtaaaaatctggtttcagaaccgaaggatgaagtggaaaaaggagaacaataaagataaatttcctgtgagcaggcaggaggtgaaggacggtgaaacaaagaaagaggcccaagagcttgaagaggacagagccgaagggttaacaaattag

SEQ ID NO: 78323 - DNA, 870 bp, Artificial Sequence
  derived and/or modified sequence
atgagcagctactttgtgaatccactgtattccaaatataaggccgcagcagccgcagccgctgccgctggggaagccattaacccaacatattatgactgtcactttgcccctgaggtcgggggtcggcacgcagccgctgctgcagctctccaactttacgggaactcagcagccggtttccctcatgcccctccacaggcccacgctcatccacacccttcaccacccccatcagggaccgggtgtggcggtagagaaggacgcggtcaagagtacttccaccccggagggggatctcctgcggcagcgtatcaggcagcgccaccgccacctcctcacccccctcctcctccccctccccctccatgcggcggaatcgcatgtcatggcgagcctgcgaagttttatgggtatgacaacctgcagcggcagccaatctttaccacccagcaagaagctgagttggtacagtaccccgattgtaagtctagtagcggaaatattggggaagatccagaccacctgaaccaatcctcctcaccgagtcagatgttcccctggatgcgcccacaggcgccagggaggagacgtggtcgacaaacatactccagattccagacactcgagctggaaaaagaattcctctttaacccctacctgaccaggaaacgtagaatagaggtcagtcacgcccttgccctgacagagagacaggtgaagatctggttccagaaccggcgaatgaagtggaaaaaggagaataacaaagacaagttcccggtgtcacgacaggaggtcaaggacggcgagaccaagaaagaggcccaagaacttgaggaggacagggcggaaggcctgacgaactag

SEQ ID NO: 78324 - DNA, 870 bp, Artificial Sequence
  derived and/or modified sequence
atgtcatcttatttcgtgaaccccctgtactctaagtataaggcggcagcggcagcagccgctgccgctggcgaagccattaatccgacctactacgactgccactttgctccagaagtggggggtcggcatgccgcagccgcagccgctctgcagctctacggtaattcggccgctggcttccctcatgctccccctcaggcacatgcccatcctcaccccagcccgccaccctccggaacaggctgcggtggcagggagggaagggggcaggaatacttccaccccggtggcggaagccccgctgccgcttaccaggctgccccacctcctcctccccatccaccaccccctccaccccctccaccatgcggcggtatcgcctgccacggcgagcccgcaaaattttacggctacgacaatctccagaggcaaccaatcttcacaacgcaacaggaggccgagctagtccagtacccggactgcaagtcaagtagtgggaacattggggaggaccccgatcatctgaaccagtcgagctctccatctcaaatgtttccgtggatgaggcctcaggccccagggcgacggagagggaggcaaacatactcccgatttcagactctggagctggagaaagaatttttgtttaatccctatctcacccgcaagcgcaggatcgaagtatcacacgctctagcactaactgagagacaggtcaagatctggtttcagaacaggaggatgaagtggaagaaggagaacaacaaagacaagttccctgtctccaggcaggaggtgaaagacggtgaaactaagaaggaagctcaggaactcgaggaagatagagcagaaggcctgaccaactag

SEQ ID NO: 78325 - DNA, 870 bp, Artificial Sequence
  derived and/or modified sequence
atgagcagctacttcgtgaaccccctgtacagcaagtacaaggccgccgccgccgccgccgccgccgccggcgaggccatcaaccccacctactacgactgccacttcgcccccgaggtgggcggcagacacgccgccgccgccgccgccctgcagctgtacggcaacagcgccgccggcttcccccacgcccccccccaggcccacgcccacccccaccccagccccccccccagcggcaccggctgcggcggcagagagggcagaggccaggagtacttccaccccggcggcggcagccccgccgccgcctaccaggccgccccccccccccccccccacccccccccccccccccccccccccccctgcggcggcatcgcctgccacggcgagcccgccaagttctacggctacgacaacctgcagagacagcccatcttcaccacccagcaggaggccgagctggtgcagtaccccgactgcaagagcagcagcggcaacatcggcgaggaccccgaccacctgaaccagagcagcagccccagccagatgttcccctggatgagaccccaggcccccggcagaagaagaggcagacagacctacagcagattccagaccctggagctggagaaggagttcctgttcaacccctacctgaccagaaagagaagaatcgaggtgagccacgccctggccctgaccgagagacaggtgaagatctggttccagaacagaagaatgaagtggaagaaggagaacaacaaggacaagttccccgtgagcagacaggaggtgaaggacggcgagaccaagaaggaggcccaggagctggaggaggacagagccgagggcctgaccaactag

SEQ ID NO: 78326 - DNA, 321 bp, Artificial Sequence
  derived and/or modified sequence
atgtttccctggatgcggccgcaggcggctcccgggcgacgtcgcggtcgtcagacctacagccgctttcagaccctcgaactggagaaggagttcttgtttaacccatatctgaccagaaagaggcgcatcgaagtctcccatgctctcgcgctgaccgagcggcaagtcaagatatggtttcagaaccgtcggatgaaatggaagaaggaaaataacaaggataagttcccagtgtctcggcaggaggtaaaagacggggagactaagaaggaggcccaagagttggaagaggaccgggcagaaggattaaccaactag

SEQ ID NO: 78327 - DNA, 321 bp, Artificial Sequence
  derived and/or modified sequence
atgttcccctggatgaggccccaggccgcccctggaagaagaagaggccggcagacctacagccgcttccagaccctggagctggagaaggagttcctgttcaacccctacctgaccaggaagaggcgcatcgaggtgagccacgccctggccctgacagagcggcaggtgaagatctggttccagaacagaaggatgaagtggaagaaggagaacaacaaggacaagtttcctgtgtcccggcaggaggtgaaggatggagagaccaagaaggaggcccaggagctggaggaggacagagctgagggcctgaccaactag

SEQ ID NO: 78328 - DNA, 321 bp, Artificial Sequence
  derived and/or modified sequence
atgttcccctggatgcggccccaggccgcccccggccggcggcggggccggcagacttacagccgctttcaaacactggagctggagaaggaattcttgttcaatccctacctgactcgtaaacgccgaattgaagtgagtcatgcgctggccctgaccgaacgacaggtgaaaatctggtttcaaaacaggagaatgaagtggaaaaaggaaaacaataaagataaattcccagtcagtcggcaggaagtgaaggacggagaaacgaaaaaggaggcccaggagctggaagaggatcgagcagagggtctgactaactag

SEQ ID NO: 78329 - DNA, 321 bp, Artificial Sequence
  derived and/or modified sequence
atgttcccctggatgaggccacaggccgcacccggtcgccgacgagggagacaaacatactcccggtttcaaaccctcgagctcgaaaaggagtttctgttcaatccctacttaacccgcaaacgaagaatcgaagtgtctcacgctctcgctctgaccgagcggcaagtaaagatctggttccaaaaccgcaggatgaaatggaaaaaggagaacaacaaggataaatttcccgtgtctcgtcaggaagtcaaggatggggaaacaaagaaagaggcccaagaactggaggaggaccgggctgagggcctcactaactag

SEQ ID NO: 78330 - DNA, 321 bp, Artificial Sequence
  derived and/or modified sequence
atgttcccctggatgagaccccaggccgcccccggcagaagaagaggcagacagacctacagcagattccagaccctggagctggagaaggagttcctgttcaacccctacctgaccagaaagagaagaatcgaggtgagccacgccctggccctgaccgagagacaggtgaagatctggttccagaacagaagaatgaagtggaagaaggagaacaacaaggacaagttccccgtgagcagacaggaggtgaaggacggcgagaccaagaaggaggcccaggagctggaggaggacagagccgagggcctgaccaactag

SEQ ID NO: 78331 - protein, 803 aa, Artificial Sequence
  derived and/or modified sequence
MAEAHQAVGFRPSLTSDGAEVELSAPVLQEIYLSGLRSWKRHLSRFWNDFLTGVFPASPLSWLFLFSAIQLAWFLQLDPSLGLMEKIKELLPDWGGQHHGLRGVLAAALFASCLWGALIFTLHVALRLLLSYHGWLLEPHGAMSSPTKTWLALVRIFSGRHPMLFSYQRSLPRQPVPSVQDTVRKYLESVRPILSDEDFDWTAVLAQEFLRLQASLLQWYLRLKSWWASNYVSDWWEEFVYLRSRNPLMVNSNYYMMDFLYVTPTPLQAARAGNAVHALLLYRHRLNRQEIPPTLLMGMRPLCSAQYEKIFNTTRIPGVQKDYIRHLHDSQHVAVFHRGRFFRMGTHSRNSLLSPRALEQQFQRILDDPSPACPHEEHLAALTAAPRGTWAQVRTSLKTQAAEALEAVEGAAFFVSLDAEPAGLTREDPAASLDAYAHALLAGRGHDRWFDKSFTLIVFSNGKLGLSVEHSWADCPISGHMWEFTLATECFQLGYSTDGHCKGHPDPTLPQPQRLQWDLPDQIHSSISLALRGAKILSENVDCHVVPFSLFGKSFIRRCHLSSDSFIQIALQLAHFRDRGQFCLTYESAMTRLFLEGRTETVRSCTREACNFVRAMEDKEKTDPQCLALFRVAVDKHQALLKAAMSGQGVDRHLFALYIVSRFLHLQSPFLTQVHSEQWQLSTSQIPVQQMHLFDVHNYPDYVSSGGGFGPADDHGYGVSYIFMGDGMITFHISSKKSSTKTDSHRLGQHIEDALLDVASLFQAGQHFKRRFRGSGKENSRHRCGFLSRQTGASKASMTSTDF

SEQ ID NO: 78332 - DNA, 2412 bp, Artificial Sequence
  derived and/or modified sequence
atggccgaagctcatcaggcagtcggcttccgcccgagccttacctccgacggcgctgaagttgaactgtctgctccagtgttgcaggagatctatttgtctggcttgcgtagctggaagaggcatcttagccggttttggaatgacttcctgacaggcgtctttcctgcctctcctcttagctggttgtttctcttctccgcgattcagctggcatggttcttgcagctggatccatcgttgggactcatggaaaagatcaaggaacttctgcccgattggggcggccaacaccatgggcttcggggagtgctggcagccgctctgttcgcctcgtgcctgtggggcgccctgatattcacactccacgtggcactaaggctcttgctgtcttaccatggctggctcttagagccccacggagccatgtccagtcctaccaagacctggctggctttagtccggatttttagcgggagacatccgatgctgtttagttatcagcgttccctgccaagacagccagtcccaagtgtgcaggatacagttagaaagtatctggaatccgtcaggcctatcttatccgacgaagacttcgattggactgctgtcctcgcacaggagttcctccgtttacaggcttccctgctgcagtggtacttgagactgaaatcatggtgggcctccaattatgtatccgattggtgggaagagttcgtatacctgcgctcccggaaccctctgatggtcaatagtaattactatatgatggacttcctgtacgttacgccaacccccctgcaggcagccagagcagggaacgccgtacacgcgctcctgctgtatcggcatcgcttgaaccgccaggaaattccacctactctgctcatgggaatgcgacctctgtgttctgcccagtatgaaaaaatcttcaataccacacggatcccaggagtgcagaaggactatatacggcacctgcatgattcacaacacgtggcggtctttcatcggggccgcttttttagaatgggaacacattctagaaactcgctgctcagccctagggccctggaacaacaattccagagaattcttgacgatccatccccagcatgcccccatgaggaacacctcgccgccctgacagccgcacccaggggtacctgggcacaggttagaacgtccctgaaaacgcaagctgccgaggcactcgaggcagtcgagggtgccgcctttttcgttagcctggatgcggagcctgccgggcttacacgcgaggatcctgccgcatccctggatgcctatgcccatgcattgctcgcgggtcgaggccacgatcgctggtttgacaagtcctttacactcattgtgttcagtaacggcaagctgggtctgtccgtggagcactcttgggccgattgtccgatttccggtcacatgtgggaatttacgctcgccaccgagtgctttcaactgggatactcaactgacgggcactgtaagggtcatcctgatccaacactcccccagccccaacggctccagtgggatctcccagaccagattcatagctcaatttcattggcgttgcgtggcgctaagatcctgtcagagaacgttgattgtcacgtggttcctttctctcttttcggcaagtccttcatccggcggtgccatctgtcaagcgattcttttattcaaatcgccctgcagctcgctcacttcagggatcgcggacagttctgcctgacatatgagtccgccatgacccgcctgttccttgaggggaggacagaaaccgtccggagctgtactcgcgaggcctgcaacttcgtgagggcgatggaggacaaggagaagactgacccccagtgtttagccctgttcagggtcgcagtggataagcatcaggccttgttaaaagccgctatgagcggccagggcgtcgaccggcacctgttcgcactgtatatcgtgtcccggttccttcatttacagtcacccttcttaacgcaggtgcactctgaacagtggcagttatcaacctcgcagattcctgttcagcaaatgcatttgtttgacgtgcataattatccggactatgtctcctctggcggggggttcgggcctgcagatgaccacgggtacggcgtgtcctatatattcatgggagacggaatgatcaccttccatatatcgtctaaaaagagctctaccaaaaccgactcacaccggctcggacagcacatcgaggatgccctcctggacgtggcctcactctttcaggccgggcagcacttcaagcgcaggttcagaggcagtggcaaggagaactccaggcaccgctgcggctttctgagtcggcaaaccggagccagcaaggcctcgatgacctctactgacttctag

SEQ ID NO: 78333 - DNA, 2412 bp, Artificial Sequence
  derived and/or modified sequence
atggccgaggctcaccaagcggtcggcttccgccctagtctgacctcagacggcgccgaggttgaactctcggcacccgtgctccaagagatatatttaagcggcctgagatcttggaaaaggcacctctcccggttctggaacgactttctcactggagtctttcccgctagtcctctcagctggctatttttgtttagtgctatccagttggcctggttcctccagctagacccatccctgggtctgatggaaaagattaaggagctccttcccgactgggggggacagcaccatggcctcaggggagtgttagcagccgccctattcgcatcctgcttatggggtgcactcatctttacgctgcacgtggcactccgactacttctttcctaccatggctggctgctggagccacatggtgcgatgtctagccccacaaaaacttggctggccctagtgagaattttctctggccggcaccccatgctcttctcctaccagaggtccttgcccaggcagcccgttccatccgtccaggacacagtgcggaagtacctggaatcggtcagacccattttgagcgatgaagatttcgactggaccgcagtgctggcccaagaatttctcaggctccaggccagtctgttgcagtggtatctgcggttaaagtcttggtgggcaagcaattatgtatccgattggtgggaggagttcgtgtatcttcggagcaggaaccccctgatggtcaatagcaattactatatgatggacttcctgtacgttacccccacccccctccaagcagccagggctggcaatgcagtccacgccctgctgctttacaggcacaggttgaatcgacaggaaatcccacccacgctgctcatgggaatgcgcccgttgtgctctgcacaatatgagaaaatcttcaacaccacgcggataccgggtgtgcagaaagactacatcaggcatctgcacgacagtcaacatgtcgcagtgtttcaccgtggtagatttttcagaatgggcactcactcacgtaacagcctgctctcgccccgcgcccttgagcagcagtttcagagaattcttgacgatccctccccagcctgtccccacgaggaacacttggctgcccttactgcggcccccagaggcacgtgggcccaggtccggactagcttgaaaactcaggccgcagaggccttagaggcagtcgaaggggctgcgttcttcgtttcgctcgacgcggagcctgctggcctgacaagggaggacccggccgcctctctagacgcatacgcccatgcattgctggccgggcgtggccatgatcgctggtttgataagtcttttacattaatagtcttttccaatggtaagcttgggctgtctgtggagcactcttgggccgattgtcccatctccgggcatatgtgggagtttacgttagcaaccgaatgctttcagctgggatactcaacagacggccactgcaagggccaccccgatccaacactgccgcaaccgcagaggctgcaatgggatttacccgatcagatccacagctcaatctcactggccctgaggggagctaaaatactgtcggaaaatgttgactgtcatgtggttcccttttccctgttcgggaagtcattcatccgacgttgccacctgagcagcgatagcttcattcagattgcacttcagctggctcactttcgcgaccgtggtcaattctgcttgacatatgagagtgctatgacacgcctcttcctggagggcagaactgagaccgtgcgaagttgtacaagagaagcatgtaacttcgtgcgcgccatggaggacaaggagaagaccgatccacagtgcctggctctgttcagagtggctgtcgataaacatcaggccctgctgaaagccgcgatgagtggacaaggggtcgacaggcatctgttcgcactgtacatcgttagccgctttctgcacttgcagtcaccctttctgactcaggtgcacagcgaacaatggcagctttccacctcccaaatacctgtgcaacagatgcacctgtttgacgttcataattatcctgactacgtcagctcagggggaggattcggtcccgccgatgaccatgggtacggcgtgtcatatattttcatgggcgatggcatgataacttttcacatttcctccaagaagtccagcactaaaaccgattcccaccggctcgggcagcacattgaagacgcccttttggacgtggcaagcttgttccaggctgggcaacatttcaagaggaggttccggggtagcggcaaagagaacagtaggcaccggtgcggatttctttctaggcagaccggtgccagtaaggctagtatgaccagcaccgatttttag

SEQ ID NO: 78334 - DNA, 2412 bp, Artificial Sequence
  derived and/or modified sequence
atggctgaagcccatcaggctgttggctttcgtccctccttaacaagcgatggtgccgaggtggaattgtctgcgccagttctacaggagatctacctgtctggcctgagatcatggaagagacacttgagcaggttctggaacgactttctcactggcgtgttccccgcctcccctttgagctggctgttcttattctccgccattcagctggcttggtttcttcagcttgacccgagtctgggactcatggagaaaatcaaggagctgttgccagattggggcggacaacaccacggattgagaggcgtgcttgctgccgccctctttgcctcgtgtctgtggggtgcgctcatttttacactgcacgtcgccctgagactgctgctatcttatcacggctggctcttagagccacacggggccatgagctcccctactaaaacttggctggccctggttagaattttttctggccgccatcccatgttattcagctaccaacgctccctgcctcgccaaccagtacctagcgtccaggacacggtgagaaagtatctagaaagtgtgaggccgatcttatctgacgaggactttgactggacagcagtgctggcccaagaatttttaaggttgcaggcctccctgttgcagtggtacctgagactgaaatcctggtgggcaagcaattatgtcagtgactggtgggaagagttcgtctatctgcgaagtagaaacccactgatggttaacagcaattattatatgatggatttcctgtacgtgacccctacacccctgcaggctgcaagggccggcaatgccgtgcacgctttgctcctttacaggcaccgcctgaaccgccaggaaattcctcccaccttgctgatgggaatgaggccactgtgttcggcccagtatgaaaagattttcaatactacaaggatccccggagtgcagaaggactacattagacatcttcacgactcccagcatgttgcggtcttccacagagggagattttttagaatgggaacacactctaggaacagcttgctaagccccagagcactcgaacaacagttccagagaatcctcgacgacccatcaccagcctgtccccacgaagagcacctggccgccctgaccgctgctccaagaggtacgtgggcacaggtgagaactagcctgaaaacccaggctgctgaggcgcttgaagccgtcgaaggcgctgccttttttgtatccctggacgctgaacctgcgggactgacacgcgaggaccccgcagctagcttagatgcttacgctcacgctctcctcgccggcagggggcacgaccgctggttcgataagtcatttacattgattgtgtttagcaatggcaagctggggctgtcagtggaacattcctgggctgattgtccaatcagcggtcacatgtgggagttcacattggcaacagaatgctttcagttagggtattccactgatggtcactgcaagggccacccagatccaacgctcccccagcctcagcggctgcagtgggatctacccgatcagattcactccagtatttcattagccttgaggggcgctaagatcctgtccgaaaatgtcgactgccatgtcgtccctttctctctcttcggaaaaagcttcatcagacgctgccatcttagcagtgactctttcatccagattgcccttcagttagctcatttcagggatcgcggacagttttgtctgacctacgagtccgctatgacacggctgtttctggaggggaggaccgagactgtcagatcttgcactagagaggcttgtaactttgtgcgcgcaatggaagacaaggagaagaccgatccgcagtgcttagcactgtttcgtgttgcagtggataagcaccaggcactgctgaaagccgccatgtccggacagggcgtcgataggcatctgtttgccctgtacatcgttagtcggtttttacacctccagagtccttttctgactcaggtgcacagtgagcagtggcagctttcgaccagccagatccccgtgcaacaaatgcatctgtttgatgtgcataactatccagattatgtcagcagtggaggtggatttggtcccgcagatgatcatggctatggcgtgagttatatcttcatgggagatggtatgatcactttccacatcagcagcaagaagagttccactaaaacagactctcaccggttgggccaacacatcgaggacgccttactggatgtggcctctctgttccaggccgggcagcatttcaagcggcgattccggggctccggaaaagagaattccaggcacaggtgcggcttcctttctcgccaaacaggtgccagtaaagcctcaatgacgtcgacagatttttag

SEQ ID NO: 78335 - DNA, 2412 bp, Artificial Sequence
  derived and/or modified sequence
atggccgaggcccaccaggccgtgggcttccggcccagcctgaccagtgatggagctgaggtggagctgagcgcccctgtgctgcaggagatctacctgagcggcctgcgctcctggaagaggcacctgagccgcttctggaatgacttcctgactggagtcttccctgccagccccctgtcctggctgttcctgttcagcgccatccagctggcctggttcctgcagctggaccccagcctgggcctgatggagaagatcaaggagctgctgcctgactggggcggccagcaccacggcctgcggggcgtgctggccgccgccctgtttgccagctgcctgtggggcgccctgatcttcaccctgcacgtggccctgcggctgctgctgagctaccacggctggctgctggagccccacggggccatgagcagccccaccaagacctggctggccctggtgcgcatcttcagcggccgccaccccatgctgttctcctaccagaggagcctgccccggcagcctgtgcccagcgtgcaggacacagtgaggaagtacctggagagcgtgcggcccatcctgagtgatgaagattttgactggacagctgtgctggcccaggagttcctgcggctgcaggccagcctgctgcagtggtacctgcggctgaagtcctggtgggccagcaactacgtgtctgactggtgggaggagtttgtgtacctgcggagcaggaaccccctgatggtgaacagcaactactacatgatggacttcctgtatgtgacccccacccccctgcaggccgcccgggctggaaatgctgtgcacgccctgctgctgtaccgccaccggctgaaccggcaggagatcccccccaccctgctgatgggcatgaggcccctgtgcagcgcccagtatgagaagatcttcaacaccacccgcatccctggggtgcagaaggactacatccgccacctgcatgacagccagcacgtggccgtgttccaccggggccgcttcttcaggatgggcacccacagcaggaacagcctgctgagcccccgggccctggagcagcagttccagaggatcctggatgaccccagccctgcctgcccccatgaggagcacctggccgccctgacagctgccccccggggcacctgggcccaggtgaggaccagcctgaagacccaggccgctgaggccctggaggccgtggagggcgccgccttctttgtgtccctggatgctgagcccgccggcctgaccagagaagatcctgctgccagcctggatgcctatgcccacgccctgctggccggccggggccatgaccgctggtttgacaagagcttcaccctgattgtgttcagcaatggcaagctgggcctgtctgtggagcacagctgggccgactgccccatcagcggccacatgtgggagttcaccctggccacagagtgcttccagctgggctacagcacagatggccactgcaagggccacccagaccccaccctgccccagccccagaggctgcagtgggacctgcctgaccagatccacagcagcatcagcctggccctgcggggggccaagatcctgtctgaaaatgtggactgccacgtggtgcccttcagcctgtttgggaagagcttcatccgccgctgccacctgagcagtgacagcttcatccagatcgccctgcagctggcccacttccgggaccggggccagttctgcctgacctatgagagcgccatgaccaggctcttcctggagggccgcacagaaacagtgcgcagctgcacccgggaggcctgcaactttgtgcgggccatggaggacaaggagaagacagacccccagtgcctggccctcttccgggtggccgtggacaagcaccaggccctgctgaaggccgccatgagcggccagggcgtggacagacacctgtttgccctgtacatcgtgagccgcttcctgcacctgcagagccccttcctgacccaggtgcacagcgagcagtggcagctgagcaccagccagatccctgtgcagcagatgcacctgtttgatgtgcacaactacccagactatgtgtcctctgggggcggctttggaccagcagatgaccacggctatggagtgtcctacatcttcatgggagatggcatgatcaccttccacatcagcagcaagaagagcagcaccaagacagacagccaccggctgggccagcacattgaagatgccctgctggatgtggccagcctcttccaggccggccagcacttcaagaggcgcttccggggcagcggcaaggagaacagccgccaccgctgtggcttcctgagccggcagacaggagccagcaaggcctccatgaccagcacagacttctag

SEQ ID NO: 78336 - DNA, 2412 bp, Artificial Sequence
  derived and/or modified sequence
atggccgaggcccaccaggccgtgggcttccggcccagcctgacctcggatggagccgaagtagagttgagtgctcccgtgctccaagagatttatctcagcggcttgcggagttggaaaaggcatctctcgcgcttctggaatgattttctcacaggcgtcttccccgcaagccccctgagctggttattcctgttcagtgccattcagctggcctggtttttacaactagaccctagccttggactgatggaaaagatcaaggaattgttacctgactggggcggccagcaccatggattaagaggggttttggcagctgccctctttgcaagctgtctctggggggccttaattttcactctgcacgtggccctgcggctactgctgagctaccatgggtggctgctggagcctcacggagctatgtctagtccgactaagacatggctggcgttagttcgaatattttccgggcgacatccaatgctgtttagttatcaaaggtcccttccgaggcagcccgtcccctcagtgcaggacaccgtgagaaagtatctcgagtccgtgaggcccatcctgagtgacgaggattttgattggactgccgtcctcgcacaggaattccttcgcctacaggcctcactgctccagtggtacctgcggctgaagtcttggtgggctagtaactacgtcagtgattggtgggaggagtttgtgtacctgaggtcaagaaacccgctcatggttaactcaaactactatatgatggatttcttgtacgtcacccccactccacttcaagccgcacgcgccgggaacgccgttcatgcgcttctgttgtatagacatagactcaataggcaggagatacctcccacactcctcatgggtatgcgacccctgtgctctgcccagtacgaaaagatcttcaataccacacgaattccgggcgttcagaaggactacattaggcacctccatgactcacagcacgtggccgtcttccacagaggccgcttctttaggatggggacccacagcagaaatagccttctcagtcctagggcactggagcagcagttccagagaattctggacgacccaagtcccgcatgtccacatgaggagcatctagccgcacttacagcagcccctcgtggtacctgggcccaggttaggacaagcctcaagacccaggctgcagaggctctagaagccgtggagggcgcggctttttttgtctccttggatgccgagcccgcaggactgacacgggaagatccggccgcgtccctagacgcatacgctcatgccttgctggcgggcagaggacacgacaggtggttcgataagtctttcacactgatcgttttttcaaacggcaagcttggtttgagcgttgagcacagctgggccgactgtcctatttctggacatatgtgggagtttacattggctaccgagtgctttcagcttgggtactccaccgatggccattgtaaagggcaccccgacccaactctgccccagcctcagcggctccagtgggacctacccgaccagatccacagtagtatttccctcgcattgcggggtgcaaagattctttccgaaaacgtcgattgccatgttgtgccgttctccctgtttgggaaatctttcatcaggcgttgtcatctttcttccgattcgtttatccagattgcactgcagctggctcatttccgagaccggggtcagttttgtctgacgtatgagtctgccatgacccgtcttttcctggagggacgcacagagacggtgcggagctgtaccagagaggcttgtaacttcgtgagggcaatggaggacaaagaaaaaactgacccccaatgtctagccctcttccgggtggctgtcgataagcaccaggcgttactgaaggcggctatgagcggccagggtgtcgatcggcacctgttcgccctgtacattgtaagccggttccttcacttgcaatccccattcctgactcaagtccatagtgaacagtggcagctgagtacctcccagattcctgtgcagcagatgcatttgttcgacgtgcataattaccccgactacgtgagctcgggcggtggctttggccctgctgatgaccacgggtacggggtcagctacattttcatgggcgatgggatgatcacattccatatctcttctaagaaatcctcaacaaaaaccgactcccatagactgggccagcacattgaggatgctctgctggacgtggctagcctgtttcaggcaggccagcatttcaaacgacgattcagagggtcggggaaggagaattcccgccatagatgcggttttctttcccgacagacaggcgcaagcaaagcctctatgacatcaaccgatttctag

SEQ ID NO: 78337 - DNA, 2412 bp, Artificial Sequence
  derived and/or modified sequence
atggccgaggcccaccaggccgtgggcttccggcccagcctgaccagcgatggggccgaggtggagctgtctgcccccgtgctccaggagatctatctgtcggggctgcggagctggaagcggcacctcagtcgtttctggaatgatttcctcacaggggtgtttccggcttccccactgagttggctttttctgttctctgcgatccagcttgcctggttcctccagcttgatccatcactgggtttgatggagaagataaaagagctgctgcctgactgggggggccagcaccacggattgcggggtgtccttgcagctgctctttttgccagctgtctttggggtgccctgatttttacccttcatgtcgcactaaggctactcctaagctaccacggatggttgttggagccccacggggctatgagcagtcccacaaagacttggctagctcttgtccgaatcttcagcggacgtcatccaatgcttttctcataccagcgaagcctcccaagacagcccgtccccagcgtacaggatacagtgcggaaatatttggagtctgttcgtcctatcttgtctgacgaggactttgattggaccgctgtcctcgctcaagagttcttacggcttcaggcatcattgctccagtggtacctgaggctcaagtcgtggtgggcttctaactatgtcagcgattggtgggaggagttcgtatacttaaggagtcggaatcccctcatggttaattctaactactatatgatggattttctgtacgtcactccgaccccactgcaggccgcccgggcagggaatgcagtccatgcacttctgttgtataggcaccggttgaataggcaggagattcccccaacgcttcttatgggtatgaggccactttgctccgcccagtacgaaaagattttcaacaccactcgtattcctggcgtgcagaaggattatatccggcacttgcacgatagccagcacgtagctgtcttccataggggtcggtttttcagaatgggcacccacagcaggaatagccttctcagccctcgggccttagagcaacaatttcagaggatcctggatgatccttctccagcatgcccccacgaagagcacctcgccgccctgaccgcagccccacgtggtacatgggcgcaagtgaggacttctttaaaaacccaggctgcagaagccctggaagccgttgagggcgctgctttctttgtgtcgttagacgccgagccagccggtcttactagagaggaccccgccgcttctctagacgcgtacgcccacgccttactcgccggcagagggcacgataggtggtttgacaagagtttcaccttgattgtgtttagtaatggcaagctgggattgtcagtagagcattcttgggccgactgtccaatctccggccacatgtgggaatttaccctggccaccgagtgcttccaattggggtattcaactgacggccactgtaaaggtcaccccgaccctaccctccctcagccacagcggcttcagtgggatttgccagatcagattcactcaagcatatcgctcgcattgcggggggctaagatccttagcgagaatgttgattgccacgtggtgccttttagcctattcgggaaaagttttattcgccgatgtcatttaagttctgatagctttatccaaattgccctccagctggcgcactttcgggacagaggccagttctgccttacgtacgagtctgcaatgactagattgttcctggaagggcgtactgaaacagtgcggtcctgcactcgagaggcttgcaacttcgtccgtgctatggaagataaggagaagacagaccctcagtgcctcgcactgttcagggtggcggttgataagcaccaggctttgcttaaagctgctatgtccggacagggggtggacagacatctgtttgctctgtacatagtgtcccggtttctccatctgcagtccccattcctaacccaggtgcactccgaacaatggcagctgtccacatcccagatacctgtgcaacagatgcacctgttcgatgtccataactatcctgactacgtgtcaagcggggggggcttcggaccagcagacgaccatggctatggggttagttacatctttatgggggatgggatgataacattccacataagctctaaaaaaagttccactaagactgattcacaccggcttggtcaacatatagaagacgcgctgttagatgtcgcatccctctttcaggccggccaacactttaagcgccgctttcgagggagcgggaaagaaaactcacgccatcggtgtgggttcctttccaggcagaccggcgcatccaaagcatccatgacatctacggacttttag

SEQ ID NO: 78338 - DNA, 2412 bp, Artificial Sequence
  derived and/or modified sequence
atggccgaggcccaccaggccgtgggcttccggcccagcctgacctctgacggcgccgaggttgagctgagtgcaccagtcctgcaggagatatacctgtccgggctgcggtcctggaagcgccatctctctaggttttggaacgattttctcacgggtgtcttccctgccagcccactgtcctggctgttcttgttcagcgccatccagctcgcctggttcttgcagctggacccttcccttggtcttatggaaaagatcaaagaactgctgcctgattgggggggacagcaccacgggttaagaggggtgctcgcagctgctctttttgcatcttgtctgtggggggcccttatatttaccctgcatgtggccttaaggctccttctaagctatcatggctggcttctcgaaccccacggtgctatgtcttccccgaccaagacttggcttgcactcgtgagaatctttagcgggcggcacccaatgttatttagctaccagcgaagtctgccaaggcagcccgtgcctagcgtccaggataccgttcgcaaataccttgagtccgtccgccccattctatccgatgaagatttcgattggaccgccgtgctcgctcaggaattcctacgcttacaggcttctctactacagtggtacctgcggctgaagtcatggtgggccagtaactacgtttctgactggtgggaggaatttgtctaccttagaagtaggaaccccttaatggtaaatagcaattactacatgatggacttcttgtatgtcacccccacaccattgcaagccgctagagccggtaatgctgtgcacgctttacttttgtacagacacaggttgaacagacaggagataccccccacattgctgatgggaatgagaccactctgctctgcccagtatgaaaagatttttaacacaactcgaataccaggcgtccagaaagattatattcgccacttgcatgattctcaacacgtcgcggttttccatcgtggacgcttcttccgcatgggcactcatagcaggaactccctgctgagtcctcgcgcgctggaacagcagtttcaacggatcctggacgatccatccccagcgtgtccacacgaggagcacctcgcggccctgacggctgccccccggggaacctgggcacaggtccggacgagcttgaagactcaagcagccgaagcgctggaggcagtagaaggagccgccttctttgtctctctggacgccgaaccggccggtctgacacgagaagatcctgcagcctcgctcgatgcctatgcacacgcacttctcgccggccggggccacgacaggtggttcgataagtcttttaccctcattgtattttctaatggcaagctcgggttatctgtggaacattcatgggccgactgccctataagtggtcacatgtgggagtttacattggccactgagtgttttcagctcggctattcaaccgatggacactgcaagggacacccagatccaaccctgcctcagccccagagattacagtgggacctccctgaccagatccacagcagcatcagtctagctctccggggcgctaaaatcctctcggagaatgtggattgtcatgtagtcccattttcactgtttggcaaaagcttcattcgcaggtgtcacttaagttcagattccttcattcagatcgctctgcaactggctcacttcagagaccgcgggcagttctgccttacctatgagagtgctatgaccaggttatttctggaagggaggactgaaactgtgcgtagctgcaccagggaagcctgtaacttcgtgagagccatggaggacaaggagaaaaccgacccacagtgcctggccttatttagggtggcagtggacaagcaccaggctttgctgaaggcagctatgtctggtcagggcgtagaccgccaccttttcgctctctacatcgtatcacgttttcttcatttgcaaagcccttttctgactcaagtgcacagtgaacagtggcagctgtccacctctcagatccccgtgcagcagatgcatttgttcgatgtgcacaattaccctgactacgtgtctagtggcggagggtttggacccgcagatgatcacggatatggcgtgtcttatatttttatgggagatggtatgatcaccttccacatatcttctaagaagtcttcgaccaagaccgactctcaccggctgggacagcatatcgaggatgcccttctggatgtggcttccctcttccaggccggacagcattttaagaggaggtttcgaggctcaggcaaagaaaacagcaggcaccggtgcggattcctgtccagacagactggagcctccaaggcttcgatgacgagtacagatttctag

SEQ ID NO: 78339 - DNA, 2412 bp, Artificial Sequence
  derived and/or modified sequence
atggccgaagcacaccaagcggtcggatttagaccaagcctaacctccgacggagcagaagttgagctgtccgccccagttttgcaggagatctacttgtcagggctgcgtagctggaagcggcatctgagtcgattttggaacgattttctgactggtgtttttcccgcaagcccccttagctggcttttcctatttagtgcaatacaacttgcctggtttctgcagttagacccgtctctgggcctgatggagaaaattaaagaattgctacccgattgggggggacaacatcacgggctgcgcggagtactggcagctgcccttttcgcctcatgtctgtggggggctttgattttcacgcttcatgttgcgctgcgcttactgctgagttaccacggttggttgctggaaccacacggagcgatgtcaagccccactaagacttggctcgcattggttcggattttctcaggccgacacccaatgctattcagttaccaacgctccctgccaagacagcctgtgccctctgtccaggatacagtacgtaagtaccttgaaagcgtgagaccaatactgagcgacgaagacttcgattggaccgcagtgcttgcccaggagtttctgaggttacaggcttctttgcttcagtggtacctcaggctgaagtcatggtgggcctcgaattacgtatctgactggtgggaagagttcgtatacctgagaagccggaatcctctcatggtgaacagtaactattacatgatggatttcctgtatgtgacccccacccccctccaggcagcgagagcaggtaatgccgtccatgccctcctactttatcgtcatcggctgaatagacaggagattccacctaccttattaatggggatgaggccactctgctcagcccagtatgagaaaattttcaataccacgcgtattcccggagtacagaaagactacatacgtcatctgcatgactcacaacatgttgcagtgttccaccgagggagattcttcagaatgggcacgcacagcagaaactcactgttgagtcccagagcactggagcaacagtttcagaggatcctggacgacccaagtcctgcttgtccgcacgaggaacatctggccgctttgactgcagctcctaggggcacgtgggcccaggtacggacatctcttaaaacccaagccgctgaagccttggaggccgtagagggtgctgcgttctttgtgtcactcgatgctgagccagccggtctgacaagggaagatccggcagcaagtctcgacgcatacgctcatgctttgttagctggacgcggacacgataggtggtttgataaatccttcactctcatagtcttttctaacgggaagctcggcctgtccgtggagcatagttgggccgattgtcctattagtggccacatgtgggaattcacgttggccacggaatgcttccagctaggttatagcacggacggacactgtaaaggacatccagatccgaccctgccgcagccacagaggttacagtgggacctgccagatcagatccatagctccatctctctggccctaagaggcgcaaaaattctgtcggaaaacgtggactgccacgtagtgccttttagcctcttcggtaagagcttcattcgtcgttgtcacttaagtagcgattcattcatccagatcgcactgcagttagctcattttagagacaggggccagttctgtttaacatatgaaagtgccatgactcgcctgttcctggagggtcgaacagagacagtgaggtcctgcacaagggaggcctgcaacttcgtgcgggcaatggaagataaagagaaaaccgaccctcagtgtctcgctctatttagggttgccgtcgataagcatcaagctctgctgaaggcagcaatgtcaggccaaggggtcgacagacacttgtttgccctgtacatcgttagccgttttttacatttgcagagccctttccttactcaggtccatagtgaacagtggcagttaagtacctcacagatacccgtacagcagatgcacctcttcgatgtacacaattacccggactatgttagctcaggcggtggattcggcccagccgacgaccatgggtatggcgtcagctatatcttcatgggcgatgggatgatcactttccatatatccagtaaaaaaagcagtacaaaaactgactcccaccgcctgggccagcatattgaagacgcgttgctggatgttgcctccctctttcaggcgggtcagcactttaagcgtaggtttagggggtccggcaaggaaaattctcgtcacaggtgcgggttcctttccaggcagacaggagctagtaaagcttcgatgacgtctaccgatttttag

SEQ ID NO: 78340 - DNA, 2412 bp, Artificial Sequence
  derived and/or modified sequence
atggccgaggcccaccaggctgtcggctttagaccaagcctcacttccgacggagccgaggtcgagctttcagccccagtactccaggaaatttacctatccggcctgcggagttggaagcgacatctgtcaagattttggaacgatttcttaaccggggtatttcccgcttcgcccctgtcttggttatttttgttttctgcaatacagctggcttggttcctgcagctagatcccagcttagggctcatggagaagatcaaagagctgttacctgactgggggggacagcatcacggtctgagaggagttctagccgctgcattgttcgcctcctgcctctggggcgcactcatatttaccctccacgtcgccctaaggctcctactctcataccacggctggttactggagccacacggggcaatgtcctcccctactaaaacttggctggcattagtgcgaatcttcagcggtaggcacccaatgctcttctcttatcaacgctccctgccacgccagccagtcccctcagtgcaggacaccgtgaggaaatacctggaaagcgttagacccatcttaagcgatgaagactttgattggacagccgtgctcgcgcaggaatttctgcggctgcaggctagcttgctgcagtggtacttgcggctgaaaagctggtgggcctcgaattatgtttccgactggtgggaagagttcgtatatctaagaagtcgaaacccgctgatggtcaattctaattactatatgatggacttcctctatgttacccctactcctttgcaggccgctcgagccggtaatgctgtccacgccctgctcttgtatcgccacaggctgaacagacaggagattccacctaccctgctgatgggcatgcgccctctttgttctgctcagtacgaaaagattttcaataccactaggattcctggtgtacagaaggattacattagacacctgcatgatagtcagcatgtggccgtctttcatcggggtaggttctttcgaatgggcactcatagccgtaactcactcctgtctcctagagcactggagcagcagtttcagcgaatcctagacgacccttctcccgcttgcccgcatgaggaacacctggcagcactgactgcagcacccaggggcacctgggctcaggtgagaacgtccttgaaaacccaggccgctgaagccctggaggcagttgagggcgcagcgttcttcgtcagtcttgacgctgagcccgctggactgacccgcgaagatcccgctgccagcctggacgcctatgcccatgcactcctggccggaagaggtcacgataggtggttcgacaaatccttcacactgatcgtcttctcaaacggtaagctgggcctgagtgtcgaacattcctgggccgattgccccattagcggacacatgtgggagttcactcttgccaccgagtgtttccagttaggctactccacagatgggcattgcaagggacatccagaccccaccttgccacagcctcagcggctacaatgggatctgcccgaccagattcacagctcaatctctttggctctgagaggggcaaagatactctctgaaaacgttgactgtcacgtggttccctttagcttatttggtaaaagtttcatacgacgatgccacctgtcaagtgactccttcatccagattgccctgcaacttgctcactttcgtgaccgcggtcagttttgtctgacctacgaatccgctatgacgaggctgttcctcgaaggcaggaccgagaccgtgcgaagctgtacaagagaggcttgcaatttcgtgcgagccatggaggataaagagaagacagacccgcagtgtttggccctctttcgcgtggccgtcgataagcaccaggccctgctgaaggccgctatgtctggccagggcgtggaccgtcacctcttcgctctctatatcgtctcaaggtttctccacctccagagccctttccttacccaggtccatagcgagcagtggcagctctccacttcacagattccagtgcagcagatgcatttatttgatgtacacaattacccggattatgtgagctctggagggggtttcggccctgccgacgatcacgggtatggtgtctcctacattttcatgggtgacgggatgataactttccacatctcctctaagaagtcatcaactaagaccgacagccaccgcctaggtcagcacattgaggatgctcttctggatgtggccagcctgttccaggctggacagcattttaagcgcagattcagaggcagtggtaaagagaacagcaggcatcggtgcggattcctcagtaggcagaccggggcaagtaaggcatccatgacttcaaccgacttttag

SEQ ID NO: 78341 - DNA, 2412 bp, Artificial Sequence
  derived and/or modified sequence
atggctgaagcacaccaggccgtaggcttcaggccatccctgacttccgacggagccgaggtggaactgagtgccccagtactacaggagatttacctgtcaggactccggtcttggaagcgccacctgtcaagattctggaacgacttcctcacaggggtctttcccgcaagccccctcagttggctctttctgttctcggccatacaactggcgtggttcctccaactggatccaagcctcggtctgatggaaaagataaaagaactgctacccgattggggtggtcagcaccacggactccggggagtcctggccgcagcattgttcgccagttgtctctggggggctctgatttttaccctgcatgtggccctcaggctcctgctaagctatcatggatggttactcgaaccacatggtgcaatgtcctccccaaccaagacgtggctggcattggttcgcatcttcagtgggcgtcaccccatgctattttcataccaacggtctctgccaagacaacctgtccccagcgttcaagacaccgtgaggaagtatcttgaaagtgtgagacccatactctcagacgaagattttgattggaccgcggttcttgcacaagagtttctgcgactccaagcatcattgttgcagtggtatctcaggctcaagtcatggtgggccagtaattacgtatccgactggtgggaagaattcgtgtatctgcggtctcgcaatccgttgatggtgaatagcaactattacatgatggacttcctgtacgttaccccaacgccgcttcaggccgctagagcaggcaacgctgtgcatgctcttctgttataccgtcatcggctcaatcgacaggaaatcccaccaaccttgttaatgggaatgaggcccttgtgctcagcacaatacgagaaaatttttaacactactcgtatcccaggagtccagaaagattatatccggcatcttcacgactcacaacatgtggcagtgtttcatcgaggacggttctttagaatgggcacccactccaggaattctctactgtcacccagggccctcgagcagcagttccagcgcatccttgacgacccttcacccgcatgcccacacgaagagcacctggcagccctgactgccgcacccagaggtacctgggcccaggtgcgtacttctctgaaaacccaggctgctgaggcacttgaagccgttgagggagccgcattttttgtgtctttggatgccgaacccgcaggcttaacccgggaagatccagctgcttctctggatgcttatgcccatgccttgctggccggtaggggccacgataggtggtttgataagtccttcaccctgatcgtcttcagcaatggtaaactcggactgagtgtcgagcatagttgggctgattgtcctattagtggacacatgtgggagtttacattggcgacggagtgtttccagttaggatactccacggacggccattgtaaaggtcatccagatccgaccctgccgcaaccgcagaggctgcagtgggacctccctgaccaaatccactcatccatttctctcgcactgcgaggcgctaagattctcagcgaaaatgttgattgccatgtcgttccctttagtctattcgggaagtcattcatccggaggtgtcacctaagtagcgacagttttatacagatcgcgctacagctagcgcatttccgggacagaggccagttttgtctgacatacgaaagtgccatgacccggctattcttggagggaagaacagaaaccgtccggagctgcacgcgggaagcctgtaattttgttcgggctatggaggataaggaaaagacagacccccagtgtctagctttgtttagggtcgccgtggataaacatcaggccctgctgaaggccgcaatgtccggacaaggagttgaccgacacttgtttgctctttacattgtgtccagattcctccatttacagtccccatttctcacccaggtccacagcgaacagtggcagctgagtacatctcagattcctgtccagcagatgcacctgtttgacgtccacaattacccagattacgtgtctagtgggggtgggttcggccctgctgacgaccatggttacggagtatcttacatttttatgggggatggcatgatcaccttccatattagctccaaaaaatcaagcacaaagactgattcccaccgccttggacagcacattgaagacgccctgttggatgtggcctctctcttccaggctgggcagcactttaagagacggttccgcggatccgggaaagagaactctcgtcatcgctgtgggttcctgtctagacagactggtgcctccaaagcttctatgacgagcaccgacttctag

SEQ ID NO: 78342 - DNA, 2743 bp, Artificial Sequence
  derived and/or modified sequence
ggggtttctgggtgacggtgatctcggggtgggcaggactccaaaggcccgtcgacccggtggtggactccttgcactgggattggacatatgcaagcgggagatttggggccggcgctcaaaatcggggggcgggggtggactcgggtttggaccccaggatccgatcagcggacccttgattcaacgtgggctccagcgtgacatggctgaagcgcaccaggccgtgggcttccgaccctcgctgacctcggacggggctgaagtggaactcagtgcccctgtgctgcaggagatctacctctctggcctgcgctcctggaaaaggcatctctcacgtttctggaatgactttctcaccggtgtgtttcctgccagccccctcagttggcttttcctcttcagtgccatccagcttgcctggttcctccagctggatccttccttaggactgatggagaagatcaaagagttgctgcctgactggggtggacaacaccacgggctccggggggtcctggcagccgcgctgtttgcctcgtgtttgtggggagccctgatcttcacactgcacgtggccctgaggctgcttctgtcctaccacggctggcttcttgagccccacggagccatgtcctcccccaccaagacctggctggccctggtccgcatcttctctggccgccacccgatgctgttcagttaccagcgctccctgccacgccagcccgtgccctctgtgcaggacaccgtgcgcaagtacctggagtcggtccggcccatcctctccgacgaggacttcgactggaccgcggtcctggcgcaggaattcctgaggctgcaggcgtcgctgctgcagtggtacctgcggctcaagtcctggtgggcgtccaattatgtcagtgactggtgggaggaatttgtgtacctgcgctcccgaaatccgctgatggtgaacagcaactattacatgatggacttcctgtatgtcacacccacgcctctgcaggcagctcgcgctgggaatgccgtccatgccctcctcctgtaccgccaccgcctgaaccgccaggagatacccccgactttgctgatgggaatgcgccccttatgctctgcccagtacgagaagatcttcaacaccacgcggattccaggggtccaaaaagactacatccgccacctccatgacagccaacacgtggctgtcttccaccggggccgattcttccgcatggggacccactcccgaaacagcctgctttccccgagagccctggagcagcagtttcagagaatcctggatgatccctcaccggcctgcccccacgaggaacatctggcagctctgacagctgctcccaggggcacgtgggcccaggtgcggacatccctgaagacccaggcagcggaggccctggaggcggtggaaggggccgctttctttgtgtcactggatgctgagcccgcggggctcaccagggaggacccggcagcgtcgttggatgcctacgcccatgctctgctggccggccggggccatgatcgctggtttgacaaatccttcaccctaatcgtcttctctaacgggaagctgggcctcagcgtggagcactcctgggccgactgccccatctcaggacacatgtgggagttcactctggctacagaatgctttcagctgggctactcaacagacggccactgcaaggggcacccggaccccacactaccccagccccagcggctgcaatgggaccttccagaccagatccactcctccatctctctagccctgaggggagccaagatcttgtctgaaaatgtcgactgccatgtcgttccattctccctatttggcaagagcttcatccgacgctgccacctctcttcagacagcttcatccagatcgccttgcaactggcccacttccgggacaggggtcaattctgcctgacttatgagtcggccatgactcgcttattcctggaaggccggacggagacggtgcggtcttgcacgagggaggcctgcaactttgtcagggccatggaggacaaagagaagacggacccacagtgcctcgccctgttccgcgtggcagtggacaagcaccaggctctgctgaaggcagccatgagcgggcagggagttgaccgccacctgtttgcgctgtacatcgtgtcccgattcctccacctgcagtcgcccttcctgacccaggtccattcggagcagtggcagctgtccaccagccagatccctgttcagcaaatgcatctgtttgacgtccacaattacccggactatgtttcctcaggcggtggattcgggcctgctgatgaccatggttatggtgtttcttatatcttcatgggggatggcatgatcaccttccacatctccagcaaaaaatcaagcacaaaaacggattcccacaggctggggcagcacattgaggacgcactgctggatgtggcctccctgttccaggcgggacagcattttaagcgccggttcagagggtcagggaaggagaactccaggcacaggtgtggatttctctcccgccagactggggcctccaaggcctcaatgacatccaccgacttctgactccttccagcaggcagctggcctctccaaggaataagggtgaaattgccacagctggctgacacaggacaggggcaactggtttggcaaccccacatccaggccaataaagatgtgtgagctggg

SEQ ID NO: 78343 - DNA, 2910 bp, Artificial Sequence
  derived and/or modified sequence
gaatacccggctagggacacgagagagaggaatcggggtttctgggtgacggtgatctcggggtgggcaggactccaaaggcccgtcgacccggtggtggactccttgcactgggattggacatatgcaagcgggagatttggggccggcgctcaaaatcggggggcgggggtggactcgggtttggaccccaggatccgatcagcggacccttgattcaacgtgaggtcccgaattgacgtccttccctcaaaacctccgggtctacaaaccaggaccctcaagacccttcaggtgcttagagaaggatgagctaggttatgtagtcctgggtcggcgcaaaaaggcagctgaaagcggctccagcgtgacatggctgaagcgcaccaggccgtgggcttccgaccctcgctgacctcggacggggctgaagtggaactcagtgcccctgtgctgcaggagatctacctctctggcctgcgctcctggaaaaggcatctctcacgtttctggaatgactttctcaccggtgtgtttcctgccagccccctcagttggcttttcctcttcagtgccatccagcttgcctggttcctccagctggatccttccttaggactgatggagaagatcaaagagttgctgcctgactggggtggacaacaccacgggctccggggggtcctggcagccgcgctgtttgcctcgtgtttgtggggagccctgatcttcacactgcacgtggccctgaggctgcttctgtcctaccacggctggcttcttgagccccacggagccatgtcctcccccaccaagacctggctggccctggtccgcatcttctctggccgccacccgatgctgttcagttaccagcgctccctgccacgccagcccgtgccctctgtgcaggacaccgtgcgcaagtacctggagtcggtccggcccatcctctccgacgaggacttcgactggaccgcggtcctggcgcaggaattcctgaggctgcaggcgtcgctgctgcagtggtacctgcggctcaagtcctggtgggcgtccaattatgtcagtgactggtgggaggaatttgtgtacctgcgctcccgaaatccgctgatggtgaacagcaactattacatgatggacttcctgtatgtcacacccacgcctctgcaggcagctcgcgctgggaatgccgtccatgccctcctcctgtaccgccaccgcctgaaccgccaggagatacccccgactttgctgatgggaatgcgccccttatgctctgcccagtacgagaagatcttcaacaccacgcggattccaggggtccaaaaagactacatccgccacctccatgacagccaacacgtggctgtcttccaccggggccgattcttccgcatggggacccactcccgaaacagcctgctttccccgagagccctggagcagcagtttcagagaatcctggatgatccctcaccggcctgcccccacgaggaacatctggcagctctgacagctgctcccaggggcacgtgggcccaggtgcggacatccctgaagacccaggcagcggaggccctggaggcggtggaaggggccgctttctttgtgtcactggatgctgagcccgcggggctcaccagggaggacccggcagcgtcgttggatgcctacgcccatgctctgctggccggccggggccatgatcgctggtttgacaaatccttcaccctaatcgtcttctctaacgggaagctgggcctcagcgtggagcactcctgggccgactgccccatctcaggacacatgtgggagttcactctggctacagaatgctttcagctgggctactcaacagacggccactgcaaggggcacccggaccccacactaccccagccccagcggctgcaatgggaccttccagaccagatccactcctccatctctctagccctgaggggagccaagatcttgtctgaaaatgtcgactgccatgtcgttccattctccctatttggcaagagcttcatccgacgctgccacctctcttcagacagcttcatccagatcgccttgcaactggcccacttccgggacaggggtcaattctgcctgacttatgagtcggccatgactcgcttattcctggaaggccggacggagacggtgcggtcttgcacgagggaggcctgcaactttgtcagggccatggaggacaaagagaagacggacccacagtgcctcgccctgttccgcgtggcagtggacaagcaccaggctctgctgaaggcagccatgagcgggcagggagttgaccgccacctgtttgcgctgtacatcgtgtcccgattcctccacctgcagtcgcccttcctgacccaggtccattcggagcagtggcagctgtccaccagccagatccctgttcagcaaatgcatctgtttgacgtccacaattacccggactatgtttcctcaggcggtggattcgggcctgctgatgaccatggttatggtgtttcttatatcttcatgggggatggcatgatcaccttccacatctccagcaaaaaatcaagcacaaaaacggattcccacaggctggggcagcacattgaggacgcactgctggatgtggcctccctgttccaggcgggacagcattttaagcgccggttcagagggtcagggaaggagaactccaggcacaggtgtggatttctctcccgccagactggggcctccaaggcctcaatgacatccaccgacttctgactccttccagcaggcagctggcctctccaaggaataagggtgaaattgccacagctggctgacacaggacaggggcaactggtttggcaaccccacatccaggccaataaagatgtgtgagctggg

SEQ ID NO: 78344 - DNA, 2767 bp, Artificial Sequence
  derived and/or modified sequence
gagagagaggaatcggggtttctgggtgacggtgatctcggggtgggcaggactccaaaggcccgtcgacccggtggtggactccttgcactgggattggacatatgcaagcgggagatttggggccggcgctcaaaatcggggggcgggggtggactcgggtttggaccccaggatccgatcagcggacccttgattcaacgtgaggtcccgaattgacgtccttccctcaaaacctccgggtctacaaaccaggaccctcaagacccttcagggctccagcgtgacatggctgaagcgcaccaggccgtgggcttccgaccctcgctgacctcggacggggctgaagtggaactcagtgcccctgtgctgcaggagatctacctctctggcctgcgctcctggaaaaggcatctctcacgtttctggaatgactttctcaccggtgtgtttcctgccagccccctcagttggcttttcctcttcagtgccatccagcttgcctggttcctccagctggatccttccttaggactgatggagaagatcaaagagttgctgcctgactggggtggacaacaccacgggctccggggggtcctggcagccgcgctgtttgcctcgtgtttgtggggagccctgatcttcacactgcacgtggccctgaggctgcttctgtcctaccacggctggcttcttgagccccacggagccatgtcctcccccaccaagacctggctggccctggtccgcatcttctctggccgccacccgatgctgttcagttaccagcgctccctgccacgccagcccgtgccctctgtgcaggacaccgtgcgcaagtacctggagtcggtccggcccatcctctccgacgaggacttcgactggaccgcggtcctggcgcaggaattcctgaggctgcaggcgtcgctgctgcagtggtacctgcggctcaagtcctggtgggcgtccaattatgtcagtgactggtgggaggaatttgtgtacctgcgctcccgaaatccgctgatggtgaacagcaactattacatgatggacttcctgtatgtcacacccacgcctctgcaggcagctcgcgctgggaatgccgtccatgccctcctcctgtaccgccaccgcctgaaccgccaggagatacccccgactttgctgatgggaatgcgccccttatgctctgcccagtacgagaagatcttcaacaccacgcggattccaggggtccaaaaagactacatccgccacctccatgacagccaacacgtggctgtcttccaccggggccgattcttccgcatggggacccactcccgaaacagcctgctttccccgagagccctggagcagcagtttcagagaatcctggatgatccctcaccggcctgcccccacgaggaacatctggcagctctgacagctgctcccaggggcacgtgggcccaggtgcggacatccctgaagacccaggcagcggaggccctggaggcggtggaaggggccgctttctttgtgtcactggatgctgagcccgcggggctcaccagggaggacccggcagcgtcgttggatgcctacgcccatgctctgctggccggccggggccatgatcgctggtttgacaaatccttcaccctaatcgtcttctctaacgggaagctgggcctcagcgtggagcactcctgggccgactgccccatctcaggacacatgtgggagttcactctggctacagaatgctttcagctgggctactcaacagacggccactgcaaggggcacccggaccccacactaccccagccccagcggctgcaatgggaccttccagaccagatccactcctccatctctctagccctgaggggagccaagatcttgtctgaaaatgtcgactgccatgtcgttccattctccctatttggcaagagcttcatccgacgctgccacctctcttcagacagcttcatccagatcgccttgcaactggcccacttccgggacaggggtcaattctgcctgacttatgagtcggccatgactcgcttattcctggaaggccggacggagacggtgcggtcttgcacgagggaggcctgcaactttgtcagggccatggaggacaaagagaagacggacccacagtgcctcgccctgttccgcgtggcagtggacaagcaccaggctctgctgaaggcagccatgagcgggcagggagttgaccgccacctgtttgcgctgtacatcgtgtcccgattcctccacctgcagtcgcccttcctgacccaggtccattcggagcagtggcagctgtccaccagccagatccctgttcagcaaatgcatctgtttgacgtccacaattacccggactatgtttcctcaggcggtggattcgggcctgctgatgaccatggttatggtgtttcttatatcttcatgggggatggcatgatcaccttccacatctccagcaaaaaatcaagcacaaaaacggattcccacaggctggggcagcacattgaggacgcactgctggatgtggcctccctgttccaggcgggacagcattttaagcgccggttcagagggtcagggaaggagaactccaggcacaggtgtggatttctctcccgccagactggggcctccaaggcctcaatgacatccaccgacttctgactccttccagcaggcagctggcctctccaaggaataagggtgaaattgccacagctggctgacacag

SEQ ID NO: 78345 - DNA, 2412 bp, Artificial Sequence
  derived and/or modified sequence
atggccgaggcccaccaggccgtgggcttcagacccagcctgaccagcgacggcgccgaggtggagctgagcgcccccgtgctgcaggagatctacctgagcggcctgagaagctggaagagacacctgagcagattctggaacgacttcctgaccggcgtgttccccgccagccccctgagctggctgttcctgttcagcgccatccagctggcctggttcctgcagctggaccccagcctgggcctgatggagaagatcaaggagctgctgcccgactggggcggccagcaccacggcctgagaggcgtgctggccgccgccctgttcgccagctgcctgtggggcgccctgatcttcaccctgcacgtggccctgagactgctgctgagctaccacggctggctgctggagccccacggcgccatgagcagccccaccaagacctggctggccctggtgagaatcttcagcggcagacaccccatgctgttcagctaccagagaagcctgcccagacagcccgtgcccagcgtgcaggacaccgtgagaaagtacctggagagcgtgagacccatcctgagcgacgaggacttcgactggaccgccgtgctggcccaggagttcctgagactgcaggccagcctgctgcagtggtacctgagactgaagagctggtgggccagcaactacgtgagcgactggtgggaggagttcgtgtacctgagaagcagaaaccccctgatggtgaacagcaactactacatgatggacttcctgtacgtgacccccacccccctgcaggccgccagagccggcaacgccgtgcacgccctgctgctgtacagacacagactgaacagacaggagatcccccccaccctgctgatgggcatgagacccctgtgcagcgcccagtacgagaagatcttcaacaccaccagaatccccggcgtgcagaaggactacatcagacacctgcacgacagccagcacgtggccgtgttccacagaggcagattcttcagaatgggcacccacagcagaaacagcctgctgagccccagagccctggagcagcagttccagagaatcctggacgaccccagccccgcctgcccccacgaggagcacctggccgccctgaccgccgcccccagaggcacctgggcccaggtgagaaccagcctgaagacccaggccgccgaggccctggaggccgtggagggcgccgccttcttcgtgagcctggacgccgagcccgccggcctgaccagagaggaccccgccgccagcctggacgcctacgcccacgccctgctggccggcagaggccacgacagatggttcgacaagagcttcaccctgatcgtgttcagcaacggcaagctgggcctgagcgtggagcacagctgggccgactgccccatcagcggccacatgtgggagttcaccctggccaccgagtgcttccagctgggctacagcaccgacggccactgcaagggccaccccgaccccaccctgccccagccccagagactgcagtgggacctgcccgaccagatccacagcagcatcagcctggccctgagaggcgccaagatcctgagcgagaacgtggactgccacgtggtgcccttcagcctgttcggcaagagcttcatcagaagatgccacctgagcagcgacagcttcatccagatcgccctgcagctggcccacttcagagacagaggccagttctgcctgacctacgagagcgccatgaccagactgttcctggagggcagaaccgagaccgtgagaagctgcaccagagaggcctgcaacttcgtgagagccatggaggacaaggagaagaccgacccccagtgcctggccctgttcagagtggccgtggacaagcaccaggccctgctgaaggccgccatgagcggccagggcgtggacagacacctgttcgccctgtacatcgtgagcagattcctgcacctgcagagccccttcctgacccaggtgcacagcgagcagtggcagctgagcaccagccagatccccgtgcagcagatgcacctgttcgacgtgcacaactaccccgactacgtgagcagcggcggcggcttcggccccgccgacgaccacggctacggcgtgagctacatcttcatgggcgacggcatgatcaccttccacatcagcagcaagaagagcagcaccaagaccgacagccacagactgggccagcacatcgaggacgccctgctggacgtggccagcctgttccaggccggccagcacttcaagagaagattcagaggcagcggcaaggagaacagcagacacagatgcggcttcctgagcagacagaccggcgccagcaaggccagcatgaccagcaccgacttctag

SEQ ID NO: 78346 - protein, 429 aa, Artificial Sequence
  derived and/or modified sequence
MIMNATSNEQQELFCQKLQQCCILFDFMDSVSDLKSKEIKRATLNELVEYVSTNRGVIVESAYSDIVKMISANIFRTLPPSDNPDFDPEEDEPTLEASWPHIQLVYEFFLRFLESPDFQPSIAKRYIDQKFVQQLLELFDSEDPRERDFLKTVLHRIYGKFLGLRAFIRKQINNIFLRFIYETEHFNGVAELLEILGSIINGFALPLKAEHKQFLMKVLIPMHTAKGLALFHAQLAYCVVQFLEKDTTLTEPVIRGLLKFWPKTCSQKEVMFLGEIEEILDVIEPTQFKKIEEPLFKQISKCVSSSHFQVAERALYFWNNEYILSLIEENIDKILPIMFASLYKISKEHWNPTIVALVYNVLKTLMEMNGKLFDDLTSSYKAERQREKKKELEREELWKKLEELKLKKALEKQNSAYNMHSILSNTSAE

SEQ ID NO: 78347 - DNA, 1290 bp, Artificial Sequence
  derived and/or modified sequence
atgatcatgaacgcaacctccaacgagcaacaggaactgttctgtcagaagctgcaacagtgctgcatattgtttgatttcatggatagcgtgtctgatctgaaatctaaagaaattaaacgcgccaccctgaatgaactcgttgagtacgtcagcactaaccggggcgtaatcgtcgaatccgcgtactctgacatcgttaaaatgatctctgcaaacatttttcgaacgctgcctccatccgacaacccagatttcgatccagaagaggatgaacccactctggaggcatcttggccccacatccagctcgtctatgaattttttctgaggttcctggagtcaccagactttcaaccatctattgccaaacgctacatcgaccaaaaattcgtgcaacagttactggagctgttcgatagtgaggatcccagagagagggacttcctcaaaaccgtgctgcaccgtatttacggtaagtttctgggcctgagggcctttataaggaagcaaattaacaacatctttcttcgcttcatttatgaaactgagcatttcaatggagtagctgagctgctcgagatcttaggttccatcatcaacggcttcgcgctgcccctgaaggccgagcacaaacaattcctaatgaaagtcctcattcctatgcatacagccaagggtctcgccctgtttcacgctcagctggcatactgcgtagtccagtttctggagaaagataccacattaactgaacctgttatccgggggctccttaagttttggccgaagacctgctcgcagaaggaggtcatgtttctaggagagattgaggaaatcctagatgtgattgagcccactcagttcaaaaagatcgaggagcccttatttaaacagatctccaaatgtgtgagctcttcgcatttccaggtcgccgagcgagctttgtacttctggaataacgagtatatcctcagcttaatagaagagaatatcgataaaatcttgcccattatgtttgcaagcctgtataagatatcaaaggagcattggaatccaacaattgtagccctggtgtataacgtgctgaagaccttaatggagatgaatggaaagctattcgacgatcttacaagctcctacaaagccgaacgtcagagagagaagaaaaaagagctggagcgggaggagctctggaagaagttagaagaacttaaactgaagaaagccttggagaagcaaaactccgcatataatatgcacagtatcctcagtaacacctctgccgagtag

SEQ ID NO: 78348 - DNA, 1290 bp, Artificial Sequence
  derived and/or modified sequence
atgatcatgaatgccaccagcaatgagcagcaggagctgttctgccagaagctgcagcagtgctgcatcctgtttgacttcatggacagcgtgtctgacctgaagagcaaggagatcaagagggccaccctgaatgagctggtggagtatgtgtccaccaacagaggagtcatcgtggagagcgcctacagcgacatcgtgaagatgatcagcgccaacatcttccgcaccctgcccccaagtgacaacccagactttgatcctgaggaggatgagcccaccctggaggcctcctggccccacatccagctggtgtatgagttcttcctgcgcttcctggagagcccagacttccagcccagcatcgccaagcgctacatcgaccagaagtttgtgcagcagctgctggagctgtttgattctgaggacccccgggagcgggacttcctgaagacagtgctgcaccgcatctacggcaagttcctgggcctgcgggccttcatcaggaagcagatcaacaacatcttcctgcgcttcatctatgaaacagagcacttcaatggagtggccgagctgctggagatcctgggcagcatcatcaatggatttgccctgcccctgaaggccgagcacaagcagttcctgatgaaggtgctgatccccatgcacacagccaagggcctggccctcttccacgcccagctggcctactgtgtggtgcagttcctggagaaggacaccaccctgacagagcccgtcatccggggcctgctgaagttctggcccaagacctgcagccagaaggaggtgatgttcctgggggagattgaggagatcctggatgtgattgagcccacccagttcaagaagattgaggagcccctcttcaagcagatcagcaaatgtgtgagcagcagccacttccaggtggccgagcgggccctgtacttctggaacaatgagtacatcctgagcctgattgaagaaaatattgacaagatcctgcccatcatgtttgccagcctgtacaagatcagcaaggagcactggaaccccaccatcgtggccctggtgtacaacgtgctgaagaccctgatggagatgaatggcaagctgtttgatgacctgaccagcagctacaaggccgagcggcagcgggagaagaagaaggagctggagcgggaggagctgtggaagaagctggaggagctgaagctgaagaaggccctggagaagcagaacagcgcctacaacatgcacagcatcctgagcaacaccagcgctgagtag

SEQ ID NO: 78349 - DNA, 1290 bp, Artificial Sequence
  derived and/or modified sequence
atgatcatgaacgccaccagcaacgagcagcaggagctgttctgccagaagctgcagcagtgttgtatcctcttcgacttcatggactccgtgtcagatctgaagagtaaggagattaaaagggcaaccctgaacgagcttgtcgaatacgtctccacaaatcgtggcgtgatcgtggagtcggcgtacagcgacattgtcaagatgatttccgcaaacatatttcggaccctgccaccctcagacaacccggactttgaccccgaagaagatgagccaacattagaagccagctggccacatattcagttagtctatgaatttttcttaagattcctcgagagtcccgattttcagccttccatcgccaagcggtatattgaccagaagtttgtgcagcagctgctggagctgttcgacagcgaggatcctcgggagcgagattttctgaaaaccgtactgcataggatttatggcaaatttctgggccttagggccttcatcaggaaacagataaacaacattttcctcaggtttatctatgagactgagcacttcaatggagtcgcggagctgttggagattctgggaagcatcattaacgggttcgccttaccactgaaagccgagcataaacagttcctgatgaaagtcctgatccccatgcatacggcaaaaggtctggccctctttcatgcacaattggcctactgcgtggtgcaatttctcgagaaagacacaactctgacggaacctgtgatcaggggactcctgaagttttggcctaagacatgttcacagaaagaagtgatgttcctcggcgaaatcgaggagatcttagatgtcatcgagcctactcagttcaagaaaattgaggagcctttgttcaagcagatttcgaaatgtgtgtccagctcccatttccaagtcgcagagagagctttatatttctggaacaacgaatatatactgtcacttattgaggaaaatatagacaaaattctgcctattatgttcgctagtctgtacaagatttcaaaggaacattggaaccccacaatcgtggctcttgtgtacaatgtgctgaaaacacttatggaaatgaacggcaagctgttcgacgatcttacttcctcatacaaagcagagcggcagcgagagaagaagaaagagctggaacgtgaggagctctggaaaaaacttgaagaactgaaactcaagaaggcattggagaaacagaatagtgcttacaatatgcattccatcctctccaataccagtgcagagtag

SEQ ID NO: 78350 - DNA, 1290 bp, Artificial Sequence
  derived and/or modified sequence
atgataatgaacgccacaagcaacgagcagcaggagctgttctgccagaaattgcaacagtgttgtatactcttcgattttatggattcagtctcagatctcaagtccaaggagatcaagcgcgctaccctgaacgagctagttgagtacgtcagcacaaataggggcgtcattgtggagtccgcatactccgacatcgtgaaaatgatcagtgcaaatatctttcgcacactccccccttctgacaatcccgattttgatcctgaggaagatgagcccaccctggaggcaagctggccccacattcagctcgtttacgagttcttcctaagattcctagaatcacctgatttccagccttccattgcaaagcgctacattgatcagaagttcgtccagcagttgctagagctttttgattcagaagaccccagagagcgggatttcttaaaaaccgtgttacacaggatctacggaaagtttctagggctccgtgcctttattcggaagcagatcaataatattttcctccgatttatctatgagacggagcacttcaatggtgtcgccgagttactggagatccttgggagtattataaacgggtttgccttacctctgaaagccgagcacaagcaatttttgatgaaggttcttatcccaatgcacaccgcgaagggcctagccctgtttcacgctcagctggcttattgtgtggtgcagtttttagaaaaggataccacattaaccgagccagtaatccgcggattgctaaagttctggccaaaaacttgttcacagaaggaggtgatgtttctgggggagattgaggagatcctcgacgtgattgagccgacacagtttaaaaaaatcgaagaacctctctttaaacagatatcaaagtgtgtttcaagctcccacttccaagtggccgagcgtgctctctatttctggaataacgagtatatactgtctctcatagaagaaaatatcgacaaaatcctgcccataatgttcgcctctctctataagatcagcaaagagcactggaacccaactatcgtggctttggtctataacgtgcttaagactctcatggaaatgaatgggaaattatttgatgacctgacatcctcctataaagcagaacggcagagggagaagaagaaggagctcgagagagaagaactctggaaaaagctggaggaattgaagctgaagaaggctcttgaaaagcagaatagtgcatacaacatgcatagtatactcagcaacacctcagctgaatag

SEQ ID NO: 78351 - DNA, 1719 bp, Artificial Sequence
  derived and/or modified sequence
atgatacagtgcttgttctataatttgtagcatgaatcctatatgagatcttactttagatttcaagtatgttagcagcagtaattagggatgttttcctctaaggaaaattatagttataaaattattatttgttagaaatgattcctgctacttcaaattatttatccttaaatgtagaggattaacaatgaacaacttgaaataacttggttatcacctcagaagtttagtttatcactgatttaatgaagaagggcaagaagaggaaggctttatgataatgaatgccacttcaaatgaacaacaagagcttttctgtcagaagttgcagcagtgttgtatactgtttgatttcatggactctgtttcagacttgaagagcaaagaaattaaaagagcaacactgaatgaactggttgagtatgtttcaactaatcgtggtgtaattgttgaatcagcgtattctgatatagtaaaaatgatcagtgctaacatcttccgtacacttcctccaagtgataatccagattttgatccagaagaggatgaacccacgcttgaggcctcttggcctcacatacagttggtatatgaattcttcttgagatttttggagagccctgatttccagcctagcattgcaaaacgatacattgatcagaaattcgtacaacagctcctggagctttttgatagtgaagatcccagagaacgtgacttcctgaagactgttctgcaccgaatttatgggaaatttcttggattaagagcattcatcagaaaacaaattaacaacattttcctcaggtttatatatgaaacagaacatttcaatggtgttgctgaacttcttgaaatattaggaagtattatcaatggctttgcattgccactgaaagcagaacataaacaatttctaatgaaggttcttattcctatgcatactgcaaaaggattagctttgtttcatgctcagctagcatattgtgttgtacagttcctggagaaagatacaacactaacagagccagtgatcagaggactgctgaaattttggccaaaaacctgcagtcagaaagaggtgatgtttttaggagaaattgaagaaatcttagatgtcattgaaccaacacagttcaaaaaaattgaagagccacttttcaagcagatatccaagtgtgtatccagttctcattttcaggttgcagaaagggcattgtacttctggaataacgaatatattcttagtttgattgaggagaacattgataaaattctgccaattatgtttgccagtttgtacaaaatttccaaagaacactggaatccgaccattgtagcactggtatacaatgtgctgaaaaccctaatggaaatgaatggcaagcttttcgatgaccttactagctcatacaaagctgaaagacagagagagaaaaagaaggaattggaacgtgaagaattatggaaaaaattagaggagctaaagctaaagaaagctctagaaaaacagaatagtgcttacaacatgcacagtattctcagcaatacaagtgccgaataaaaaaaaagcctcccacctctgccggataggcagagttttgtatgcttttttgaaatatgtaaaaattacaaaacaaacctcatcagtataatataattaaaaggccaattttttctggcaactgtaaatggaaaaatatatggactaaacgt

SEQ ID NO: 78352 - DNA, 1290 bp, Artificial Sequence
  derived and/or modified sequence
atgatcatgaacgccaccagcaacgagcagcaggagctgttctgccagaagctgcagcagtgctgcatcctgttcgacttcatggacagcgtgagcgacctgaagagcaaggagatcaagagagccaccctgaacgagctggtggagtacgtgagcaccaacagaggcgtgatcgtggagagcgcctacagcgacatcgtgaagatgatcagcgccaacatcttcagaaccctgccccccagcgacaaccccgacttcgaccccgaggaggacgagcccaccctggaggccagctggccccacatccagctggtgtacgagttcttcctgagattcctggagagccccgacttccagcccagcatcgccaagagatacatcgaccagaagttcgtgcagcagctgctggagctgttcgacagcgaggaccccagagagagagacttcctgaagaccgtgctgcacagaatctacggcaagttcctgggcctgagagccttcatcagaaagcagatcaacaacatcttcctgagattcatctacgagaccgagcacttcaacggcgtggccgagctgctggagatcctgggcagcatcatcaacggcttcgccctgcccctgaaggccgagcacaagcagttcctgatgaaggtgctgatccccatgcacaccgccaagggcctggccctgttccacgcccagctggcctactgcgtggtgcagttcctggagaaggacaccaccctgaccgagcccgtgatcagaggcctgctgaagttctggcccaagacctgcagccagaaggaggtgatgttcctgggcgagatcgaggagatcctggacgtgatcgagcccacccagttcaagaagatcgaggagcccctgttcaagcagatcagcaagtgcgtgagcagcagccacttccaggtggccgagagagccctgtacttctggaacaacgagtacatcctgagcctgatcgaggagaacatcgacaagatcctgcccatcatgttcgccagcctgtacaagatcagcaaggagcactggaaccccaccatcgtggccctggtgtacaacgtgctgaagaccctgatggagatgaacggcaagctgttcgacgacctgaccagcagctacaaggccgagagacagagagagaagaagaaggagctggagagagaggagctgtggaagaagctggaggagctgaagctgaagaaggccctggagaagcagaacagcgcctacaacatgcacagcatcctgagcaacaccagcgccgagtag

SEQ ID NO: 78353 - protein, 950 aa, Artificial Sequence
  derived and/or modified sequence
MRRPRRPGGLGGSGGLRLLLCLLLLSSRPGGCSAVSAHGCLFDRRLCSHLEVCIQDGLFGQCQVGVGQARPLLQVTSPVLQRLQGVLRQLMSQGLSWHDDLTQYVISQEMERIPRLRPPEPRPRDRSGLAPKRPGPAGELLLQDIPTGSAPAAQHRLPQPPVGKGGAGASSSLSPLQAELLPPLLEHLLLPPQPPHPSLSYEPALLQPYLFHQFGSRDGSRVSEGSPGMVSVGPLPKAEAPALFSRTASKGIFGDHPGHSYGDLPGPSPAQLFQDSGLLYLAQELPAPSRARVPRLPEQGSSSRAEDSPEGYEKEGLGDRGEKPASPAVQPDAALQRLAAVLAGYGVELRQLTPEQLSTLLTLLQLLPKGAGRNPGGVVNVGADIKKTMEGPVEGRDTAELPARTSPMPGHPTASPTSSEVQQVPSPVSSEPPKAARPPVTPVLLEKKSPLGQSQPTVAGQPSARPAAEEYGYIVTDQNVVGPALTFRIRHNEQNLSLADVTQQAGLVKSELEAQTGLQILQTGVGQREEAAAVLPQTAHSTSPMRSVLLTLVALAGVAGLLVALAVALCVRQHARQQDKERLAALGPEGAHGDTTFEYQDLCRQHMATKSLFNRAEGPPEPSRVSSVSSQFSDAAQASPSSHSSTPSWCEEPAQANMDISTGHMILAYMEDHLRNRDRLAKEWQALCAYQAEPNTCATAQGEGNIKKNRHPDFLPYDHARIKLKVESSPSRSDYINASPIIEHDPRMPAYIATQGPLSHTIADFWQMVWESGCTVIVMLTPLVEDGVKQCDRYWPDEGASLYHVYEVNLVSEHIWCEDFLVRSFYLKNVQTQETRTLTQFHFLSWPAEGTPASTRPLLDFRRKVNKCYRGRSCPIIVHCSDGAGRTGTYILIDMVLNRMAKGVKEIDIAATLEHVRDQRPGLVRSKDQFEFALTAVAEEVNAILKALPQ

SEQ ID NO: 78354 - DNA, 2853 bp, Artificial Sequence
  derived and/or modified sequence
atgcgaaggcctcgtcgacccggcggcctgggcggcagtggcggactcagactgcttctgtgtctcctcttactcagcagccgacccggcgggtgttccgcggtgtccgctcatggttgcctgtttgatcgcaggctgtgctcacacttggaagtgtgcatccaggacggtctgttcggtcagtgtcaggttggtgttggacaagccagacctctgttacaggtgacttcacccgtgttgcaaaggctgcagggtgtgctgaggcagctgatgagtcaaggactgagttggcatgatgacctgacccagtacgtgatttcgcaggaaatggaacggataccacgcctcaggccgcctgagccacgtccccgtgacagaagcggtctggcccctaagagaccaggcccagcgggggaactacttctccaggatatacctacaggaagcgcaccagccgcccaacaccggctccctcagcctccagtcggaaagggcggcgccggagcttcttcatctctgagtccactgcaggctgagctcctgccccccttgcttgaacacctgcttttgccaccccaacctccccacccttctttgagttatgagcccgcgctgctgcaaccatacttgttccaccagttcggttctagagacggcagtcgcgtgtcagagggtagcccaggaatggtgtccgtggggcccctaccaaaggccgaagctcctgctcttttttccagaaccgcatctaaaggaatattcggggatcatcccggtcactcatacggggacttgcccggtcctagtcctgcgcagctgttccaagactccggactgctgtatctagcccaggagctgcccgccccatccagagcaagggtgccacgattgcccgagcaggggagctcgagcagagcagaggactcgcctgaaggctacgagaaggagggcttgggtgatcgcggtgaaaaacccgcaagccctgcggtgcagcccgacgccgccctgcaacggctcgcggcagttctggcagggtatggcgtcgagttgaggcagctcacaccagagcagctgtcaactctgctcacgctcttgcaactcctgcccaaaggggccggacggaaccccggcggagtagtgaatgtgggcgcagacataaagaagactatggaagggcctgtggagggaagagatactgccgagttgcccgcacggaccagcccaatgcccggccatccaacggctagcccgactagttcggaggtgcagcaagtgccaagccccgtgagttccgaacccccaaaagcagcgcgtccccccgtaacgccagtgcttctggagaagaaaagtccgctcggccagtcccaacccaccgttgccggccagccatccgcccgccccgccgccgaggaatatggatacattgtcaccgaccagaatgtggttggtcccgcactgacattccgcattagacacaatgaacagaatttgtcacttgccgacgttacccagcaggccggtctcgtgaaaagcgaacttgaggcgcagactggactgcaaattttgcagacaggcgtcggtcagcgggaagaagccgctgcagttctgccgcaaactgcgcactccaccagtcccatgcgcagcgttctgctcaccctcgtcgccctggcaggagttgcaggcctgttagtggctctcgctgtggcactctgcgtcagacagcatgctcggcagcaggataaggaaagacttgctgcactaggaccagagggcgctcacggggacactactttcgagtatcaagacttatgcaggcagcatatggccacaaaaagtcttttcaacagggccgaggggccccccgaaccctcccgggtgtcatccgtcagttctcaattcagcgatgctgctcaggcatctccctcttcccacagcagcaccccctcttggtgcgaagaaccagcacaggccaacatggatatttccacaggccacatgattcttgcgtacatggaggaccacctcagaaatagggaccggctggcgaaagagtggcaagccctatgtgcttaccaggcggagcctaatacatgcgcaactgcccagggggagggcaatatcaagaagaatcgacatccggatttcctcccatacgaccatgcccgtatcaaactgaaagttgagtctagcccttcacgatcagactatataaacgcctcccctatcatcgaacatgatccgcgcatgcccgcatatatcgcgacccagggacctttgtcacatactatcgcagacttctggcaaatggtgtgggagagcgggtgcactgtgatcgtgatgctgacccccttagttgaggacggcgttaaacagtgcgatcgctattggcctgatgaaggcgcttctctgtatcatgtgtacgaagtgaacttggtgagcgaacacatctggtgcgaggactttttggtccgtagcttctaccttaagaatgtgcaaactcaggagactcgaactctgacccagttccattttttgtcctggccagctgagggaacacccgctagcacacggccactcttggatttcagacggaaagtcaacaaatgctaccgagggcgcagctgtccgataatcgtgcattgcagcgatggggccggccggacaggcacatacatactaatcgatatggtgcttaaccgcatggcgaagggcgtcaaggaaatcgatatcgcagcaacactagaacatgtgagagatcaacggccaggcttggtccgatctaaggaccagttcgaatttgcgcttacagccgtcgcagaagaggtcaacgcgattttgaaagctttaccccaatag

SEQ ID NO: 78355 - DNA, 2853 bp, Artificial Sequence
  derived and/or modified sequence
atgcgcaggcccaggcggcctggcggcttgggtgggtcaggtggcctccggctactgctctgcttactgctcttgtcgagccgacctggtggatgctcggcggtgagtgcacacggttgccttttcgatcgccggctgtgctctcacctcgaggtgtgcatccaggatgggcttttcggacagtgtcaggttggcgtgggtcaggctcgaccccttctgcaggtcacttccccagtgctacagaggctgcagggagttctgcgacagttaatgagccaggggctttcctggcatgacgaccttactcagtacgtcatatcacaagagatggagagaatccccaggctcaggcccccggagccccgcccacgcgaccggtctgggcttgccccaaagagaccaggccccgccggggagctgttgttgcaagatatcccaactggctccgcacccgcagcccaacaccgcctgccccaacctcccgttgggaaaggaggagccggggccagctcttcactgtctccccttcaggcagagctgctcccaccactgctggagcacctcttactcccgcctcagccacctcacccctcattgtcatatgagcccgccctgcttcaaccatacctcttccaccagtttggctcgagagatgggtcacgggtgagcgaaggcagccctggcatggtgtccgtgggtcctctcccaaaagcagaagcacctgccctgttcagtaggaccgcttctaaaggcatcttcggtgatcaccccgggcactcatacggagatctaccagggccgagtcccgcccaactcttccaggattcaggattgctttacttagctcaagaactgccggccccatcgagggccagagtgccgcgactgcctgagcagggcagctcgtcccgggctgaagacagcccagagggatacgaaaaagaaggactgggagaccggggtgagaaaccagcatccccggctgtccaacccgacgctgctttgcagcgcctggcggctgttttagctggctatggggttgaactgaggcagctgaccccggagcagctgagtacactcctcaccctgctccagctcctgccaaagggagcgggtcgaaatccaggcggcgttgtcaatgtgggcgccgatatcaagaagactatggaaggccccgtggagggcagggacaccgctgagttgcctgcaagaacttctccaatgccaggccatccgacagctagtcccacctctagcgaggttcaacaggtccccagcccagtttcaagtgaaccaccaaaagcagcccgcccccccgtcacaccagtgcttctcgagaaaaaaagtcccctcgggcaatcccaaccaaccgtggctggtcagccgtctgcaagacctgccgccgaggagtatgggtatattgttacagaccagaatgttgtcggacctgccctcacgttcaggatccgacacaatgaacagaatctgtccctcgcagacgttacccagcaggccggtctggtgaagagcgaactggaggcccagaccggcctccagatactgcagacaggagttggacagagggaagaggctgctgccgttctgccacagaccgcccactcaacaagccctatgcgctcagtgctgctaactctagtggccctcgctggggtagcagggctattagtcgcgctggccgtggccctctgtgtcaggcagcatgctagacagcaggacaaagagcggctggctgcactgggccctgagggggctcatggcgacaccactttcgaatatcaggacctatgtagacagcacatggccaccaagagcctttttaacagagcggaaggcccgcctgagccctctagggtgtcttccgtgtcgtctcaattctccgacgccgcccaagcttcaccatcctcacattcaagcaccccaagctggtgcgaagagcctgcacaggctaacatggacatatccacaggccacatgattctcgcttatatggaagaccatttacgcaaccgggatcggttggccaaggaatggcaggcgctttgcgcttaccaggctgagccaaatacctgtgctacagcccaaggagagggcaacattaaaaaaaatcggcaccctgacttcctcccatacgaccacgctagaattaaacttaaggtcgaatcatcccccagccgcagcgactatatcaatgcgtcacccattatcgaacacgacccccggatgccagcctatatcgcgacgcaggggccactgagtcacaccattgctgacttctggcagatggtgtgggaaagtggatgcacggtcatcgtcatgctgacacccctcgtggaagacggggttaagcagtgtgatcgatactggcccgacgaaggagcatccttgtatcacgtgtacgaagtcaacttagtcagcgaacacatctggtgcgaggattttctggtgagaagcttttatctcaaaaatgtgcagacccaggagacacggacccttactcaattccactttctaagttggccagccgaggggactcctgcttccactcgtcctctgctcgacttccggcggaaagtgaataagtgctatcgcggccggtcctgtccaattatcgtgcattgctccgatggggcaggaagaacagggacgtacattctgatcgacatggtgctcaacaggatggccaaaggcgtcaaagagatcgacattgccgctactctcgaacacgtgcgggaccagagaccaggtctcgtgagatcaaaagaccagttcgaattcgcattgacagcggtggccgaagaggttaacgcaatccttaaggctctgccacagtag

SEQ ID NO: 78356 - DNA, 2853 bp, Artificial Sequence
  derived and/or modified sequence
atgaggcggcccaggaggcctgggggcctgggcggcagcggcggcctgcggctgctgctgtgcctgctgctgctgagcagcaggcctgggggctgcagcgctgtgtctgcccacggctgcctgtttgaccggcggctgtgcagccacctggaggtgtgcatccaggacggcctgtttggccagtgccaggtgggcgtgggccaggcccggcccctgctgcaggtgaccagccctgtgctgcagaggctgcagggcgtgctgcggcagctgatgagccagggcctgtcctggcatgatgacctgacccagtatgtgatcagccaggagatggagcgcatcccccggctgcggcccccagagccccggccccgggacagaagtggcctggcccccaagaggcctggccctgctggggagctgctgctgcaggacatccccactggaagtgccccagctgcccagcaccggctgccccagccccctgtgggcaagggcggggccggggccagcagcagcctgagccccctgcaggccgagctgctgccccccctgctggagcacctgctgctgcccccccagcccccccaccccagcctgtcctatgagcccgccctgctgcagccctacctgttccaccagtttggcagcagagatggcagccgggtgtctgagggcagccctggcatggtgtctgtgggccccctgcccaaggccgaggccccagccctcttcagcaggacagccagcaagggcatctttggagaccaccctggccacagctatggagacctgcccggccccagccctgcccagctgttccaggacagcggcctgctgtacctggcccaggagctgcctgcccccagccgggcccgggtgccccggctgcctgagcagggcagcagcagcagagctgaggacagccctgagggctatgagaaggagggcctgggggacagaggagagaagccagccagccctgctgtgcagccagatgctgccctgcagaggctggccgctgtgctggccggctatggagtggagctgcggcagctgaccccagagcagctgagcaccctgctgaccctgctgcagctgctgcccaagggagctggaagaaatcctggaggagtggtgaatgtgggcgctgacatcaagaagaccatggagggccctgtggagggccgggacacagctgagctgcctgcccggaccagccccatgcctggccaccccacagccagccccaccagcagcgaggtgcagcaggtgcccagccctgtgagcagcgagccccccaaggccgcccggccccctgtgacccctgtgctgctggagaagaagagccccctgggccagagccagcccaccgtggccggccagcccagcgcccggcctgctgctgaggagtatggctacatcgtgacagaccagaatgtggtgggccctgccctgaccttccgcatccgccacaatgagcagaacctgagcctggctgatgtgacccagcaggccggcctggtgaagtctgagctggaggcccagacaggcctgcagatcctgcagacaggagtgggccagcgggaggaggccgctgctgtgctgccccagacagcccacagcaccagccccatgaggtctgtgctgctgaccctggtggccctggccggcgtggccggcctgctggtggccctggccgtggccctgtgtgtgcggcagcacgcccggcagcaggacaaggagcggctggccgccctgggccctgagggcgcccacggggacaccacctttgagtaccaggacctgtgccggcagcacatggccaccaagagcctcttcaacagagctgagggccccccagagcccagccgggtgtcctctgtgagcagccagttcagtgatgctgcccaggccagccccagcagccacagcagcacccccagctggtgtgaggagcccgcccaggccaacatggacatcagcacaggccacatgatcctggcctacatggaggaccacctgaggaacagagaccggctggccaaggagtggcaggccctgtgtgcctaccaggccgagcccaacacctgtgccacagcccagggcgagggcaacatcaagaagaacagacacccagacttcctgccctatgaccacgcccgcatcaagctgaaggtggagagcagccccagcagaagtgactacatcaatgccagccccatcatcgagcatgaccccaggatgcctgcctacatcgccacccagggccccctgagccacaccatcgctgacttctggcagatggtgtgggagagcggctgcaccgtgattgtgatgctgacccccctggtggaggatggagtgaagcagtgtgaccgctactggccagatgaaggagccagcctgtaccacgtgtatgaggtgaacctggtgtctgagcacatctggtgtgaggacttcctggtgcgctccttctacctgaagaatgtgcagacccaggagaccaggaccctgacccagttccacttcctgtcctggccagctgagggcaccccagccagcacccggcccctgctggacttccggaggaaggtgaacaagtgctaccggggccgcagctgccccatcatcgtgcactgcagtgatggagctggccgcacaggcacctacatcctgattgacatggtgctgaacaggatggccaagggcgtgaaggagattgatattgctgccaccctggagcacgtgcgggaccagaggcctggcctggtgcgcagcaaggaccagtttgaatttgccctgacagctgtggccgaggaggtgaatgccatcctgaaggccctgccccagtag

SEQ ID NO: 78357 - DNA, 2853 bp, Artificial Sequence
  derived and/or modified sequence
atgcggcggccccggcggcccggcggcctgggcggcagcggcggcctgagactcttactgtgtctcctgctgctgtcaagcaggcccggcggatgcagtgcagttagcgcacacggatgcttgttcgatcggagattgtgctctcatctggaggtgtgtatccaagacggactcttcggtcagtgccaggtgggagtggggcaggcgcgcccgttgctccaggtaacctcacccgttctgcagaggctccagggggtgctgcgtcagttgatgtcacagggcctgtcttggcacgacgacctgacccaatacgtgatctcgcaggagatggaaaggatacctaggctcagacctccggagccccgccctcgggatcgatccggcctggcccccaagcgccccggtcccgccggcgagctcctgctgcaggacatccccactggcagcgcaccagctgcacagcatcgcttacctcagccccccgtcggcaaaggcggtgccggcgcctcgtccagcctgtctccacttcaggcagagctcttgccccccctgctggagcatttgctcctgcctccgcagcctccgcaccctagcttgtcttatgagccagcccttctacagccctatctctttcaccagttcggaagtcgggacggctcacgggtgagtgaaggttcccctggaatggtatcagtcgggcccctgcccaaggccgaggcgccagccctgttttcccgcacagcaagcaaggggattttcggtgatcaccccggacatagctatggggatcttccagggccttcccccgctcaacttttccaagatagcggcctgctatacctggcccaagaactgccagctcctagccgcgctagggtgccacgcctgcctgagcagggctcctcttctagagcagaggattctccggaaggatatgagaaagagggtctaggtgatcgaggggagaagcccgcgagccctgcggttcagcctgatgccgcgctccagcgtctcgccgccgttctggctgggtacggcgtggaactccggcagctgactccggaacaactgtccaccctgctaacccttctgcagcttctgccaaaaggagccgggaggaaccctggcggagtggtgaatgtcggtgccgacatcaagaaaaccatggagggacctgtggaaggccgagacaccgccgagctccctgcaagaacctcccctatgccgggtcatcccacagctagtcccactagctcagaagttcagcaggttccaagtcctgtgagctcagagcctcctaaagccgctcggcctcctgttacaccagtactgctggaaaaaaagtctcctttgggccagagtcagcccactgtcgccgggcagcctagtgctcggcctgcggctgaggagtatggatacatcgtcacagatcagaacgtggtcggtcccgctctgacttttcggatccggcataatgaacagaatttgtcattggcagacgtaactcaacaggctggcctcgtgaagtctgaattggaagcccagactggcctccaaatcttacagaccggagtggggcaacgcgaggaagcagccgcagttttaccacagaccgctcacagcacatctcctatgcggtcagtcctgctcacactggttgctctggctggtgtggcaggcttactggtggctctcgccgtggccctttgtgtacggcagcatgccaggcagcaggacaaagaacgccttgctgcacttggccctgaaggagcccacggcgacaccacgtttgaatatcaggacctctgtcggcagcatatggccaccaagtctctcttcaaccgggctgaagggccccctgagccgagccgcgtgtcttcagtcagctcgcagttttccgacgccgcccaggcatcgccttcctcccactcgtctaccccttcctggtgtgaagaacctgcccaagccaacatggatattagcactggccacatgatccttgcttacatggaagatcacctgagaaaccgcgaccggcttgctaaggaatggcaagctctgtgcgcctatcaggccgagcccaatacatgtgccacagcccagggcgaaggcaatataaagaaaaacagacatcccgattttcttccgtatgatcacgcaagaatcaagctgaaggtggaatcctctccaagcagatccgattatatcaacgcctcccctatcattgagcatgatcctcgaatgcccgcctatattgccacccagggtcccctttcacacactatcgccgacttttggcagatggtatgggagtccggctgtaccgttatcgttatgctcacccccctggtagaagacggtgtgaaacaatgcgaccggtactggccggacgagggagcctctctgtaccacgtgtacgaagtgaacctcgtgtccgaacacatctggtgcgaagattttcttgtgcgctcattttacttaaaaaacgtgcagacacaggagactcggacattaacccagtttcacttcctcagctggcctgccgagggaaccccagctagcacacgacccttgttggatttcagaagaaaggttaataagtgttaccgcggtaggtcctgccccattatcgtgcattgcagtgatggagccggaaggactgggacgtacatcctcatcgatatggttctcaatagaatggccaagggagtgaaagagatcgacatcgcagccactttggagcatgtcagagaccaacgcccaggtctggttcggtctaaggatcaatttgaattcgcactcacagcagtggccgaagaggtgaacgccattctcaaggctctaccacagtag

SEQ ID NO: 78358 - DNA, 2853 bp, Artificial Sequence
  derived and/or modified sequence
atgcggcggccccggcggcccggcggcctgggcggcagcggcggcctgcgccttctgttatgcctgctcctgctctcttctaggcccggtggatgctctgcggtcagtgcgcatgggtgcctgttcgaccggagattatgcagccacctcgaggtttgtatccaggatggtttgttcggccagtgtcaagtcggagtcggccaggcccgacctcttctccaggtgacaagtcccgtgctgcaacggctgcagggtgtgcttcggcaactcatgagtcaaggcctttcttggcacgacgaccttacgcagtatgtaatatcgcaagagatggagaggatccctcgccttcggccgcccgaacccaggcctcgggaccgctccggtctggctccaaaacgacctgggccagctggggagctgctcctgcaagacattcctaccggatcagctccggcagcccaacaccgcctgccgcaacctcccgttgggaagggcggagccggggcgtccagtagcctgtcccccctgcaggccgagctcctccctccactcttggagcacctgctgctccctcctcagcccccccacccaagcctgtcctatgagcccgccctccttcagccctatctgtttcatcaattcgggtcaagagatggaagccgggtcagtgaaggctccccgggtatggtctcagtgggcccactgcccaaggctgaggctcctgccctgttttcccggacagcgagtaagggaatcttcggggatcatcctggtcacagctacggcgacctgcccggcccctccccggcacagctgtttcaagatagcgggctcctttatctcgcacaggagctgccggccccttccagggctcgcgtgccaagacttcccgagcagggaagctcttccagagccgaggactcccccgaaggctatgaaaaggaaggactgggagaccggggggagaagccagcatccccagcagtgcagcctgatgcagccctgcagcgattagcggcagtgttagccggttacggagttgaattgaggcagctgaccccagagcagctatctacactgctgacacttcttcaactgttgccaaagggggctgggagaaatcctggaggtgtggtgaacgtgggcgcagacatcaaaaaaactatggaaggtccggttgaaggccgtgacactgcagagctccccgcaagaactagtcctatgcccgggcaccccactgcctctcccacgtccagtgaggttcagcaggtgcctagccccgtctcctccgagccaccaaaggctgcaagaccccccgtgacgccagtcctactggagaagaaaagcccattaggtcagagtcagcctacggttgcaggccaaccatccgcaagacctgccgcagaggagtacggatacattgtaacagatcagaatgttgtaggtcctgcccttacattcagaatccgtcataatgagcagaacttgagcttggctgatgtgacccagcaagctgggttagtgaagtcagaactggaagcccagacaggcctgcagattctgcagaccggcgtcgggcaaagagaggaggccgctgcagttctgccccagactgcccacagtacctcacctatgcgaagtgtccttctcaccctggtggctctggctggcgtggctgggctcctcgttgctctggctgtggcactgtgtgtacgccagcacgcacgacaacaggacaaggaacgcctggctgcccttggccccgaaggtgcccatggagacacaacattcgagtaccaggacttgtgccggcagcatatggccacaaagagtttattcaatcgggccgaaggcccccctgagccctctcgcgtgagcagtgtatcttcccagttcagcgatgcagcccaagcatccccttccagccatagttccacccctagctggtgtgaggaacctgctcaagctaatatggacatctccacaggacacatgatactggcttatatggaagatcacttaaggaacagagatagacttgccaaagagtggcaggctctgtgcgcctatcaggccgagccaaacacttgcgcaaccgcgcagggcgaaggcaatatcaagaagaatagacatccagatttcttaccatacgatcacgcccgtatcaagctgaaggttgagtctagtccatctcgctctgactatatcaatgcctctccaattatcgagcacgatccccgtatgcccgcctatatcgctacccagggaccattgagccacaccatcgccgatttttggcagatggtgtgggagagtggatgcacagtgattgttatgcttaccccactggtggaggatggtgtcaaacagtgcgatcgttactggcctgacgagggggcttccttataccacgtgtatgaagtcaatctcgtaagcgagcacatttggtgtgaggatttcctagtgcgctccttttacctgaagaacgttcagacccaagagacgcgtaccctcacacagtttcacttcctctcctggcccgctgaaggcacgcccgctagcactcgaccgctcctggacttccggcggaaagtcaacaagtgctaccgcgggcggtcatgtcctatcattgtccactgcagcgacggagcgggacggaccggcacctacatcctaatcgacatggtgctaaaccggatggcaaaaggggtgaaggaaatagacatagctgcgacgctagagcatgtgcgggaccagcgacctgggctagtcaggagtaaagatcagttcgagttcgccctcactgctgtagccgaagaagttaatgcgattctgaaggcactgccacaatag

SEQ ID NO: 78359 - DNA, 2853 bp, Artificial Sequence
  derived and/or modified sequence
atgcgaaggccccgtaggcctggcggtctcggtggatctgggggtctgagactcctgttatgtctgctcctcctgtccagccgtcctggcggttgttctgctgtgagcgcacatggatgcttgttcgacaggcgtttatgtagccacttggaagtgtgcatacaggatggcctgttcggtcagtgccaagtcggggtgggccaagcacggcctcttcttcaggtgacctcgcccgtgcttcaacgtctccaaggcgtgctacggcagttaatgtcacaggggctctcatggcatgacgatctgacacagtatgtcatcagccaggagatggaacgtattccaagactgcggccacctgaaccacgaccgagagacaggtcaggcctcgccccaaagagacccggaccagcaggagagctgctacttcaggacattccgactggctccgcccctgccgctcagcataggctgccgcaaccccctgtcggcaagggtggcgctggggcatcctcttctctgtcaccactgcaggctgaactactcccgccactactggaacacctgctgttaccaccacaacccccacaccccagtctctcatacgagcccgctctgctgcagccctacctatttcaccagttcggtagtagagatggcagccgtgtgtccgagggaagcccaggaatggtgagcgtcggacccctgccaaaagccgaggcccctgcactgttctcacggaccgcatccaagggtatcttcggggaccatcccggtcatagctacggcgatctcccgggacctagtccggctcagctatttcaagatagtggcctgctataccttgcccaggagctgcccgctccctcacgcgcacgggttccaaggctccccgagcagggctccagcagtcgcgctgaagacagccctgagggctacgaaaaggagggcttgggcgataggggtgagaaacctgccagtcccgctgttcagcctgacgcagcactgcagaggttagccgcagttctggcaggatacggcgtcgaattacggcagctcaccccagagcagttgtctaccctcctgaccctcctgcagttgctacctaaaggggctggcaggaatcccggtggcgtagttaacgttggcgcagacataaaaaagacgatggaagggcctgtggaaggccgtgacactgccgaattgccagcccgtacttcaccaatgccgggtcatccaacagcctcgcccacaagctctgaggtccagcaggtgccttcacccgtgtcctctgagccacctaaggccgctcgcccaccagtcactcctgtgctgctggaaaagaaaagtccactcggacagtctcagccgaccgtggccggacagccatcagctagaccagccgcagaagaatacggctacatcgtaaccgatcagaacgtggtgggtcccgctctgaccttcaggattcgacacaatgagcaaaacctgtccttggcggacgtcacccaacaggccggattagtcaagtcagagttggaagcccaaacagggctgcaaatcctgcagaccggcgtcgggcagcgggaagaagcggctgcagttctaccacagaccgctcactcgacgtcacctatgcggagcgtgcttttgaccctcgtcgctctcgccggtgtggccggattgctggtggccctggctgtggccctatgcgtccggcaacacgccagacagcaggacaaagagagactcgccgcacttggccctgagggtgctcacggggatacaacctttgaataccaagacctgtgccgccagcacatggcaaccaagtccctattcaacagagcagaagggcctcccgagccatctagagtatcctctgtgtcttcccagttctccgacgcagctcaggccagcccatcatctcactcttcaactccctcttggtgtgaagaacctgcccaagcaaacatggacatctctaccggacacatgattttagcttacatggaagaccacctacgcaaccgtgaccggctcgctaaagagtggcaggcactctgcgcgtatcaggcagagccgaatacctgtgccactgcacagggagaggggaacatcaaaaaaaatcgccacccagattttctcccttatgaccacgcacgaataaaactgaaggtagagagcagcccttctcggtcggattatatcaacgcatccccaatcatagagcatgaccccagaatgcctgcctatattgcaacgcagggtccgctgagccacaccatcgctgatttttggcagatggtctgggagagtgggtgcacggtgattgtgatgctgacccccctggtggaggatggcgtcaagcagtgcgatcggtattggcccgacgaaggcgcatctctgtaccacgtttacgaggtgaatctggtgtcggagcacatttggtgcgaagacttcctcgtacgcagcttttacctgaagaatgtgcaaactcaggaaacaaggaccctgacacaatttcacttccttagctggcctgcagagggtaccccggctagcactaggccactgcttgatttccgacgtaaagtcaacaagtgttatcgaggtagatcttgccccataatcgtccactgcagtgatggagctggaaggactgggacatacatccttatcgatatggtcctcaataggatggctaagggggtgaaggagattgatatcgcagccaccctggaacatgtgagggaccaacgacctggactcgtcaggtccaaggatcagttcgagttcgcgttgaccgccgtcgctgaggaggttaacgctatattgaaggctctgcctcagtag

SEQ ID NO: 78360 - DNA, 2853 bp, Artificial Sequence
  derived and/or modified sequence
atgagaaggccacgtcgccctggtggcctgggtggttctggaggactgagactactgctgtgtctattgctgctgagctccaggccaggaggctgttctgctgtttccgctcacggttgtctttttgacaggcgtctgtgtagccatctagaggtttgcattcaagacggcctcttcggacagtgtcaggtgggcgtgggccaggccagaccactgctacaagttacaagccctgtgctgcagaggctgcaaggcgtgctccgtcagctcatgagtcagggcctgagctggcacgatgatcttacccagtacgtgatttctcaggagatggagaggatcccgaggctgaggcctcccgagcctagacccagagacaggtctggattagcccctaagagaccaggcccagcaggtgaactgctgctgcaggacatccccaccggatctgccccagccgcacagcaccggttgccacaacctccggtcgggaaaggcggagctggtgcctcgagctccctctcccccctgcaggccgaactgctgccacccctgctggagcacctactgttgcctccccagcctccccacccgagcctttcttatgaacccgctcttcttcaaccctatcttttccatcagtttggcagccgggatggaagtagagtgtccgaaggcagccccggaatggtaagcgtgggacctctgccgaaagctgaagcacccgcactgttctcgagaacggcttccaaagggattttcggagaccacccaggccactcctatggggatctgccaggcccttccccagctcagttatttcaggacagcgggctgctgtacctggcccaggaattgcctgccccatcccgcgcacgggtccctagactaccagagcagggcagttctagcagggcagaggactctccggaaggctatgagaaggaagggctaggggaccgcggagaaaagccggctagcccggcagtccagccagacgcggctctgcagaggttagccgcagttttggcagggtatggcgtggaactccgacagctgacaccagagcagcttagcacgctactcacactcctgcagctgttgccaaaaggcgcaggtcgaaatcctggtggggtggttaacgtgggagcagatatcaaaaagacaatggaaggacccgtggaggggagagacaccgcagaacttccagctagaactagtccgatgccaggccatccaactgctagccccacgtcatccgaggtacagcaagtcccttctccagtgagctccgagccaccgaaagccgcacggcctccagtgactccagttctgctcgagaagaaatctccgctgggacagtcacagcctaccgtggccggacagccgtctgcacgccctgccgctgaggaatatggctacatcgtgaccgatcagaatgtggttgggcctgccctgacttttcgtatccgtcataatgaacagaatctatctctggctgatgtcacccagcaggcgggactggtgaaatccgagttagaggcacagacaggactgcagatactgcaaaccggtgttgggcaacgcgaagaggccgcagccgtgctgcctcagaccgcccatagtacttcccctatgagatccgtgttgctgacccttgtcgcccttgccggtgttgcagggctgttagtggcattagccgtcgccttgtgcgtaagacagcacgccaggcaacaagataaggagcgtctggccgctctgggtccagaaggagctcatggcgataccacattcgagtaccaagacctttgccgccagcacatggccaccaaatccctgttcaatagggctgagggcccacctgagccttctcgggttagctctgtctcatcccaattctcagacgccgcacaagctagtccctcttcacatagctccaccccgtcctggtgtgaggagcccgcacaagctaacatggatatatccacgggccacatgatactagcctacatggaggaccacttgcggaatcgagaccggttggcgaaggaatggcaagccctttgtgcttatcaagccgaacctaacacttgtgcaactgcacagggcgagggaaacattaagaaaaacaggcaccccgacttcctgccttacgaccacgcccgaattaaacttaaggtcgaaagtagtccctcccgcagcgactatatcaacgcatcccctataatcgagcatgacccaaggatgcctgcctatattgcaacccagggcccactcagccatacaattgccgatttttggcagatggtctgggaaagtggttgcacagtcatagtgatgttgactccacttgtagaggatggcgtgaagcagtgcgaccggtattggcccgatgagggcgcttctttataccatgtgtatgaagtgaacctcgtctctgagcacatctggtgcgaagactttctcgtacgctcattctatctgaaaaacgtccagactcaagaaacccgcaccctcactcagttccacttcttgtcgtggccagccgaaggcacaccagcatctactaggccactgctcgacttcagacgcaaggtcaacaaatgctataggggccgttcctgtcctattatcgttcactgttctgacggggcagggagaactggcacctacattcttatcgatatggtgctgaaccggatggctaagggggttaaagagatcgacatcgcagctacactggaacacgttcgagatcagcggcctgggctcgtgaggtcaaaggaccaattcgaatttgcgcttacagcagtggcagaggaagtgaatgccattctgaaggccctccctcaatag

SEQ ID NO: 78361 - DNA, 3622 bp, Artificial Sequence
  derived and/or modified sequence
gtcgtcagcacccgcctgcggttggccgcgttgcagcgagaggggcatgtagaccccgcctcgtagggaggtggggagcggcaagccccgcctcagcccctctggcaggctcccgccagcgtcgctgcggctccggcccgggagcgagcgcccggagctcggaaagatgcggcgcccgcggcggcctgggggtctcgggggatccgggggtctccggctgctcctctgcctcctgctgctgagcagccgcccggggggctgcagcgccgttagtgcccacggctgtctatttgaccgcaggctctgctctcacctggaagtctgtattcaggatggcttgtttgggcagtgccaggtgggagtggggcaggcccggccccttttgcaagtcacctccccagttctccaacgcttacaaggtgtgctccgacaactcatgtcccaaggattgtcctggcacgatgacctcacccagtatgtgatctctcaggagatggagcgcatccccaggcttcgccccccagagccccgtccaagggacaggtctggcttggcacccaagagacctggtcctgctggagagctgcttttacaggacatccccactggctccgcccctgctgcccagcatcggcttccacaaccaccagtgggcaaaggtggagctggggccagctcctctctgtcccctctgcaggctgagctgctcccgcctctcttggagcacctgctgctgcccccacagcctccccacccttcactgagttacgaacctgccttgctgcagccctacctgttccaccagtttggctcccgtgatggctccagggtctcagagggctccccagggatggtcagtgtcggccccctgcccaaggctgaagcccctgccctcttcagcagaactgcctccaagggcatatttggggaccaccctggccactcctacggggaccttccagggccttcacctgcccagctttttcaagactctgggctgctctatctggcccaggagttgccagcacccagcagggccagggtgccaaggctgccagagcaagggagcagcagccgggcagaggactccccagagggctatgagaaggaaggactaggggatcgtggagagaagcctgcttccccagctgtgcagccagatgcggctctgcagaggctggccgctgtgctggcgggctatggggtagagctgcgtcagctgacccctgagcagctctccacactcctgaccctgctgcagctactgcccaagggtgcaggaagaaatccgggaggggttgtaaatgttggagctgatatcaagaaaacaatggaggggccggtggagggcagagacacagcagagcttccagcccgcacatcccccatgcctggacaccccactgccagccctacctccagtgaagtccagcaggtgccaagccctgtctcctctgagcctcccaaagctgccagaccccctgtgacacctgtcctgctagagaagaaaagcccactgggccagagccagcccacggtggcaggacagccctcagcccgcccagcagcagaggaatatggctacatcgtcactgatcagaatgtggtgggaccagccctcaccttccgcatccggcacaatgagcagaacctgtctttggctgatgtgacccaacaagcagggctggtgaagtctgaactggaagcacagacagggctccaaatcttgcagacaggagtgggacagagggaggaggcagctgcagtccttccccaaactgcgcacagcacctcacccatgcgctcagtgctgctcactctggtggccctggcaggtgtggctgggctgctggtggctctggctgtggctctgtgtgtgcggcagcatgcgcggcagcaagacaaggagcgcctggcagccctggggcctgagggggcccatggtgacactacctttgagtaccaggacctgtgccgccagcacatggccacgaagtccttgttcaaccgggcagagggtccaccggagccttcacgggtgagcagtgtgtcctcccagttcagcgacgcagcccaggccagccccagctcccacagcagcaccccgtcctggtgcgaggagccggcccaagccaacatggacatctccacgggacacatgattctggcatacatggaggatcacctgcggaaccgggaccgccttgccaaggagtggcaggccctctgtgcctaccaagcagagccaaacacctgtgccaccgcgcagggggagggcaacatcaaaaagaaccggcatcctgacttcctgccctatgaccatgcccgcataaaactgaaggtggagagcagcccttctcggagcgattacatcaacgccagccccattattgagcatgaccctcggatgccagcctacatagccacgcagggcccgctgtcccataccatcgcagacttctggcagatggtgtgggagagcggctgcaccgtcatcgtcatgctgaccccgctggtggaggatggtgtcaagcagtgtgaccgctactggccagatgagggtgcctccctctaccacgtatatgaggtgaacctggtgtcggagcacatctggtgcgaggactttctggtgcggagcttctacctgaagaacgtgcagacccaggagacgcgcacgctcacgcagttccacttcctcagctggccggcagagggcacaccggcctccacgcggcccctgctggacttccgcaggaaggtgaacaagtgctaccggggccgctcctgccccatcatcgtgcactgcagtgatggtgcggggaggaccggcacctacatcctcatcgacatggtcctgaaccgcatggcaaaaggagtgaaggagattgacatcgctgccaccctggagcatgtccgtgaccagcggcctggccttgtccgctctaaggaccagtttgaatttgccctgacagccgtggcggaggaagtgaatgccatcctcaaggccctgccccagtgagaccctggggccccttggcgggcagcccagcctctgtccctctttgcctgtgtgagcatctctgtgtacccactcctcactgccccaccagccacctcttgggcatgctcagcccttcctagaagagtcaggaagggaaagccagaaggggcacgcctgcccagcctcgcatgccagagcctggggcatcccagagcccagggcatcccatgggggtgctgcagccaggaggagaggaaaggacatgggtagcaattctacccagagccttctcctgcctacattccctggcctggctctcctgtagctctcctggggttctgggagttccctgaacatctgtgtgtgtccccctatgctccagtatggaagaatggggtggagggtcgccacacccggctccccctgcttctcagccccgggcctgcctctgactcacacttgggcgctctgccctccctggcctcacgcccagcctcctcccaccaccctcccaccatgcgctgctcaacctctctccttctggcgcaagagaacatttctagaaaaaactacttttgtaccagtgtgaataaagttagtgtgttgtctgtgcagctgcaa

SEQ ID NO: 78362 - DNA, 3281 bp, Artificial Sequence
  derived and/or modified sequence
gtcgtcagcacccgcctgcggttggccgcgttgcagcgagaggggcatgtagaccccgcctcgtagggaggtggggagcggcaagccccgcctcagcccctctggcaggctcccgccagcgtcgctgcggctccggcccgggagcgagcgcccggagctcggaaagatgcggcgcccgcggcggcctgggggtctcgggggatccgggggtctccggctgctcctctgcctcctgctgctgagcagccgcccggggggctgcagcgccgttagtgcccacggctgtctatttgaccgcaggctctgctctcacctggaagtctgtattcaggatggcttgtttgggcagtgccaggtgggagtggggcaggcccggccccttttgcaagtcacctccccagttctccaacgcttacaaggtgtgctccgacaactcatgtcccaaggattgtcctggcacgatgacctcacccagtatgtgatctctcaggagatggagcgcatccccaggcttcgccccccagagccccgtccaagggacaggtctggcttggcacccaagagacctggtcctgctggagagctgcttttacaggacatccccactggctccgcccctgctgcccagcatcggcttccacaaccaccagtgggcaaaggtggagctggggccagctcctctctgtcccctctgcaggctgagctgctcccgcctctcttggagcacctgctgctgcccccacagcctccccacccttcactgagttacgaacctgccttgctgcagccctacctgttccaccagtttggctcccgtgatggctccagggtctcagagggctccccagggatggtcagtgtcggccccctgcccaaggctgaagcccctgccctcttcagcagaactgcctccaagggcatatttggggaccaccctggccactcctacggggaccttccagggccttcacctgcccagctttttcaagactctgggctgctctatctggcccaggagttgccagcacccagcagggccagggtgccaaggctgccagagcaagggagcagcagccgggcagaggactccccagagggctatgagaaggaaggactaggggatcgtggagagaagcctgcttccccagctgtgcagccagatgcggctctgcagaggctggccgctgtgctggcgggctatggggtagagctgcgtcagctgacccctgagcagctctccacactcctgaccctgctgcagctactgcccaagggtgcaggaagaaatccgggaggggttgtaaatgttggagctgatatcaagaaaacaatggaggggccggtggagggcagagacacagcagagcttccagcccgcacatcccccatgcctggacaccccactgccagccctacctccagtgaagtccagcaggtgccaagccctgtctcctctgagcctcccaaagctgccagaccccctgtgacacctgtcctgctagagaagaaaagcccactgggccagagccagcccacggtggcaggacagccctcagcccgcccagcagcagaggaatatggctacatcgtcactgatcagaatgtggtgggaccagccctcaccttccgcatccggcacaatgagcagaacctgtctttggctgatgtgacccaacaagcagggctggtgaagtctgaactggaagcacagacagggctccaaatcttgcagacaggagtgggacagagggaggaggcagctgcagtccttccccaaactgcgcacagcacctcacccatgcgctcagtgctgctcactctggtggccctggcaggtgtggctgggctgctggtggctctggctgtggctctgtgtgtgcggcagcatgcgcggcagcaagacaaggagcgcctggcagccctggggcctgagggggcccatggtgacactacctttgagtaccaggacctgtgccgccagcacatggccacgaagtccttgttcaaccgggcagagggtccaccggagccttcacgggtgagcagtgtgtcctcccagttcagcgacgcagcccaggccagccccagctcccacagcagcaccccgtcctggtgcgaggagccggcccaagccaacatggacatctccacgggacacatgattctggcatacatggaggatcacctgcggaaccgggaccgccttgccaaggagtggcaggccctctgtgcctaccaagcagagccaaacacctgtgccaccgcgcagggggagggcaacatcaaaaagaaccggcatcctgacttcctgccctatgaccatgcccgcataaaactgaaggtggagagcagcccttctcggagcgattacatcaacgccagccccattattgagcatgaccctcggatgccagcctacatagccacgcagggcccgctgtcccataccatcgcagacttctggcagatggtgtgggagagcggctgcaccgtcatcgtcatgctgaccccgctggtggaggatggtgtcaagcagtgtgaccgctactggccagatgagggtgcctccctctaccacgtatatgaggtgaacctggtgtcggagcacatctggtgcgaggactttctggtgcggagcttctacctgaagaacgtgcagacccaggagacgcgcacgctcacgcagttccacttcctcagctggccggcagagggcacaccggcctccacgcggcccctgctggacttccgcaggaaggtgaacaagtgctaccggggccgctcctgccccatcatcgtgcactgcagtgatggtgcggggaggaccggcacctacatcctcatcgacatggtcctgaaccgcatggcaaaaggagtgaaggagattgacatcgctgccaccctggagcatgtccgtgaccagcggcctggccttgtccgctctaaggaccagtttgaatttgccctgacagccgtggcggaggaagtgaatgccatcctcaaggccctgccccagtgagaccctggggccccttggcgggcagcccagcctctgtccctctttgcctgtgtgagcatctctgtgtacccactcctcactgccccaccagccacctcttgggcatgctcagcccttcctagaagagtcaggaagggaaagccagaaggggcacgcctggcctgcctctgactcacacttgggcgctctgccctccctggcctcacgcccagcctcctcccaccaccctcccaccatgcgctgctcaacctctctccttctg
